United States Patent Application Publication US 2011/0183924 A1 - sequence listing, part 130

SEQ ID NO: 358350 - DNA, 1606 bp, Homo sapiens
tgccggaaacagaataatggcgtctcgtagccccaggcgacagcgtggaggggcgggtctgtcgattggatgaacgcagctgagattactcccagccactaaggacgaagaggtggggcggtggcgtcccacgcctcgtgcgacagtgggcggggctttgttgcctgagtaaccgtatgatggtggtggtggtggtgtcttcctgtctcaacgatacctattttctagtgctgagatcctgagacaatgagtggtatgatccaaatgcttcacttcttcgacgttatgagcttttattttacccaggggatggatctgttgaaatgcatgatgtaaagaatcatcgcacctttttaaagcggaccaaatatgataacctgcacttggaagatttatttataggcaacaaagtgaatgtcttttctcgacaactggtattaattgactatggggatcaatatacagctcgccagctgggcagtaggaaagaaaaaacgctagccctaattaaaccagatgcaatatcaaaggctggagaaataattgaaataataaacaaagctggatttactataaccaaactcaaaatgatgatgctttcaaggaaagaagcattggattttcatgtagatcaccagtcaagaccctttttcaatgagctgatccagtttattacaactggtcctattattgccatggagattttaagagatgatgctatatgtgaatggaaaagactgctgggacctgcaaactctggagtggcacgcacagatgcttctgaaagcattagagccctctttggaacagatggcataagaaatgcagcgcatggccctgattcttttgcttctgcggccagagaaatggagttgttttttccttcaagtggaggttgtgggccggcaaacactgctaaatttactaattgtacctgttgcattgttaaaccccatgctgtcagtgaaggactgttgggaaagatcctgatggctatccgagatgcaggttttgaaatctcagctatgcagatgttcaatatggatcgggttaatgttgaggaattctatgaagtttataaaggagtagtgaccgaatatcatgacatggtgacagaaatgtattctggcccttgtgtagcaatggagattcaacagaataatgctacaaagacatttcgagaattttgtggacctgctgatcctgaaattgcccggcatttacgccctggaactctcagagcaatctttggtaaaactaagatccagaatgctgttcactgtactgatctgccagaggatggcctattagaggttcaatacttcttcaagatcttggataattagtggtgtggaaagtaaagaagtcacaggttgggacatttagacaagagtgaatcacacacgaggaatgtgttcattcttttattgtccgttgttttaacctgactgaatacaagatcaacaagagcactgtactcctggcaattattacatatgttagaacatggattttgcactgtagacaacatttaacaccagtctatggggtactgcattgctttttataaagttcaaaataaagatttattttcaaacaagtgact

SEQ ID NO: 358351 - DNA, 1721 bp, Homo sapiens
tgccggaaacagaataatggcgtctcgtagccccaggcgacagcgtggaggggcgggtctgtcgattggatgaacgcagctgagattactcccagccactaaggacgaagaggtggggcggtggcgtcccacgcctcgtgcgacagtgggcggggctttgttgcctgagtaaccgtatgatggtggtggtggtggtgtcttcctgtctcaacgatacctattttctagtgctgagatcctgagacaatgaatcatagtgaaagattcgttttcattgcagagtggtatgatccaaatgcttcacttcttcgacgttatgagcttttattttacccaggggatggatctgttgaaatgcatgatgtaaagaatcatcgcacctttttaaagcggaccaaatatgataacctgcacttggaagatttatttataggcaacaaagtgaatgtcttttctcgacaactggtattaattgactatggggatcaatatacagctcgccagctgggcagtaggaaagaaaaaacgctagccctaattaaaccagatgcaatatcaaaggctggagaaataattgaaataataaacaaagctggatttactataaccaaactcaaaatgatgatgctttcaaggaaagaagcattggattttcatgtagatcaccagtcaagaccctttttcaaatacagggggtacacatgcagatttgttacgtgggaatattgtgtgatgctgaggtttggagtatggatcccatcatccaggtatgagctgatccagtttattacaactggtcctattattgccatggagattttaagagatgatgctatatgtgaatggaaaagactgctgggacctgcaaactctggagtggcacgcacagatgcttctgaaagcattagagccctctttggaacagatggcataagaaatgcagcgcatggccctgattcttttgcttctgcggccagagaaatggagttgttttttccttcaagtggaggttgtgggccggcaaacactgctaaatttactaattgtacctgttgcattgttaaaccccatgctgtcagtgaaggactgttgggaaagatcctgatggctatccgagatgcaggttttgaaatctcagctatgcagatgttcaatatggatcgggttaatgttgaggaattctatgaagtttataaaggagtagtgaccgaatatcatgacatggtgacagaaatgtattctggcccttgtgtagcaatggagattcaacagaataatgctacaaagacatttcgagaattttgtggacctgctgatcctgaaattgcccggcatttacgccctggaactctcagagcaatctttggtaaaactaagatccagaatgctgttcactgtactgatctgccagaggatggcctattagaggttcaatacttcttcaagatcttggataattagtggtgtggaaagtaaagaagtcacaggttgggacatttagacaagagtgaatcacacacgaggaatgtgttcattcttttattgtccgttgttttaacctgactgaatacaagatcaacaagagcactgtactcctggcaattattacatatgttagaacatggattttgcactgtagacaacatttaacaccagtctatggggtactgcattgctttttataaagttcaaaataaagatttattttcaaacaagtgact

SEQ ID NO: 358352 - DNA, 1198 bp, Homo sapiens
  misc_feature (1191)..(1191): n is a, c, g, or t
  misc_feature (1193)..(1193): n is a, c, g, or t
  misc_feature (1198)..(1198): n is a, c, g, or t
tgccggaaacagaataatggcgtctcgtagccccaggcgacagcgtggaggggcgggtctgtcgattggatgaacgcagctgagattactcccagccactaaggacgaagaggtggggcggtggcgtcccacgcctcgtgcgacagtgggcggggctttgttgcctgagtaaccgtatgatggtggtggtggtggtgtcttcctgtctcaacgatacctattttctagtgctgagatcctgagacaatgaatcatagtgaaagattcgttttcattgcagagtggtatgatccaaatgcttcacttcttcgacgttatgagcttttattttacccaggggatggatctgttgaaatgcatgatgtaaagaatcatcgcacctttttaaagcggaccaaatatgataacctgcacttggaagatttatttataggcaacaaagtgaatgtcttttctcgacaactggtattaattgactatggggatcaatatacagctcgccagctgggcagtaggaaagaaaaaacgctagccctaattaaaccagatgcaatatcaaaggctggagaaataattgaaataataaacaaagctggatttactataaccaaactcaaaatgatgatgctttcaaggaaagaagcattggattttcatgtagatcaccagtcaagaccctttttcaattcaccactgatgggcgcctgggttgattccatgtctttgctattttgtatagtgctgcaatgaacagtgagctgatccagtttattacaactggtcctattattgccatggagattttaagagatgatgctatatgtgaatggaaaagactgctgggacctgcaaactctggagtggcacgcacagatgcttctgaaagcattagagccctctttggaacagatggcataagaaatgcagcgcatggccctgattcttttgcttctgcggccagagaaatggagttgttttttccttcaagtggaggttgtgggccggcaaacactgctaaatttactaattgtacctgttgcattgttaaaccccatgctgtcagtgaaggtatgttgaatacacatatattcagtacattttgttaataggagagcaatgtttattttcttgatgtactttatgtatagaaaaataaagtatacttttaataaaaataacacctggtatgcngnccagn

SEQ ID NO: 358353 - DNA, 1026 bp, Homo sapiens
ccagcgaggatgcagacgagttgcacaaaattttactggagaaaaaggatgcctgaacacgcaaagtcggctgcagaattattgccaagttgctgctgcttccaccgccccttaaagttagtcagtttttcttctcttctttgacattctaagaacttatagataacttaaaacttttgtgaggaagattaatgtggccaataaaacctttaaatgttaagtgtcaagaaactgcactctcccttcttaagaactgcctaaagtgtaaaatacatttgaatgcaatttttggaagattttttaatgttcgtttattaaactaaccctaagtgatttcttcaaggactgcaatcagggtatcaatttgctttcccaaaggctcttccaacccgtgggttttggggtccaccgccaccaccagagaggcttttgaacaggtgcctggctgtgttcagaaggaagctggcctgtgtgcttctctccggtgggctcagccgacgtgtgagacttgttctgttaccaaatgaaccgggctgccacgctgtgacaggcgtttgtcctctgctttatttttactttgaagctcaaatgcgagtactaagtgttcacctcagcgttcgaatcattggcctgtaaccctgtgggctgcttcacgagaattcaggacctgcattttcattctaaaaagaaatgaacagcttgtgaaggagttttttggcttcatagtttctattcatgaggtagtgttacttctttatccccctaaagacaaaatgaagataaagggggattgccaggaatgggtttaaaagcacaaatgtggtagcttatcatctacaccatggagagtgaacccttacgaaatgaaagtcaaatgagaccatccgagaaaaagatgcgcataggcatttgtaccatgatcaaccccacgcacatgaaaactgtgaccaagtgacgtgcctgggagctttgacacacgagccgtgtgaattcactaggaaacatgtaataaagtcatggaagaga

SEQ ID NO: 358354 - DNA, 3412 bp, Homo sapiens
ccagcgaggatgcagacgagttgcacaaaattttactggagaaaaaggatgcctgaacacgcaaagtcggctgcagaattattgccaagttgctgctgcttccaccgccccttaaagttagtcagtttttcttctcttctttgacattctaagaacttatagataacttaaaacttttgtgaggaagattaatgtggccaataaaacctttaaatgttaagtgtcaagaaactgcactctcccttcttaagaactgcctaaagtgtaaaatacatttgaatgcaatttttggaagattttttaatgttcgtttattaaactaaccctaagtgatttcttcaaggactgcaatcagggtatcaatttgctttcccaaaggctcttccaacccgtgggttttggggtccaccgccaccaccagagaggcttttgaacaggtgcctggctgtgttcagaaggaagctggcctgtgtgcttctctccggtgggctcagccgacgtgtgagacttgttctgttaccaaatgaaccgggctgccacgctgtgacaggcgtttgtcctctgctttatttttactttgaagctcaaatgcgagtactaagtgttcacctcagcgttcgaatcattggcctgtaaccctgtgggctgcttcacgagaattcaggacctgcattttcattctaaaaagaaatgaacagcttgtgaaggagttttttggcttcatagtttctattcatgaggtagtgttacttctttatccccctaaagacaaaatgaagataaagggggattgccaggaatgggtttaaaagcacaaatgtggtagcttatcatctacaccatggagagtgaacccttacgaaatgaaagtcaaatgagaccatccgagaaaaagatgcgcataggcatttgtaccatgatcaaccccacgcacatgaaaactgtgaccaagtgacgtgcctgggagctttgacacacgagccgtgtgaattcactaggaaacatgtaataaagtcatggaagagaaaatcgtgtgtaaattttgcctttaactttagaccgcagtatattataatacatttgatatctgaaatatctttacttttttaagagtaagattccatatgtctgtctggaagggagccatggttattcacacgaatatccctgtcacttctccagaggtgtcaggtaactaacacgagcattctttgaagactctgggcacatgaatgatacacagaattgaatgtttaaatttccactttgagtcctcatgaatcatttgagactagtaccagctgatcttgtgtacaggctcagggtcagtgcccaagggctcccgcgtgtgtgttctgatcttcagtgcgtagcacattctccatttagaaaagagtggtcagaataattgtggacggtacagtggctttttaaaactacagtctttaggtgtaaggtttggcgccgggagcaattttatgatcaaatatgatgaactcctaagtcactgaggtgtgattgggccaatgttggcatgaggttcttgctctacttccagtgttttgattccactgggagaatttggcctagtgtgtggctttggatgaatccgtgtagagagaggtgagcttgtcctgttacagatgctgtcagacatagcgatagtaggcacctagggaggaagtggccgttagttttacactgactttttaagaatggagaatgcacgtgggtttctgttgcggatgattcatagtaagcaagcggttgatgctgttaataccggccccacccgattgacattaagtttattcagcttttaaaaagatgaagaactaaggggaacaaatttaagtttgttgcaacttagccacacatgcttccctggtaccagctggaatcagcagctcacaggcatcttcaggacacttcagtgtatatgacacagtactttgttagcgtctgcgtgtgtatggaaagttgacaaaaaatggcatgaaaagatcatgattggattttcttttaaacctgcccttctgtaaaaaatagtttatatatttttaaattagtaggtatgtgtggcttccttttttcctaacattcccagcaaatttttgctgctaagactatcactgttaaagtgaaaattacagggaaaaatgtgatgaatataccgtaactcaaaatgtgatattttcttaaaatcactcttttatgctttaggaactggttggtctccactttgattattagtgtaaagagcctgagtatacgtggatttcattgtaaaatttaactccttgtcttttacttggggcacggggcccctggagggcttccctactttccccactatgttaacaggtaattctgatttatgcctttagtttgacttatttttaacaaaatattagaagttatgctttaaaatgtttaatgtggactgaaattttcatcttttgtttgagaatctatgaagtgtatcatatacgtggcctaaagcaaggtgtgtattttgttattctgaaattgttttgcatctggacaaatactaaatatcccagtggccttttttttttttttttaaacctgtgtatccatctcatccttttgcgcattcctagtaagcaaaaaaatttgttatgccatcttcattattcgaattacagactgaaaaaatatggccagtttttaaagaagtttagattatgttttccatggaaggacaagtctgactgttcataggctgattttctttaagaggattattctgttttacaatttcaattctagatcacattttatatatgctgcatgccaaaaaaaaaaaaaagagaaaactgccttttctggtgtggaggggaagaaaaactaatattctaccttactagtagagttcaaaacaagttttcactgagagccttttcagtaaaagttaaacaagtttgttttttgagcatttgtcagttattctatttcagaagagtcaaaattcaagcacgatacattttgaaggctttgcaaactcctaaacccctgatgagtcctctcattctggaagtgggaatttgagtagatactgatttgtcccgtagtatggcagatgacagggaggtcttttccaatcaggcactcagaacacaggtcaccgtatgttctcagccagtaacaatcatactgaggacgaaggactctccgtttgatgcagacacaattgtaatggagatgtaaaacttcttagcaatcagatggataaattctttgctttttactttaaataggaaattgttttctaaaactaaaatacttgaattgtcagacagtataatctcagcttgtattagtttttgaatgctcccatcgaggaagtgtaacaatccatgaaatgtgaataaatgaaaagtaaacaaaa

SEQ ID NO: 358355 - DNA, 3492 bp, Homo sapiens
ccagcgaggatgcagacgagttgcacaaaattttactggagaaaaaggatgcctgaacacgcaaagtcggctgcagaattattgccaagttgctgctgcttccaccgccccttaaagttagtcagtttttcttctcttctttgacattctaagaacttatagataacttaaaacttttgtgaggaagattaatgtggccaataaaacctttaaatgttaagtgtcaagaaactgcactctcccttcttaagaactgcctaaagtgtaaaatacatttgaatgcaatttttggaagattttttaatgttcgtttattaaactaaccctaagtgatttcttcaaggactgcaatcagggtatcaatttgctttcccaaaggctcttccaacccgtgggttttggggtccaccgccaccaccagagaggcttttgaacaggtgcctggctgtgttcagaaggaagctggcctgtgtgcttctctccggtgggctcagccgacgtgtgagacttgttctgttaccaaatgaaccgggctgccacgctgtgacaggcgtttgtcctctgctttatttttactttgaagctcaaatgcgagtactaagtgttcacctcagcgttcgaatcattggcctgtaaccctgtgggctgcttcacgagaattcaggacctgcattttcattctaaaaagaaatgaacagcttgtgaaggagttttttggcttcatagtttctattcatgaggtagtgttacttctttatccccctaaagacaaaatgaagataaagggggattgccaggaatgggtttaaaagcacaaatgtggtagcttatcatctacaccatggagagtgaacccttacgaaatgaaagtcaaatgagaccatccgagaaaaagatgcgcataggcatttgtaccatgatcaaccccacgcacatgaaaactgtgaccaagtgacgtgcctgggagctttgacacacgagccgtgtgaattcactaggaaacatgtaataaagtcatggaagagaaaatcgtgtgtaaattttgcctttaactttagaccgcagtatattataatacatttgatatctgaaatatctttacttttttaagagtaagattccatatgtctgtctggaagggagccatggttattcacacgaatatccctgtcacttctccagaggtgtcaggtaactaacacgagcattctttgaagactctgggcacatgaatgatacacagaattgaatgtttaaatttccactttgagtcctcatgaatcatttgagactagtaccagctgatcttgtgtacaggctcagggtcagtgcccaagggctcccgcgtgtgtgttctgatcttcagtgcgtagcacattctccatttagaaaagagtggtcagaataattgtggacggtacagtggctttttaaaactacagtctttaggtgtaaggtttggcgccgggagcaattttatgatcaaatatgatgaactcctaagtcactgaggtgtgattgggccaatgttggcatgaggttcttgctctacttccagtgttttgattccactgggagaatttggcctagtgtgtggctttggatgaatccgtgtagagagaggtgagcttgtcctgttacagatgctgtcagacatagcgatagtaggcacctagggaggaagtggccgttagttttacactgactttttaagaatggagaatgcacgtgggtttctgttgcggatgattcatagtaagcaagcggttgatgctgttaataccggccccacccgattgacattaagtttattcagcttttaaaaagatgaagaactaaggggaacaaatttaagtttgttgcaacttagccacacatgcttccctggtaccagctggaatcagcagctcacaggcatcttcaggacacttcagtgtatatgacacagtactttgttagcgtctgcgtgtgtatggaaagttgacaaaaaatggcatgaaaagatcatgattggattttcttttaaacctgcccttctgtaaaaaatagtttatatatttttaaattagtaggtatgtgtggcttccttttttcctaacattcccagcaaatttttgctgctaagactatcactgttaaagtgaaaattacagggaaaaatgtgatgaatataccgtaactcaaaatgtgatattttcttaaaatcactcttttatgctttaggaactggttggtctccactttgattattagtgtaaagagcctgagtatacgtggatttcattgtaaaatttaactccttgtcttttacttggggcacggggcccctggagggcttccctactttccccactatgttaacaggtaattctgatttatgcctttagtttgacttatttttaacaaaatattagaagttatgctttaaaatgtttaatgtggactgaaattttcatcttttgtttgagaatctatgaagtgtatcatatacgtggcctaaagcaaggtgtgtattttgttattctgaaattgttttgcatctggacaaatactaaatatcccagtggccttttttttttttttttaaacctgtgtatccatctcatccttttgcgcattcctagtaagcaaaaaaatttgttatgccatcttcattattcgaattacagactgaaaaaatatggccagtttttaaagaagtttagattatgttttccatggaaggacaagtctgactgttcataggctgattttctttaagaggattattctgttttacaatttcaattctagatcacattttatatatgctgcatgccaaaaaaaaaaaaaagagaaaactgccttttctggtgtggaggggaagaaaaactaatattctaccttactagtagagttcaaaacaagttttcactgagagccttttcagtaaaagttaaacaagtttgttttttgagcatttgtcagttattctatttcagaagagtcaaaattcaagcacgatacattttgaaggctttgcaaactcctaaacccctgatgagtcctctcattctggaagtgggaatttgagtagatactgatttgtcccgtagtatggcagatgacagggaggtcttttccaatcaggcactcagaacacaggtcaccgtatgttctcagccagtaacaatcatactgaggacgaaggactctccgtttgatgcagacacaattgtaatggagatgtaaaacttcttagcaatcagatggataaattctttgctttttactttaaataggaaattgttttctaaaactaaaatacttgaattgtcagacagtataatctcagcttgtattagtttttgaatgctcccatcgaggaagtgtaacaatccatgaaatgtgaataaatgaaaagtaaacaaaatttatccatctgattgctaagaagttttacatctccattacaattgtgtctgcatcaaacggagagtccttcggtcgacg

SEQ ID NO: 358356 - DNA, 3358 bp, Homo sapiens
ccagcgaggatgcagacgagttgcacaaaattttactggagaaaaaggatgcctgaacacgcaaagtcggctgcagaattattgccaagttgctgctgcttccaccgccccttaaagttagtcagtttttcttctcttctttgacattctaagaacttatagataacttaaaacttttgtgaggaagattaatgtggccaataaaacctttaaatgttaagtgtcaagaaactgcactctcccttcttaagaactgcctaaagtgtaaaatacatttgaatgcaatttttggaagattttttaatgttcgtttattaaactaaccctaagtgatttcttcaaggactgcaatcagggtatcaatttgctttcccaaaggctcttccaacccgtgggttttggggtccaccgccaccaccagagaggcttttgaacaggtgcctggctgtgttcagaaggaagctggcctgtgtgcttctctccggtgggctcagccgacgtgtgagacttgttctgttaccaaatgaaccgggctgccacgctgtgacaggcgtttgtcctctgctttatttttactttgaagctcaaatgcgagtactaagtgttcacctcagcgttcgaatcattggcctgtaaccctgtgggctgcttcacgagaattcaggacctgcattttcattctaaaaagaaatgaacagcttgtgaaggagttttttggcttcatagtttctattcatgaggtagtgttacttctttatccccctaaagacaaaatgaagataaagggggattgccaggaatgggtttaaaagcacaaatgtggtagcttatcatctacaccatggagagtgaacccttacgaaatgaaagtcaaatgagaccatccgagaaaaagatgcgcataggcatttgtaccatgatcaaccccacgcacatgaaaactgtgaccaagtgacgtgcctgggagctttgacacacgagccgtgtgaattcactaggaaacatgtaataaagtcatggaagagaaaatcgtgtgtaaattttgcctttaactttagaccgcagtatattataatacatttgatatctgaaatatctttacttttttaagagtaagattccatatgtctgtctggaagggagccatggttattcacacgaatatccctgtcacttctccagaggtgtcaggtaactaacacgagcattctttgaagactctgggcacatgaatgatacacagaattgaatgtttaaatttccactttgagtcctcatgaatcatttgagactagtaccagctgatcttgtgtacaggctcagggtcagtgcccaagggctcccgcgtgtgtgttctgatcttcagtgcgtagcacattctccatttagaaaagagtggtcagaataattgtggacggtacagtggctttttaaaactacagtctttaggtgtaaggtttggcgccgggagcaattttatgatcaaatatgatgaactcctaagtcactgaggtgtgattgggccaatgttggcatgaggttcttgctctacttccagtgttttgattccactgggagaatttggcctagtgtgtggctttggatgaatccgtgtagagagaggtgagcttgtcctgttacagatgctgtcagacatagcgatagtaggcacctagggaggaagtggccgttagttttacactgactttttaagaatggagaatgcacgtgggtttctgttgcggatgattcatagtaagcaagcggttgatgctgttaataccggccccacccgattgacattaagtttattcagcttttaaaaagatgaagaactaaggggaacaaatttaagtttgttgcaacttagccacacatgcttccctggtaccagctggaatcagcagctcacaggcatcttcaggacacttcagtgtatatgacacagtactttgttagcgtctgcgtgtgtatggaaagttgacaaaaaatggcatgaaaagatcatgattggattttcttttaaacctgcccttctgtaaaaaatagtttatatatttttaaattagtaggtatgtgtggcttccttttttcctaacattcccagcaaatttttgctgctaagactatcactgttaaagtgaaaattacagggaaaaatgtgatgaatataccgtaactcaaaatgtgatattttcttaaaatcactcttttatgctttaggaactggttggtctccactttgattattagtgtaaagagcctgagtatacgtggatttcattgttactttccccactatgttaacaggtaattctgatttatgcctttagtttgacttatttttaacaaaatattagaagttatgctttaaaatgtttaatgtggactgaaattttcatcttttgtttgagaatctatgaagtgtatcatatacgtggcctaaagcaaggtgtgtattttgttattctgaaattgttttgcatctggacaaatactaaatatcccagtggccttttttttttttttttaaacctgtgtatccatctcatccttttgcgcattcctagtaagcaaaaaaatttgttatgccatcttcattattcgaattacagactgaaaaaatatggccagtttttaaagaagtttagattatgttttccatggaaggacaagtctgactgttcataggctgattttctttaagaggattattctgttttacaatttcaattctagatcacattttatatatgctgcatgccaaaaaaaaaaaaaagagaaaactgccttttctggtgtggaggggaagaaaaactaatattctaccttactagtagagttcaaaacaagttttcactgagagccttttcagtaaaagttaaacaagtttgttttttgagcatttgtcagttattctatttcagaagagtcaaaattcaagcacgatacattttgaaggctttgcaaactcctaaacccctgatgagtcctctcattctggaagtgggaatttgagtagatactgatttgtcccgtagtatggcagatgacagggaggtcttttccaatcaggcactcagaacacaggtcaccgtatgttctcagccagtaacaatcatactgaggacgaaggactctccgtttgatgcagacacaattgtaatggagatgtaaaacttcttagcaatcagatggataaattctttgctttttactttaaataggaaattgttttctaaaactaaaatacttgaattgtcagacagtataatctcagcttgtattagtttttgaatgctcccatcgaggaagtgtaacaatccatgaaatgtgaataaatgaaaagtaaacaaaa

SEQ ID NO: 358357 - DNA, 3359 bp, Homo sapiens
ccagcgaggatgcagacgagttgcacaaaattttactggagaaaaaggatgcctgaacacgcaaagtcggctgcagaattattgccaagttgctgctgcttccaccgccccttaaagttagtcagtttttcttctcttctttgacattctaagaacttatagataacttaaaacttttgtgaggaagattaatgtggccaataaaacctttaaatgttaagtgtcaagaaactgcactctcccttcttaagaactgcctaaagtgtaaaatacatttgaatgcaatttttggaagattttttaatgttcgtttattaaactaaccctaagtgatttcttcaaggactgcaatcagggtatcaatttgctttcccaaaggctcttccaacccgtgggttttggggtccaccgccaccaccagagaggcttttgaacaggtgcctggctgtgttcagaaggaagctggcctgtgtgcttctctccggtgggctcagccgacgtgtgagacttgttctgttaccaaatgaaccgggctgccacgctgtgacaggcgtttgtcctctgctttatttttactttgaagctcaaatgcgagtactaagtgttcacctcagcgttcgaatcattggcctgtaaccctgtgggctgcttcacgagaattcaggacctgcattttcattctaaaaagaaatgaacagcttgtgaaggagttttttggcttcatagtttctattcatgaggtagtgttacttctttatccccctaaagacaaaatgaagataaagggggattgccaggaatgggtttaaaagcacaaatgtggtagcttatcatctacaccatggagagtgaacccttacgaaatgaaagtcaaatgagaccatccgagaaaaagatgcgcataggcatttgtaccatgatcaaccccacgcacatgaaaactgtgaccaagtgacgtgcctgggagctttgacacacgagccgtgtgaattcactaggaaacatgtaataaagtcatggaagagaaaatcgtgtgtaaattttgcctttaactttagaccgcagtatattataatacatttgatatctgaaatatctttacttttttaagagtaagattccatatgtctgtctggaagggagccatggttattcacacgaatatccctgtcacttctccagaggtgtcaggtaactaacacgagcattctttgaagactctgggcacatgaatgatacacagaattgaatgtttaaatttccactttgagtcctcatgaatcatttgagactagtaccagctgatcttgtgtacaggctcagggtcagtgcccaagggctcccgcgtgtgtgttctgatcttcagtgcgtagcacattctccatttagaaaagagtggtcagaataattgtggacggtacagtggctttttaaaactacagtctttaggtgtaaggtttggcgccgggagcaattttatgatcaaatatgatgaactcctaagtcactgaggtgtgattgggccaatgttggcatgaggttcttgctctacttccagtgttttgattccactgggagaatttggcctagtgtgtggctttggatgaatccgtgtagagagaggtgagcttgtcctgttacagatgctgtcagacatagcgatagtaggcacctagggaggaagtggccgttagttttacactgactttttaagaatggagaatgcacgtgggtttctgttgcggatgattcatagtaagcaagcggttgatgctgttaataccggccccacccgattgacattaagtttattcagcttttaaaaagatgaagaactaaggggaacaaatttaagtttgttgcaacttagccacacatgcttccctggtaccagctggaatcagcagctcacaggcatcttcaggacacttcagtgtatatgacacagtactttgttagcgtctgcgtgtgtatggaaagttgacaaaaaatggcatgaaaagatcatgattggattttcttttaaacctgcccttctgtaaaaaatagtttatatatttttaaattagtaggtatgtgtggcttccttttttcctaacattcccagcaaatttttgctgctaagactatcactgttaaagtgaaaattacagggaaaaatgtgatgaatataccgtaactcaaaatgtgatattttcttaaaatcactcttttatgctttaggaactggttggtctccactttgattattagtgtaaagagcctgagtatacgtggatttcattgtaaaatttaactccttgtcttttacttggggcacggggcccctggagggcttccctactttccccactatgttaacaggtaattctgatttatgcctttagtttgacttatttttaacaaaatattagaagttatgcttttgtatcatatacgtggcctaaagcaaggtgtgtattttgttattctgaaattgttttgcatctggacaaatactaaatatcccagtggccttttttttttttttttaaacctgtgtatccatctcatccttttgcgcattcctagtaagcaaaaaaatttgttatgccatcttcattattcgaattacagactgaaaaaatatggccagtttttaaagaagtttagattatgttttccatggaaggacaagtctgactgttcataggctgattttctttaagaggattattctgttttacaatttcaattctagatcacattttatatatgctgcatgccaaaaaaaaaaaaaagagaaaactgccttttctggtgtggaggggaagaaaaactaatattctaccttactagtagagttcaaaacaagttttcactgagagccttttcagtaaaagttaaacaagtttgttttttgagcatttgtcagttattctatttcagaagagtcaaaattcaagcacgatacattttgaaggctttgcaaactcctaaacccctgatgagtcctctcattctggaagtgggaatttgagtagatactgatttgtcccgtagtatggcagatgacagggaggtcttttccaatcaggcactcagaacacaggtcaccgtatgttctcagccagtaacaatcatactgaggacgaaggactctccgtttgatgcagacacaattgtaatggagatgtaaaacttcttagcaatcagatggataaattctttgctttttactttaaataggaaattgttttctaaaactaaaatacttgaattgtcagacagtataatctcagcttgtattagtttttgaatgctcccatcgaggaagtgtaacaatccatgaaatgtgaataaatgaaaagtaaacaaaa

SEQ ID NO: 358358 - DNA, 1562 bp, Homo sapiens
taaaaatatataaaactatttttacagaagggcaggtttaaaagaaaatccaatcatgatcttttcatgccattttttggtcaactttccatacacacgcagacgctaacaaagtactgtgtcatatacactgaagtgtcctgaagatgcctgtgagctgctgattccagctggtaccagggaagcatgtgtggctaagtggcaacaaacttaaattagtaggtatgtgtggcttccttttttcctaacattcccagcaaatttttgctgctaagactatcactgttaaagtgaaaattacagggaaaaatgtgatgaatataccgtaactcaaaatgtgatattttcttaaaatcactcttttatgctttaggaactggttggtctccactttgattattagtgtaaagagcctgagtatacgtggatttcattgtaaaatttaactccttgtcttttacttggggcacggggcccctggagggcttccctactttccccactatgttaacaggtaattctgatttatgcctttagtttgacttatttttaacaaaatattagaagttatgctttaaaatgtttaatgtggactgaaattttcatcttttgtttgagaatctatgaagtgtatcatatacgtggcctaaagcaaggtgtgtattttgttattctgaaattgttttgcatctggacaaatactaaatatcccagtggccttttttttttttttttaaacctgtgtatccatctcatccttttgcgcattcctagtaagcaaaaaaatttgttatgccatcttcattattcgaattacagactgaaaaaatatggccagtttttaaagaagtttagattatgttttccatggaaggacaagtctgactgttcataggctgattttctttaagaggattattctgttttacaatttcaattctagatcacattttatatatgctgcatgccaaaaaaaaaaaaaagagaaaactgccttttctggtgtggaggggaagaaaaactaatattctaccttactagtagagttcaaaacaagttttcactgagagccttttcagtaaaagttaaacaagtttgttttttgagcatttgtcagttattctatttcagaagagtcaaaattcaagcacgatacattttgaaggctttgcaaactcctaaacccctgatgagtcctctcattctggaagtgggaatttgagtagatactgatttgtcccgtagtatggcagatgacagggaggtcttttccaatcaggcactcagaacacaggtcaccgtatgttctcagccagtaacaatcatactgaggacgaaggactctccgtttgatgcagacacaattgtaatggagatgtaaaacttcttagcaatcagatggataaattctttgctttttactttaaataggaaattgttttctaaaactaaaatacttgaattgtcagacagtataatctcagcttgtattagtttttgaatgctcccatcgaggaagtgtaacaatccatgaaatgtgaataaatgaaaagtaaacaaaa

SEQ ID NO: 358359 - DNA, 3761 bp, Homo sapiens
ccagcgaggatgcagacgagttgcacaaaattttactggagaaaaaggatgcctgaacacgcaaagtcggctgcagaattattgccaagttgctgctgcttccaccgccccttaaagttagtcagtttttcttctcttctttgacattctaagaacttatagataacttaaaacttttgtgaggaagattaatgtggccaataaaacctttaaatgttaagtgtcaagaaactgcactctcccttcttaagaactgcctaaagtgtaaaatacatttgaatgcaatttttggaagattttttaatgttcgtttattaaactaaccctaagtgatttcttcaaggactgcaatcagggtatcaatttgctttcccaaaggctcttccaacccgtgggttttggggtccaccgccaccaccagagaggcttttgaacaggtgcctggctgtgttcagaaggaagctggcctgtgtgcttctctccggtgggctcagccgacgtgtgagacttgttctgttaccaaatgaaccgggctgccacgctgtgacaggcgtttgtcctctgctttatttttactttgaagctcaaatgcgagtactaagtgttcacctcagcgttcgaatcattggcctgtaaccctgtgggctgcttcacgagaattcaggacctgcattttcattctaaaaagaaatgaacagcttgtgaaggagttttttggcttcatagtttctattcatgaggtagtgttacttctttatccccctaaagacaaaatgaagataaagggggattgccaggaatgggtttaaaagcacaaatgtggtagcttatcatctacaccatggagagtgaacccttacgaaatgaaagtcaaatgagaccatccgagaaaaagatgcgcataggcatttgtaccatgatcaaccccacgcacatgaaaactgtgaccaagtgacgtgcctgggagctttgacacacgagccgtgtgaattcactaggaaacatgtaataaagtcatggaagagaaaatcgtgtgtaaattttgcctttaactttagaccgcagtatattataatacatttgatatctgaaatatctttacttttttaagagtaagattccatatgtctgtctggaagggagccatggttattcacacgaatatccctgtcacttctccagaggtgtcaggtaactaacacgagcattctttgaagactctgggcacatgaatgatacacagaattgaatgtttaaatttccactttgagtcctcatgaatcatttgagactagtaccagctgatcttgtgtacaggctcagggtcagtgcccaagggctcccgcgtgtgtgttctgatcttcagtgcgtagcacattctccatttagaaaagagtggtcagaataattgtggacggtacagtggctttttaaaactacagtctttaggtgtaaggtttggcgccgggagcaattttatgatcaaatatgatgaactcctaagtcactgaggtgtgattgggccaatgttggcatgaggttcttgctctacttccagtgttttgattccactgggagaatttggcctagtgtgtggctttggatgaatccgtgtagagagaggtgagcttgtcctgttacagatgctgtcagacatagcgatagtaggcacctagggaggaagtggccgttagttttacactgactttttaagaatggagaatgcacgtgggtttctgttgcggatgattcatagtaagcaagcggttgatgctgttaataccggccccacccgattgacattaagtttattcagcttttaaaaagatgaagaactaaggggaacaaatttaagtttgttgcaacttagccacacatgcttccctggtaccagctggaatcagcagctcacaggcatcttcaggacacttcagtgtatatgacacagtactttgttagcgtctgcgtgtgtatggaaagttgacaaaaaatggcatgaaaagatcatgattggattttcttttaaacctgcccttctgtaaaaaatagtttatatatttttaaattagtaggtatgtgtggcttccttttttcctaacattcccagcaaatttttgctgctaagactatcactgttaaagtgaaaattacagggaaaaatgtgatgaatataccgtaactcaaaatgtgatattttcttaaaatcactcttttatgctttaggaactggttggtctccactttgattattagtgtaaagagcctgagtatacgtggatttcattgtaaaatttaactccttgtcttttacttggggcacggggcccctggagggcttccctactttccccactatgttaacaggtaattctgatttatgcctttagtttgacttatttttaacaaaatattagaagttatgctttaaaatgtttaatgtggactgaaattttcatcttttgtttgagaatctatgaagtgtatcatatacgtggcctaaagcaaggtgtgtattttgttattctgaaattgttttgcatctggacaaatactaaatatcccagtggccttttttttttttttttaaacctgtgtatccatctcatccttttgcgcattcctagtaagcaaaaaaatttgttatgccatcttcattattcgaattacagactgaaaaaatatggccagtttttaaagaagtttagattatgttttccatggaaggacaagtctgactgttcataggctgattttctttaagaggattattctgttttacaatttcaattctagatcacattttatatatgctgcatgccaaaaaaaaaaaaaagagaaaactgccttttctggtgtggaggggaagaaaaactaatattctaccttactagtagagttcaaaacaagttttcactgagagccttttcagtaaaagttaaacaagtttgttttttgagcatttgtcagttattctatttcagaagagtcaaaattcaagcacgatacattttgaaggctttgcaaactcctaaacccctgatgagtcctctcattctggaagtgggaatttgagtagatactgatttgtcccgtagtatggcagatgacagggaggtcttttccaatcaggcactcagaacacaggtcaccgtatgttctcagccagtaacaatcatactgaggacgaaggactctccgtttgatgcagacacaattgtaatggagatgtaaaacttcttagcaatcagatggataaattctttgctttttactttaaataggaaattgttttctaaaactaaaatacttgaattgtcagacagtataatctcagcttgtattagtttttgaatgctcccatcgaggaagtgtaacaatccatgaaatgtgaataaatgaaaagtaaacaaaaaaaaaaaaaaaaaaaaaaaaatgggggtattgggggggcggggaaacaacgcgcggtaatgagaaagggactgggccatagcgtgcttccggaacccagtttgtggttacagggggaaaatcggcgggcccccaagagagagcggaaataaattcgaacacccggttaccgcataaacatgcgcgaaaatgagacacacgcacaccgacaccaaggcgaagagaagaagctaacaacagtgacaccaatcgggtcgaaaagacttaacaaggcgaaaacacagcgacgcaacccgaaagtcatagacaaatgctatacacaacactagacaggcagcaacacacagaag

SEQ ID NO: 358360 - DNA, 2810 bp, Homo sapiens
ggcacgagacaatcctgacatttcattgttttgttacttggggcagtattaaccagtggcctttgtatgtacattcattgcttacatttattgtttaagtggtagagtagcatttttatgaacttccctgttcagtattagtgaaattgacagatgcgtatatgtaaagatagaaaagaaacgaatacaattaattttttattccttgaggcctatttatttgttttggccctggatcttttctaatcacaattatatttctttatttttgcctttgagcagtttcatttatctttgtgggcagggaagattaaatatgaaattcagtccagtcattttgctactggttagctttagtttgaggcaagtaaaaatttttgattaaaattagtttcttaaaattatgcccttgctttaccaaataatcaaattggctaaaaaataagggtatgtaactttgcattttgaagaacaaaccaataatttttcatgagccctactcgatcttctttaaagaagaccttcctaagagacaattagggatgagtttgattaatgggaaatagctctaggttagattattttaaattccatacaccaagtgatttaaccacagtggcagtggcagtttctgaaccgtcaagtatgaacatcacttaaaaattaaaagatgcttaataataaactcttaattttcattaagccaatctgtaattcagaagaaaagcatatgtctgccatgggactattgcagtgcgtctccatcagtgttaacacaggagagatatgttattttatgtgtatgtcttagtttgggatatgtggtagtaagaacatgtcaagagtgctttcttcaaacctgtcagctcaactgagaagacagttacttcattgcttattttttcccttgttttattgaaatctgtatctcatatccagtatctaacactttgtagagatacttacatataatgtaagtgcacacctacccagaggaatggataactgttaaagtgttaataatagctcgtcttagttgatttcagcataatttacattagggagacctaaaaagcaccttcaaagtattaaaagcaccttttttttttctttttcctaaaaaagcaattaaaatggtcactgctaacatttattaaacttcatgttagttgatgaaacagctggagggaagctgccacatctcctagctaagcagtctgacttacctgttgggaaacaaagggatattgctctaagattgattaggatgattgtagctagagtcttgaattctatctgtatacggcagagaaactttatagagtgtagagaggtgagcgaaaggatgcaaaagcactttgagggctttataataatatgctgcttgaaaaaaaaaatgtgtagttgatactcagtgcatctccagacatagtaaggggttgctctgaccaatcaggtgatcattttttctatcacttcccaggttttatgcaaaaattttgttaaattctataatggtgatatgcatcttttaggaaagatatacatttttaaaaatctattttatgtaagaactgacagaggaatttgctttgtataatgcaggctggctttacaaaagcactgtagcaaatttactacaagtctaaaagtatacatatatgttaatagatatatgtgcaactagatatggacagcagttgtatttttttaaataaatatttttaacaaaaaaaaaaaaaaaaaactcgagcaaacatggcggctccactagggggtatgttttctgggcagccacccggtccccctcaggccccgccgggccttccgggccaagcttcgcttcttcaggcagctccaggcgctcctagaccttccagcagtactttggtggacgagttggagtcatctttcgaggcttgctttgcatctctggtgagtcaggactatgtcaatggcaccgatcaggaagaaattcgaaccggtgttgatcagtgtatccagaagtttctggatattgcaagacagacagaatgttttttcttacaaaaaagattgcagttatctgtccagaaaccagagcaagttatcaaagaggatgtgtcagaactaaggaatgaattacagcggaaagatgcactagtccagaagcacttgacaaagctgaggcattggcagcaggtgctggaggacatcaacgtgcagcacaaaaagcccgccgacatccctcagggctccttggcctacctggagcaggcatctgccaacatccctgcacctctgaagccaacgtgagcaaagggcagaggcagttggcctatgagtgggctgatgcgtgaggttggccacacattccttcctgtggacttgacattttggaagaactctttgccagataatgagttcattttagttttatgctcccattgaaaaattttccactatttttataagctgttaatttcttgagtactttataacatgtctgtagcttggataaaccaagtaagtattttttttttgtctttagcgaagtttagactgtgaatatgatgacacagattcttttttatggtggctttgcttgttttaaatttttgcatgacttttcatctttttatgtgtgtttcctgtagtttgatccgaaggaaaagagtatagtagcctgagaatcaggagatgggagttttagtcgtaggccttatgataattaccccgcggtggtgtgtagaaaagtatgtaaatttgctctgttttaagactttgaactacctcaagaagaggaatctaatacaatatttgtaatgttt

SEQ ID NO: 358361 - DNA, 892 bp, Homo sapiens
atggggttttgccatgttggccaggctggtcttgaactcctgacctcaagtgatctgtccgcctcagcctcccaaagtactgagattacaggcatgagccaccgtgcccagcccatcttcatcttctttacttgaacttaattctttttcatgcatcttcccttctttcctcttttctcctccacccaaatgtcttaactgttaacattcccaggtgtttggtcctgggcctctggaggttgtgaaggagcactgctcagtcctcccttcaagaaagcagcttcaaggagttcaattacaaaagctcctggcattggggacctgccgccatgttcctgcccagggcatgctggtcctggctgtcaccaagcacagtggaggtcaggtgctaggccatttctgcccgacacaggcctcctctaatgagcagtctgaggccaggcacaggaggctgaggcaggagaatcgcttgaacccaggaggtggacgttgcagtgagccgagatcgagccactgcactccagcctgggtgacggagtaagacttcgtctcaaaaaataaaaaataaaaaaatactgagcagtctgcttgggcgcttccatcagcctggccatgacatctttggagctgtcctgccctcttttgccccggtgttccttggcccacctgtcagacctacatcataggctcttcctgtcttctgtttcctctcccctttctctaacataggtgtttctcctgagaaagaaaaaaaccacctgtccctgacattcagaagctgacaacactgttcggtcatgccattctcctgttggacataaacagtctctgaatgccaaccccaaagttgctctcaggccatgataaaataaaccacttaataattttgtct

SEQ ID NO: 358362 - DNA, 5545 bp, Homo sapiens
ggcacgagacaatcctgacatttcattgttttgttacttggggcagtattaaccagtggcctttgtatgtacattcattgcttacatttattgtttaagtggtagagtagcatttttatgaacttccctgttcagtattagtgaaattgacagatgcgtatatgtaaagatagaaaagaaacgaatacaattaattttttattccttgaggcctatttatttgttttggccctggatcttttctaatcacaattatatttctttatttttgcctttgagcagtttcatttatctttgtgggcagggaagattaaatatgaaattcagtccagtcattttgctactggttagctttagtttgaggcaagtaaaaatttttgattaaaattagtttcttaaaattatgcccttgctttaccaaataatcaaattggctaaaaaataagggtatgtaactttgcattttgaagaacaaaccaataatttttcatgagccctactcgatcttctttaaagaagaccttcctaagagacaattagggatgagtttgattaatgggaaatagctctaggttagattattttaaattccatacaccaagtgatttaaccacagtggcagtggcagtttctgaaccgtcaagtatgaacatcacttaaaaattaaaagatgcttaataataaactcttaattttcattaagccaatctgtaattcagaagaaaagcatatgtctgccatgggactattgcagtgcgtctccatcagtgttaacacaggagagatatgttattttatgtgtatgtcttagtttgggatatgtggtagtaagaacatgtcaagagtgctttcttcaaacctgtcagctcaactgagaagacagttacttcattgcttattttttcccttgttttattgaaatctgtatctcatatccagtatctaacactttgtagagatacttacatataatgtaagtgcacacctacccagaggaatggataactgttaaagtgttaataatagctcgtcttagttgatttcagcataatttacattagggagacctaaaaagcaccttcaaagtattaaaagcaccttttttttttctttttcctaaaaaagcaattaaaatggtcactgctaacatttattaaacttcatgttagttgatgaaacagctggagggaagctgccacatctcctagctaagcagtctgacttacctgttgggaaacaaagggatattgctctaagattgattaggatgattgtagctagagtcttgaattctatctgtatacggcagagaaactttatagagtgtagagaggtgagcgaaaggatgcaaaagcactttgagggctttataataatatgctgcttgaaaaaaaaaatgtgtagttgatactcagtgcatctccagacatagtaaggggttgctctgaccaatcaggtgatcattttttctatcacttcccaggttttatgcaaaaattttgttaaattctataatggtgatatgcatcttttaggaaagatatacatttttaaaaatctattttatgtaagaactgacagaggaatttgctttgtataatgcaggctggctttacaaaagcactgtagcaaatttactacaagtctaaaagtatacatatatgttaatagatatatgtgcaactagatatggacagcagttgtatttttttaaataaatatttttaacaaaaaaaaaaaaaaaaaactcgagcaaacatggcggctccactagggggtatgttttctgggcagccacccggtccccctcaggccccgccgggccttccgggccaagcttcgcttcttcaggcagctccaggcgctcctagaccttccagcagtactttggtggacgagttggagtcatctttcgaggcttgctttgcatctctggtgagtcaggactatgtcaatggcaccgatcaggaagaaattcgaaccggtgttgatcagtgtatccagaagtttctggatattgcaagacagacagaatgttttttcttacaaaaaagattgcagttatctgtccagaaaccagagcaagttatcaaagaggatgtgtcagaactaaggaatgaattacagcggaaagatgcactagtccagaagcacttgacaaagctgaggcattggcagcaggtgctggaggacatcaacgtgcagcacaaaaagcccgccgacatccctcagggctccttggcctacctggagcaggcatctgccaacatccctgcacctctgaagccaacgtgagcaaagggcagaggcagttggcctatgagtgggctgatgcgtgaggttggccacacattccttcctgtggacttgacattttggaagaactctttgccagataatgagttcattttagttttatgctcccattgaaaaattttccactatttttataagctgttaatttcttgagtactttataacatgtctgtagcttggataaaccaagtaagtattttttttttgtctttagcgaagtttagactgtgaatatgatgacacagattcttttttatggtggctttgcttgttttaaatttttgcatgacttttcatctttttatgtgtgtttcctgtagtttgatccgaaggaaaagagtatagtagcctgagaatcaggagatgggagttttagtcgtaggccttatgataattaccccgcggtggtgtgtagaaaagtatgtaaatttgctctgttttaagactttgaactacctcaagaagaggaatctaatacaatatttgtaatgtttccagagctctcagaatgaggatttttttgtaaataggtcagaagacgatggaactgtcctgggttagtatagtaatcttacagtaggatccttaggttgatgctgacttctgtttggggtatgtttatattttatgtggtgtttactttttttttttgacatagaaggatatagtgggagcagtgatacgctaacattcattacattctgcagtaatgaatctgtttaatgggtcagacactgttttcagtagcatgacagtggggtcataggtgagctgtgaggggctaaatcttgctctgattgtctctttctgttttgagttttgtttgcgtgtatcatttttgttctacattttgggaggggaaacattttccgttaaggaaggttgttgccagtggatttgactccaagggactagagtgtcgtggtgggggtggggaggggctgcagggtgatcattggctactgagcctccacaaagagcatgtggtgccctgcctttgggagggtattttgctctcgttagttttgtgggcagcctcagattccctgttgagttgctgttaagaaatggagatttctggctctcattgggtaaggttttctgagttttatatcttattagatcacatccctttacccagaacaaatgcttcactgtcttctgattggcagtactcctgtggctttgtgccttgactcattttgttgtcttcagccttgaaggccccttcccacatggactgacatccactcatgtgcctgatccctgaagcctcccagcacccattcagttgcatccccagggcacaggactttgatctcttctgttgccctcgctaggttctccctggtgggttagtgctttgtatctgtctctctgcccctcactaattctacacccatgagaattagacattattctccttaaatatataaggaccatataatctgtatctttttggtgtgtgtatatggtatctggcacatggatctctgattaccagcctgacatcaacaaatcccctcagttacaacgtataggttaaacaaagcttttaaaagctcatgtggtatgacctcaaggttgctaacctggtcactcatggtaattagaaactctgattggcagctttgtatttcttgactaaaaacctaaataaactgattaggttttaggcgttctttcaaagaggttcttgagaagattgagaactatcctatttggtgcttagtgaaaagattttgaattactgtacgtaccagttgttgccatttctttattaaattcagaagtttttttgccaaaaaaaaatttttcaatcttctctgtttgtagacatcttactgggtgatgaataatcctctaagaaaccctctgagctgctaactctttcagggagaaaatcacaagccatcttctcaagttcccctagaaacctgtggaatgccctctgccaagcactgctctggtactggggagtggagtattatgtcttggaagagactcctgctgtgattgtccaggggtacgttctggtctggcttggtgcttgaccttaggtctgcccacaggcttcaggctttcaactttgaaacaaacatctgtgccacacacattttgtaaatgatcccattcagtcttctagaagccttataacagaatcaatattgtttttcccattttcacagatggataataaatctgtaaaatagggataagactaggacctattccccaggattacttctgcagattaaaggagatgttgaggccaggtgcagtggctcacgcctgtaatcccagcactttggggggctgaggcaggagaatcgcttgaacctgggaggcagaggttgtgatgagccaagatcgtgccattgcactccatcctgggctacaagagtgaaactccgtctcaaaaaagaaaaaggagatgttgaatgggaagtcagcaagggtgctagaatgtagcaagtattcttcaggtgttagtgatttctgttgttcgggaagaggagggttatggaggaagagtatgggatttaggtgggttaagtgatttgcccaaagtcaagaggttagtctttaacctttggcagaagcaggatttgaagtgagttttcacacccctcttccctggtcagtgtgttgataacagcccacccacctgtggttccagggtgttcttaagaagccaaggttgtcttgggtgtggtagctctttgaaaggtagaaagttccaccaagaaggccttttttcttgaatactgcttagcttccttgtcaggctccaagatgcagattgcctgtgggctatctctctccacagataaacctactcacatcttcaggacagccttttttttttgagacagaagacttcgtctcaaaaaataaaaaataaaaaaatactgagcagtctgcttgggcgcttccatcagcctggccatgacatctttggagctgtcctgccctcttttgccccggtgttccttggcccacctgtcagacctacatcataggctcttcctgtcttctgtttcctctcccctttctctaacataggtgtttctcctgagaaagaaaaaaaccacctgtccctgacattcagaagctgacaacactgttcggtcatgccattctcctgttggacataaacagtctctgaatgccaaccccaaagttgctctcaggccatgataaaataaaccacttaataattttgtct

SEQ ID NO: 358363 - DNA, 4122 bp, Homo sapiens
ggcacgagacaatcctgacatttcattgttttgttacttggggcagtattaaccagtggcctttgtatgtacattcattgcttacatttattgtttaagtggtagagtagcatttttatgaacttccctgttcagtattagtgaaattgacagatgcgtatatgtaaagatagaaaagaaacgaatacaattaattttttattccttgaggcctatttatttgttttggccctggatcttttctaatcacaattatatttctttatttttgcctttgagcagtttcatttatctttgtgggcagggaagattaaatatgaaattcagtccagtcattttgctactggttagctttagtttgaggcaagtaaaaatttttgattaaaattagtttcttaaaattatgcccttgctttaccaaataatcaaattggctaaaaaataagggtatgtaactttgcattttgaagaacaaaccaataatttttcatgagccctactcgatcttctttaaagaagaccttcctaagagacaattagggatgagtttgattaatgggaaatagctctaggttagattattttaaattccatacaccaagtgatttaaccacagtggcagtggcagtttctgaaccgtcaagtatgaacatcacttaaaaattaaaagatgcttaataataaactcttaattttcattaagccaatctgtaattcagaagaaaagcatatgtctgccatgggactattgcagtgcgtctccatcagtgttaacacaggagagatatgttattttatgtgtatgtcttagtttgggatatgtggtagtaagaacatgtcaagagtgctttcttcaaacctgtcagctcaactgagaagacagttacttcattgcttattttttcccttgttttattgaaatctgtatctcatatccagtatctaacactttgtagagatacttacatataatgtaagtgcacacctacccagaggaatggataactgttaaagtgttaataatagctcgtcttagttgatttcagcataatttacattagggagacctaaaaagcaccttcaaagtattaaaagcaccttttttttttctttttcctaaaaaagcaattaaaatggtcactgctaacatttattaaacttcatgttagttgatgaaacagctggagggaagctgccacatctcctagctaagcagtctgacttacctgttgggaaacaaagggatattgctctaagattgattaggatgattgtagctagagtcttgaattctatctgtatacggcagagaaactttatagagtgtagagaggtgagcgaaaggatgcaaaagcactttgagggctttataataatatgctgcttgaaaaaaaaaatgtgtagttgatactcagtgcatctccagacatagtaaggggttgctctgaccaatcaggtgatcattttttctatcacttcccaggttttatgcaaaaattttgttaaattctataatggtgatatgcatcttttaggaaagatatacatttttaaaaatctattttatgtaagaactgacagaggaatttgctttgtataatgcaggctggctttacaaaagcactgtagcaaatttactacaagtctaaaagtatacatatatgttaatagatatatgtgcaactagatatggacagcagttgtatttttttaaataaatatttttaacaaaaaaaaaaaaaaaaaactcgagcaaacatggcggctccactagggggtatgttttctgggcagccacccggtccccctcaggccccgccgggccttccgggccaagcttcgcttcttcaggcagctccaggcgctcctagaccttccagcagtactttggtggacgagttggagtcatctttcgaggcttgctttgcatctctggtgagtcaggactatgtcaatggcaccgatcaggaagaaattcgaaccggtgttgatcagtgtatccagaagtttctggatattgcaagacagacagaatgttttttcttacaaaaaagattgcagttatctgtccagaaaccagagcaagttatcaaagaggatgtgtcagaactaaggaatgaattacagcggaaagatgcactagtccagaagcacttgacaaagctgaggcattggcagcaggtgctggaggacatcaacgtgcagcacaaaaagcccgccgacatccctcagggctccttggcctacctggagcaggcatctgccaacatccctgcacctctgaagccaacgtgagcaaagggcagaggcagttggcctatgagtgggctgatgcgtgaggttggccacacattccttcctgtggacttgacattttggaagaactctttgccagataatgagttcattttagttttatgctcccattgaaaaattttccactatttttataagctgttaatttcttgagtactttataacatgtctgtagcttggataaaccaagtaagtattttttttttgtctttagcgaagtttagactgtgaatatgatgacacagattcttttttatggtggctttgcttgttttaaatttttgcatgacttttcatctttttatgtgtgtttcctgtagtttgatccgaaggaaaagagtatagtagcctgagaatcaggagatgggagttttagtcgtaggccttatgataattaccccgcggtggtgtgtagaaaagtatgtaaatttgctctgttttaagactttgaactacctcaagaagaggaatctaatacaatatttgtaatgtttccagagctctcagaatgaggatttttttgtaaataggtcagaagacgatggaactgtcctgggttagtatagtaatcttacagtaggatccttaggttgatgctgacttctgtttggggtatgtttatattttatgtggtgtttactttttttttttgacatagaaggatatagtgggagcagtgatacgctaacattcattacattctgcagtaatgaatctgtttaatgggtcagacactgttttcagtagcatgacagtggggtcataggtgagctgtgaggggctaaatcttgctctgattgtctctttctgttttgagttttgtttgcgtgtatcatttttgttctacattttgggaggggaaacattttccgttaaggaaggttgttgccagtggatttgactccaagggactagagtgtcgtggtgggggtggggaggggctgcagggtgatcattggctactgagcctccacaaagagcatgtggtgccctgcctttgggagggtattttgctctcgttagttttgtgggcagcctcagattccctgttgagttgctgttaagaaatggagatttctggctctcattgggtaaggttttctgagttttatatcttattagatcacatccctttacccagaacaaatgcttcactgtcttctgattggcagtactcctgtggctttgtgccttgactcattttgttgtcttcagccttgaaggccccttcccacatggactgacatccactcatgtgcctgatccctgaagcctcccagcacccattcagttgcatccccagggcacaggactttgatctcttctgttgccctcgctaggttctccctggtgggttagtgctttgtatctgtctctctgcccctcactaattctacacccatgagaattagacattattctccttaaatatataaggaccatataatctgtatctttttggtgtgtgtatatggtatctggcacatggatctctgattaccagcctgacatcaacaaatcccctcagttacaacgtataggttaaacaaagcttttaaaagctcatgtggtatgacctcaaggttgctaacctggtcactcatggtaattagaaactctgattggcagctttgtatttcttgactaaaaacctaaataaactgattaggttttaggcgttctttcaaagaggttcttgagaagattgagaactatcctatttggtgcttagtgaaaagattttgaattactgtacgtaccagttgttgccatttctttattaaattcagaagtttttttgccaaa

SEQ ID NO: 358364 - DNA, 4184 bp, Homo sapiens
ggcacgagacaatcctgacatttcattgttttgttacttggggcagtattaaccagtggcctttgtatgtacattcattgcttacatttattgtttaagtggtagagtagcatttttatgaacttccctgttcagtattagtgaaattgacagatgcgtatatgtaaagatagaaaagaaacgaatacaattaattttttattccttgaggcctatttatttgttttggccctggatcttttctaatcacaattatatttctttatttttgcctttgagcagtttcatttatctttgtgggcagggaagattaaatatgaaattcagtccagtcattttgctactggttagctttagtttgaggcaagtaaaaatttttgattaaaattagtttcttaaaattatgcccttgctttaccaaataatcaaattggctaaaaaataagggtatgtaactttgcattttgaagaacaaaccaataatttttcatgagccctactcgatcttctttaaagaagaccttcctaagagacaattagggatgagtttgattaatgggaaatagctctaggttagattattttaaattccatacaccaagtgatttaaccacagtggcagtggcagtttctgaaccgtcaagtatgaacatcacttaaaaattaaaagatgcttaataataaactcttaattttcattaagccaatctgtaattcagaagaaaagcatatgtctgccatgggactattgcagtgcgtctccatcagtgttaacacaggagagatatgttattttatgtgtatgtcttagtttgggatatgtggtagtaagaacatgtcaagagtgctttcttcaaacctgtcagctcaactgagaagacagttacttcattgcttattttttcccttgttttattgaaatctgtatctcatatccagtatctaacactttgtagagatacttacatataatgtaagtgcacacctacccagaggaatggataactgttaaagtgttaataatagctcgtcttagttgatttcagcataatttacattagggagacctaaaaagcaccttcaaagtattaaaagcaccttttttttttctttttcctaaaaaagcaattaaaatggtcactgctaacatttattaaacttcatgttagttgatgaaacagctggagggaagctgccacatctcctagctaagcagtctgacttacctgttgggaaacaaagggatattgctctaagattgattaggatgattgtagctagagtcttgaattctatctgtatacggcagagaaactttatagagtgtagagaggtgagcgaaaggatgcaaaagcactttgagggctttataataatatgctgcttgaaaaaaaaaatgtgtagttgatactcagtgcatctccagacatagtaaggggttgctctgaccaatcaggtgatcattttttctatcacttcccaggttttatgcaaaaattttgttaaattctataatggtgatatgcatcttttaggaaagatatacatttttaaaaatctattttatgtaagaactgacagaggaatttgctttgtataatgcaggctggctttacaaaagcactgtagcaaatttactacaagtctaaaagtatacatatatgttaatagatatatgtgcaactagatatggacagcagttgtatttttttaaataaatatttttaacaaaaaaaaaaaaaaaaaactcgagcaaacatggcggctccactagggggtatgttttctgggcagccacccggtccccctcaggccccgccgggccttccgggccaagcttcgcttcttcaggcagctccaggcgctcctagaccttccagcagtactttggtggacgagttggagtcatctttcgaggcttgctttgcatctctggtgagtcaggactatgtcaatggcaccgatcaggaagaaattcgaaccggtgttgatcagtgtatccagaagtttctggatattgcaagacagacagaatgttttttcttacaaaaaagattgcagttatctgtccagaaaccagagcaagttatcaaagaggatgtgtcagaactaaggaatgaattacagcggaaagatgcactagtccagaagcacttgacaaagctgaggcattggcagcaggtgctggaggacatcaacgtgcagcacaaaaagcccgccgacatccctcagggctccttggcctacctggagcaggcatctgccaacatccctgcacctctgaagccaacgtgagcaaagggcagaggcagttggcctatgagtgggctgatgcgtgaggttggccacacattccttcctgtggacttgacattttggaagaactctttgccagataatgagttcattttagttttatgctcccattgaaaaattttccactatttttataagctgttaatttcttgagtactttataacatgtctgtagcttggataaaccaagtaagtattttttttttgtctttagcgaagtttagactgtgaatatgatgacacagattcttttttatggtggctttgcttgttttaaatttttgcatgacttttcatctttttatgtgtgtttcctgtagtttgatccgaaggaaaagagtatagtagcctgagaatcaggagatgggagttttagtcgtaggccttatgataattaccccgcggtggtgtgtagaaaagtatgtaaatttgctctgttttaagactttgaactacctcaagaagaggaatctaatacaatatttgtaatgtttccagagctctcagaatgaggatttttttgtaaataggtcagaagacgatggaactgtcctgggttagtatagtaatcttacagtaggatccttaggttgatgctgacttctgtttggggtatgtttatattttatgtggtgtttactttttttttttgacatagaaggatatagtgggagcagtgatacgctaacattcattacattctgcagtaatgaatctgtttaatgggtcagacactgttttcagtagcatgacagtggggtcataggtgagctgtgaggggctaaatcttgctctgattgtctctttctgttttgagttttgtttgcgtgtatcatttttgttctacattttgggaggggaaacattttccgttaaggaaggttgttgccagtggatttgactccaagggactagagtgtcgtggtgggggtggggaggggctgcagggtgatcattggctactgagcctccacaaagagcatgtggtgccctgcctttgggagggtattttgctctcgttagttttgtgggcagcctcagattccctgttgagttgctgttaagaaatggagatttctggctctcattgggtaaggttttctgagttttatatcttattagatcacatccctttacccagaacaaatgcttcactgtcttctgattggcagtactcctgtggctttgtgccttgactcattttgttgtcttcagccttgaaggccccttcccacatggactgacatccactcatgtgcctgatccctgaagcctcccagcacccattcagttgcatccccagggcacaggactttgatctcttctgttgccctcgctaggttctccctggtgggttagtgctttgtatctgtctctctgcccctcactaattctacacccatgagaattagacattattctccttaaatatataaggaccatataatctgtatctttttggtgtgtgtatatggtatctggcacatggatctctgattaccagcctgacatcaacaaatcccctcagttacaacgtataggttaaacaaagcttttaaaagctcatgtggtatgacctcaaggttgctaacctggtcactcatggtaattagaaactctgattggcagctttgtatttcttggtggagtcagtggtaataaccccttatcatttctgattgtgtttgtttgattcttctctgttttcttattagtctagctagtggtctattttttttaattttttaaaaaaaccagctcctggatttgttgaattttttgaagggtttttcgtgtctctctctcttttagttcagctctgatattggttatttcttgtcttctgctagcttgggagtttgttggct

SEQ ID NO: 358365 - DNA, 2644 bp, Homo sapiens
ggcacgagacaatcctgacatttcattgttttgttacttggggcagtattaaccagtggcctttgtatgtacattcattgcttacatttattgtttaagtggtagagtagcatttttatgaacttccctgttcagtattagtgaaattgacagatgcgtatatgtaaagatagaaaagaaacgaatacaattaattttttattccttgaggcctatttatttgttttggccctggatcttttctaatcacaattatatttctttatttttgcctttgagcagtttcatttatctttgtgggcagggaagattaaatatgaaattcagtccagtcattttgctactggttagctttagtttgaggcaagtaaaaatttttgattaaaattagtttcttaaaattatgcccttgctttaccaaataatcaaattggctaaaaaataagggtatgtaactttgcattttgaagaacaaaccaataatttttcatgagccctactcgatcttctttaaagaagaccttcctaagagacaattagggatgagtttgattaatgggaaatagctctaggttagattattttaaattccatacaccaagtgatttaaccacagtggcagtggcagtttctgaaccgtcaagtatgaacatcacttaaaaattaaaagatgcttaataataaactcttaattttcattaagccaatctgtaattcagaagaaaagcatatgtctgccatgggactattgcagtgcgtctccatcagtgttaacacaggagagatatgttattttatgtgtatgtcttagtttgggatatgtggtagtaagaacatgtcaagagtgctttcttcaaacctgtcagctcaactgagaagacagttacttcattgcttattttttcccttgttttattgaaatctgtatctcatatccagtatctaacactttgtagagatacttacatataatgtaagtgcacacctacccagaggaatggataactgttaaagtgttaataatagctcgtcttagttgatttcagcataatttacattagggagacctaaaaagcaccttcaaagtattaaaagcaccttttttttttctttttcctaaaaaagcaattaaaatggtcactgctaacatttattaaacttcatgttagttgatgaaacagctggagggaagctgccacatctcctagctaagcagtctgacttacctgttgggaaacaaagggatattgctctaagattgattaggatgattgtagctagagtcttgaattctatctgtatacggcagagaaactttatagagtgtagagaggtgagcgaaaggatgcaaaagcactttgagggctttataataatatgctgcttgaaaaaaaaaatgtgtagttgatactcagtgcatctccagacatagtaaggggttgctctgaccaatcaggtgatcattttttctatcacttcccaggttttatgcaaaaattttgttaaattctataatggtgatatgcatcttttaggaaagatatacatttttaaaaatctattttatgtaagaactgacagaggaatttgctttgtataatgcaggctggctttacaaaagcactgtagcaaatttactacaagtctaaaagtatacatatatgttaatagatatatgtgcaactagatatggacagcagttgtatttttttaaataaatatttttaacaaaaaaaaaaaaaaaaaactcgagcaaacatggcggctccactagggggtatgttttctgggcagccacccggtccccctcaggccccgccgggccttccgggccaagcttcgcttcttcaggcagctccaggcgctcctagaccttccagcagtactttggtggacgagttggagtcatctttcgaggcttgctttgcatctctggtgagtcaggactatgtcaatggcaccgatcaggaagaaattcgaaccggtgttgatcagtgtatccagaagtttctggatattgcaagacagacagaatgttttttcttacaaaaaagattgcagttatctgtccagaaaccagagcaagttatcaaagaggatgtgtcagaactaaggaatgaattacagcggaaagatgcactagtccagaagcacttgacaaagctgaggcattggcagcaggtgctggaggacatcaacgtgcagcacaaaaagcccgccgacatccctcagggctccttggcctacctggagcaggcatctgccaacatccctgcacctctgaagccaacacatcttactgggtgatgaataatcctctaagaaaccctctgagctgctaactctttcagggagaaaatcacaagccatcttctcaagttcccctagaaacctgtggaatgccctctgccaagcactgctctggtactggggagtggagtattatgtcttggaagagactcctgctgtgattgtccaggggtgtttctcctgagaaagaaaaaaaccacctgtccctgacattcagaagctgacaacactgttcggtcatgccattctcctgttggacataaacagtctctgaatgccaaccccaaagttgctctcaggccatgataaaataaaccacttaataattttgtct

SEQ ID NO: 358366 - DNA, 2143 bp, Homo sapiens
  misc_feature (2101)..(2101): n is a, c, g, or t
  misc_feature (2114)..(2114): n is a, c, g, or t
  misc_feature (2121)..(2121): n is a, c, g, or t
  misc_feature (2127)..(2127): n is a, c, g, or t
  misc_feature (2134)..(2134): n is a, c, g, or t
ggcacgagacaatcctgacatttcattgttttgttacttggggcagtattaaccagtggcctttgtatgtacattcattgcttacatttattgtttaagtggtagagtagcatttttatgaacttccctgttcagtattagtgaaattgacagatgcgtatatgtaaagatagaaaagaaacgaatacaattaattttttattccttgaggcctatttatttgttttggccctggatcttttctaatcacaattatatttctttatttttgcctttgagcagtttcatttatctttgtgggcagggaagattaaatatgaaattcagtccagtcattttgctactggttagctttagtttgaggcaagtaaaaatttttgattaaaattagtttcttaaaattatgcccttgctttaccaaataatcaaattggctaaaaaataagggtatgtaactttgcattttgaagaacaaaccaataatttttcatgagccctactcgatcttctttaaagaagaccttcctaagagacaattagggatgagtttgattaatgggaaatagctctaggttagattattttaaattccatacaccaagtgatttaaccacagtggcagtggcagtttctgaaccgtcaagtatgaacatcacttaaaaattaaaagatgcttaataataaactcttaattttcattaagccaatctgtaattcagaagaaaagcatatgtctgccatgggactattgcagtgcgtctccatcagtgttaacacaggagagatatgttattttatgtgtatgtcttagtttgggatatgtggtagtaagaacatgtcaagagtgctttcttcaaacctgtcagctcaactgagaagacagttacttcattgcttattttttcccttgttttattgaaatctgtatctcatatccagtatctaacactttgtagagatacttacatataatgtaagtgcacacctacccagaggaatggataactgttaaagtgttaataatagctcgtcttagttgatttcagcataatttacattagggagacctaaaaagcaccttcaaagtattaaaagcaccttttttttttctttttcctaaaaaagcaattaaaatggtcactgctaacatttattaaacttcatgttagttgatgaaacagctggagggaagctgccacatctcctagctaagcagtctgacttacctgttgggaaacaaagggatattgctctaagattgattaggatgattgtagctagagtcttgaattctatctgtatacggcagagaaactttatagagtgtagagaggtgagcgaaaggatgcaaaagcactttgagggctttataataatatgctgcttgaaaaaaaaaatgtgtagttgatactcagtgcatctccagacatagtaaggggttgctctgaccaatcaggtgatcattttttctatcacttcccaggttttatgcaaaaattttgttaaattctataatggtgatatgcatcttttaggaaagatatacatttttaaaaatctattttatgtaagaactgacagaggaatttgctttgtataatgcaggctggctttacaaaagcactgtagcaaatttactacaagtctaaaagtatacatatatgttaatagatatatgtgcaactagatatggacagcagttgtatttttttaaataaatatttttaacaaaaaaaaaaaaaaaaaactcgagcaaacatggcggctccactagggggtatgttttctgggcagccacccggtccccctcaggccccgccgggccttccgggccaagcttcgcttcttcaggcagctccaggcgctcctagaccttccagcagtactttggtggacgagttggagtcatctttcgaggcttgctttgcatctctggtgagtcaggactatgtcaatggcaccgatcaggaagaaattcgaaccggtaagcattccctctgtgtacacaatgttctgggcttcagcagtatttcctagttgctaattttatacttcatgtgtttcagtcctgcttttatcctaagaccatttcagggacctnatggggggtttgnggggggntctttnggggggnccccccccc

SEQ ID NO: 358367 - DNA, 626 bp, Homo sapiens
aattcaagaccagcctggccaacatggcgaaacaccatctctactaaaaatacgaaaattaaggctgggcgcggtggctcatgcctgtaatcccagccctttgggaggcagaggcaggcggatcacgaggtcagattgagaccatcctgaccaacatggtgaaaccccgtctctactaaaaatacaaaattatctgggtgtagtggtgtgcacctgacagctactcgggaggctgacgtaggaaaattacttgaacccgggaggcagaggttgaagacttcgtctcaaaaaataaaaaataaaaaaatactgagcagtctgcttgggcgcttccatcagcctggccatgacatctttggagctgtcctgccctcttttgccccggtgttccttggcccacctgtcagacctacatcataggctcttcctgtcttctgtttcctctcccctttctctaacataggtgtttctcctgagaaagaaaaaaaccacctgtccctgacattcagaagctgacaacactgttcggtcatgccattctcctgttggacataaacagtctctgaatgccaaccccaaagttgctctcaggccatgataaaataaaccacttaataattttgtct

SEQ ID NO: 358368 - DNA, 3162 bp, Homo sapiens
ggcacgagacaatcctgacatttcattgttttgttacttggggcagtattaaccagtggcctttgtatgtacattcattgcttacatttattgtttaagtggtagagtagcatttttatgaacttccctgttcagtattagtgaaattgacagatgcgtatatgtaaagatagaaaagaaacgaatacaattaattttttattccttgaggcctatttatttgttttggccctggatcttttctaatcacaattatatttctttatttttgcctttgagcagtttcatttatctttgtgggcagggaagattaaatatgaaattcagtccagtcattttgctactggttagctttagtttgaggcaagtaaaaatttttgattaaaattagtttcttaaaattatgcccttgctttaccaaataatcaaattggctaaaaaataagggtatgtaactttgcattttgaagaacaaaccaataatttttcatgagccctactcgatcttctttaaagaagaccttcctaagagacaattagggatgagtttgattaatgggaaatagctctaggttagattattttaaattccatacaccaagtgatttaaccacagtggcagtggcagtttctgaaccgtcaagtatgaacatcacttaaaaattaaaagatgcttaataataaactcttaattttcattaagccaatctgtaattcagaagaaaagcatatgtctgccatgggactattgcagtgcgtctccatcagtgttaacacaggagagatatgttattttatgtgtatgtcttagtttgggatatgtggtagtaagaacatgtcaagagtgctttcttcaaacctgtcagctcaactgagaagacagttacttcattgcttattttttcccttgttttattgaaatctgtatctcatatccagtatctaacactttgtagagatacttacatataatgtaagtgcacacctacccagaggaatggataactgttaaagtgttaataatagctcgtcttagttgatttcagcataatttacattagggagacctaaaaagcaccttcaaagtattaaaagcaccttttttttttctttttcctaaaaaagcaattaaaatggtcactgctaacatttattaaacttcatgttagttgatgaaacagctggagggaagctgccacatctcctagctaagcagtctgacttacctgttgggaaacaaagggatattgctctaagattgattaggatgattgtagctagagtcttgaattctatctgtatacggcagagaaactttatagagtgtagagaggtgagcgaaaggatgcaaaagcactttgagggctttataataatatgctgcttgaaaaaaaaaatgtgtagttgatactcagtgcatctccagacatagtaaggggttgctctgaccaatcaggtgatcattttttctatcacttcccaggttttatgcaaaaattttgttaaattctataatggtgatatgcatcttttaggaaagatatacatttttaaaaatctattttatgtaagaactgacagaggaatttgctttgtataatgcaggctggctttacaaaagcactgtagcaaatttactacaagtctaaaagtatacatatatgttaatagatatatgtgcaactagatatggacagcagttgtatttttttaaataaatatttttaacaaaaaaaaaaaaaaaaaactcgagcaaacatggcggctccactagggggtatgttttctgggcagccacccggtccccctcaggccccgccgggccttccgggccaagcttcgcttcttcaggcagctccaggcgctcctagaccttccagcagtactttggtggacgagttggagtcatctttcgaggcttgctttgcatctctggtgagtcaggactatgtcaatggcaccgatcaggaagaaattcgaaccggtgttgatcagtgtatccagaagtttctggatattgcaagacagacagaatgttttttcttacaaaaaagattgcagttatctgtccagaaaccagagcaagttatcaaagaggatgtgtcagaactaaggaatgaattacagcggaaagatgcactagtccagaagcacttgacaaagctgaggcattggcagcaggtgctggaggacatcaacgtgcagcacaaaaagcccgccgacatccctcagggctccttggcctacctggagcaggcatctgccaacatccctgcacctctgaagccaacgtgagcaaagggcagaggcagttggcctatgagtgggctgatgcgtgaggttggccacacattccttcctgtggacttgacattttggaagaactctttgccagataatgagttcattttagttttatgctcccattgaaaaattttccactatttttataagctgttaatttcttgagtactttataacatgtctgtagcttggataaaccaagtaagtattttttttttgtctttagcgaagtttagactgtgaatatgatgacacagattcttttttatggtggctttgcttgttttaaatttttgcatgacttttcatctttttatgtgtgtttcctgtagtttgatccgaaggaaaagagtatagtagcctgagaatcaggagatgggagttttagtcgtaggccttatgataattaccccgcggtggtgtgtagaaaagtatgtaaatttgctctgttttaagactttgaactacctcaagaagaggaatctaatacaatatttgtaatgtttaaaaaaaaaaaaaaaaaaaaaaaaaaaaaaaaaaaaaaaaaaaaaaaaaaaaaaaacaaaaaaaaaaaaaaaaaaaaaaaaaaaagttgggggggggggagcggccccgagagaaaaacgtttaaaaacacacttgtgtggggcggggggccccaaagaaagagagaagaaaacacgggcgcaagagggtcaacagaaaggaaacgggggaaaaaaagggggggggggcatcacacacacaaaaaaaagcgggggggtgagagaggggttggcgagcacacgcgagggggctctgggagacaagggaggggatacaagaggggcgcacgagagcggagataagttcccgggg

SEQ ID NO: 358369 - DNA, 4712 bp, Homo sapiens
ggcacgagacaatcctgacatttcattgttttgttacttggggcagtattaaccagtggcctttgtatgtacattcattgcttacatttattgtttaagtggtagagtagcatttttatgaacttccctgttcagtattagtgaaattgacagatgcgtatatgtaaagatagaaaagaaacgaatacaattaattttttattccttgaggcctatttatttgttttggccctggatcttttctaatcacaattatatttctttatttttgcctttgagcagtttcatttatctttgtgggcagggaagattaaatatgaaattcagtccagtcattttgctactggttagctttagtttgaggcaagtaaaaatttttgattaaaattagtttcttaaaattatgcccttgctttaccaaataatcaaattggctaaaaaataagggtatgtaactttgcattttgaagaacaaaccaataatttttcatgagccctactcgatcttctttaaagaagaccttcctaagagacaattagggatgagtttgattaatgggaaatagctctaggttagattattttaaattccatacaccaagtgatttaaccacagtggcagtggcagtttctgaaccgtcaagtatgaacatcacttaaaaattaaaagatgcttaataataaactcttaattttcattaagccaatctgtaattcagaagaaaagcatatgtctgccatgggactattgcagtgcgtctccatcagtgttaacacaggagagatatgttattttatgtgtatgtcttagtttgggatatgtggtagtaagaacatgtcaagagtgctttcttcaaacctgtcagctcaactgagaagacagttacttcattgcttattttttcccttgttttattgaaatctgtatctcatatccagtatctaacactttgtagagatacttacatataatgtaagtgcacacctacccagaggaatggataactgttaaagtgttaataatagctcgtcttagttgatttcagcataatttacattagggagacctaaaaagcaccttcaaagtattaaaagcaccttttttttttctttttcctaaaaaagcaattaaaatggtcactgctaacatttattaaacttcatgttagttgatgaaacagctggagggaagctgccacatctcctagctaagcagtctgacttacctgttgggaaacaaagggatattgctctaagattgattaggatgattgtagctagagtcttgaattctatctgtatacggcagagaaactttatagagtgtagagaggtgagcgaaaggatgcaaaagcactttgagggctttataataatatgctgcttgaaaaaaaaaatgtgtagttgatactcagtgcatctccagacatagtaaggggttgctctgaccaatcaggtgatcattttttctatcacttcccaggttttatgcaaaaattttgttaaattctataatggtgatatgcatcttttaggaaagatatacatttttaaaaatctattttatgtaagaactgacagaggaatttgctttgtataatgcaggctggctttacaaaagcactgtagcaaatttactacaagtctaaaagtatacatatatgttaatagatatatgtgcaactagatatggacagcagttgtatttttttaaataaatatttttaacaaaaaaaaaaaaaaaaaactcgagcaaacatggcggctccactagggggtatgttttctgggcagccacccggtccccctcaggccccgccgggccttccgggccaagcttcgcttcttcaggcagctccaggcgctcctagaccttccagcagtactttggtggacgagttggagtcatctttcgaggcttgctttgcatctctggtgagtcaggactatgtcaatggcaccgatcaggaagaaattcgaaccggtgttgatcagtgtatccagaagtttctggatattgcaagacagacagaatgttttttcttacaaaaaagattgcagttatctgtccagaaaccagagcaagttatcaaagaggatgtgtcagaactaaggaatgaattacagcggaaagatgcactagtccagaagcacttgacaaagctgaggcattggcagcaggtgctggaggacatcaacgtgcagcacaaaaagcccgccgacatccctcagggctccttggcctacctggagcaggcatctgccaacatccctgcacctctgaagccaacgtgagcaaagggcagaggcagttggcctatgagtgggctgatgcgtgaggttggccacacattccttcctgtggacttgacattttggaagaactctttgccagataatgagttcattttagttttatgctcccattgaaaaattttccactatttttataagctgttaatttcttgagtactttataacatgtctgtagcttggataaaccaagtaagtattttttttttgtctttagcgaagtttagactgtgaatatgatgacacagattcttttttatggtggctttgcttgttttaaatttttgcatgacttttcatctttttatgtgtgtttcctgtagtttgatccgaaggaaaagagtatagtagcctgagaatcaggagatgggagttttagtcgtaggccttatgataattaccccgcggtggtgtgtagaaaagtatgtaaatttgctctgttttaagactttgaactacctcaagaagaggaatctaatacaatatttgtaatgtttccagagctctcagaatgaggatttttttgtaaataggtcagaagacgatggaactgtcctgggttagtatagtaatcttacagtaggatccttaggttgatgctgacttctgtttggggtatgtttatattttatgtggtgtttactttttttttttgacatagaaggatatagtgggagcagtgatacgctaacattcattacattctgcagtaatgaatctgtttaatgggtcagacactgttttcagtagcatgacagtggggtcataggtgagctgtgaggggctaaatcttgctctgattgtctctttctgttttgagttttgtttgcgtgtatcatttttgttctacattttgggaggggaaacattttccgttaaggaaggttgttgccagtggatttgactccaagggactagagtgtcgtggtgggggtggggaggggctgcagggtgatcattggctactgagcctccacaaagagcatgtggtgccctgcctttgggagggtattttgctctcgttagttttgtgggcagcctcagattccctgttgagttgctgttaagaaatggagatttctggctctcattgggtaaggttttctgagttttatatcttattagatcacatccctttacccagaacaaatgcttcactgtcttctgattggcagtactcctgtggctttgtgccttgactcattttgttgtcttcagccttgaaggccccttcccacatggactgacatccactcatgtgcctgatccctgaagcctcccagcacccattcagttgcatccccagggcacaggactttgatctcttctgttgccctcgctaggttctccctggtgggttagtgctttgtatctgtctctctgcccctcactaattctacacccatgagaattagacattattctccttaaatatataaggaccatataatctgtatctttttggtgtgtgtatatggtatctggcacatggatctctgattaccagcctgacatcaacaaatcccctcagttacaacgtataggttaaacaaagcttttaaaagctcatgtggtatgacctcaaggttgctaacctggtcactcatggtaattagaaactctgattggcagctttgtatttcttgactaaaaacctaaataaactgattaggttttaggcgttctttcaaagaggttcttgagaagattgagaactatcctatttggtgcttagtgaaaagattttgaattactgtacgtaccagttgttgccatttctttattaaattcagaagtttttttgccaaaaaaaaatttttcaatcttctctgtttgtagacatcttactgggtgatgaataatcctctaagaaaccctctgagctgctaactctttcagggagaaaatcacaagccatcttctcaagttcccctagaaacctgtggaatgccctctgccaagcactgctctggtactggggagtggagtattatgtcttggaagagactcctgctgtgattgtccaggggtacgttctggtctggcttggtgcttgaccttaggtctgcccacaggcttcaggctttcaactttgaaacaaacatctgtgccacacacattttgtaaatgatcccattcagtcttctagaagccttataacagaatcaatattgtttttcccattttcacagatggataataaatctgtaaaatagggataagactaggacctattccccaggattaaggcgtgagctgctgtgcctggcagaacagtatgaagtgttaacgccaaaatttgttttagctatcatatataaatcataagcatattatttggttggttggtgttagttcattccttcaatcggatgatttaaaataaatgtttttcaagt

SEQ ID NO: 358370 - DNA, 2515 bp, Homo sapiens
ggcacgagacaatcctgacatttcattgttttgttacttggggcagtattaaccagtggcctttgtatgtacattcattgcttacatttattgtttaagtggtagagtagcatttttatgaacttccctgttcagtattagtgaaattgacagatgcgtatatgtaaagatagaaaagaaacgaatacaattaattttttattccttgaggcctatttatttgttttggccctggatcttttctaatcacaattatatttctttatttttgcctttgagcagtttcatttatctttgtgggcagggaagattaaatatgaaattcagtccagtcattttgctactggttagctttagtttgaggcaagtaaaaatttttgattaaaattagtttcttaaaattatgcccttgctttaccaaataatcaaattggctaaaaaataagggtatgtaactttgcattttgaagaacaaaccaataatttttcatgagccctactcgatcttctttaaagaagaccttcctaagagacaattagggatgagtttgattaatgggaaatagctctaggttagattattttaaattccatacaccaagtgatttaaccacagtggcagtggcagtttctgaaccgtcaagtatgaacatcacttaaaaattaaaagatgcttaataataaactcttaattttcattaagccaatctgtaattcagaagaaaagcatatgtctgccatgggactattgcagtgcgtctccatcagtgttaacacaggagagatatgttattttatgtgtatgtcttagtttgggatatgtggtagtaagaacatgtcaagagtgctttcttcaaacctgtcagctcaactgagaagacagttacttcattgcttattttttcccttgttttattgaaatctgtatctcatatccagtatctaacactttgtagagatacttacatataatgtaagtgcacacctacccagaggaatggataactgttaaagtgttaataatagctcgtcttagttgatttcagcataatttacattagggagacctaaaaagcaccttcaaagtattaaaagcaccttttttttttctttttcctaaaaaagcaattaaaatggtcactgctaacatttattaaacttcatgttagttgatgaaacagctggagggaagctgccacatctcctagctaagcagtctgacttacctgttgggaaacaaagggatattgctctaagattgattaggatgattgtagctagagtcttgaattctatctgtatacggcagagaaactttatagagtgtagagaggtgagcgaaaggatgcaaaagcactttgagggctttataataatatgctgcttgaaaaaaaaaatgtgtagttgatactcagtgcatctccagacatagtaaggggttgctctgaccaatcaggtgatcattttttctatcacttcccaggttttatgcaaaaattttgttaaattctataatggtgatatgcatcttttaggaaagatatacatttttaaaaatctattttatgtaagaactgacagaggaatttgctttgtataatgcaggctggctttacaaaagcactgtagcaaatttactacaagtctaaaagtatacatatatgttaatagatatatgtgcaactagatatggacagcagttgtatttttttaaataaatatttttaacaaaaaaaaaaaaaaaaaactcgagcaaacatggcggctccactagggggtatgttttctgggcagccacccggtccccctcaggccccgccgggccttccgggccaagcttcgcttcttcaggcagctccaggcgctcctagaccttccagcagtactttggtggacgagttggagtcatctttcgaggcttgctttgcatctctggtgagtcaggactatgtcaatggcaccgatcaggaagaaattcgaaccggtgttgatcagtgtatccagaagtttctggatattgcaagacagacagaatgttttttcttacaaaaaagattgcagttatctgtccagaaaccagagcaagttatcaaagaggatgtgtcagaactaaggaatgaattacagcggaaagatgcactagtccagaagcacttgacaaagctgaggcattggcagcaggtgctggaggacatcaacgtgcagcacaaaaagcccgccgacatccctcagggctccttggcctacctggagcaggcatctgccaacatccctgcacctctgaagccaacgtgagcaaagggcagaggcagttggcctatgagtgggctgatgcgtgaggttggccacacattccttcctgtggacttgacattttggaagaactctttgccagataatgagttcattttagttttatgctcccattgaaaaattttccactatttttataagctgttaatttcttgagtactttataacatgtctgtagcttggataaaccaagtaagtattt

SEQ ID NO: 358371 - DNA, 446 bp, Homo sapiens
cggccgctgcagagcaccgagctgtgtccgggcgggggagcccgcgttgtggcagtggcggcgctcctaggccgcctggtgtggtgcgaggagcggcaggcccgggccgagggcccgtcagggtcgccagcagccgctttcagccactgtgtgtgcgtccggactctggagcccagcggggaatgggtttttgtttttccttcattgttgagaatttaaggacctttgatactgctgcacaatagagattgagttctgggatcagttataatatatattttttttagaaagagaaaatgagctgagagtttacagtagaaaatgcagtgcaaaaattttaaatgaggaatattccatttacaattaatttaaaacttatgaagctgttttaactggcccatctaaatgtgttaattaacatcaatgatggtttcttcctcgtgccg

SEQ ID NO: 358372 - DNA, 4072 bp, Homo sapiens
cacgtagcattgctgcggagctggacgagcttgctgatgaccgtatggcactggtgtcaggcatcagcttagatccagaagcagcgattggtgtgacaaaacggccacctcctaagtgggtggatggagtggatgaaattcagtatgatgttggccggattaagcagaagatgaaagaattggccagccttcatgacaagcatttaaacagacccaccctggatgacagcagcgaagaggaacatgccattgagataactacccaagagatcactcagctcttccacaggtgccagcgtgccgtgcaggccctgccgagccgggcccgggcctgctccgagcaggaggggcggctgcttgggaacgtggtggcctcgctggcgcaggccctgcaggaactctccaccagcttccggcacgcacaatcaggctacctcaaacgcatgaagaatcgagaggaaagatcccagcattttttcgacacatcagtaccactaatggatgatggagacgataacactctttaccatcggggttttacagaggaccagttagttctggtggagcagaacacactgatggtggaagagcgggaacgagagattcgccagattgtacagtccatttctgacctgaatgaaatattcagggacttaggggcgatgattgtagaacagggtacagtccttgacagaattgactataacgttgaacagtcctgtatcaaaactgaagatggtttgaaacagcttcacaaggcagaacagtatcaaaagaagaatcggaagatgcttgtgattttaatattatttgtcatcatcattgtgctcattgttgtcctcgttggcgtgaagtctcgataagtggcattgggttttcgtgtgtgccgcgcgtgtggatctcccgggtgtgaggggcttggcctgcgccccgccagctgcccgcagaggtgcagcctcgaggaatctgagggcgtcggggcagcgaacctttgcatccacggactcctccttccctagtcctgctcaagcggtccggggaatgggtttttgtttttccttcattgttgagaatttaaggacctttgatactgctgcacaatagagattgagttctgggatcagttataatatatattttttttagaaagagaaaatgagctgagagtttacaggcactgcagaagctgttcagtattatatgtgtatatgctatttttttagcagccatgtctgagcagaatgttaacataatttttggaaaaattttctttaaaccatctggtttttaagaaatttggtaccaaaaattgatgagtagaggcaaaaatgccccttcatctttctctatatattttccagttgaaaacaaactaagaagtcctttaagaatttataatccgttccccattaacttaatttagcttttccatcactgttaatgatcagagtaacaaagtgtgaaaaataagaaaccatcattgatgttaattaacacatttagatgggccagttaaaacagcttcataagttttaaattaattgtaaatggaatattcctcatttaaaatttttgcactgcattttctactgtaaaccaaaagaggttactaagcaaaaccacctaaatttaagttggtgatttaaatgaatctcacattaaaagaaagcttgacagtgttatgaaagccaccagactcagccagtgtgtccccatgggtatccccagccatccttgctcaatccattacttatatactaactacataatgacctgttcaaaccagactctatttaatgaactgtgaatttacacagaggccattttaaatgggtcaccccatttaggattagtggatctcaaattattaaccaaacatcactccatttcaaagtaaaatattccaccagcgatttgatttattggctcttccattgccactgagcaatgcccaggaagcaggcacattgccaaggactgggggcatcttgactaggaagctcctcgtttgtgtgagcgtgggtcagaccgccaaagtaggacttcatcgtttacctacctattatcaatatggtgcttgaatatattcctataactgtagaacagtgtggaaagtgatggtaactttgaagttgttcatgttttattggctttgttttaattgacactagtagagttttaatggtctttgtgtaaattttaatggcttttccattgtttttgcttctcttaaaaagtttaagaagaatatgacctcattaaatgtgctgttttatttggaccagtcacacaaaatgtctctctagagttgactttaaagttgtttacagaaatttaaactcaattccagagattgaagttgtccaaacagctcatgggcttagtgtccaaacccctgcccagccttccctttccaagttggtgccacctccaggtagccattggtggttttcctattactgatgtggctgtggaatgataaggtcctagaggggccctggcatttcaggaagcggacctggtattccctgacaaacattgcttaggaaagagggccggagaataagaagccagcacctcatcagtcagccctgcaatgtgagacttccgtagctgttgagagtcactgcaggtgttctttcatcccgtctgattttaacccatggttgagacgttccaagttagatctgctgctcttaggtgtggggctgtccacattagggaacttgcctcaaaaacagtccacagtggcaataccggacttctgttcaagctttttaaagtgctgagccttacaaacccctgaaggaaggtgaccctttaagagaggatcatctttttttatatttattttcaccaaatagggtgatgagggttggtttttgttccctcaacccatttgggtaaaataacggatctaattagaaactgttttaaggaggggctgggctcggtggctcacgcctgtaatcccagactttgagaggccaaggcggtcacgaggtcaggagttcgagaccagcctagccaacatggtgaaaccccgtctctacaaaaaatacaaaaattagccgggtgggacacgcctgtaatcccagctactcaagaggctgaggcaggagaatagcttgaacccgggaggcagaggttgcagtgagccgagatcacaccactgcactccagcctgggtgacagagcgaggctccgtctcaaaaaaaaaaaaaaaaaaaattgttttagcgctgggtttcccaaggtgggagagacagacccagcctggagctggcccctggcctgtgtgctgacttcttggggtcctcaaaccactgtatttttctgttgagcctgtacttggggagagatcagtagcatttgaggaagtaagagaaaagaatcatggtacctcagggtttctttccctttactcgctggcagccattgtctgtgggcacctcatgtttttccacactctactgggccgtggaggtaacgatcacccaggccagtctcctctgcctgggatgcgccctctgagaggaggcctagcagggcaggctccctctgggcatccctggatgcagcctctggacacatgcctcctttaaagtgtccgggtgcagctcaggttgagtggaggtagaaggagaaacagacatgtttaccacgcgttttccaaagctcctgatctttcccaagattgtaactgaaaactgctgtctcttgttttgttcgttttgggggtggtggtgctggctgggccatgcttgtgaagtgatgtgtgtctctgatttaacggattcactgttttctctgctaattgagagagcgttatttacattatttatttgttttgacacaagtgctttcagtgttttatcctagctaatggcttcttaaaggtaataaaacccttccaacgtaattggtcagataaaactttttttcttgtatgcttaaataaagcaattagtgaagcacttctatccaaaatgacttttttgtccttttttaaaaccaatttactgttactggaaactttttgtacaataaagcaatcacgcagattaaagaa

SEQ ID NO: 358373 - DNA, 4099 bp, Homo sapiens
cacgtagcattgctgcggagctggacgagcttgctgatgaccgtatggcactggtgtcaggcatcagcttagatccagaagcagcgattggtgtgacaaaacggccacctcctaagtgggtggatggagtggatgaaattcagtatgatgttggccggattaagcagaagatgaaagaattggccagccttcatgacaagcatttaaacagacccaccctggatgacagcagcgaagaggaacatgccattgagataactacccaagagatcactcagctcttccacaggtgccagcgtgccgtgcaggccctgccgagccgggcccgggcctgctccgagcaggaggggcggctgcttgggaacgtggtggcctcgctggcgcaggccctgcaggaactctccaccagcttccggcacgcacaatcaggctacctcaaacgcatgaagaatcgagaggaaagatcccagcattttttcgacacatcagtaccactaatggatgatggagacgataacactctttaccatcggggttttacagaggaccagttagttctggtggagcagaacacactgatggtggaagagcgggaacgagagattcgccagattgtacagtccatttctgacctgaatgaaatattcagggacttaggggcgatgattgtagaacagggtacagtccttgacagaattgactataacgttgaacagtcctgtatcaaaactgaagatggtttgaaacagcttcacaaggcagaacagtatcaaaagaagaatcggaagatgcttgtgattttaatattatttgtcatcatcattgtgctcattgttgtcctcgttggcgtgaagtctcgataagtggcattgggttttcgtgtgtgccgcgcgtgtggatctcccgggtgtgaggggcttggcctgcgccccgccagctgcccgcagaggtgcagcctcgaggaatctgagggcgtcggggcagcgaacctttgcatccacggactcctccttccctagtcctgctcaagcggtccggggaatgggtttttgtttttccttcattgttgagaatttaaggacctttgatactgctgcacaatagagattgagttctgggatcagttataatatatattttttttagaaagagaaaatgagctgagagtttacaggcactgcagaagctgttcagtattatatgtgtatatgctatttttttagcagccatgtctgagcagaatgttaacataatttttggaaaaattttctttaaaccatctggtttttaagaaatttggtaccaaaaattgatgagtagaggcaaaaatgccccttcatctttctctatatattttccagttgaaaacaaactaagaagtcctttaagaatttataatccgttccccattaacttaatttagcttttccatcactgttaatgatcagagtaacaaagtgtgaaaaataagaaaccatcattgatgttaattaacacatttagatgggccagttaaaacagcttcataagttttaaattaattgtaaatggaatattcctcatttaaaatttttgcactgcattttctactgtaaaccaaaagaggttactaagcaaaaccacctaaatttaagttggtgatttaaatgaatctcacattaaaagaaagcttgacagtgttatgaaagccaccagactcagccagtgtgtccccatgggtatccccagccatccttgctcaatccattacttatatactaactacataatgacctgttcaaaccagactctatttaatgaactgtgaatttacacagaggccattttaaatgggtcaccccatttaggattagtggatctcaaattattaaccaaacatcactccatttcaaagtaaaatattccaccagcgatttgatttattggctcttccattgccactgagcaatgcccaggaagcaggcacattgccaaggactgggggcatcttgactaggaagctcctcgtttgtgtgagcgtgggtcagaccgccaaagtaggacttcatcgtttacctacctattatcaatatggtgcttgaatatattcctataactgtagaacagtgtggaaagtgatggtaactttgaagttgttcatgttttattggctttgttttaattgacactagtagagttttaatggtctttgtgtaaattttaatggcttttccattgtttttgcttctcttaaaaagtttaagaagaatatgacctcattaaatgtgctgttttatttggaccagtcacacaaaatgtctctctagagttgactttaaagttgtttacagaaatttaaactcaattccagagattgaagttgtccaaacagctcatgggcttagtgtccaaacccctgcccagccttccctttccaagttggtgccacctccaggtagccattggtggttttcctattactgatgtggctgtggaatgataaggtcctagaggggccctggcatttcaggaagcggacctggtattccctgacaaacattgcttaggaaagagggccggagaataagaagccagcacctcatcagtcagccctgcaatgtgagacttccgtagctgttgagagtcactgcaggtgttctttcatcccgtctgattttaacccatggttgagacgttccaagttagatctgctgctcttaggtgtggggctgtccacattagggaacttgcctcaaaaacagtccacagtggcaataccggacttctgttcaagctttttaaagtgctgagccttacaaacccctgaaggaaggtgaccctttaagagaggatcatctttttttatatttattttcaccaaatagggtgatgagggttggtttttgttccctcaacccatttgggtaaaataacggatctaattagaaactgttttaaggaggggctgggctcggtggctcacgcctgtaatcccagactttgagaggccaaggcggtcacgaggtcaggagttcgagaccagcctagccaacatggtgaaaccccgtctctacaaaaaatacaaaaattagccgggtgggacacgcctgtaatcccagctactcaagaggctgaggcaggagaatagcttgaacccgggaggcagaggttgcagtgagccgagatcacaccactgcactccagcctgggtgacagagcgaggctccgtctcaaaaaaaaaaaaaaaaaaaattgttttagcgctgggtttcccaaggtgggagagacagacccagcctggagctggcccctggcctgtgtgctgacttcttggggtcctcaaaccactgtatttttctgttgagcctgtacttggggagagatcagtagcatttgaggaagtaagagaaaagaatcatggtacctcagggtttctttccctttactcgctggcagccattgtctgtgggcacctcatgtttttccacactctactgggccgtggaggtaacgatcacccaggccagtctcctctgcctgggatgcgccctctgagaggaggcctagcagggcaggctccctctgggcatccctggatgcagcctctggacacatgcctcctttaaagtgtccgggtgcagctcaggttgagtggaggtagaaggagaaacagacatgtttaccacgcgttttccaaagctcctgatctttcccaagattgtaactgaaaactgctgtctcttgttttgttcgttttgggggtggtggtgctggctgggccatgcttgtgaagtgatgtgtgtctctgatttaacggattcactgttttctctgctaattgagagagcgttatttacattatttatttgttttgacacaagtgctttcagtgttttatcctagctaatggcttcttaaaggtaataaaacccttccaacgtaattggtcagataaaactttttttcttgtatgcttaaataaagcaattagtgaagcacttctatccaaaatgacttttttgtccttttttaaaaccaatttactgttactggaaactttttgtacaataaagcaatcacgcagattaaagaacatcctgcaatcctagtattaatttta

SEQ ID NO: 358374 - DNA, 3760 bp, Homo sapiens
gtgagaaggccggggaggcaggccctgctgtcttcctgcaggccggcagcctgctggcagtggaggaccaggccgtccaggaaaggaaggggtcaggaggtcgggcagggcctcagcaggttcagacaagcatgaagaatcgagaggaaagatcccagcattttttcgacacatcagtaccactaatggatgatggagacgataacactctttaccatcggggttttacagaggaccagttagttctggtggagcagaacacactgatggtggaagagcgggaacgagagattcgccagattgtacagtccatttctgacctgaatgaaatattcagggacttaggggcgatgattgtagaacagggtacagtccttgacagaattgactataacgttgaacagtcctgtatcaaaactgaagatggtttgaaacagcttcacaaggcagaacagtatcaaaagaagaatcggaagatgcttgtgattttaatattatttgtcatcatcattgtgctcattgttgtcctcgttggcgtgaagtctcgataagtggcattgggttttcgtgtgtgccgcgcgtgtggatctcccgggtgtgaggggcttggcctgcgccccgccagctgcccgcagaggtgcagcctcgaggaatctgagggcgtcggggcagcgaacctttgcatccacggactcctccttccctagtcctgctcaagcggtccggggaatgggtttttgtttttccttcattgttgagaatttaaggacctttgatactgctgcacaatagagattgagttctgggatcagttataatatatattttttttagaaagagaaaatgagctgagagtttacaggcactgcagaagctgttcagtattatatgtgtatatgctatttttttagcagccatgtctgagcagaatgttaacataatttttggaaaaattttctttaaaccatctggtttttaagaaatttggtaccaaaaattgatgagtagaggcaaaaatgccccttcatctttctctatatattttccagttgaaaacaaactaagaagtcctttaagaatttataatccgttccccattaacttaatttagcttttccatcactgttaatgatcagagtaacaaagtgtgaaaaataagaaaccatcattgatgttaattaacacatttagatgggccagttaaaacagcttcataagttttaaattaattgtaaatggaatattcctcatttaaaatttttgcactgcattttctactgtaaaccaaaagaggttactaagcaaaaccacctaaatttaagttggtgatttaaatgaatctcacattaaaagaaagcttgacagtgttatgaaagccaccagactcagccagtgtgtccccatgggtatccccagccatccttgctcaatccattacttatatactaactacataatgacctgttcaaaccagactctatttaatgaactgtgaatttacacagaggccattttaaatgggtcaccccatttaggattagtggatctcaaattattaaccaaacatcactccatttcaaagtaaaatattccaccagcgatttgatttattggctcttccattgccactgagcaatgcccaggaagcaggcacattgccaaggactgggggcatcttgactaggaagctcctcgtttgtgtgagcgtgggtcagaccgccaaagtaggacttcatcgtttacctacctattatcaatatggtgcttgaatatattcctataactgtagaacagtgtggaaagtgatggtaactttgaagttgttcatgttttattggctttgttttaattgacactagtagagttttaatggtctttgtgtaaattttaatggcttttccattgtttttgcttctcttaaaaagtttaagaagaatatgacctcattaaatgtgctgttttatttggaccagtcacacaaaatgtctctctagagttgactttaaagttgtttacagaaatttaaactcaattccagagattgaagttgtccaaacagctcatgggcttagtgtccaaacccctgcccagccttccctttccaagttggtgccacctccaggtagccattggtggttttcctattactgatgtggctgtggaatgataaggtcctagaggggccctggcatttcaggaagcggacctggtattccctgacaaacattgcttaggaaagagggccggagaataagaagccagcacctcatcagtcagccctgcaatgtgagacttccgtagctgttgagagtcactgcaggtgttctttcatcccgtctgattttaacccatggttgagacgttccaagttagatctgctgctcttaggtgtggggctgtccacattagggaacttgcctcaaaaacagtccacagtggcaataccggacttctgttcaagctttttaaagtgctgagccttacaaacccctgaaggaaggtgaccctttaagagaggatcatctttttttatatttattttcaccaaatagggtgatgagggttggtttttgttccctcaacccatttgggtaaaataacggatctaattagaaactgttttaaggaggggctgggctcggtggctcacgcctgtaatcccagactttgagaggccaaggcggtcacgaggtcaggagttcgagaccagcctagccaacatggtgaaaccccgtctctacaaaaaatacaaaaattagccgggtgggacacgcctgtaatcccagctactcaagaggctgaggcaggagaatagcttgaacccgggaggcagaggttgcagtgagccgagatcacaccactgcactccagcctgggtgacagagcgaggctccgtctcaaaaaaaaaaaaaaaaaaaattgttttagcgctgggtttcccaaggtgggagagacagacccagcctggagctggcccctggcctgtgtgctgacttcttggggtcctcaaaccactgtatttttctgttgagcctgtacttggggagagatcagtagcatttgaggaagtaagagaaaagaatcatggtacctcagggtttctttccctttactcgctggcagccattgtctgtgggcacctcatgtttttccacactctactgggccgtggaggtaacgatcacccaggccagtctcctctgcctgggatgcgccctctgagaggaggcctagcagggcaggctccctctgggcatccctggatgcagcctctggacacatgcctcctttaaagtgtccgggtgcagctcaggttgagtggaggtagaaggagaaacagacatgtttaccacgcgttttccaaagctcctgatctttcccaagattgtaactgaaaactgctgtctcttgttttgttcgttttgggggtggtggtgctggctgggccatgcttgtgaagtgatgtgtgtctctgatttaacggattcactgttttctctgctaattgagagagcgttatttacattatttatttgttttgacacaagtgctttcagtgttttatcctagctaatggcttcttaaaggtaataaaacccttccaacgtaattggtcagataaaactttttttcttgtatgcttaaataaagcaattagtgaagcacttctatccaaaatgacttttttgtccttttttaaaaccaatttactgttactggaaactttttgtacaataaagcaatcacgcagattaaagaa

SEQ ID NO: 358375 - DNA, 3545 bp, Homo sapiens
caaatccatttccacgtccagggtaaataagcagcaccaggatcatggggctcttccactcctggtgattgaattccgtgggattgattggagggattacaatcatgtagcctgtagcagagacctcagtcactgtgcagagagatctggaagcctcattctggaaacgagtgggacttgatttgggattttggggaaaatgacggccttttttccctcctctttttgtaggcagaacagtatcaaaagaagaatcggaagatgcttgtgattttaatattatttgtcatcatcattgtgctcattgttgtcctcgttggcgtgaagtctcgataagtggcattgggttttcgtgtgtgccgcgcgtgtggatctcccgggtgtgaggggcttggcctgcgccccgccagctgcccgcagaggtgcagcctcgaggaatctgagggcgtcggggcagcgaacctttgcatccacggactcctccttccctagtcctgctcaagcggtccggggaatgggtttttgtttttccttcattgttgagaatttaaggacctttgatactgctgcacaatagagattgagttctgggatcagttataatatatattttttttagaaagagaaaatgagctgagagtttacaggcactgcagaagctgttcagtattatatgtgtatatgctatttttttagcagccatgtctgagcagaatgttaacataatttttggaaaaattttctttaaaccatctggtttttaagaaatttggtaccaaaaattgatgagtagaggcaaaaatgccccttcatctttctctatatattttccagttgaaaacaaactaagaagtcctttaagaatttataatccgttccccattaacttaatttagcttttccatcactgttaatgatcagagtaacaaagtgtgaaaaataagaaaccatcattgatgttaattaacacatttagatgggccagttaaaacagcttcataagttttaaattaattgtaaatggaatattcctcatttaaaatttttgcactgcattttctactgtaaaccaaaagaggttactaagcaaaaccacctaaatttaagttggtgatttaaatgaatctcacattaaaagaaagcttgacagtgttatgaaagccaccagactcagccagtgtgtccccatgggtatccccagccatccttgctcaatccattacttatatactaactacataatgacctgttcaaaccagactctatttaatgaactgtgaatttacacagaggccattttaaatgggtcaccccatttaggattagtggatctcaaattattaaccaaacatcactccatttcaaagtaaaatattccaccagcgatttgatttattggctcttccattgccactgagcaatgcccaggaagcaggcacattgccaaggactgggggcatcttgactaggaagctcctcgtttgtgtgagcgtgggtcagaccgccaaagtaggacttcatcgtttacctacctattatcaatatggtgcttgaatatattcctataactgtagaacagtgtggaaagtgatggtaactttgaagttgttcatgttttattggctttgttttaattgacactagtagagttttaatggtctttgtgtaaattttaatggcttttccattgtttttgcttctcttaaaaagtttaagaagaatatgacctcattaaatgtgctgttttatttggaccagtcacacaaaatgtctctctagagttgactttaaagttgtttacagaaatttaaactcaattccagagattgaagttgtccaaacagctcatgggcttagtgtccaaacccctgcccagccttccctttccaagttggtgccacctccaggtagccattggtggttttcctattactgatgtggctgtggaatgataaggtcctagaggggccctggcatttcaggaagcggacctggtattccctgacaaacattgcttaggaaagagggccggagaataagaagccagcacctcatcagtcagccctgcaatgtgagacttccgtagctgttgagagtcactgcaggtgttctttcatcccgtctgattttaacccatggttgagacgttccaagttagatctgctgctcttaggtgtggggctgtccacattagggaacttgcctcaaaaacagtccacagtggcaataccggacttctgttcaagctttttaaagtgctgagccttacaaacccctgaaggaaggtgaccctttaagagaggatcatctttttttatatttattttcaccaaatagggtgatgagggttggtttttgttccctcaacccatttgggtaaaataacggatctaattagaaactgttttaaggaggggctgggctcggtggctcacgcctgtaatcccagactttgagaggccaaggcggtcacgaggtcaggagttcgagaccagcctagccaacatggtgaaaccccgtctctacaaaaaatacaaaaattagccgggtgggacacgcctgtaatcccagctactcaagaggctgaggcaggagaatagcttgaacccgggaggcagaggttgcagtgagccgagatcacaccactgcactccagcctgggtgacagagcgaggctccgtctcaaaaaaaaaaaaaaaaaaaattgttttagcgctgggtttcccaaggtgggagagacagacccagcctggagctggcccctggcctgtgtgctgacttcttggggtcctcaaaccactgtatttttctgttgagcctgtacttggggagagatcagtagcatttgaggaagtaagagaaaagaatcatggtacctcagggtttctttccctttactcgctggcagccattgtctgtgggcacctcatgtttttccacactctactgggccgtggaggtaacgatcacccaggccagtctcctctgcctgggatgcgccctctgagaggaggcctagcagggcaggctccctctgggcatccctggatgcagcctctggacacatgcctcctttaaagtgtccgggtgcagctcaggttgagtggaggtagaaggagaaacagacatgtttaccacgcgttttccaaagctcctgatctttcccaagattgtaactgaaaactgctgtctcttgttttgttcgttttgggggtggtggtgctggctgggccatgcttgtgaagtgatgtgtgtctctgatttaacggattcactgttttctctgctaattgagagagcgttatttacattatttatttgttttgacacaagtgctttcagtgttttatcctagctaatggcttcttaaaggtaataaaacccttccaacgtaattggtcagataaaactttttttcttgtatgcttaaataaagcaattagtgaagcacttctatccaaaatgacttttttgtccttttttaaaaccaatttactgttactggaaactttttgtacaataaagcaatcacgcagattaaagaa

SEQ ID NO: 358376 - DNA, 4049 bp, Homo sapiens
gacgctttcttgttgttgcggaataattccatccaaaaccggcagctgttagccgagcaacttgctgatgaccgtatggcactggtgtcaggcatcagcttagatccagaagcagcgattggtgtgacaaaacggccacctcctaagtgggtggatggagtggatgaaattcagtatgatgttggccggattaagcagaagatgaaagaattggccagccttcatgacaagcatttaaacagacccaccctggatgacagcagcgaagaggaacatgccattgagataactacccaagagatcactcagctcttccacaggtgccagcgtgccgtgcaggccctgccgagccgggcccgggcctgctccgagcaggaggggcggctgcttgggaacgtggtggcctcgctggcgcaggccctgcaggaactctccaccagcttccggcacgcacaatcaggctacctcaaacgcatgaagaatcgagaggaaagatcccagcattttttcgacacatcagtaccactaatggatgatggagacgataacactctttaccatcggggttttacagaggaccagttagttctggtggagcagaacacactgatggtggaagagcgggaacgagagattcgccagattgtacagtccatttctgacctgaatgaaatattcagggacttaggggcgatgattgtagaacagggtacagtccttgacagaattgactataacgttgaacagtcctgtatcaaaactgaagatggtttgaaacagcttcacaaggcagaacagtatcaaaagaagaatcggaagatgcttgtgattttaatattatttgtcatcatcattgtgctcattgttgtcctcgttggcgtgaagtctcgataagtggcattgggttttcgtgtgtgccgcgcgtgtggatctcccgggtgtgaggggcttggcctgcgccccgccagctgcccgcagaggtgcagcctcgaggaatctgagggcgtcggggcagcgaacctttgcatccacggactcctccttccctagtcctgctcaagcggtccggggaatgggtttttgtttttccttcattgttgagaatttaaggacctttgatactgctgcacaatagagattgagttctgggatcagttataatatatattttttttagaaagagaaaatgagctgagagtttacaggcactgcagaagctgttcagtattatatgtgtatatgctatttttttagcagccatgtctgagcagaatgttaacataatttttggaaaaattttctttaaaccatctggtttttaagaaatttggtaccaaaaattgatgagtagaggcaaaaatgccccttcatctttctctatatattttccagttgaaaacaaactaagaagtcctttaagaatttataatccgttccccattaacttaatttagcttttccatcactgttaatgatcagagtaacaaagtgtgaaaaataagaaaccatcattgatgttaattaacacatttagatgggccagttaaaacagcttcataagttttaaattaattgtaaatggaatattcctcatttaaaatttttgcactgcattttctactgtaaaccaaaagaggttactaagcaaaaccacctaaatttaagttggtgatttaaatgaatctcacattaaaagaaagcttgacagtgttatgaaagccaccagactcagccagtgtgtccccatgggtatccccagccatccttgctcaatccattacttatatactaactacataatgacctgttcaaaccagactctatttaatgaactgtgaatttacacagaggccattttaaatgggtcaccccatttaggattagtggatctcaaattattaaccaaacatcactccatttcaaagtaaaatattccaccagcgatttgatttattggctcttccattgccactgagcaatgcccaggaagcaggcacattgccaaggactgggggcatcttgactaggaagctcctcgtttgtgtgagcgtgggtcagaccgccaaagtaggacttcatcgtttacctacctattatcaatatggtgcttgaatatattcctataactgtagaacagtgtggaaagtgatggtaactttgaagttgttcatgttttattggctttgttttaattgacactagtagagttttaatggtctttgtgtaaattttaatggcttttccattgtttttgcttctcttaaaaagtttaagaagaatatgacctcattaaatgtgctgttttatttggaccagtcacactccagagattgaagttgtccaaacagctcatgggcttagtgtccaaacccctgcccagccttccctttccaagttggtgccacctccaggtagccattggtggttttcctattactgatgtggctgtggaatgataaggtcctagaggggccctggcatttcaggaagcggacctggtattccctgacaaacattgcttaggaaagagggccggagaataagaagccagcacctcatcagtcagccctgcaatgtgagacttccgtagctgttgagagtcactgcaggtgttctttcatcccgtctgattttaacccatggttgagacgttccaagttagatctgctgctcttaggtgtggggctgtccacattagggaacttgcctcaaaaacagtccacagtggcaataccggacttctgttcaagctttttaaagtgctgagccttacaaacccctgaaggaaggtgaccctttaagagaggatcatctttttttatatttattttcaccaaatagggtgatgagggttggtttttgttccctcaacccatttgggtaaaataacggatctaattagaaactgttttaaggaggggctgggctcggtggctcacgcctgtaatcccagactttgagaggccaaggcggtcacgaggtcaggagttcgagaccagcctagccaacatggtgaaaccccgtctctacaaaaaatacaaaaattagccgggtgggacacgcctgtaatcccagctactcaagaggctgaggcaggagaatagcttgaacccgggaggcagaggttgcagtgagccgagatcacaccactgcactccagcctgggtgacagagcgaggctccgtctcaaaaaaaaaaaaaaaaaaaattgttttagcgctgggtttcccaaggtgggagagacagacccagcctggagctggcccctggcctgtgtgctgacttcttggggtcctcaaaccactgtatttttctgttgagcctgtacttggggagagatcagtagcatttgaggaagtaagagaaaagaatcatggtacctcagggtttctttccctttactcgctggcagccattgtctgtgggcacctcatgtttttccacactctactgggccgtggaggtaacgatcacccaggccagtctcctctgcctgggatgcgccctctgagaggaggcctagcagggcaggctccctctgggcatccctggatgcagcctctggacacatgcctcctttaaagtgtccgggtgcagctcaggttgagtggaggtagaaggagaaacagacatgtttaccacgcgttttccaaagctcctgatctttcccaagattgtaactgaaaactgctgtctcttgttttgttcgttttgggggtggtggtgctggctgggccatgcttgtgaagtgatgtgtgtctctgatttaacggattcactgttttctctgctaattgagagagcgttatttacattatttatttgttttgacacaagtgctttcagtgttttatcctagctaatggcttcttaaaggtaataaaacccttccaacgtaattggtcagataaaactttttttcttgtatgcttaaataaagcaattagtgaagcacttctatccaaaatgacttttttgtccttttttaaaaccaatttactgttactggaaactttttgtacaataaagcaatcacgcagattaaagaa

SEQ ID NO: 358377 - DNA, 3861 bp, Homo sapiens
gacgctttcttgttgttgcggaataattccatccaaaaccggcagctgttagccgagcaacttgctgatgaccgtatggcactggtgtcaggcatcagcttagatccagaagcagcgattggtgtgacaaaacggccacctcctaagtgggtggatggagtggatgaaattcagtatgatgttggccggattaagcagaagatgaaagaattggccagccttcatgacaagcatttaaacagacccaccctggatgacagcagcgaagaggaacatgccattgagataactacccaagagatcactcagctcttccacaggtgccagcgtgccgtgcaggccctgccgagccgggcccgggcctgctccgagcaggaggggcggctgcttgggaacgtggtggcctcgctggcgcaggccctgcaggaactctccaccagcttccggcacgcacaatcaggctacctcaaacgcatgaagaatcgagaggaaagatcccagcattttttcgacacatcagtaccactaatggatgatggagacgataacactctttaccatcggggttttacagaggaccagttagttctggtggagcagaacacactgatggtggaagagcgggaacgagagattcgccagattgtacagtccatttctgacctgaatgaaatattcagggacttaggggcgatgattgtagaacagggtacagtccttgacagaattgactataacgttgaacagtcctgtatcaaaactgaagatggtttgaaacagcttcacaaggcagaacagtatcaaaagaagaatcggaagatgcttgtgattttaatattatttgtcatcatcattgtgctcattgttgtcctcgttggcgtgaagtctcgataagtggcattgggttttcgtgtgtgccgcgcgtgtggatctcccgggtgtgaggggcttggcctgcgccccgccagctgcccgcagaggtgcagcctcgaggaatctgagggcgtcggggcagcgaacctttgcatccacggactcctccttccctagtcctgctcaagcggtccggggaatgggtttttgtttttccttcattgttgagaatttaaggacctttgatactgctgcacaatagagattgagttctgggatcagttataatatatattttttttagaaagagaaaatgagctgagagtttacaggcactgcagaagctgttcagtattatatgtgtatatgctatttttttagcagccatgtctgagcagaatgttaacataatttttggaaaaattttctttaaaccatctggtttttaagaaatttggtaccaaaaattgatgagtagaggcaaaaatgccccttcatctttctctatatattttccagttgaaaacaaactaagaagtcctttaagaatttataatccgttccccattaacttaatttagcttttccatcactgttaatgatcagagtaacaaagtgtgaaaaataagaaaccatcattgatgttaattaacacatttagatgggccagttaaaacagcttcataagttttaaattaattgtaaatggaatattcctcatttaaaatttttgcactgcattttctactgtaaaccaaaagaggttactaagcaaaaccacctaaatttaagttggtgatttaaatgaatctcacattaaaagaaagcttgacagtgttatgaaagccaccagactcagccagtgtgtccccatgggtatccccagccatccttgctcaatccattacttatatactaactacataatgacctgttcaaaccagactctatttaatgaactgtgaatttacacagaggccattttaaatgggtcaccccatttaggattagtggatctcaaattattaaccaaacatcactccatttcaaagtaaaatattccaccagcgatttgatttattggctcttccattgccactgagcaatgcccaggaagcaggcacattgccaaggactgggggcatcttgactaggaagctcctcgtttgtgtgagcgtgggtcagaccgccaaagtaggacttcatcgtttacctacctattatcaatatggtgcttgaatatattcctataactgtagaacagtgtggaaagtgatggtaactttgaagttgttcatgttttattggctttgttttaattgacactagtagagttttaatggtctttgtgtaaattttaatggcttttccattgtttttgcttctcttaaaaagtttaagaagaatatgacctcattaaatgtgctgttttatttggaccagtcacacaaaatgtctctctagagttgactttaaagttgtttacagaaatttaaactcaattccagagattgaagttgtccaaacagctcatgggcttagtgtccaaacccctgcccagccttccctttccaagttggtgccacctccaggtagccattggtggttttcctattactgatgtggctgtggaatgataaggtcctagaggggccctggcatttcaggaagcggacctggtattccctgacaaacattgcttaggaaagagggccggagaataagaagccagcacctcatcagtcagccctgcaatgtgagacttccgtagctgttgagagtcactgcaggtgttctttcatcccgtctgattttaacccatggttgagacgttccaagttagatctgctgctcttaggtgtggggctgtccacattagggaacttgcctcaaaaacagtccacagtggcaataccggacttctgttcaagctttttaaagtgctgagccttacaaaccccgtctctacaaaaaatacaaaaattagccgggtgggacacgcctgtaatcccagctactcaagaggctgaggcaggagaatagcttgaacccgggaggcagaggttgcagtgagccgagatcacaccactgcactccagcctgggtgacagagcgaggctccgtctcaaaaaaaaaaaaaaaaaaaattgttttagcgctgggtttcccaaggtgggagagacagacccagcctggagctggcccctggcctgtgtgctgacttcttggggtcctcaaaccactgtatttttctgttgagcctgtacttggggagagatcagtagcatttgaggaagtaagagaaaagaatcatggtacctcagggtttctttccctttactcgctggcagccattgtctgtgggcacctcatgtttttccacactctactgggccgtggaggtaacgatcacccaggccagtctcctctgcctgggatgcgccctctgagaggaggcctagcagggcaggctccctctgggcatccctggatgcagcctctggacacatgcctcctttaaagtgtccgggtgcagctcaggttgagtggaggtagaaggagaaacagacatgtttaccacgcgttttccaaagctcctgatctttcccaagattgtaactgaaaactgctgtctcttgttttgttcgttttgggggtggtggtgctggctgggccatgcttgtgaagtgatgtgtgtctctgatttaacggattcactgttttctctgctaattgagagagcgttatttacattatttatttgttttgacacaagtgctttcagtgttttatcctagctaatggcttcttaaaggtaataaaacccttccaacgtaattggtcagataaaactttttttcttgtatgcttaaataaagcaattagtgaagcacttctatccaaaatgacttttttgtccttttttaaaaccaatttactgttactggaaactttttgtacaataaagcaatcacgcagattaaagaa

SEQ ID NO: 358378 - DNA, 1028 bp, Homo sapiens
ataggaatagtttaattttggtcataaaaaagtcaacaaagtggttgggcataggtggctctatgccctgttatccccagcactttggggaggccaaagaggaaagattgcttgcctcccggagttcgagaccaacctgggcaaaacaatggaaccccggctctaccaaaaaaaaaaaaaaaaaaaattgttttagcgctgggtttcccaaggtgggagagacagacccagcctggagctggcccctggcctgtgtgctgacttcttggggtcctcaaaccactgtatttttctgttgagcctgtacttggggagagatcagtagcatttgaggaagtaagagaaaagaatcatggtacctcagggtttctttccctttactcgctggcagccattgtctgtgggcacctcatgtttttccacactctactgggccgtggaggtaacgatcacccaggccagtctcctctgcctgggatgcgccctctgagaggaggcctagcagggcaggctccctctgggcatccctggatgcagcctctggacacatgcctcctttaaagtgtccgggtgcagctcaggttgagtggaggtagaaggagaaacagacatgtttaccacgcgttttccaaagctcctgatctttcccaagattgtaactgaaaactgctgtctcttgttttgttcgttttgggggtggtggtgctggctgggccatgcttgtgaagtgatgtgtgtctctgatttaacggattcactgttttctctgctaattgagagagcgttatttacattatttatttgttttgacacaagtgctttcagtgttttatcctagctaatggcttcttaaaggtaataaaacccttccaacgtaattggtcagataaaactttttttcttgtatgcttaaataaagcaattagtgaagcacttctatccaaaatgacttttttgtccttttttaaaaccaatttactgttactggaaactttttgtacaataaagcaatcacgcagattaaagaa

SEQ ID NO: 358379 - DNA, 779 bp, Homo sapiens
gagtatctgtgtgcaggtgtgtgcgtgtgtgtgctgtgcgtttgtgtgtgtcctgtacttggggagagatcagtagcatttgaggaagtaagagaaaagaatcatggtacctcagggtttctttccctttactcgctggcagccattgtctgtgggcacctcatgtttttccacactctactgggccgtggaggtaacgatcacccaggccagtctcctctgcctgggatgcgccctctgagaggaggcctagcagggcaggctccctctgggcatccctggatgcagcctctggacacatgcctcctttaaagtgtccgggtgcagctcaggttgagtggaggtagaaggagaaacagacatgtttaccacgcgttttccaaagctcctgatctttcccaagattgtaactgaaaactgctgtctcttgttttgttcgttttgggggtggtggtgctggctgggccatgcttgtgaagtgatgtgtgtctctgatttaacggattcactgttttctctgctaattgagagagcgttatttacattatttatttgttttgacacaagtgctttcagtgttttatcctagctaatggcttcttaaaggtaataaaacccttccaacgtaattggtcagataaaactttttttcttgtatgcttaaataaagcaattagtgaagcacttctatccaaaatgacttttttgtccttttttaaaaccaatttactgttactggaaactttttgtacaataaagcaatcacgcagattaaagaa

SEQ ID NO: 358380 - DNA, 649 bp, Homo sapiens
gatcttctgtgcagtgtcagtggattgatacagttgacttgtatattcatcaggttgttttgcagcaggtggaagaacagccgtactgtttcttcctttccaaaggccacagggagaccttgtaatctgctttccagagcctttgggaaagtggtcaacacgctgccttcttaggaagagcccagagaaacagagggctatcccgggggttttgtttatctgcccttgtggagttggcagacgtgggcttctgtcttccctgctatggcctcagagctttagatcctgctggtttagggaatttgaatctttcctgttagggaaaaatgagtgcttactgtgctttgtagaaatattttcagaattcattttctttaaattattttcattgtctttaaattatatctaaacaagtataccatagctttcctgagagggaaaacaatctatccaacacattgtgcactgtcttgctagggttttacagaggaccagttagttctggtggagcagaacacactgatggtggaagagcgggaacgagagattcgccagattgtacagtccatttctgacctgaatgaaatattcagggacttaggggcgatgattgtagaacaggtacgtgagctggccttcctcgtgaata

SEQ ID NO: 358381 - DNA, 3981 bp, Homo sapiens
cacgtagcattgctgcggagctggacgagcttgctgatgaccgtatggcactggtgtcaggcatcagcttagatccagaagcagcgattggtgtgacaaaacggccacctcctaagtgggtggatggagtggatgaaattcagtatgatgttggccggattaagcagaagatgaaagaattggccagccttcatgacaagcatttaaacagacccaccctggatgacagcagcgaagaggaacatgccattgagataactacccaagagatcactcagctcttccacaggtgccagcgtgccgtgcaggccctgccgagccgggcccgggcctgctccgagcaggaggggcggctgcttgggaacgtggtggcctcgctggcgcaggccctgcaggaactctccaccagcttccggcacgcacaatcaggctacctcaaacgcatgaagaatcgagaggaaagatcccagcattttttcgacacatcagtaccactaatggatgatggagacgataacactctttaccatcggggttttacagaggaccagttagttctggtggagcagaacacactgatggtggaagagcgggaacgagagattcgccagattgtacagtccatttctgacctgaatgaaatattcagggacttaggggcgatgattgtagaacagggtacagtccttgacagaattgactataacgttgaacagtcctgtatcaaaactgaagatggtttgaaacagcttcacaaggcagaacagtatcaaaagaagaatcggaagatgcttgtgattttaatattatttgtcatcatcattgtgctcattgttgtcctcgttggcgtgaagtctcgataagtggcattgggttttcgtgtgtgccgcgcgtgtggatctcccgggtgtgaggggcttggcctgcgccccgccagctgcccgcagaggtgcagcctcgaggaatctgagggcgtcggggcagcgaacctttgcatccacggactcctccttccctagtcctgctcaagcggtccggggaatgggtttttgtttttccttcattgttgagaatttaaggacctttgatactgctgcacaatagagattgagttctgggatcagttataatatatattttttttagaaagagaaaatgagctgagagtttacaggcactgcagaagctgttcagtattatatgtgtatatgctatttttttagcagccatgtctgagcagaatgttaacataatttttggaaaaattttctttaaaccatctggtttttaagaaatttggtaccaaaaattgatgagtagaggcaaaaatgccccttcatctttctctatatattttccagttgaaaacaaactaagaagtcctttaagaatttataatccgttccccattaacttaatttagcttttccatcactgttaatgatcagagtaacaaagtgtgaaaaataagaaaccatcattgatgttaattaacacatttagatgggccagttaaaacagcttcataagttttaaattaattgtaaatggaatattcctcatttaaaatttttgcactgcattttctactgtaaaccaaaagaggttactaagcaaaaccacctaaatttaagttggtgatttaaatgaatctcacattaaaagaaagcttgacagtgttatgaaagccaccagactcagccagtgtgtccccatgggtatccccagccatccttgctcaatccattacttatatactaactacataatgacctgttcaaaccagactctatttaatgaactgtgaatttacacagaggccattttaaatgggtcaccccatttaggattagtggatctcaaattattaaccaaacatcactccatttcaaagtaaaatattccaccagcgatttgatttattggctcttccattgccactgagcaatgcccaggaagcaggcacattgccaaggactgggggcatcttgactaggaagctcctcgtttgtgtgagcgtgggtcagaccgccaaagtaggacttcatcgtttacctacctattatcaatatggtgcttgaatatattcctataactgtagaacagtgtggaaagtgatggtaactttgaagttgttcatgttttattggctttgttttaattgacactagtagagttttaatggtctttgtgtaaattttaatggcttttccattgtttttgcttctcttaaaaagtttaagaagaatatgacctcattaaatgtgctgttttatttggaccagtcacacaaaatgtctctctagagttgactttaaagttgtttacagaaatttaaactcaattccagagattgaagttgtccaaacagctcatgggcttagtgtccaaacccctgcccagccttccctttccaagttggtgccacctccaggtagccattggtggttttcctattactgatgtggctgtggaatgataaggtcctagaggggccctggcatttcaggaagcggacctggtattccctgacaaacattgcttaggaaagagggccggagaataagaagccagcacctcatcagtcagccctgcaatgtgagacttccgtagctgttgagagtcactgcaggtgttctttcatcccgtctgattttaacccatggttgagacgttccaagttagatctgctgctcttaggtgtggggctgtccacattagggaacttgcctcaaaaacagtccacagtggcaataccggacttctgttcaagctttttaaagtgctgagccttacaaacccctgaaggaaggtgaccctttaagagaggatcatctttttttatatttattttcaccaaatagggtgatgagggttggtttttgttccctcaacccatttgggtaaaataacggatctaattagaaactgttttaaggaggggctgggctcggtggctcacgcctgtaatcccagactttgagaggccaaggcggtcacgaggtcaggagttcgagaccagcctagccaacatggtgaaaccccgtctctacaaaaaatacaaaaattagccgggtgggacacgcctgtaatcccagctactcaagaggctgaggcaggagaatagcttgaacccgggaggcagaggttgcagtgagccgagatcacaccactgcactccagcctgggtgacagagcgaggctccgtctcaaaaaaaaaaaaaaaaaaaattgttttagcgctgggtttcccaaggtgggagagacagacccagcctggagctggcccctggcctgtgtgctgacttcttggggtcctcaaaccactgtatttttctgttgagcctgtacttggggagagatcagtagcatttgaggaagtaagagaaaagaatcatggtacctcagggtttctttccctttactcgctggcagccattgtctgtgggcacctcatgtttttccacactctactgggccgtggaggtaacgatcacccaggccagtctcctctgcctgggatgcgccctctgagaggaggcctagcagggcaggctccctctgggcatccctggatgcagcctctggacacatgcctcctttaaagtgtccgggtgcagctcaggttgagtggaggtagaaggagaaacagacatgtttaccacgcgttttccaaagctcctgatctttcccaagattgtaactgaaaactgctgtctcttgttttgttcgttttgggggtggtggtgctggctgggccatgcttgtgaagtgatgtgtgtctctgatttaacggattcactgttttctctgctaattgagagagcgttatttacattatttatttgttttgacacaagtgctttcagtgttttatcctagctaatggcttcttaaaggtaataaaacccttccaacgtaattggtcagataaaactttttttcttgtatgcttaaataaagcaattagtgaagcacttc

SEQ ID NO: 358382 - DNA, 4103 bp, Homo sapiens
gacgctttcttgttgttgcggaataattccatccaaaaccggcagctgttagccgagcaacttgctgatgaccgtatggcactggtgtcaggcatcagcttagatccagaagcagcgattggtgtgacaaaacggccacctcctaagtgggtggatggagtggatgaaattcagtatgatgttggccggattaagcagaagatgaaagaattggccagccttcatgacaagcatttaaacagacccaccctggatgacagcagcgaagaggaacatgccattgagataactacccaagagatcactcagctcttccacaggtgccagcgtgccgtgcaggccctgccgagccgggcccgggcctgctccgagcaggaggggcggctgcttgggaacgtggtggcctcgctggcgcaggccctgcaggaactctccaccagcttccggcacgcacaatcaggctacctcaaacgcatgaagaatcgagaggaaagatcccagcattttttcgacacatcagtaccactaatggatgatggagacgataacactctttaccatcggggttttacagaggaccagttagttctggtggagcagaacacactgatggtggaagagcgggaacgagagattcgccagattgtacagtccatttctgacctgaatgaaatattcagggacttaggggcgatgattgtagaacagggtacagtccttgacagaattgactataacgttgaacagtcctgtatcaaaactgaagatggtttgaaacagcttcacaaggcagaacagtatcaaaagaagaatcggaagatgcttgtgattttaatattatttgtcatcatcattgtgctcattgttgtcctcgttggcgtgaagtctcgataagtggcattgggttttcgtgtgtgccgcgcgtgtggatctcccgggtgtgaggggcttggcctgcgccccgccagctgcccgcagaggtgcagcctcgaggaatctgagggcgtcggggcagcgaacctttgcatccacggactcctccttccctagtcctgctcaagcggtccggggaatgggtttttgtttttccttcattgttgagaatttaaggacctttgatactgctgcacaatagagattgagttctgggatcagttataatatatattttttttagaaagagaaaatgagctgagagtttacaggcactgcagaagctgttcagtattatatgtgtatatgctatttttttagcagccatgtctgagcagaatgttaacataatttttggaaaaattttctttaaaccatctggtttttaagaaatttggtaccaaaaattgatgagtagaggcaaaaatgccccttcatctttctctatatattttccagttgaaaacaaactaagaagtcctttaagaatttataatccgttccccattaacttaatttagcttttccatcactgttaatgatcagagtaacaaagtgtgaaaaataagaaaccatcattgatgttaattaacacatttagatgggccagttaaaacagcttcataagttttaaattaattgtaaatggaatattcctcatttaaaatttttgcactgcattttctactgtaaaccaaaagaggttactaagcaaaaccacctaaatttaagttggtgatttaaatgaatctcacattaaaagaaagcttgacagtgttatgaaagccaccagactcagccagtgtgtccccatgggtatccccagccatccttgctcaatccattacttatatactaactacataatgacctgttcaaaccagactctatttaatgaactgtgaatttacacagaggccattttaaatgggtcaccccatttaggattagtggatctcaaattattaaccaaacatcactccatttcaaagtaaaatattccaccagcgatttgatttattggctcttccattgccactgagcaatgcccaggaagcaggcacattgccaaggactgggggcatcttgactaggaagctcctcgtttgtgtgagcgtgggtcagaccgccaaagtaggacttcatcgtttacctacctattatcaatatggtgcttgaatatattcctataactgtagaacagtgtggaaagtgatggtaactttgaagttgttcatgttttattggctttgttttaattgacactagtagagttttaatggtctttgtgtaaattttaatggcttttccattgtttttgcttctcttaaaaagtttaagaagaatatgacctcattaaatgtgctgttttatttggaccagtcacacaaaatgtctctctagagttgactttaaagttgtttacagaaatttaaactcaattccagagattgaagttgtccaaacagctcatgggcttagtgtccaaacccctgcccagccttccctttccaagttggtgccacctccaggtagccattggtggttttcctattactgatgtggctgtggaatgataaggtcctagaggggccctggcatttcaggaagcggacctggtattccctgacaaacattgcttaggaaagagggccggagaataagaagccagcacctcatcagtcagccctgcaatgtgagacttccgtagctgttgagagtcactgcaggtgttctttcatcccgtctgattttaacccatggttgagacgttccaagttagatctgctgctcttaggtgtggggctgtccacattagggaacttgcctcaaaaacagtccacagtggcaataccggacttctgttcaagctttttaaagtgctgagccttacaaacccctgaaggaaggtgaccctttaagagaggatcatctttttttatatttattttcaccaaatagggtgatgagggttggtttttgttccctcaacccatttgggtaaaataacggatctaattagaaactgttttaaggaggggctgggctcggtggctcacgcctgtaatcccagactttgagaggccaaggcggtcacgaggtcaggagttcgagaccagcctagccaacatggtgaaaccccgtctctacaaaaaatacaaaaattagccgggtgggacacgcctgtaatcccagctactcaagaggctgaggcaggagaatagcttgaacccgggaggcagaggttgcagtgagccgagatcacaccactgcactccagcctgggtgacagagcgaggctccgtctcaaaaaaaaaaaaaaaaaaaattgttttagcgctgggtttcccaaggtgggagagacagacccagcctggagctggcccctggcctgtgtgctgacttcttggggtcctcaaaccactgtatttttctgttgagcctgtacttggggagagatcagtagcatttgaggaagtaagagaaaagaatcatggtacctcagggtttctttccctttactcgctggcagccattgtctgtgggcacctcatgtttttccacactctactgggccgtggaggtaacgatcacccaggccagtctcctctgcctgggatgcgccctctgagaggaggcctagcagggcaggctccctctgggcatccctggatgcagcctctggacacatgcctcctttaaagtgtccgggtgcagctcaggttgagtggaggtagaaggagaaacagacatgtttaccacgcgttttccaaagctcctgatctttcccaagattgtaactgaaaactgctgtctcttgttttgttcgttttgggggtggtggtgctggctgggccatgcttgtgaagtgatgtgtgtctctgatttaacggattcactgttttctctgctaattgagagagcgttatttacattatttatttgttttgacacaagtgctttcagtgttttatcctagctaatggcttcttaaaggtaataaaacccttccaacgtaattggtcagataaaactttttttcttgtatgcttaaataaagcaattagtgaagcacttctatccaaaatgacttttttgtccttttttaaaaccaatttactgttactggaaactttttgtacaataaagcaatcacgcagattaaagaa

SEQ ID NO: 358383 - DNA, 3909 bp, Homo sapiens
cacgtagcattgctgcggagctggacgagcttgctgatgaccgtatggcactggtgtcaggcatcagcttagatccagaagcagcgattggtgtgacaaaacggccacctcctaagtgggtggatggagtggatgaaattcagtatgatgttggccggattaagcagaagatgaaagaattggccagccttcatgacaagcatttaaacagacccaccctggatgacagcagcgaagaggaacatgccattgagataactacccaagagatcactcaggcatgaagaatcgagaggaaagatcccagcattttttcgacacatcagtaccactaatggatgatggagacgataacactctttaccatcggggttttacagaggaccagttagttctggtggagcagaacacactgatggtggaagagcgggaacgagagattcgccagattgtacagtccatttctgacctgaatgaaatattcagggacttaggggcgatgattgtagaacagggtacagtccttgacagaattgactataacgttgaacagtcctgtatcaaaactgaagatggtttgaaacagcttcacaaggcagaacagtatcaaaagaagaatcggaagatgcttgtgattttaatattatttgtcatcatcattgtgctcattgttgtcctcgttggcgtgaagtctcgataagtggcattgggttttcgtgtgtgccgcgcgtgtggatctcccgggtgtgaggggcttggcctgcgccccgccagctgcccgcagaggtgcagcctcgaggaatctgagggcgtcggggcagcgaacctttgcatccacggactcctccttccctagtcctgctcaagcggtccggggaatgggtttttgtttttccttcattgttgagaatttaaggacctttgatactgctgcacaatagagattgagttctgggatcagttataatatatattttttttagaaagagaaaatgagctgagagtttacaggcactgcagaagctgttcagtattatatgtgtatatgctatttttttagcagccatgtctgagcagaatgttaacataatttttggaaaaattttctttaaaccatctggtttttaagaaatttggtaccaaaaattgatgagtagaggcaaaaatgccccttcatctttctctatatattttccagttgaaaacaaactaagaagtcctttaagaatttataatccgttccccattaacttaatttagcttttccatcactgttaatgatcagagtaacaaagtgtgaaaaataagaaaccatcattgatgttaattaacacatttagatgggccagttaaaacagcttcataagttttaaattaattgtaaatggaatattcctcatttaaaatttttgcactgcattttctactgtaaaccaaaagaggttactaagcaaaaccacctaaatttaagttggtgatttaaatgaatctcacattaaaagaaagcttgacagtgttatgaaagccaccagactcagccagtgtgtccccatgggtatccccagccatccttgctcaatccattacttatatactaactacataatgacctgttcaaaccagactctatttaatgaactgtgaatttacacagaggccattttaaatgggtcaccccatttaggattagtggatctcaaattattaaccaaacatcactccatttcaaagtaaaatattccaccagcgatttgatttattggctcttccattgccactgagcaatgcccaggaagcaggcacattgccaaggactgggggcatcttgactaggaagctcctcgtttgtgtgagcgtgggtcagaccgccaaagtaggacttcatcgtttacctacctattatcaatatggtgcttgaatatattcctataactgtagaacagtgtggaaagtgatggtaactttgaagttgttcatgttttattggctttgttttaattgacactagtagagttttaatggtctttgtgtaaattttaatggcttttccattgtttttgcttctcttaaaaagtttaagaagaatatgacctcattaaatgtgctgttttatttggaccagtcacacaaaatgtctctctagagttgactttaaagttgtttacagaaatttaaactcaattccagagattgaagttgtccaaacagctcatgggcttagtgtccaaacccctgcccagccttccctttccaagttggtgccacctccaggtagccattggtggttttcctattactgatgtggctgtggaatgataaggtcctagaggggccctggcatttcaggaagcggacctggtattccctgacaaacattgcttaggaaagagggccggagaataagaagccagcacctcatcagtcagccctgcaatgtgagacttccgtagctgttgagagtcactgcaggtgttctttcatcccgtctgattttaacccatggttgagacgttccaagttagatctgctgctcttaggtgtggggctgtccacattagggaacttgcctcaaaaacagtccacagtggcaataccggacttctgttcaagctttttaaagtgctgagccttacaaacccctgaaggaaggtgaccctttaagagaggatcatctttttttatatttattttcaccaaatagggtgatgagggttggtttttgttccctcaacccatttgggtaaaataacggatctaattagaaactgttttaaggaggggctgggctcggtggctcacgcctgtaatcccagactttgagaggccaaggcggtcacgaggtcaggagttcgagaccagcctagccaacatggtgaaaccccgtctctacaaaaaatacaaaaattagccgggtgggacacgcctgtaatcccagctactcaagaggctgaggcaggagaatagcttgaacccgggaggcagaggttgcagtgagccgagatcacaccactgcactccagcctgggtgacagagcgaggctccgtctcaaaaaaaaaaaaaaaaaaaattgttttagcgctgggtttcccaaggtgggagagacagacccagcctggagctggcccctggcctgtgtgctgacttcttggggtcctcaaaccactgtatttttctgttgagcctgtacttggggagagatcagtagcatttgaggaagtaagagaaaagaatcatggtacctcagggtttctttccctttactcgctggcagccattgtctgtgggcacctcatgtttttccacactctactgggccgtggaggtaacgatcacccaggccagtctcctctgcctgggatgcgccctctgagaggaggcctagcagggcaggctccctctgggcatccctggatgcagcctctggacacatgcctcctttaaagtgtccgggtgcagctcaggttgagtggaggtagaaggagaaacagacatgtttaccacgcgttttccaaagctcctgatctttcccaagattgtaactgaaaactgctgtctcttgttttgttcgttttgggggtggtggtgctggctgggccatgcttgtgaagtgatgtgtgtctctgatttaacggattcactgttttctctgctaattgagagagcgttatttacattatttatttgttttgacacaagtgctttcagtgttttatcctagctaatggcttcttaaaggtaataaaacccttccaacgtaattggtcagataaaactttttttcttgtatgcttaaataaagcaattagtgaagcacttctatccaaaatgacttttttgtccttttttaaaaccaatttactgttactggaaactttttgtacaataaagcaatcacgcagattaaagaa

SEQ ID NO: 358384 - DNA, 3138 bp, Homo sapiens
gacgctttcttgttgttgcggaataattccatccaaaaccggcagctgttagccgagcaacttgctgatgaccgtatggcactggtgtcaggcatcagcttagatccagaagcagcgattggtgtgacaaaacggccacctcctaagtgggtggatggagtggatgaaattcagtatgatgttggccggattaagcagaagatgaaagaattggccagccttcatgacaagcatttaaacagacccaccctggatgacagcagcgaagaggaacatgccattgagataactacccaagagatcactcagctcttccacaggtgccagcgtgccgtgcaggccctgccgagccgggcccgggcctgctccgagcaggaggggcggctgcttgggaacgtggtggcctcgctggcgcaggccctgcaggaactctccaccagcttccggcacgcacaatcaggctacctcaaacgcatgaagaatcgagaggaaagatcccagcattttttcgacacatcagtaccactaatggatgatggagacgataacactctttaccatcggggttttacagaggaccagttagttctggtggagcagaacacactgatggtggaagagcgggaacgagagattcgccagattgtacagtccatttctgacctgaatgaaatattcagggacttaggggcgatgattgtagaacagggtacagtccttgacagaattgactataacgttgaacagtcctgtatcaaaactgaagatggtttgaaacagcttcacaaggcagaacagtatcaaaagaagaatcggaagatgcttgtgattttaatattatttgtcatcatcattgtgctcattgttgtcctcgttggcgtgaagtctcgataagtggcattgggttttcgtgtgtgccgcgcgtgtggatctcccgggtgtgaggggcttggcctgcgccccgccagctgcccgcagaggtgcagcctcgaggaatctgagggcgtcggggcagcgaacctttgcatccacggactcctccttccctagtcctgctcaagcggtccggggaatgggtttttgtttttccttcattgttgagaatttaaggacctttgatactgctgcacaatagagattgagttctgggatcagttataatatatattttttttagaaagagaaaatgagctgagagtttacaggcactgcagaagctgttcagtattatatgtgtatatgctatttttttagcagccatgtctgagcagaatgttaacataatttttggaaaaattttctttaaaccatctggtttttaagaaatttggtaccaaaaattgatgagtagaggcaaaaatgccccttcatctttctctatatattttccagttgaaaacaaactaagaagtcctttaagaatttataatccgttccccattaacttaatttagcttttccatcactgttaatgatcagagtaacaaagtgtgaaaaataagaaaccatcattgatgttaattaacacatttagatgggccagttaaaacagcttcataagttttaaattaattgtaaatggaatattcctcatttaaaatttttgcactgcattttctactgtaaaccaaaagaggttactaagcaaaaccacctaaatttaagttggtgatttaaatgaatctcacattaaaagaaagcttgacagtgttatgaaagccaccagactcagccagtgtgtccccatgggtatccccagccatccttgctcaatccattacttatatactaactacataatgacctgttcaaaccagactctatttaatgaactgtgaatttacacagaggccattttaaatgggtcaccccatttaggattagtggatctcaaattattaaccaaacatcactccatttcaaagtaaaatattccaccagcgatttgatttattggctcttccattgccactgagcaatgcccaggaagcaggcacattgccaaggactgggggcatcttgactaggaagctcctcgtttgtgtgagcgtgggtcagaccgccaaagtaggacttcatcgtttacctacctattatcaatatggtgcttgaatatattcctataactgtagaacagtgtggaaagtgatggtaactttgaagttgttcatgttttattggctttgttttaattgacactagtagagttttaatggtctttgtgtaaattttaatggcttttccattgtttttgcttctcttaaaaagtttaagaagaatatgacctcattaaatgtgctgttttatttggaccagtcacacaaaatgtctctctagagttgactttaaagttgtttacagaaatttaaactcaattccagagattgaagttgtccaaacagctcatgggcttagtgtccaaacccctgcccagccttccctttccaagttggtgccacctccaggtagccattggtggttttcctattactgatgtggctgtggaatgataaggtcctagaggggccctggcatttcaggaagcggacctggtattccctgacaaacattgcttaggaaagagggccggagaataagaagccagcacctcatcagtcagccctgcaatgtgagacttccgtagctgttgagagtcactgcaggtgttctttcatcccgtctgattttaacccatggttgagacgttccaagttagatctgctgctcttaggtgtggggctgtccacattagggaacttgcctcaaaaacagtccacagtggcaataccggacttctgttcaagctttttaaagtgctgagccttacaaacccctgaaggaaggtgaccctttaagagaggatcatctttttttatatttattttcaccaaatagggtgatgagggttggtttttgttccctcaacccatttgggtaaaataacggatctaattagaaactgttttaaggaggggctgggctcggtggctcacgcctgtaatcccagactttgagaggccaaggctggtctcaaactcccgatctcaggtgatccccctgcctcagcctcccaaagtgctgggattacaggcgtgagccaccgtgccctgccaatatttgtctttttagtagagatgg

SEQ ID NO: 358385 - DNA, 347 bp, Homo sapiens
acaaagtatgatctgctttagaagtcctgcttctggctgcctcccaatcttttgtttgtatgtttcaatcaagacatctgctgtctagtgttatttcagataataatcttaatattaagaaatgattcagaatatccagccataccaaagcaaaaaggcagcatacaatctcttaagagaagacataattaagttaaggaaaacagagagttgccattttttaagagtgaatatgcatgtccaaattacttcaattagcataaccacatctttccagaacagttggctaatatcatggccttcctcattaggattcaacttcacaattgtgaataacaactacaaag

SEQ ID NO: 358386 - DNA, 2007 bp, Homo sapiens
ggacccagaggcggggcgtcggcccggggaccactgctcctccggggcgtggctgcaggaggctggaggagccccgcgggacccagaggcggggcgtcggccggggaccgctgctcctccggggcgtggctgctgccgagcatctcccagctcagccgagcccgtgcccaggccacgctttgttccagccgccgcctcctctaccctacggcgtccggagccatccctcgcctgctcgctctctcctttcgcccactccctgcatctgggcctgcatcacctttgccaaccgctcccccgatcctgccgacactcctcccccaaacttctgaccggcacccttgcctggtacccttctctccattcctccccctccatcttctttccccgacccctctcgggtccctcttttcccaaaacccgggtctctccgcgtggccccgcctccaggccggggatgtcccccgcggccccgcgcccatggtcctgacgctgcttctctccgcctacaagctgtgtcgcttcttcgccatgtcgggcccacggccgggcgccgagcggctggcggtgcctgggccagatgggggcggtggcacgggcccatggtgggctgcgggtggcccgggcccgcgaaagtgtcgccgggggcaggcaccgaggtgcaggacgccctggagcgcgcgctgccggagctgcagcaggccttgtccgcgctgaagcaggcgggcggcgcgcgggccgtgggcgccggcctggccgaggtcttccaactggtggaggaggcctggctgctgcggccgtgggccgcgaggtagcccagggtctgtgcgacgccatccgcctcgatggcggcctcgacctgctgttgcggctgctgcaggcgccggagttggagacgcgtgtgcaggccgcgcgcctgctggagcagatcctggtggctgagaaccggtgagcgcgccaggccggggttgggagagcgccgcgtggtgtggacagttaagcgcctgcgttcccgtgtgccttgcgccgtgcctttgcctccctcacctctctgactgcctgcactacatctctgttaggggtcagcctgtctgtttcacagataaggaaactgagccttgggaaagtttagtgacttgctcagtggatcacagtgaactaagatttgctcccagggctagtggggtgaggaatggagttacaggacaggagtccgtccctggctctatggatggagatggcatcctattgccaattctccctctcccccgccccccaagcccacagctctccttcccaccggcttgggttcccgtctatgacaccttctctcgccatcatcccatccctctcccaatgagagaagaagggaaacacaacgctcagaaaagagggagggagacctctcctttccctcctccccaggctgtaaggcgtgctggcctgaggctgcttactcccttcttgccgccccaatccaacttctgctccatccttcattctggttcttgcaacaggccagacatgatctcattctgcagctgctgatgggaaacagttttctgctgggaggcatgggtgggggaagaggacaccggggtgcagagcccggcggggaccaggcagagtgtgtgttctctcccttcaccccacttagcaccaagatgccgcaagagggtcaaacagaggcctggttgccactcttgcatgtctcttgggatctctcctggagtatgaagacctccaaggactcactttccctcccttctgatgccagagcagaccaagctgtcacactccagtctcatgctgaagtctccagcttctcaagcttagaagagtttttggaagagtcactttcagctcatgcagctctcacaagtgtgaagggagtgggttgggggtgttttccttgccattttcgaaaagaaaaaaattacctggtgattggtggaaagatacaactgtcaaaaatgcatgaatgaagcaatttaggttgggagacca

SEQ ID NO: 358387 - DNA, 651 bp, Homo sapiens
tgaataatagtaataaataatattattaatctcaaaatcctgggctcaagtgatcctcctgcctcagcctcccaaagtgttgggattacaggcgtgacccaccatgcccagctgaattatttaatttcacagttataaaggacacagctcaagaatagccaaatggaagagatacataggatctctacgtatggagggtggaggtgtggatgccatgccttctaccaccttcccagcacctacacctgtttatcaacctggaggctcttcaaaaccccttgtttgggggtttttatggaggttccattatgtaggcatgattgattaaatcattggccattggtgattgaactcaatctccagcacctctctggaggctgggaggtggggctgaaagttccaatcctctagtcatgccctggtctccctggtgaccagccctcttcctgaaactatctaggctacccccatagcaccccccgggcccccagtggggaatcatctctttagcatacaaagacactcatcactcaatgatgggcacaatgttcttgccgcagcttaaagcagtcacaatctcctggagaaagaaaggaaaggaggaagatacccctgtacccatctagggacccttgtagccaggcaggtgct

SEQ ID NO: 358388 - DNA, 5919 bp, Homo sapiens
tgaataatagtaataaataatattattaatctcaaaatcctgggctcaagtgatcctcctgcctcagcctcccaaagtgttgggattacaggcgtgacccaccatgcccagctgaattatttaatttcacagttataaaggacacagctcaagaatagccaaatggaagagatacataggatctctacgtatggagggtggaggtgtggatgccatgccttctaccaccttcccagcacctacacctgtttatcaacctggaggctcttcaaaaccccttgtttgggggtttttatggaggttccattatgtaggcatgattgattaaatcattggccattggtgattgaactcaatctccagcacctctctggaggctgggaggtggggctgaaagttccaatcctctagtcatgccctggtctccctggtgaccagccctcttcctgaaactatctaggctacccccatagcaccccccgggcccccagtggggaatcatctctttagcatacaaagacactcatcactcaagagattccaagggttttagcagctctgtgccaggaactctgggcaaaggaaaaatatttattttttattacactacaagggttaaggtagacatcaaggtggacatcaggactggtgtcctgccctgggcccagcctcgggccagtgggcctcccagcacctgcctggctacaagggtccctagatgggtacaggggtatcttcctcctttcctttctttctccaggagattgtgactgctttaagctgcggcaagaacattgtgcccatcattgatggcttcgagtggcctgagccccaggtcctgcctgaggacatgcaggctgtgcttactttcaacggtatcaagtgagccccagggccctgggaccaggggggtagggtacaaatcaccatgacaggcagagtgtgggcaaacagctgactagcagctccctctgcccagctgtctgaaccacattggctcctgtgcccacaggtggtcccacgaataccaggaggccaccattgagaagatcatccgcttcctgcagggccgctcctcccgggactcatctgcaggctctgacaccagtttggagggtgctgcacccatgggtccaacctaaccagtccccagttccccagccctgctgtgacttccatttccatcgtcctttctgaaggaacagctcctgaaaccagtctccctgggctgagacaacctgggctcttcttaggaaatggctctccctccccctgtcccccaccctcatggcccacctccaacccactttcctcagtatctggagagggaagggaagtcaggcttgggcacgggaggttagaactcccccaggccctgccattgggttgtctgtctccgtcatggggagggtccctgctcagttctggagacactggagttggggtgggggtggttctgcattcccttctcctgctgatagcagtcagcttgaggaggatgaaggaaggcagcctcagacaggaattaaggcaatgcccaggcgggcctgggcactgtattctgagcaagggcctgggcccaggagccagccagggatgagtgccatcatggctctccactcagactgtgcctggcccctgcacttacaacttcctgccgctctgtggccttgccctgtaatcactcagtgcccttagctagcctgactaagtcccagatcccctacagcttccttcggtgtggtatcttttgccacatccagggcgagggttgaggcaaaccagccctccctctgacttccttgtcactgcagccagctttgctgcacttgctggtgcacaggagcctcctgtttgggcctgggtctgggcatggggaggccgtgcctcaaagcccaccctaccccatgccttggtgctgtgcctcaggctccttcctggtctggcccagctggcttccccagcccctcagccatccagggctacccactgcttactcagggaccaggcagcccccatggcagtaaaagcagcctagacagaacctgcagctctgtggaaagaggcaaagtcctgaaaaggcaaagggttgtcacttagggcagcttctccaactttaacatgcatccaagtcacctgggaatgttgttaaaatcaggagatctggggtggggcctaggactctgcatttcttacagattcccaggtgagctgatgctggtggttaagggtagcaaatctctaaagcacgaagccctcacaaatctttgccatttcccaaacactccgctccatggtctccagtcatcagagcaactctacctggtattatcatccccattttacagataatgacactgaggctcagaaaggttgaggataagcccactttcctgtcattagtggcagccccagatccagacctaggcctcctggcacccagtccactggcagtggaattgctttcctgagaatcattctgaggctgggctattgcttctcccttgcttcaaagaatctagcagcgggggataggattttgcaacaaaaagctgacccagaggccatacagagcaggaatatcccattgccccctcctccactgggttcagagggtaagaaagcaccctccaataaacccaggctccaggccgtgggggctgctgaaggctctttccccgcaagggccaggtgttgacaccttaaagctggctgcgcccccagccccactcttggctgtgctggccaggtgactcctagttcttggccacatcatcagaaagtcaaaggtctcactccaggtttggggctccttccttccactcccctccctgccagagtctgtcttggccagtgccagcctcgatgctttggttttgaccccacctgatcctcctttcctcatgcagcacaagtgctcaccggggccagagccagggcatggatatgacaagcagggcagcctggacactgccctcacaggacagcgccaataacaatacagtgtctgagtatctccaggggatgatttctggctctttgtctccaatcagtcccactccctcctgaggtccccaagggcagtattcagagaggtttcctgcattttatttctatttggtataccctccactgttgtccactgccctgtgtggccttctggttgacctctgcccgatcttctgtctctctgagggaatcagagtccagcatccagccccagctggaacagctgaagtcacaagcctcctctaagccaaggccagtgtgttcagaggtgactgccacccatactaggacaaacacagctcagatcaccaggtcaagcacctaggcctggcttctcctgagacagaggactcagaagtggcctttcctccaaagcctgctcagacacaggtctgtagggccagggtgttctgcttggctgggctgcagctgctacccctcggttggggctgagtcagccagatcctccccctacttctccccaagggccaagaactgctcagggacattaaaggtcaaaagtccagccacactcattcatcctttccccaggcccatgaagagaggcatctcattgtagaatgtatgaggaagtgggaagtatctcagagaatcagctaagtttcctaacttgtccatccaaatgtgatcaccacgattcaacaatttggggcattgctgatctagccgttcctagtggggcttgctcaaggttgcacagcgagtcagtagaagccctggctggccccacttggtaccaatccaccaggcagctcagggctcctgcccagcccagcagcttctgttgtctaacgtatggcaggcagactgggagcaggaaaacagagggccccaaagcccaaggcaccagaaggtttgtttcagtttgctgaagctgatttgtaatgattggcactcttcagccaggggagtgggtaggccatagccaaggatcgattccccaaccacagcaaaggcaacactcttcctccagagatcaccaagcccctcttacctccctccctccttcccaaggctggcactaaccaggtaccacattcattgttaaggaatggctgatgactgctacacgtgttgggaacctggttggggctgtgcagtttgggctggaaggagagatgccagccctcgtgctgcctctggtccctgaagtgtcacctctctcaggacctctcctctggcctgtggggttataagtgatggatagcagaaagggagaactgactcctgtcccaaatagctcctctgccacctgtcctgcagtgggcctgtgtgggttatgattctagatcctagacagaggctgggtcagctgtggatggggtggtgccttggtctctcttgactacctcgtccaaagagagcactgcccttagacaagagttgcttgtcctgctgtgggctgggcttccagctgcagacctccagttgcttggtgttcactttgctcctcttgccctctgtcttctggtccaggcagatcaggggctctggggaaactgctggaactcgaggtgaggatcagccttttccagcatcctgtgagagaccagagagagagtttggatttcatgtggggaaccctcaaggcctgtctggagaagtgacacaggatttactggggtgggctggtccaggtagctctcctgaacctcctccttccccaagctgagaagctgagagctggaggacaatatccagggacatggctctggaaaataactttttttttttaagagacagggtcttgctctgttgtccaggctggagggcagtgacataatcatagctcactgtacccttgaactcctgggctcaagtgatcctcctgcctcagcctccttagtagctgggactaccagtgcataccaccatgcctgggtgattttttaaattttttatacagacaaggtcttgctatgttgcccaggctgatcttgaattcccgggctcaagtggtcctcctgcctcagcctcccacaggatcgggattacaggcaagagcctccacgcccggccatgaaatataattcttaatatcatacaggaaaaagtcagcgggtcaagctagcctgtggcccagccacaactagctgacaaagcttcctggccttccctttaacacagttctgctgccatagttccatctataaaatgggaatggagggaaataggggaactgggagagagaacacagccttgccaagcagcaatgttagcctgatccttcctccacctagctcgccatctcgcccttggaaaatggctcctggaggattaggcagccatctgcaaggagaggggcaacctgggacaagacacccagagggtaaggattccaggaatgaagctgccatttctggttgggaggagaagaggaaacttttaagagaaagggctccattatgagcatgggttcagggccctgcattacccaatcagaacagccgggatgagcaggaggccagctcccaggaggaaggggaaccccttcataaagttcagagtggctgggtagagtgagttgaagatgccggaggccgtcagcatggccaggctattcacacaggccacagcagaaaagagagcacctgtgaagaaataaataccatactctggagtccgaaagggccatattccaactctggcaccaccacctcacagctgtgtgaccgggagtagtcacttaacctatgtctccccttcctcaccagtaaatcctgctacatcatgtactgtgacaaggattcagtaaggtcatatgtggacagtagctggcacagaggggctactaaacaaatggctgctattaaatccacattaaaagtacatgtgatctgacagaacccagcacataaaagaaaaaaaaaagtacatgtgatattgtct

SEQ ID NO: 358389 - DNA, 5390 bp, Homo sapiens
tggggacaaggctgtggcactgacacaggacttacttgcagtctcctgaaggtgcacctgcagctgcatggcttcagtgtcttcattgatgtggagaagctggaagcaggcaagttcgaggacaaactcatccagagtgtcatgggtgcccgcaactttgtgttggtgctatcacctggagcactggacaagtgcatgcaagaccatgactgcaaggattgggtgcataaggagattgtgactgctttaagctgcggcaagaacattgtgcccatcattgatggcttcgagtggcctgagccccaggtcctgcctgaggacatgcaggctgtgcttactttcaacggtatcaagtgagccccagggccctgggaccaggggggtagggtacaaatcaccatgacaggcagagtgtgggcaaacagctgactagcagctccctctgcccagctgtctgaaccacattggctcctgtgcccacaggtggtcccacgaataccaggaggccaccattgagaagatcatccgcttcctgcagggccgctcctcccgggactcatctgcaggctctgacaccagtttggagggtgctgcacccatgggtccaacctaaccagtccccagttccccagccctgctgtgacttccatttccatcgtcctttctgaaggaacagctcctgaaaccagtctccctgggctgagacaacctgggctcttcttaggaaatggctctccctccccctgtcccccaccctcatggcccacctccaacccactttcctcagtatctggagagggaagggaagtcaggcttgggcacgggaggttagaactcccccaggccctgccattgggttgtctgtctccgtcatggggagggtccctgctcagttctggagacactggagttggggtgggggtggttctgcattcccttctcctgctgatagcagtcagcttgaggaggatgaaggaaggcagcctcagacaggaattaaggcaatgcccaggcgggcctgggcactgtattctgagcaagggcctgggcccaggagccagccagggatgagtgccatcatggctctccactcagactgtgcctggcccctgcacttacaacttcctgccgctctgtggccttgccctgtaatcactcagtgcccttagctagcctgactaagtcccagatcccctacagcttccttcggtgtggtatcttttgccacatccagggcgagggttgaggcaaaccagccctccctctgacttccttgtcactgcagccagctttgctgcacttgctggtgcacaggagcctcctgtttgggcctgggtctgggcatggggaggccgtgcctcaaagcccaccctaccccatgccttggtgctgtgcctcaggctccttcctggtctggcccagctggcttccccagcccctcagccatccagggctacccactgcttactcagggaccaggcagcccccatggcagtaaaagcagcctagacagaacctgcagctctgtggaaagaggcaaagtcctgaaaaggcaaagggttgtcacttagggcagcttctccaactttaacatgcatccaagtcacctgggaatgttgttaaaatcaggagatctggggtggggcctaggactctgcatttcttacagattcccaggtgagctgatgctggtggttaagggtagcaaatctctaaagcacgaagccctcacaaatctttgccatttcccaaacactccgctccatggtctccagtcatcagagcaactctacctggtattatcatccccattttacagataatgacactgaggctcagaaaggttgaggataagcccactttcctgtcattagtggcagccccagatccagacctaggcctcctggcacccagtccactggcagtggaattgctttcctgagaatcattctgaggctgggctattgcttctcccttgcttcaaagaatctagcagcgggggataggattttgcaacaaaaagctgacccagaggccatacagagcaggaatatcccattgccccctcctccactgggttcagagggtaagaaagcaccctccaataaacccaggctccaggccgtgggggctgctgaaggctctttccccgcaagggccaggtgttgacaccttaaagctggctgcgcccccagccccactcttggctgtgctggccaggtgactcctagttcttggccacatcatcagaaagtcaaaggtctcactccaggtttggggctccttccttccactcccctccctgccagagtctgtcttggccagtgccagcctcgatgctttggttttgaccccacctgatcctcctttcctcatgcagcacaagtgctcaccggggccagagccagggcatggatatgacaagcagggcagcctggacactgccctcacaggacagcgccaataacaatacagtgtctgagtatctccaggggatgatttctggctctttgtctccaatcagtcccactccctcctgaggtccccaagggcagtattcagagaggtttcctgcattttatttctatttggtataccctccactgttgtccactgccctgtgtggccttctggttgacctctgcccgatcttctgtctctctgagggaatcagagtccagcatccagccccagctggaacagctgaagtcacaagcctcctctaagccaaggccagtgtgttcagaggtgactgccacccatactaggacaaacacagctcagatcaccaggtcaagcacctaggcctggcttctcctgagacagaggactcagaagtggcctttcctccaaagcctgctcagacacaggtctgtagggccagggtgttctgcttggctgggctgcagctgctacccctcggttggggctgagtcagccagatcctccccctacttctccccaagggccaagaactgctcagggacattaaaggtcaaaagtccagccacactcattcatcctttccccaggcccatgaagagaggcatctcattgtagaatgtatgaggaagtgggaagtatctcagagaatcagctaagtttcctaacttgtccatccaaatgtgatcaccacgattcaacaatttggggcattgctgatctagccgttcctagtggggcttgctcaaggttgcacagcgagtcagtagaagccctggctggccccacttggtaccaatccaccaggcagctcagggctcctgcccagcccagcagcttctgttgtctaacgtatggcaggcagactgggagcaggaaaacagagggccccaaagcccaaggcaccagaaggtttgtttcagtttgctgaagctgatttgtaatgattggcactcttcagccaggggagtgggtaggccatagccaaggatcgattccccaaccacagcaaaggcaacactcttcctccagagatcaccaagcccctcttacctccctccctccttcccaaggctggcactaaccaggtaccacattcattgttaaggaatggctgatgactgctacacgtgttgggaacctggttggggctgtgcagtttgggctggaaggagagatgccagccctcgtgctgcctctggtccctgaagtgtcacctctctcaggacctctcctctggcctgtggggttataagtgatggatagcagaaagggagaactgactcctgtcccaaatagctcctctgccacctgtcctgcagtgggcctgtgtgggttatgattctagatcctagacagaggctgggtcagctgtggatggggtggtgccttggtctctcttgactacctcgtccaaagagagcactgcccttagacaagagttgcttgtcctgctgtgggctgggcttccagctgcagacctccagttgcttggtgttcactttgctcctcttgccctctgtcttctggtccaggcagatcaggggctctggggaaactgctggaactcgaggtgaggatcagccttttccagcatcctgtgagagaccagagagagagtttggatttcatgtggggaaccctcaaggcctgtctggagaagtgacacaggatttactggggtgggctggtccaggtagctctcctgaacctcctccttccccaagctgagaagctgagagctggaggacaatatccagggacatggctctggaaaataactttttttttttaagagacagggtcttgctctgttgtccaggctggagggcagtgacataatcatagctcactgtacccttgaactcctgggctcaagtgatcctcctgcctcagcctccttagtagctgggactaccagtgcataccaccatgcctgggtgattttttaaattttttatacagacaaggtcttgctatgttgcccaggctgatcttgaattcccgggctcaagtggtcctcctgcctcagcctcccacaggatcgggattacaggcaagagcctccacgcccggccatgaaatataattcttaatatcatacaggaaaaagtcagcgggtcaagctagcctgtggcccagccacaactagctgacaaagcttcctggccttccctttaacacagttctgctgccatagttccatctataaaatgggaatggagggaaataggggaactgggagagagaacacagccttgccaagcagcaatgttagcctgatccttcctccacctagctcgccatctcgcccttggaaaatggctcctggaggattaggcagccatctgcaaggagaggggcaacctgggacaagacacccagagggtaaggattccaggaatgaagctgccatttctggttgggaggagaagaggaaacttttaagagaaagggctccattatgagcatgggttcagggccctgcattacccaatcagaacagccgggatgagcaggaggccagctcccaggaggaaggggaaccccttcataaagttcagagtggctgggtagagtgagttgaagatgccggaggccgtcagcatggccaggctattcacacaggccacagcagaaaagagagcacctgtgaagaaataaataccatactctggagtccgaaagggccatattccaactctggcaccaccacctcacagctgtgtgaccgggagtagtcacttaacctatgtctccccttcctcaccagtaaatcctgctacatcatgtactgtgacaaggattcagtaaggtcatatgtggacagtagctggcacagaggggctactaaacaaatggctgctattaaatccacattaaaagtacatgtgatctgacagaacccagcacataaaagaaaaaaaaaagtacatgtgatattgtct

SEQ ID NO: 358390 - DNA, 6173 bp, Homo sapiens
ggacccagaggcggggcgtcggcccggggaccactgctcctccggggcgtggctgcaggaggctggaggagccccgcgggacccagaggcggggcgtcggccggggaccgctgctcctccggggcgtggctgctgccgagcatctcccagctcagccgagcccgtgcccaggccacgctttgttccagccgccgcctcctctaccctacggcgtccggagccatccctcgcctgctcgctctctcctttcgcccactccctgcatctgggcctgcatcacctttgccaaccgctcccccgatcctgccgacactcctcccccaaacttctgaccggcacccttgcctggtacccttctctccattcctccccctccatcttctttccccgacccctctcgggtccctcttttcccaaaacccgggtctctccgcgtggccccgcctccaggccggggatgtcccccgcggccccgcgcccatggtcctgacgctgcttctctccgcctacaagctgtgtcgcttcttcgccatgtcgggcccacggccgggcgccgagcggctggcggtgcctgggccagatgggggcggtggcacgggcccatggtgggctgcgggtggcccgggcccgcgaaagtgtcgccgggggcaggcaccgaggtgcaggacgccctggagcgcgcgctgccggagctgcagcaggccttgtccgcgctgaagcaggcgggcggcgcgcgggccgtgggcgccggcctggccgaggtcttccaactggtggaggaggcctggctgctgcggccgtgggccgcgaggtagcccagggtctgtgcgacgccatccgcctcgatggcggcctcgacctgctgttgcggctgctgcaggcgccggagttggagacgcgtgtgcaggccgcgcgcctgctggagcagatcctggtggctgagaaccgagaccgcgtggcgcgcattgggctgggcgtgatcctgaacctggcgaaggaacgcgaacccgtagagctggcgcggagcgtggcaggcatcttggagcacatgttcaagcattcggaggagacatgccagaggctggtggcggccggcggcctggacgcggtgctgtattggtgccgccgcacggaccccgcgctgctgcgccactgcgcgctggcgctgggcaactgcgcgctgcacgggggccaggcggtgcagcgacgcatggtagagaagcgcgcagccgagtggctcttcccgctcgccttctccaaggaggacgagctgcttcggctgcacgcctgcctcgcagtagcggtgttggcgactaacaaggaggtggagcgcgaggtggagcgctcgggcacgctggcgctcgtggagccgcttgtggcctcgctggaccctggccgcttcgcccgctgtctggtggacgccagcgacacaagccagggccgcgggcccgacgacctgcagcgcctcgtgccgttgctcgactctaaccgcttggaggcgcagtgcatcggggctttctacctctgcgccgaggctgccatcaagagcctgcaaggcaagaccaaggtgttcagcgacatcggcgccatccagagcctgaaacgcctggtttcctactctaccaatggcactaagtcggcgctggccaagcgcgcgctgcgcctgctgggcgaggaggtgccacggcccatcctgccctccgtgcccagctggaaggaggccgaggttcagacgtggctgcagcagatcggtttctccaagtactgcgagagcttccgggagcagcaggtggatggcgacctgcttctgcggctcacggaggaggaactccagaccgacctgggcatgaaatcgggcatcacccgcaagaggttctttagggagctcacggagctcaagaccttcgccaactattctacgtgcgaccgcagcaacctggcggactggctgggcagcctggacccgcgcttccgtcagtacacctacggcctggtcagctgcggcctggaccgctccctgctgcaccgcgtgtctgagcagcagctgctggaagactgcggcatccacctgggcgtgcaccgcgcccgcatcctcacggcggccagagaaatgctacactccccgctgccctgtactggtggcaaacccagtggggacactccagatgtcttcatcagctaccgccggaactcaggttcccagctggccagtctcctgaaggtgcacctgcagctgcatggcttcagtgtcttcattgatgtggagaagctggaagcaggcaagttcgaggacaaactcatccagagtgtcatgggtgcccgcaactttgtgttggtgctatcacctggagcactggacaagtgcatgcaagaccatgactgcaaggattgggtgcataaggagattgtgactgctttaagctgcggcaagaacattgtgcccatcattgatggcttcgagtggcctgagccccaggtcctgcctgaggacatgcaggctgtgcttactttcaacggtatcaagtgagccccagggccctgggaccaggggggtagggtacaaatcaccatgacaggcagagtgtgggcaaacagctgactagcagctccctctgcccagctgtctgaaccacattggctcctgtgcccacaggtggtcccacgaataccaggaggccaccattgagaagatcatccgcttcctgcagggccgctcctcccgggactcatctgcaggctctgacaccagtttggagggtgctgcacccatgggtccaacctaaccagtccccagttccccagccctgctgtgacttccatttccatcgtcctttctgaaggaacagctcctgaaaccagtctccctgggctgagacaacctgggctcttcttaggaaatggctctccctccccctgtcccccaccctcatggcccacctccaacccactttcctcagtatctggagagggaagggaagtcaggcttgggcacgggaggttagaactcccccaggccctgccattgggttgtctgtctccgtcatggggagggtccctgctcagttctggagacactggagttggggtgggggtggttctgcattcccttctcctgctgatagcagtcagcttgaggaggatgaaggaaggcagcctcagacaggaattaaggcaatgcccaggcgggcctgggcactgtattctgagcaagggcctgggcccaggagccagccagggatgagtgccatcatggctctccactcagactgtgcctggcccctgcacttacaacttcctgccgctctgtggccttgccctgtaatcactcagtgcccttagctagcctgactaagtcccagatcccctacagcttccttcggtgtggtatcttttgccacatccagggcgagggttgaggcaaaccagccctccctctgacttccttgtcactgcagccagctttgctgcacttgctggtgcacaggagcctcctgtttgggcctgggtctgggcatggggaggccgtgcctcaaagcccaccctaccccatgccttggtgctgtgcctcaggctccttcctggtctggcccagctggcttccccagcccctcagccatccagggctacccactgcttactcagggaccaggcagcccccatggcagtaaaagcagcctagacagaacctgcagctctgtggaaagaggcaaagtcctgaaaaggcaaagggttgtcacttagggcagcttctccaactttaacatgcatccaagtcacctgggaatgttgttaaaatcaggagatctggggtggggcctaggactctgcatttcttacagattcccaggtgagctgatgctggtggttaagggtagcaaatctctaaagcacgaagccctcacaaatctttgccatttcccaaacactccgctccatggtctccagtcatcagagcaactctacctggtattatcatccccattttacagataatgacactgaggctcagaaaggttgaggataagcccactttcctgtcattagtggcagccccagatccagacctaggcctcctggcacccagtccactggcagtggaattgctttcctgagaatcattctgaggctgggctattgcttctcccttgcttcaaagaatctagcagcgggggataggattttgcaacaaaaagctgacccagaggccatacagagcaggaatatcccattgccccctcctccactgggttcagagggtaagaaagcaccctccaataaacccaggctccaggccgtgggggctgctgaaggctctttccccgcaagggccaggtgttgacaccttaaagctggctgcgcccccagccccactcttggctgtgctggccaggtgactcctagttcttggccacatcatcagaaagtcaaaggtctcactccaggtttggggctccttccttccactcccctccctgccagagtctgtcttggccagtgccagcctcgatgctttggttttgaccccacctgatcctcctttcctcatgcagcacaagtgctcaccggggccagagccagggcatggatatgacaagcagggcagcctggacactgccctcacaggacagcgccaataacaatacagtgtctgagtatctccaggggatgatttctggctctttgtctccaatcagtcccactccctcctgaggtccccaagggcagtattcagagaggtttcctgcattttatttctatttggtataccctccactgttgtccactgccctgtgtggccttctggttgacctctgcccgatcttctgtctctctgagggaatcagagtccagcatccagccccagctggaacagctgaagtcacaagcctcctctaagccaaggccagtgtgttcagaggtgactgccacccatactaggacaaacacagctcagatcaccaggtcaagcacctaggcctggcttctcctgagacagaggactcagaagtggcctttcctccaaagcctgctcagacacaggtctgtagggccagggtgttctgcttggctgggctgcagctgctacccctcggttggggctgagtcagccagatcctccccctacttctccccaagggccaagaactgctcagggacattaaaggtcaaaagtccagccacactcattcatcctttccccaggcccatgaagagaggcatctcattgtagaatgtatgaggaagtgggaagtatctcagagaatcagctaagtttcctaacttgtccatccaaatgtgatcaccacgattcaacaatttggggcattgctgatctagccgttcctagtggggcttgctcaaggttgcacagcgagtcagtagaagccctggctggccccacttggtaccaatccaccaggcagctcagggctcctgcccagcccagcagcttctgttgtctaacgtatggcaggcagactgggagcaggaaaacagagggccccaaagcccaaggcaccagaaggtttgtttcagtttgctgaagctgatttgtaatgattggcactcttcagccaggggagtgggtaggccatagccaaggatcgattccccaaccacagcaaaggcaacactcttcctccagagatcaccaagcccctcttacctccctccctccttcccaaggctggcactaaccaggtaccacattcattgttaaggaatggctgatgactgctacacgtgttgggaacctggttggggctgtgcagtttgggctggaaggagagatgccagccctcgtgctgcctctggtccctgaagtgtcacctctctcaggacctctcctctggcctgtggggttataagtgatggatagcagaaagggagaactgactcctgtcccaaatagctcctctgccacctgtcctgcagtgggcctgtgtgggttatgattctagatcctagacagaggctgggtcagctgtggatggggtggtgccttggtctctcttgactacctcgtccaaagagagcactgcccttagacaagagttgcttgtcctgctgtgggctgggcttccagcagcttccccagagccgctgatctgactgtaccagaagacatgcggcaagaggagcaaagtgaacactcagcaactggaggtctgcag

SEQ ID NO: 358391 - DNA, 4554 bp, Homo sapiens
ggacccagaggcggggcgtcggcccggggaccactgctcctccggggcgtggctgcaggaggctggaggagccccgcgggacccagaggcggggcgtcggccggggaccgctgctcctccggggcgtggctgctgccgagcatctcccagctcagccgagcccgtgcccaggccacgctttgttccagccgccgcctcctctaccctacggcgtccggagccatccctcgcctgctcgctctctcctttcgcccactccctgcatctgggcctgcatcacctttgccaaccgctcccccgatcctgccgacactcctcccccaaacttctgaccggcacccttgcctggtacccttctctccattcctccccctccatcttctttccccgacccctctcgggtccctcttttcccaaaacccgggtctctccgcgtggccccgcctccaggccggggatgtcccccgcggccccgcgcccatggtcctgacgctgcttctctccgcctacaagctgtgtcgcttcttcgccatgtcgggcccacggccgggcgccgagcggctggcggtgcctgggccagatgggggcggtggcacgggcccatggtgggctgcgggtggcccgggcccgcgaaagtgtcgccgggggcaggcaccgaggtgcaggacgccctggagcgcgcgctgccggagctgcagcaggccttgtccgcgctgaagcaggcgggcggcgcgcgggccgtgggcgccggcctggccgaggtcttccaactggtggaggaggcctggctgctgcggccgtgggccgcgaggtagcccagggtctgtgcgacgccatccgcctcgatggcggcctcgacctgctgttgcggctgctgcaggcgccggagttggagacgcgtgtgcaggccgcgcgcctgctggagcagatcctggtggctgagaaccgagaccgcgtggcgcgcattgggctgggcgtgatcctgaacctggcgaaggaacgcgaacccgtagagctggcgcggagcgtggcaggcatcttggagcacatgttcaagcattcggaggagacatgccagaggctggtggcggccggcggcctggacgcggtgctgtattggtgccgccgcacggaccccgcgctgctgcgccactgcgcgctggcgctgggcaactgcgcgctgcacgggggccaggcggtgcagcgacgcatggtagagaagcgcgcagccgagtggctcttcccgctcgccttctccaaggaggacgagctgcttcggctgcacgcctgcctcgcagtagcggtgttggcgactaacaaggaggtggagcgcgaggtggagcgctcgggcacgctggcgctcgtggagccgcttgtggcctcgctggaccctggccgcttcgcccgctgtctggtggacgccagcgacacaagccagggccgcgggcccgacgacctgcagcgcctcgtgccgttgctcgactctaaccgcttggaggcgcagtgcatcggggctttctacctctgcgccgaggctgccatcaagagcctgcaaggcaagaccaaggtgttcagcgacatcggcgccatccagagcctgaaacgcctggtttcctactctaccaatggcactaagtcggcgctggccaagcgcgcgctgcgcctgctgggcgaggaggtgccacggcccatcctgccctccgtgcccagctggaaggaggccgaggttcagacgtggctgcagcagatcggtttctccaagtactgcgagagcttccgggagcagcaggtggatggcgacctgcttctgcggctcacggaggaggaactccagaccgacctgggcatgaaatcgggcatcacccgcaagaggttctttagggagctcacggagctcaagaccttcgccaactattctacgtgcgaccgcagcaacctggcggactggctgggcagcctggacccgcgcttccgtcagtacacctacggcctggtcagctgcggcctggaccgctccctgctgcaccgcgtgtctgagcagcagctgctggaagactgcggcatccacctgggcgtgcaccgcgcccgcatcctcacggcggccagagaaatgctacactccccgctgccctgtactggtggcaaacccagtggggacactccagatgtcttcatcagctaccgccggaactcaggttcccagctggccagtctcctgaaggtgcacctgcagctgcatggcttcagtgtcttcattgatgtggagaagctggaagcaggcaagttcgaggacaaactcatccagagtgtcatgggtgcccgcaactttgtgttggtgctatcacctggagcactggacaagtgcatgcaagaccatgactgcaaggattgggtgcataaggagattgtgactgctttaagctgcggcaagaacattgtgcccatcattgatggcttcgagtggcctgagccccaggtcctgcctgaggacatgcaggctgtgcttactttcaacggtatcaagtgagccccagggccctgggaccaggggggtagggtacaaatcaccatgacaggcagagtgtgggcaaacagctgactagcagctccctctgcccagctgtctgaaccacattggctcctgtgcccacaggtggtcccacgaataccaggaggccaccattgagaagatcatccgcttcctgcagggccgctcctcccgggactcatctgcaggctctgacaccagtttggagggtgctgcacccatgggtccaacctaaccagtccccagttccccagccctgctgtgacttccatttccatcgtcctttctgaaggaacagctcctgaaaccagtctccctgggctgagacaacctgggctcttcttaggaaatggctctccctccccctgtcccccaccctcatggcccacctccaacccactttcctcagtatctggagagggaagggaagtcaggcttgggcacgggaggttagaactcccccaggccctgccattgggttgtctgtctccgtcatggggagggtccctgctcagttctggagacactggagttggggtgggggtggttctgcattcccttctcctgctgatagcagtcagcttgaggaggatgaaggaaggcagcctcagacaggaattaaggcaatgcccaggcgggcctgggcactgtattctgagcaagggcctgggcccaggagccagccagggatgagtgccatcatggctctccactcagactgtgcctggcccctgcacttacaacttcctgccgctctgtggccttgccctgtaatcactcagtgcccttagctagcctgactaagtcccagatcccctacagcttccttcggtgtggtatcttttgccacatccagggcgagggttgaggcaaaccagccctccctctgacttccttgtcactgcagccagctttgctgcacttgctggtgcacaggagcctcctgtttgggcctgggtctgggcatggggaggccgtgcctcaaagcccaccctaccccatgccttggtgctgtgcctcaggctccttcctggtctggcccagctggcttccccagcccctcagccatccagggctacccactgcttactcagggaccaggcagcccccatggcagtaaaagcagcctagacagaacctgcagctctgtggaaagaggcaaagtcctgaaaaggcaaagggttgtcacttagggcagcttctccaactttaacatgcatccaagtcacctgggaatgttgttaaaatcaggagatctggggtggggcctaggactctgcatttcttacagattcccaggtgagctgatgctggtggttaagggtagcaaatctctaaagcacgaagccctcacaaatctttgccatttcccaaacactccgctccatggtctccagtcatcagagcaactctacctggtattatcatccccattttacagataatgacactgaggctcagaaaggttgaggataagcccactttcctgtcattagtggcagccccagatccagacctaggcctcctggcacccagtccactggcagtggaattgctttcctgagaatcattctgaggctgggctattgcttctcccttgcttcaaagaatctagcagcgggggataggattttgcaacaaaaagctgacccagaggccatacagagcaggaatatcccattgcccccttaaagctggctgcgcccccagccccactcttggctgtgctggccaggtgactcctagttcttggccacatcatcagaaagtcaaaggtctcactccaggtttggggctccttccttccactcccctccctgccagagtctgtcttggccagtgccagcctcgatgctttggttttgaccccacctgatcctcctttcctcatgcagcacaagtgctcaccggggccagagccagggcatggatatgacaagcagggcagcctggacactgccctcacaggacagcgccaataacaatacagtgtctgagtatctcca

SEQ ID NO: 358392 - DNA, 7430 bp, Homo sapiens
ggacccagaggcggggcgtcggcccggggaccactgctcctccggggcgtggctgcaggaggctggaggagccccgcgggacccagaggcggggcgtcggccggggaccgctgctcctccggggcgtggctgctgccgagcatctcccagctcagccgagcccgtgcccaggccacgctttgttccagccgccgcctcctctaccctacggcgtccggagccatccctcgcctgctcgctctctcctttcgcccactccctgcatctgggcctgcatcacctttgccaaccgctcccccgatcctgccgacactcctcccccaaacttctgaccggcacccttgcctggtacccttctctccattcctccccctccatcttctttccccgacccctctcgggtccctcttttcccaaaacccgggtctctccgcgtggccccgcctccaggccggggatgtcccccgcggccccgcgcccatggtcctgacgctgcttctctccgcctacaagctgtgtcgcttcttcgccatgtcgggcccacggccgggcgccgagcggctggcggtgcctgggccagatgggggcggtggcacgggcccatggtgggctgcgggtggcccgggcccgcgaaagtgtcgccgggggcaggcaccgaggtgcaggacgccctggagcgcgcgctgccggagctgcagcaggccttgtccgcgctgaagcaggcgggcggcgcgcgggccgtgggcgccggcctggccgaggtcttccaactggtggaggaggcctggctgctgcggccgtgggccgcgaggtagcccagggtctgtgcgacgccatccgcctcgatggcggcctcgacctgctgttgcggctgctgcaggcgccggagttggagacgcgtgtgcaggccgcgcgcctgctggagcagatcctggtggctgagaaccgagaccgcgtggcgcgcattgggctgggcgtgatcctgaacctggcgaaggaacgcgaacccgtagagctggcgcggagcgtggcaggcatcttggagcacatgttcaagcattcggaggagacatgccagaggctggtggcggccggcggcctggacgcggtgctgtattggtgccgccgcacggaccccgcgctgctgcgccactgcgcgctggcgctgggcaactgcgcgctgcacgggggccaggcggtgcagcgacgcatggtagagaagcgcgcagccgagtggctcttcccgctcgccttctccaaggaggacgagctgcttcggctgcacgcctgcctcgcagtagcggtgttggcgactaacaaggaggtggagcgcgaggtggagcgctcgggcacgctggcgctcgtggagccgcttgtggcctcgctggaccctggccgcttcgcccgctgtctggtggacgccagcgacacaagccagggccgcgggcccgacgacctgcagcgcctcgtgccgttgctcgactctaaccgcttggaggcgcagtgcatcggggctttctacctctgcgccgaggctgccatcaagagcctgcaaggcaagaccaaggtgttcagcgacatcggcgccatccagagcctgaaacgcctggtttcctactctaccaatggcactaagtcggcgctggccaagcgcgcgctgcgcctgctgggcgaggaggtgccacggcccatcctgccctccgtgcccagctggaaggaggccgaggttcagacgtggctgcagcagatcggtttctccaagtactgcgagagcttccgggagcagcaggtggatggcgacctgcttctgcggctcacggaggaggaactccagaccgacctgggcatgaaatcgggcatcacccgcaagaggttctttagggagctcacggagctcaagaccttcgccaactattctacgtgcgaccgcagcaacctggcggactggctgggcagcctggacccgcgcttccgtcagtacacctacggcctggtcagctgcggcctggaccgctccctgctgcaccgcgtgtctgagcagcagctgctggaagactgcggcatccacctgggcgtgcaccgcgcccgcatcctcacggcggccagagaaatgctacactccccgctgccctgtactggtggcaaacccagtggggacactccagatgtcttcatcagctaccgccggaactcaggttcccagctggccagtctcctgaaggtgcacctgcagctgcatggcttcagtgtcttcattgatgtggagaagctggaagcaggcaagttcgaggacaaactcatccagagtgtcatgggtgcccgcaactttgtgttggtgctatcacctggagcactggacaagtgcatgcaagaccatgactgcaaggattgggtgcataaggagattgtgactgctttaagctgcggcaagaacattgtgcccatcattgatggcttcgagtggcctgagccccaggtcctgcctgaggacatgcaggctgtgcttactttcaacggtatcaagtggtcccacgaataccaggaggccaccattgagaagatcatccgcttcctgcagggccgctcctcccgggactcatctgcaggctctgacaccagtttggagggtgctgcacccatgggtccaacctaaccagtccccagttccccagccctgctgtgacttccatttccatcgtcctttctgaaggaacagctcctgaaaccagtctccctgggctgagacaacctgggctcttcttaggaaatggctctccctccccctgtcccccaccctcatggcccacctccaacccactttcctcagtatctggagagggaagggaagtcaggcttgggcacgggaggttagaactcccccaggccctgccattgggttgtctgtctccgtcatggggagggtccctgctcagttctggagacactggagttggggtgggggtggttctgcattcccttctcctgctgatagcagtcagcttgaggaggatgaaggaaggcagcctcagacaggaattaaggcaatgcccaggcgggcctgggcactgtattctgagcaagggcctgggcccaggagccagccagggatgagtgccatcatggctctccactcagactgtgcctggcccctgcacttacaacttcctgccgctctgtggccttgccctgtaatcactcagtgcccttagctagcctgactaagtcccagatcccctacagcttccttcggtgtggtatcttttgccacatccagggcgagggttgaggcaaaccagccctccctctgacttccttgtcactgcagccagctttgctgcacttgctggtgcacaggagcctcctgtttgggcctgggtctgggcatggggaggccgtgcctcaaagcccaccctaccccatgccttggtgctgtgcctcaggctccttcctggtctggcccagctggcttccccagcccctcagccatccagggctacccactgcttactcagggaccaggcagcccccatggcagtaaaagcagcctagacagaacctgcagctctgtggaaagaggcaaagtcctgaaaaggcaaagggttgtcacttagggcagcttctccaactttaacatgcatccaagtcacctgggaatgttgttaaaatcaggagatctggggtggggcctaggactctgcatttcttacagattcccaggtgagctgatgctggtggttaagggtagcaaatctctaaagcacgaagccctcacaaatctttgccatttcccaaacactccgctccatggtctccagtcatcagagcaactctacctggtattatcatccccattttacagataatgacactgaggctcagaaaggttgaggataagcccactttcctgtcattagtggcagccccagatccagacctaggcctcctggcacccagtccactggcagtggaattgctttcctgagaatcattctgaggctgggctattgcttctcccttgcttcaaagaatctagcagcgggggataggattttgcaacaaaaagctgacccagaggccatacagagcaggaatatcccattgccccctcctccactgggttcagagggtaagaaagcaccctccaataaacccaggctccaggccgtgggggctgctgaaggctctttccccgcaagggccaggtgttgacaccttaaagctggctgcgcccccagccccactcttggctgtgctggccaggtgactcctagttcttggccacatcatcagaaagtcaaaggtctcactccaggtttggggctccttccttccactcccctccctgccagagtctgtcttggccagtgccagcctcgatgctttggttttgaccccacctgatcctcctttcctcatgcagcacaagtgctcaccggggccagagccagggcatggatatgacaagcagggcagcctggacactgccctcacaggacagcgccaataacaatacagtgtctgagtatctccaggggatgatttctggctctttgtctccaatcagtcccactccctcctgaggtccccaagggcagtattcagagaggtttcctgcattttatttctatttggtataccctccactgttgtccactgccctgtgtggccttctggttgacctctgcccgatcttctgtctctctgagggaatcagagtccagcatccagccccagctggaacagctgaagtcacaagcctcctctaagccaaggccagtgtgttcagaggtgactgccacccatactaggacaaacacagctcagatcaccaggtcaagcacctaggcctggcttctcctgagacagaggactcagaagtggcctttcctccaaagcctgctcagacacaggtctgtagggccagggtgttctgcttggctgggctgcagctgctacccctcggttggggctgagtcagccagatcctccccctacttctccccaagggccaagaactgctcagggacattaaaggtcaaaagtccagccacactcattcatcctttccccaggcccatgaagagaggcatctcattgtagaatgtatgaggaagtgggaagtatctcagagaatcagctaagtttcctaacttgtccatccaaatgtgatcaccacgattcaacaatttggggcattgctgatctagccgttcctagtggggcttgctcaaggttgcacagcgagtcagtagaagccctggctggccccacttggtaccaatccaccaggcagctcagggctcctgcccagcccagcagcttctgttgtctaacgtatggcaggcagactgggagcaggaaaacagagggccccaaagcccaaggcaccagaaggtttgtttcagtttgctgaagctgatttgtaatgattggcactcttcagccaggggagtgggtaggccatagccaaggatcgattccccaaccacagcaaaggcaacactcttcctccagagatcaccaagcccctcttacctccctccctccttcccaaggctggcactaaccaggtaccacattcattgttaaggaatggctgatgactgctacacgtgttgggaacctggttggggctgtgcagtttgggctggaaggagagatgccagccctcgtgctgcctctggtccctgaagtgtcacctctctcaggacctctcctctggcctgtggggttataagtgatggatagcagaaagggagaactgactcctgtcccaaatagctcctctgccacctgtcctgcagtgggcctgtgtgggttatgattctagatcctagacagaggctgggtcagctgtggatggggtggtgccttggtctctcttgactacctcgtccaaagagagcactgcccttagacaagagttgcttgtcctgctgtgggctgggcttccagctgcagacctccagttgcttggtgttcactttgctcctcttgccctctgtcttctggtccaggcagatcaggggctctggggaaactgctggaactcgaggtgaggatcagccttttccagcatcctgtgagagaccagagagagagtttggatttcatgtggggaaccctcaaggcctgtctggagaagtgacacaggatttactggggtgggctggtccaggtagctctcctgaacctcctccttccccaagctgagaagctgagagctggaggacaatatccagggacatggctctggaaaataactttttttttttaagagacagggtcttgctctgttgtccaggctggagggcagtgacataatcatagctcactgtacccttgaactcctgggctcaagtgatcctcctgcctcagcctccttagtagctgggactaccagtgcataccaccatgcctgggtgattttttaaattttttatacagacaaggtcttgctatgttgcccaggctgatcttgaattcccgggctcaagtggtcctcctgcctcagcctcccacaggatcgggattacaggcaagagcctccacgcccggccatgaaatataattcttaatatcatacaggaaaaagtcagcgggtcaagctagcctgtggcccagccacaactagctgacaaagcttcctggccttccctttaacacagttctgctgccatagttccatctataaaatgggaatggagggaaataggggaactgggagagagaacacagccttgccaagcagcaatgttagcctgatccttcctccacctagctcgccatctcgcccttggaaaatggctcctggaggattaggcagccatctgcaaggagaggggcaacctgggacaagacacccagagggtaaggattccaggaatgaagctgccatttctggttgggaggagaagaggaaacttttaagagaaagggctccattatgagcatgggttcagggccctgcattacccaatcagaacagccgggatgagcaggaggccagctcccaggaggaaggggaaccccttcataaagttcagagtggctgggtagagtgagttgaagatgccggaggccgtcagcatggccaggctattcacacaggccacagcagaaaagagagcacctgtgaagaaataaataccatactctggagtccgaaagggccatattccaactctggcaccaccacctcacagctgtgtgaccgggagtagtcacttaacctatgtctccccttcctcaccagtaaatcctgctacatcatgtactgtgacaaggattcagtaaggtcatatgtggacagtagctggcacagaggggctactaaacaaatggctgctattaaatccacattaaaagtacatgtgatctgacagaacccagcacataaaagaaaaaaaaaagtacatgtgatattgtct

SEQ ID NO: 358393 - DNA, 7560 bp, Homo sapiens
ggacccagaggcggggcgtcggcccggggaccactgctcctccggggcgtggctgcaggaggctggaggagccccgcgggacccagaggcggggcgtcggccggggaccgctgctcctccggggcgtggctgctgccgagcatctcccagctcagccgagcccgtgcccaggccacgctttgttccagccgccgcctcctctaccctacggcgtccggagccatccctcgcctgctcgctctctcctttcgcccactccctgcatctgggcctgcatcacctttgccaaccgctcccccgatcctgccgacactcctcccccaaacttctgaccggcacccttgcctggtacccttctctccattcctccccctccatcttctttccccgacccctctcgggtccctcttttcccaaaacccgggtctctccgcgtggccccgcctccaggccggggatgtcccccgcggccccgcgcccatggtcctgacgctgcttctctccgcctacaagctgtgtcgcttcttcgccatgtcgggcccacggccgggcgccgagcggctggcggtgcctgggccagatgggggcggtggcacgggcccatggtgggctgcgggtggcccgggcccgcgaaagtgtcgccgggggcaggcaccgaggtgcaggacgccctggagcgcgcgctgccggagctgcagcaggccttgtccgcgctgaagcaggcgggcggcgcgcgggccgtgggcgccggcctggccgaggtcttccaactggtggaggaggcctggctgctgcggccgtgggccgcgaggtagcccagggtctgtgcgacgccatccgcctcgatggcggcctcgacctgctgttgcggctgctgcaggcgccggagttggagacgcgtgtgcaggccgcgcgcctgctggagcagatcctggtggctgagaaccgagaccgcgtggcgcgcattgggctgggcgtgatcctgaacctggcgaaggaacgcgaacccgtagagctggcgcggagcgtggcaggcatcttggagcacatgttcaagcattcggaggagacatgccagaggctggtggcggccggcggcctggacgcggtgctgtattggtgccgccgcacggaccccgcgctgctgcgccactgcgcgctggcgctgggcaactgcgcgctgcacgggggccaggcggtgcagcgacgcatggtagagaagcgcgcagccgagtggctcttcccgctcgccttctccaaggaggacgagctgcttcggctgcacgcctgcctcgcagtagcggtgttggcgactaacaaggaggtggagcgcgaggtggagcgctcgggcacgctggcgctcgtggagccgcttgtggcctcgctggaccctggccgcttcgcccgctgtctggtggacgccagcgacacaagccagggccgcgggcccgacgacctgcagcgcctcgtgccgttgctcgactctaaccgcttggaggcgcagtgcatcggggctttctacctctgcgccgaggctgccatcaagagcctgcaaggcaagaccaaggtgttcagcgacatcggcgccatccagagcctgaaacgcctggtttcctactctaccaatggcactaagtcggcgctggccaagcgcgcgctgcgcctgctgggcgaggaggtgccacggcccatcctgccctccgtgcccagctggaaggaggccgaggttcagacgtggctgcagcagatcggtttctccaagtactgcgagagcttccgggagcagcaggtggatggcgacctgcttctgcggctcacggaggaggaactccagaccgacctgggcatgaaatcgggcatcacccgcaagaggttctttagggagctcacggagctcaagaccttcgccaactattctacgtgcgaccgcagcaacctggcggactggctgggcagcctggacccgcgcttccgtcagtacacctacggcctggtcagctgcggcctggaccgctccctgctgcaccgcgtgtctgagcagcagctgctggaagactgcggcatccacctgggcgtgcaccgcgcccgcatcctcacggcggccagagaaatgctacactccccgctgccctgtactggtggcaaacccagtggggacactccagatgtcttcatcagctaccgccggaactcaggttcccagctggccagtctcctgaaggtgcacctgcagctgcatggcttcagtgtcttcattgatgtggagaagctggaagcaggcaagttcgaggacaaactcatccagagtgtcatgggtgcccgcaactttgtgttggtgctatcacctggagcactggacaagtgcatgcaagaccatgactgcaaggattgggtgcataaggagattgtgactgctttaagctgcggcaagaacattgtgcccatcattgatggcttcgagtggcctgagccccaggtcctgcctgaggacatgcaggctgtgcttactttcaacggtatcaagtgagccccagggccctgggaccaggggggtagggtacaaatcaccatgacaggcagagtgtgggcaaacagctgactagcagctccctctgcccagctgtctgaaccacattggctcctgtgcccacaggtggtcccacgaataccaggaggccaccattgagaagatcatccgcttcctgcagggccgctcctcccgggactcatctgcaggctctgacaccagtttggagggtgctgcacccatgggtccaacctaaccagtccccagttccccagccctgctgtgacttccatttccatcgtcctttctgaaggaacagctcctgaaaccagtctccctgggctgagacaacctgggctcttcttaggaaatggctctccctccccctgtcccccaccctcatggcccacctccaacccactttcctcagtatctggagagggaagggaagtcaggcttgggcacgggaggttagaactcccccaggccctgccattgggttgtctgtctccgtcatggggagggtccctgctcagttctggagacactggagttggggtgggggtggttctgcattcccttctcctgctgatagcagtcagcttgaggaggatgaaggaaggcagcctcagacaggaattaaggcaatgcccaggcgggcctgggcactgtattctgagcaagggcctgggcccaggagccagccagggatgagtgccatcatggctctccactcagactgtgcctggcccctgcacttacaacttcctgccgctctgtggccttgccctgtaatcactcagtgcccttagctagcctgactaagtcccagatcccctacagcttccttcggtgtggtatcttttgccacatccagggcgagggttgaggcaaaccagccctccctctgacttccttgtcactgcagccagctttgctgcacttgctggtgcacaggagcctcctgtttgggcctgggtctgggcatggggaggccgtgcctcaaagcccaccctaccccatgccttggtgctgtgcctcaggctccttcctggtctggcccagctggcttccccagcccctcagccatccagggctacccactgcttactcagggaccaggcagcccccatggcagtaaaagcagcctagacagaacctgcagctctgtggaaagaggcaaagtcctgaaaaggcaaagggttgtcacttagggcagcttctccaactttaacatgcatccaagtcacctgggaatgttgttaaaatcaggagatctggggtggggcctaggactctgcatttcttacagattcccaggtgagctgatgctggtggttaagggtagcaaatctctaaagcacgaagccctcacaaatctttgccatttcccaaacactccgctccatggtctccagtcatcagagcaactctacctggtattatcatccccattttacagataatgacactgaggctcagaaaggttgaggataagcccactttcctgtcattagtggcagccccagatccagacctaggcctcctggcacccagtccactggcagtggaattgctttcctgagaatcattctgaggctgggctattgcttctcccttgcttcaaagaatctagcagcgggggataggattttgcaacaaaaagctgacccagaggccatacagagcaggaatatcccattgccccctcctccactgggttcagagggtaagaaagcaccctccaataaacccaggctccaggccgtgggggctgctgaaggctctttccccgcaagggccaggtgttgacaccttaaagctggctgcgcccccagccccactcttggctgtgctggccaggtgactcctagttcttggccacatcatcagaaagtcaaaggtctcactccaggtttggggctccttccttccactcccctccctgccagagtctgtcttggccagtgccagcctcgatgctttggttttgaccccacctgatcctcctttcctcatgcagcacaagtgctcaccggggccagagccagggcatggatatgacaagcagggcagcctggacactgccctcacaggacagcgccaataacaatacagtgtctgagtatctccaggggatgatttctggctctttgtctccaatcagtcccactccctcctgaggtccccaagggcagtattcagagaggtttcctgcattttatttctatttggtataccctccactgttgtccactgccctgtgtggccttctggttgacctctgcccgatcttctgtctctctgagggaatcagagtccagcatccagccccagctggaacagctgaagtcacaagcctcctctaagccaaggccagtgtgttcagaggtgactgccacccatactaggacaaacacagctcagatcaccaggtcaagcacctaggcctggcttctcctgagacagaggactcagaagtggcctttcctccaaagcctgctcagacacaggtctgtagggccagggtgttctgcttggctgggctgcagctgctacccctcggttggggctgagtcagccagatcctccccctacttctccccaagggccaagaactgctcagggacattaaaggtcaaaagtccagccacactcattcatcctttccccaggcccatgaagagaggcatctcattgtagaatgtatgaggaagtgggaagtatctcagagaatcagctaagtttcctaacttgtccatccaaatgtgatcaccacgattcaacaatttggggcattgctgatctagccgttcctagtggggcttgctcaaggttgcacagcgagtcagtagaagccctggctggccccacttggtaccaatccaccaggcagctcagggctcctgcccagcccagcagcttctgttgtctaacgtatggcaggcagactgggagcaggaaaacagagggccccaaagcccaaggcaccagaaggtttgtttcagtttgctgaagctgatttgtaatgattggcactcttcagccaggggagtgggtaggccatagccaaggatcgattccccaaccacagcaaaggcaacactcttcctccagagatcaccaagcccctcttacctccctccctccttcccaaggctggcactaaccaggtaccacattcattgttaaggaatggctgatgactgctacacgtgttgggaacctggttggggctgtgcagtttgggctggaaggagagatgccagccctcgtgctgcctctggtccctgaagtgtcacctctctcaggacctctcctctggcctgtggggttataagtgatggatagcagaaagggagaactgactcctgtcccaaatagctcctctgccacctgtcctgcagtgggcctgtgtgggttatgattctagatcctagacagaggctgggtcagctgtggatggggtggtgccttggtctctcttgactacctcgtccaaagagagcactgcccttagacaagagttgcttgtcctgctgtgggctgggcttccagctgcagacctccagttgcttggtgttcactttgctcctcttgccctctgtcttctggtccaggcagatcaggggctctggggaaactgctggaactcgaggtgaggatcagccttttccagcatcctgtgagagaccagagagagagtttggatttcatgtggggaaccctcaaggcctgtctggagaagtgacacaggatttactggggtgggctggtccaggtagctctcctgaacctcctccttccccaagctgagaagctgagagctggaggacaatatccagggacatggctctggaaaataactttttttttttaagagacagggtcttgctctgttgtccaggctggagggcagtgacataatcatagctcactgtacccttgaactcctgggctcaagtgatcctcctgcctcagcctccttagtagctgggactaccagtgcataccaccatgcctgggtgattttttaaattttttatacagacaaggtcttgctatgttgcccaggctgatcttgaattcccgggctcaagtggtcctcctgcctcagcctcccacaggatcgggattacaggcaagagcctccacgcccggccatgaaatataattcttaatatcatacaggaaaaagtcagcgggtcaagctagcctgtggcccagccacaactagctgacaaagcttcctggccttccctttaacacagttctgctgccatagttccatctataaaatgggaatggagggaaataggggaactgggagagagaacacagccttgccaagcagcaatgttagcctgatccttcctccacctagctcgccatctcgcccttggaaaatggctcctggaggattaggcagccatctgcaaggagaggggcaacctgggacaagacacccagagggtaaggattccaggaatgaagctgccatttctggttgggaggagaagaggaaacttttaagagaaagggctccattatgagcatgggttcagggccctgcattacccaatcagaacagccgggatgagcaggaggccagctcccaggaggaaggggaaccccttcataaagttcagagtggctgggtagagtgagttgaagatgccggaggccgtcagcatggccaggctattcacacaggccacagcagaaaagagagcacctgtgaagaaataaataccatactctggagtccgaaagggccatattccaactctggcaccaccacctcacagctgtgtgaccgggagtagtcacttaacctatgtctccccttcctcaccagtaaatcctgctacatcatgtactgtgacaaggattcagtaaggtcatatgtggacagtagctggcacagaggggctactaaacaaatggctgctattaaatccacattaaaagtacatgtgatctgacagaacccagcacataaaagaaaaaaaaaagtacatgtgatattgtct

SEQ ID NO: 358394 - DNA, 6978 bp, Homo sapiens
ggacccagaggcggggcgtcggcccggggaccactgctcctccggggcgtggctgcaggaggctggaggagccccgcgggacccagaggcggggcgtcggccggggaccgctgctcctccggggcgtggctgctgccgagcatctcccagctcagccgagcccgtgcccaggccacgctttgttccagccgccgcctcctctaccctacggcgtccggagccatccctcgcctgctcgctctctcctttcgcccactccctgcatctgggcctgcatcacctttgccaaccgctcccccgatcctgccgacactcctcccccaaacttctgaccggcacccttgcctggtacccttctctccattcctccccctccatcttctttccccgacccctctcgggtccctcttttcccaaaacccgggtctctccgcgtggccccgcctccaggccggggatgtcccccgcggccccgcgcccatggtcctgacgctgcttctctccgcctacaagctgtgtcgcttcttcgccatgtcgggcccacggccgggcgccgagcggctggcggtgcctgggccagatgggggcggtggcacgggcccatggtgggctgcgggtggcccgggcccgcgaaagtgtcgccgggggcaggcaccgaggtgcaggacgccctggagcgcgcgctgccggagctgcagcaggccttgtccgcgctgaagcaggcgggcggcgcgcgggccgtgggcgccggcctggccgaggtcttccaactggtggaggaggcctggctgctgcggccgtgggccgcgaggtagcccagggtctgtgcgacgccatccgcctcgatggcggcctcgacctgctgttgcggctgctgcaggcgccggagttggagacgcgtgtgcaggccgcgcgcctgctggagcagatcctggtggctgagaaccgagaccgcgtggcgcgcattgggctgggcgtgatcctgaacctggcgaaggaacgcgaacccgtagagctggcgcggagcgtggcaggcatcttggagcacatgttcaagcattcggaggagacatgccagaggctggtggcggccggcggcctggacgcggtgctgtattggtgccgccgcacggaccccgcgctgctgcgccactgcgcgctggcgctgggcaactgcgcgctgcacgggggccaggcggtgcagcgacgcatggtagagaagcgcgcagccgagtggctcttcccgctcgccttctccaaggaggacgagctgcttcggctgcacgcctgcctcgcagtagcggtgttggcgactaacaaggaggtggagcgcgaggtggagcgctcgggcacgctggcgctcgtggagccgcttgtggcctcgctggaccctggccgcttcgcccgctgtctggtggacgccagcgacacaagccagggccgcgggcccgacgacctgcagcgcctcgtgccgttgctcgactctaaccgcttggaggcgcagtgcatcggggctttctacctctgcgccgaggctgccatcaagagcctgcaaggcaagaccaaggtgttcagcgacatcggcgccatccagagcctgaaacgcctggtttcctactctaccaatggcactaagtcggcgctggccaagcgcgcgctgcgcctgctgggcgaggaggtgccacggcccatcctgccctccgtgcccagctggaaggaggccgaggttcagacgtggctgcagcagatcggtttctccaagtactgcgagagcttccgggagcagcaggtggatggcgacctgcttctgcggctcacggaggaggaactccagaccgacctgggcatgaaatcgggcatcacccgcaagaggttctttagggagctcacggagctcaagaccttcgccaactattctacgtgcgaccgcagcaacctggcggactggctgggcagcctggacccgcgcttccgtcagtacacctacggcctggtcagctgcggcctggaccgctccctgctgcaccgcgtgtctgagcagcagctgctggaagactgcggcatccacctgggcgtgcaccgcgcccgcatcctcacggcggccagagaaatgctacactccccgctgccctgtactggtggcaaacccagtggggacactccagatgtcttcatcagctaccgccggaactcaggttcccagctggccagtctcctgaaggtgcacctgcagctgcatggcttcagtgtcttcattgatgtggagaagctggaagcaggcaagttcgaggacaaactcatccagagtgtcatgggtgcccgcaactttgtgttggtgctatcacctggagcactggacaagtgcatgcaagaccatgactgcaaggattgggtgcataaggagattgtgactgctttaagctgcggcaagaacattgtgcccatcattgatggcttcgagtggcctgagccccaggtcctgcctgaggacatgcaggctgtgcttactttcaacggtatcaagtgagccccagggccctgggaccaggggggtagggtacaaatcaccatgacaggcagagtgtgggcaaacagctgactagcagctccctctgcccagctgtctgaaccacattggctcctgtgcccacaggtggtcccacgaataccaggaggccaccattgagaagatcatccgcttcctgcagggccgctcctcccgggactcatctgcaggctctgacaccagtttggagggtgctgcacccatgggtccaacctaaccagtccccagttccccagccctgctgtgacttccatttccatcgtcctttctgaaggaacagctcctgaaaccagtctccctgggctgagacaacctgggctcttcttaggaaatggctctccctccccctgtcccccaccctcatggcccacctccaacccactttcctcagtatctggagagggaagggaagtcaggcttgggcacgggaggttagaactcccccaggccctgccattgggttgtctgtctccgtcatggggagggtccctgctcagttctggagacactggagttggggtgggggtggttctgcattcccttctcctgctgatagcagtcagcttgaggaggatgaaggaaggcagcctcagacaggaattaaggcaatgcccaggcgggcctgggcactgtattctgagcaagggcctgggcccaggagccagccagggatgagtgccatcatggctctccactcagactgtgcctggcccctgcacttacaacttcctgccgctctgtggccttgccctgtaatcactcagtgcccttagctagcctgactaagtcccagatcccctacagcttccttcggtgtggtatcttttgccacatccagggcgagggttgaggcaaaccagccctccctctgacttccttgtcactgcagccagctttgctgcacttgctggtgcacaggagcctcctgtttgggcctgggtctgggcatggggaggccgtgcctcaaagcccaccctaccccatgccttggtgctgtgcctcaggctccttcctggtctggcccagctggcttccccagcccctcagccatccagggctacccactgcttactcagggaccaggcagcccccatggcagtaaaagcagcctagacagaacctgcagctctgtggaaagaggcaaagtcctgaaaaggcaaagggttgtcacttagggcagcttctccaactttaacatgcatccaagtcacctgggaatgttgttaaaatcaggagatctggggtggggcctaggactctgcatttcttacagattcccaggtgagctgatgctggtggttaagggtagcaaatctctaaagcacgaagccctcacaaatctttgccatttcccaaacactccgctccatggtctccagtcatcagagcaactctacctggtattatcatccccattttacagataatgacactgaggctcagaaaggttgaggataagcccactttcctgtcattagtggcagccccagatccagacctaggcctcctggcacccagtccactggcagtggaattgctttcctgagaatcattctgaggctgggctattgcttctcccttgcttcaaagaatctagcagcgggggataggattttgcaacaaaaagctgacccagaggccatacagagcaggaatatcccattgccccctcctccactgggttcagagggtaagaaagcaccctccaataaacccaggctccaggccgtgggggctgctgaaggctctttccccgcaagggccaggtgttgacaccttaaagctggctgcgcccccagccccactcttggctgtgctggccaggtgactcctagttcttggccacatcatcagaaagtcaaaggtctcactccaggtttggggctccttccttccactcccctccctgccagagtctgtcttggccagtgccagcctcgatgctttggttttgaccccacctgatcctccccctacttctccccaagggccaagaactgctcagggacattaaaggtcaaaagtccagccacactcattcatcctttccccaggcccatgaagagaggcatctcattgtagaatgtatgaggaagtgggaagtatctcagagaatcagctaagtttcctaacttgtccatccaaatgtgatcaccacgattcaacaatttggggcattgctgatctagccgttcctagtggggcttgctcaaggttgcacagcgagtcagtagaagccctggctggccccacttggtaccaatccaccaggcagctcagggctcctgcccagcccagcagcttctgttgtctaacgtatggcaggcagactgggagcaggaaaacagagggccccaaagcccaaggcaccagaaggtttgtttcagtttgctgaagctgatttgtaatgattggcactcttcagccaggggagtgggtaggccatagccaaggatcgattccccaaccacagcaaaggcaacactcttcctccagagatcaccaagcccctcttacctccctccctccttcccaaggctggcactaaccaggtaccacattcattgttaaggaatggctgatgactgctacacgtgttgggaacctggttggggctgtgcagtttgggctggaaggagagatgccagccctcgtgctgcctctggtccctgaagtgtcacctctctcaggacctctcctctggcctgtggggttataagtgatggatagcagaaagggagaactgactcctgtcccaaatagctcctctgccacctgtcctgcagtgggcctgtgtgggttatgattctagatcctagacagaggctgggtcagctgtggatggggtggtgccttggtctctcttgactacctcgtccaaagagagcactgcccttagacaagagttgcttgtcctgctgtgggctgggcttccagctgcagacctccagttgcttggtgttcactttgctcctcttgccctctgtcttctggtccaggcagatcaggggctctggggaaactgctggaactcgaggtgaggatcagccttttccagcatcctgtgagagaccagagagagagtttggatttcatgtggggaaccctcaaggcctgtctggagaagtgacacaggatttactggggtgggctggtccaggtagctctcctgaacctcctccttccccaagctgagaagctgagagctggaggacaatatccagggacatggctctggaaaataactttttttttttaagagacagggtcttgctctgttgtccaggctggagggcagtgacataatcatagctcactgtacccttgaactcctgggctcaagtgatcctcctgcctcagcctccttagtagctgggactaccagtgcataccaccatgcctgggtgattttttaaattttttatacagacaaggtcttgctatgttgcccaggctgatcttgaattcccgggctcaagtggtcctcctgcctcagcctcccacaggatcgggattacaggcaagagcctccacgcccggccatgaaatataattcttaatatcatacaggaaaaagtcagcgggtcaagctagcctgtggcccagccacaactagctgacaaagcttcctggccttccctttaacacagttctgctgccatagttccatctataaaatgggaatggagggaaataggggaactgggagagagaacacagccttgccaagcagcaatgttagcctgatccttcctccacctagctcgccatctcgcccttggaaaatggctcctggaggattaggcagccatctgcaaggagaggggcaacctgggacaagacacccagagggtaaggattccaggaatgaagctgccatttctggttgggaggagaagaggaaacttttaagagaaagggctccattatgagcatgggttcagggccctgcattacccaatcagaacagccgggatgagcaggaggccagctcccaggaggaaggggaaccccttcataaagttcagagtggctgggtagagtgagttgaagatgccggaggccgtcagcatggccaggctattcacacaggccacagcagaaaagagagcacctgtgaagaaataaataccatactctggagtccgaaagggccatattccaactctggcaccaccacctcacagctgtgtgaccgggagtagtcacttaacctatgtctccccttcctcaccagtaaatcctgctacatcatgtactgtgacaaggattcagtaaggtcatatgtggacagtagctggcacagaggggctactaaacaaatggctgctattaaatccacattaaaagtacatgtgatctgacagaacccagcacataaaagaaaaaaaaaagtacatgtgatattgtct

SEQ ID NO: 358395 - DNA, 4661 bp, Homo sapiens
ggacccagaggcggggcgtcggcccggggaccactgctcctccggggcgtggctgcaggaggctggaggagccccgcgggacccagaggcggggcgtcggccggggaccgctgctcctccggggcgtggctgctgccgagcatctcccagctcagccgagcccgtgcccaggccacgctttgttccagccgccgcctcctctaccctacggcgtccggagccatccctcgcctgctcgctctctcctttcgcccactccctgcatctgggcctgcatcacctttgccaaccgctcccccgatcctgccgacactcctcccccaaacttctgaccggcacccttgcctggtacccttctctccattcctccccctccatcttctttccccgacccctctcgggtccctcttttcccaaaacccgggtctctccgcgtggccccgcctccaggccggggatgtcccccgcggccccgcgcccatggtcctgacgctgcttctctccgcctacaagctgtgtcgcttcttcgccatgtcgggcccacggccgggcgccgagcggctggcggtgcctgggccagatgggggcggtggcacgggcccatggtgggctgcgggtggcccgggcccgcgaaagtgtcgccgggggcaggcaccgaggtgcaggacgccctggagcgcgcgctgccggagctgcagcaggccttgtccgcgctgaagcaggcgggcggcgcgcgggccgtgggcgccggcctggccgaggtcttccaactggtggaggaggcctggctgctgcggccgtgggccgcgaggtagcccagggtctgtgcgacgccatccgcctcgatggcggcctcgacctgctgttgcggctgctgcaggcgccggagttggagacgcgtgtgcaggccgcgcgcctgctggagcagatcctggtggctgagaaccgagaccgcgtggcgcgcattgggctgggcgtgatcctgaacctggcgaaggaacgcgaacccgtagagctggcgcggagcgtggcaggcatcttggagcacatgttcaagcattcggaggagacatgccagaggctggtggcggccggcggcctggacgcggtgctgtattggtgccgccgcacggaccccgcgctgctgcgccactgcgcgctggcgctgggcaactgcgcgctgcacgggggccaggcggtgcagcgacgcatggtagagaagcgcgcagccgagtggctcttcccgctcgccttctccaaggaggacgagctgcttcggctgcacgcctgcctcgcagtagcggtgttggcgactaacaaggaggtggagcgcgaggtggagcgctcgggcacgctggcgctcgtggagccgcttgtggcctcgctggaccctggccgcttcgcccgctgtctggtggacgccagcgacacaagccagggccgcgggcccgacgacctgcagcgcctcgtgccgttgctcgactctaaccgcttggaggcgcagtgcatcggggctttctacctctgcgccgaggctgccatcaagagcctgcaaggcaagaccaaggtgttcagcgacatcggcgccatccagagcctgaaacgcctggtttcctactctaccaatggcactaagtcggcgctggccaagcgcgcgctgcgcctgctgggcgaggaggtgccacggcccatcctgccctccgtgcccagctggaaggaggccgaggttcagacgtggctgcagcagatcggtttctccaagtactgcgagagcttccgggagcagcaggtggatggcgacctgcttctgcggctcacggaggaggaactccagaccgacctgggcatgaaatcgggcatcacccgcaagaggttctttagggagctcacggagctcaagaccttcgccaactattctacgtgcgaccgcagcaacctggcggactggctgggcagcctggacccgcgcttccgtcagtacacctacggcctggtcagctgcggcctggaccgctccctgctgcaccgcgtgtctgagcagcagctgctggaagactgcggcatccacctgggcgtgcaccgcgcccgcatcctcacggcggccagagaaatgctacactccccgctgccctgtactggtggcaaacccagtggggacactccagatgtcttcatcagctaccgccggaactcaggttcccagctggccagtctcctgaaggtgcacctgcagctgcatggcttcagtgtcttcattgatgtggagaagctggaagcaggcaagttcgaggacaaactcatccagagtgtcatgggtgcccgcaactttgtgttggtgctatcacctggagcactggacaagtgcatgcaagaccatgactgcaaggattgggtgcataaggagattgtgactgctttaagctgcggcaagaacattgtgcccatcattgatggcttcgagtggcctgagccccaggtcctgcctgaggacatgcaggctgtgcttactttcaacggtatcaagtgagccccagggccctgggaccaggggggtagggtacaaatcaccatgacaggcagagtgtgggcaaacagctgactagcagctccctctgcccagctgtctgaaccacattggctcctgtgcccacaggtggtcccacgaataccaggaggccaccattgagaagatcatccgcttcctgcagggccgctcctcccgggactcatctgcaggctctgacaccagtttggagggtgctgcacccatgggtccaacctaaccagtccccagttccccagccctgctgtgacttccatttccatcgtcctttctgaaggaacagctcctgaaaccagtctccctgggctgagacaacctgggctcttcttaggaaatggctctccctccccctgtcccccaccctcatggcccacctccaacccactttcctcagtatctggagagggaagggaagtcaggcttgggcacgggaggttagaactcccccaggccctgccattgggttgtctgtctccgtcatggggagggtccctgctcagttctggagacactggagttggggtgggggtggttctgcattcccttctcctgctgatagcagtcagcttgaggaggatgaaggaaggcagcctcagacaggaattaaggcaatgcccaggcgggcctgggcactgtattctgagcaagggcctgggcccaggagccagccagggatgagtgccatcatggctctccactcagactgtgcctggcccctgcacttacaacttcctgccgctctgtggccttgccctgtaatcactcagtgcccttagctagcctgactaagtcccagatcccctacagcttccttcggtgtggtatcttttgccacatccagggcgagggttgaggcaaaccagccctccctctgacttccttgtcactgcagccagctttgctgcacttgctggtgcacaggagcctcctgtttgggcctgggtctgggcatggggaggccgtgcctcaaagcccaccctaccccatgccttggtgctgtgcctcaggctccttcctggtctggcccagctggcttccccagcccctcagccatccagggctacccactgcttactcagggaccaggcagcccccatggcagtaaaagcagcctagacagaacctgcagctctgtggaaagaggcaaagtcctgaaaaggcaaagggttgtcacttagggcagcttctccaactttaacatgcatccaagtcacctgggaatgttgttaaaatcaggagatctggggtggggcctaggactctgcatttcttacagattcccaggtgagctgatgctggtggttaagggtagcaaatctctaaagcacgaagccctcacaaatctttgccatttcccaaacactccgctccatggtctccagtcatcagagcaactctacctggtattatcatccccattttacagataatgacactgaggctcagaaaggttgaggataagcccactttcctgtcattagtggcagccccagatccagacctaggcctcctggcacccagtccactggcagtggaattgctttcctgagaatcattctgaggctgggctattgcttctcccttgcttcaaagaatctagcagcgggggataggattttgcaacaaaaagctgacccagaggccatacagagcaggaatatcccattgccccctcctccactgggttcagagggtaagaaagcaccctccaataaacccaggctccaggccgtgggggctgctgaaggctctttccccgcaagggccaggtgttgacaccttaaagctggctgcgcccccagccccactcttggctgtgctggccaggtgactcctagttcttggccacatcatcagaaagtcaaaggtctcactccaggtttggggctccttccttccactcccctccctgccagagtctgtcttggccagtgccagcctcgatgctttggttttgaccccacctgatcctcctttcctcatgcagcacaagtgctcaccggggccagagccagggcatggatatgacaagcagggcagcctggacactgccctcacaggacagcgccaataacaatacagtgtctgagtatctcca

SEQ ID NO: 358396 - DNA, 5523 bp, Homo sapiens
ggacccagaggcggggcgtcggcccggggaccactgctcctccggggcgtggctgcaggaggctggaggagccccgcgggacccagaggcggggcgtcggccggggaccgctgctcctccggggcgtggctgctgccgagcatctcccagctcagccgagcccgtgcccaggccacgctttgttccagccgccgcctcctctaccctacggcgtccggagccatccctcgcctgctcgctctctcctttcgcccactccctgcatctgggcctgcatcacctttgccaaccgctcccccgatcctgccgacactcctcccccaaacttctgaccggcacccttgcctggtacccttctctccattcctccccctccatcttctttccccgacccctctcgggtccctcttttcccaaaacccgggtctctccgcgtggccccgcctccaggccggggatgtcccccgcggccccgcgcccatggtcctgacgctgcttctctccgcctacaagctgtgtcgcttcttcgccatgtcgggcccacggccgggcgccgagcggctggcggtgcctgggccagatgggggcggtggcacgggcccatggtgggctgcgggtggcccgggcccgcgaaagtgtcgccgggggcaggcaccgaggtgcaggacgccctggagcgcgcgctgccggagctgcagcaggccttgtccgcgctgaagcaggcgggcggcgcgcgggccgtgggcgccggcctggccgaggtcttccaactggtggaggaggcctggctgctgcggccgtgggccgcgaggtagcccagggtctgtgcgacgccatccgcctcgatggcggcctcgacctgctgttgcggctgctgcaggcgccggagttggagacgcgtgtgcaggccgcgcgcctgctggagcagatcctggtggctgagaaccgagaccgcgtggcgcgcattgggctgggcgtgatcctgaacctggcgaaggaacgcgaacccgtagagctggcgcggagcgtggcaggcatcttggagcacatgttcaagcattcggaggagacatgccagaggctggtggcggccggcggcctggacgcggtgctgtattggtgccgccgcacggaccccgcgctgctgcgccactgcgcgctggcgctgggcaactgcgcgctgcacgggggccaggcggtgcagcgacgcatggtagagaagcgcgcagccgagtggctcttcccgctcgccttctccaaggaggacgagctgcttcggctgcacgcctgcctcgcagtagcggtgttggcgactaacaaggaggtggagcgcgaggtggagcgctcgggcacgctggcgctcgtggagccgcttgtggcctcgctggaccctggccgcttcgcccgctgtctggtggacgccagcgacacaagccagggccgcgggcccgacgacctgcagcgcctcgtgccgttgctcgactctaaccgcttggaggcgcagtgcatcggggctttctacctctgcgccgaggctgccatcaagagcctgcaaggcaagaccaaggtgttcagcgacatcggcgccatccagagcctgaaacgcctggtttcctactctaccaatggcactaagtcggcgctggccaagcgcgcgctgcgcctgctgggcgaggaggtgccacggcccatcctgccctccgtgcccagctggaaggaggccgaggttcagacgtggctgcagcagatcggtttctccaagtactgcgagagcttccgggagcagcaggtggatggcgacctgcttctgcggctcacggaggaggaactccagaccgacctgggcatgaaatcgggcatcacccgcaagaggttctttagggagctcacggagctcaagaccttcgccaactattctacgtgcgaccgcagcaacctggcggactggctgggcagcctggacccgcgcttccgtcagtacacctacggcctggtcagctgcggcctggaccgctccctgctgcaccgcgtgtctgagcagcagctgctggaagactgcggcatccacctgggcgtgcaccgcgcccgcatcctcacggcggccagagaaatgctacactccccgctgccctgtactggtggcaaacccagtggggacactccagatgtcttcatcagctaccgccggaactcaggttcccagctggccagtctcctgaaggtgcacctgcagctgcatggcttcagtgtcttcattgatgtggagaagctggaagcaggcaagttcgaggacaaactcatccagagtgtcatgggtgcccgcaactttgtgttggtgctatcacctggagcactggacaagtgcatgcaagaccatgactgcaaggattgggtgcataaggagattgtgactgctttaagctgcggcaagaacattgtgcccatcattgatggcttcgagtggcctgagccccaggtcctgcctgaggacatgcaggctgtgcttactttcaacggtatcaagtgagccccagggccctgggaccaggggggtagggtacaaatcaccatgacaggcagagtgtgggcaaacagctgactagcagctccctctgcccagctgtctgaaccacattggctcctgtgcccacaggtggtcccacgaataccaggaggccaccattgagaagatcatccgcttcctgcagggccgctcctcccgggactcatctgcaggctctgacaccagtttggagggtgctgcacccatgggtccaacctaaccagtccccagttccccagccctgctgtgacttccatttccatcgtcctttctgaaggaacagctcctgaaaccagtctccctgggctgagacaacctgggctcttcttaggaaatggctctccctccccctgtcccccaccctcatggcccacctccaacccactttcctcagtatctggagagggaagggaagtcaggcttgggcacgggaggttagaactcccccaggccctgccattgggttgtctgtctccgtcatggggagggtccctgctcagttctggagacactggagttggggtgggggtggttctgcattcccttctcctgctgatagcagtcagcttgaggaggatgaaggaaggcagcctcagacaggaattaaggcaatgcccaggcgggcctgggcactgtattctgagcaagggcctgggcccaggagccagccagggatgagtgccatcatggctctccactcagactgtgcctggcccctgcacttacaacttcctgccgctctgtggccttgccctgtaatcactcagtgcccttagctagcctgactaagtcccagatcccctacagcttccttcggtgtggtatcttttgccacatccagggcgagggttgaggcaaaccagccctccctctgacttccttgtcactgcagccagctttgctgcacttgctggtgcacaggagcctcctgtttgggcctgggtctgggcatggggaggccgtgcctcaaagcccaccctaccccatgccttggtgctgtgcctcaggctccttcctggtctggcccagctggcttccccagcccctcagccatccagggctacccactgcttactcagggaccaggcagcccccatggcagtaaaagcagcctagacagaacctgcagctctgtggaaagaggcaaagtcctgaaaaggcaaagggttgtcacttagggcagcttctccaactttaacatgcatccaagtcacctgggaatgttgttaaaatcaggagatctggggtggggcctaggactctgcatttcttacagattcccaggtgagctgatgctggtggttaagggtagcaaatctctaaagcacgaagccctcacaaatctttgccatttcccaaacactccgctccatggtctccagtcatcagagcaactctacctggtattatcatccccattttacagataatgacactgaggctcagaaaggttgaggataagcccactttcctgtcattagtggcagccccagatccagacctaggcctcctggcacccagtccactggcagtggaattgctttcctgagaatcattctgaggctgggctattgcttctcccttgcttcaaagaatctagcagcgggggataggattttgcaacaaaaagctgacccagaggccatacagagcaggaatatcccattgccccctcctccactgggttcagagggtaagaaagcaccctccaataaacccaggctccaggccgtgggggctgctgaaggctctttccccgcaagggccaggtgttgacaccttaaagctggctgcgcccccagccccactcttggctgtgctggccaggtgactcctagttcttggccacatcatcagaaagtcaaaggtctcactccaggtttggggctccttccttccactcccctccctgccagagtctgtcttggccagtgccagcctcgatgctttggttttgaccccacctgatcctcctttcctcatgcagcacaagtgctcaccggggccagagccagggcatggatatgacaagcagggcagcctggacactgccctcacaggacagcgccaataacaatacagtgtctgagtatctccaaaaaaaaaaaaaaaaaaaaaaaaaaaaaaaaaaaaaaaaaaaaaaaaaaaaaaaaaaaaaaaaaaaaaaaaaaaaaaaaaaaaaaaaaaagaaaaaacagagaagcgaggagacaaaagaaaacacagcgagagagagaagcagaggagcgaagaacaagaaaacgagcgacaacagcgagagccggacaggacacaagcgcgaggagcgggactgccaatacaaagagaagcagcgagggagccaccaacacagagcgagcagaggagccacagacagagagaagaaacaaaaagggagagaacacaaccgaggaggggacaggaccaaaagaaaaaaacaaagcaacgaaaaaagaaaaagcgaggcgaagagaaatgcgtggacaagacccgcgaacagatatggtgcaacagagcgacagaagacgactagccgacgagagcgcagaggaagaccgagcagatgagacagacagagcgcgcacaacaaagaggcgcggcgtcggctaccaacagggaacggacggcgagcggggggacgggagggccgaaagggacggcggagagggagggagagaagagcagcggccgcgggcgagaagacggggggcagggcggcgaaaggggagcgggagcccgagacagacaagaccaaagctcggggaggcagcaggcaagcaggaaacagcggaggaagacgacgagaaccggcacaagggagagagaaggagcgagagagagagggcggggagggagccgagcgcgaccacggagcgaagaggcagggaagggaagcaaggaaggacagacagaaccggagaggacgagagaacagacagcaccagaggcggcgccagcag

SEQ ID NO: 358397 - DNA, 184 bp, Homo sapiens
ttattagctagggaaatgggaggtgcagtggttaaatgcatgggctcaggagtcatactagacctggttagagggcttcgtcctagccctgtgatcttgagcaagttacctaaccattctgggctctctttgcttctctgcaaactgaggataataaaacagtgcctacgtcataggcttgcca

SEQ ID NO: 358398 - DNA, 235 bp, Homo sapiens
tatgtaaatacacaaaccctgactggatgggaaaagaggctataaaaatacttcagtgacaatatgtaaatacagaaaccccgactggatgggaaagaggctataaaaatacattttgtgggcctacagcagctgctcacgcctataatcccaacactttgggaggctgaggtgagcacttgaacccagaagttgaagaccagcctgtgcaatatgatgaaaccctgtctctaca

SEQ ID NO: 358399 - DNA, 651 bp, Homo sapiens
gaagcatttgtggtacagagcttggagtttggagtaaggcttccttgttttgcatcctggctctaccactgtcaatctgtgtgaccttgggtgagtcacttaactgtttcctcacctgttaaatgtgaataataacagtacctctccccttttgtgaagactgaatgagataaatgaaaagctgtttgcagtatggtcatactaaaatgggagcagtcagtaccctccccccatttccagcagagtggtgggcaggtctagctagcccttgtacatacaccttgcagaatagtttatagtagtgagcatagctggtaaatgtacaataaaaaaagttcctgtttttcatttctacctgattgaatgagacacctatttaatgcaaatttcaataatgctctgatactaactctgttcaagttagtaagagagctttgtagagttattgtgacacctgggttaagtatggctgactttgggttaagtatgaggtctaatcatcccagtctgtcctctagattttttgctgttttgttcaatataattatgtaaacaggtattctctatgtaaacatttgtgaaagttaaaataccaaagcagattaaatatagaactagactggatgcctacatcagtgttttagtgacagc

SEQ ID NO: 358400 - DNA, 421 bp, Homo sapiens
acacatttggtaagagaatatcctgatctgctttgcatgtgaggctctcccagtaataaacaaagaagcataatcaaacaagattttaatttctctatgccctgttagaaattcagatataattcaagtcatcttggaaattttaagttgcattctgatgtcgtctctgttctggccattgtgcaatgggccttcaaatgttgtagtagaggccaactgatattccattgttattcatttatacacaggtacatatatggtgtgtgtacgcaaatatataaatattcatatatgtgtacatgtgtacatacatacatatggaggtaatacaagtttgcattgtttttaaaattattttacccaaattaacaatgactctattgcatatctttattggttatatcacatttatataaataaa

SEQ ID NO: 358401 - DNA, 162 bp, Homo sapiens
ttggctgactgccctgattgcctgcctgccccctcccctgcggagagccttagccctccacttccggtcagcacctgggcctggagctgggagtttctctctgcagagctgcctggagggggatgagtgagctgttgacttcttggctctcattagctcttc

SEQ ID NO: 358402 - DNA, 448 bp, Homo sapiens
agccaggatggtctcgatctcctgacctcgtgatccgcctgcctctgcctcccaaagtgctgggattgcaggtgtgagccaccgcacccagcggaacttctttttaactaaataaagaaaattagttcagattttttggcctttacttcttcattatgtacatgaattttaaagaaaaacagtaaaaacctcagtttagtattctgttgtaacacatttgccattggtttttattttaaacctctctgtagacctcatatggcaatatacagaaatgttactaaatcaccttgccaaaaaatcaagcagtgtaaattaggccaccaaaggcattggaggaacagttcagataaccttaaaatactgaaatgaatcttacaaaaattgtaggtgaccagttcacatttgttttatccttatttcttaatctttatatgtcttgaaattc

SEQ ID NO: 358403 - DNA, 566 bp, Homo sapiens
gtttgtgtatgtgtttatttacttttgttattacagttcagtaaattttttatgagactatacaggtttggagtgttttctccaatcccagctttcttgtatgtcctgttctttttattatgcacaattccatctcttggtggttttagaaccatataccacatgaagggtgaaatttcttcatactgatcactgcttactcctctgtgtttggctcactttttctttttctttgtcttttctccctccttttcctccttcattccttctttttttttttttgacttctggcttttggagatttccctcactttcttctgatcccagcaaggcatttaaagtcatgttggttgtaatttatgtaggattcagtttttagcagcaggaccttgcagaatattcaatctactgcactcccagaaatgaaagtctctccccacctttcctcttgcataaatttgtggaagtctctcattcgtcgtcgatggtcttttctgattttcttcattgtcattgactttgtcccttttcattccttcagttccatcttaatgtggtcactggag

SEQ ID NO: 358404 - DNA, 692 bp, Homo sapiens
ctgtgctaattgggactgggaagggtttgccaaggattggagctgcagactccagtgctcagagcagcaggatggcacttggtgtctggatgcctttggagttgcacatacagcttctttatgaaaggaagaaactggaagacaacaaagggtcagagaggagggagaaggctgtgctaaacaaggtgctggcagtgtcaggagctggcctcctgccttctgggttgagagatatcgaatgctgctttgccaagagctgctttcttgagcccctccaaggttctcctatttggactctgctgcagatcccttgccctggttctcctcctgttgccaaggcccaggctactgtctgggcaagagcacacatagggtttgaaaccttccagaacaaaatgccagtctacctcctcctatctggaatctaaggcctaacccatcactgcacctgatgacaaggacctgcagtgctgcagagaaaaagcatatcaatgtggaatgtataatttacagtcaagctggaagactacagcaacttaaatggtactaggcacggaacgggcaggaaatcaaaagtcatcaaggaaagttggaggatattccagagattgcaacataagccccagaggttcaatgtatttgctgagtaagggccttttagaaaaacaagtctgtgggttgatattattggc

SEQ ID NO: 358405 - DNA, 641 bp, Homo sapiens
ctgtgctaattgggactgggaagggtttgccaaggattggagctgcagactccagtgctcagagcagcaggatggcacttggtgtctggatgcctttggagttgcacatacagcttctttatgaaaggaagaaactggaagacaacaaagagacaccgccagccacataaatggccattgcaactgccattgaaaatccaacattgatagtgatgacccctccaaaacgtcctcgactgagaatagcttgggcaacacagccacatccaaggacctggaatgagaggaaaactcaacagatgctgaaatggcttttcttaggaggataatcaatgctgtgtgctgcaggaaataggaggagtgatgagcaatgtggggacttcagttaccctcatcagaatcgccactcagaagattggagcccagatttccagcattacatcttaatttagaaatgttttattgtagcctgaaaagcaacgaggaagccaggctgcatcttggggcttctctgaggactcctgtttctaccaatacctacctgttgtggtcctcactttcacagccagatgaaaatggacgttttgacaatggctcacagattcctggagatgtctggtaagagtctctgactgtacaaa

SEQ ID NO: 358406 - DNA, 414 bp, Homo sapiens
ctgtgctaattgggactgggaagggtttgccaaggattggagctgcagactccagtgctcagagcagcaggatggcacttggtgtctggatgcctttggagttgcacatacagcttctttatgaaaggaagaaactggaagacaacaaagggtcagagaggagggagaaggctgtgctaaacaaggtgctggcagtgtcaggagctggcctcctgccttctgggttgagagatatcgaatgctgctttgccaagagctgctttcttgagcccctccaaggttctcctatttggactctgctgcagatcccttgccctggtcagcagctacttaatcagaaagatcaactcaacattttcccttgacccaattagattatcgaatctccaataaacgtcatctgttatctctgga

SEQ ID NO: 358407 - DNA, 464 bp, Homo sapiens
tatcatctgtgctaattgggactgggaagggtttgccaaggattggagctgcagactccagtgctcagagcagcaggatggcacttggtgtctggatgcctttggagttgcacatacagcttctttatgaaaggaagaaactggaagacaacaaaggtagggttctatttcaagccagagtaaaagaaagaaatgcagacaatgagccacaaccttccacctcgggggtcaccacatctcagcctgagaatgacgttgtcccttcttactacctcttctccacagcatttgaccacagcaagcacgtttaaatgttttgtctatgattacaatattatttatttatagaaaacaaaaaatggcagtagcgtttgtgtatgtgtttatttacttttgttattacagttcagtaaattttttatgagactatacaggtttggagtgttttctccaatcccagcttt

SEQ ID NO: 358408 - DNA, 2035 bp, Homo sapiens
ccaatcgctagcaaactccctgcctagcaaggcccagcctggggcagaaatggctgcaagtggccgaggtctctgcaaggctgtggccgcctctcccttcccggcgtggagacgagataacacggaagccaggggaggtctgaagcctgagtatgatgcggtggtgataggagcaggacacaacggactggtggctgcagcgtacctgcagagactgggggtgaacaccgccgtcttcgagaggcgccatgtgatcgggggtgcagctgtcactgaggagatcatcccagggtttaagttctcccgtgcgtcctacctgctcagcctgctgaggccgcagatttacactgatctggagctgaagaaacatgggctgaggcttcatcttcgaaacccctactccttcacccccatgctggaagagggtgcaggcagcaaggtgcccaggtgccttctgctgggcacagacatggcagaaaaccagaagcagatcgcccagttctcccagaaggatgcccaggtctttcccaaatatgaggagttcatgcatcgcttggcattagccattgaccctctgctggatgcggcccccgtggacatggcggccttccagcatggctccttgctgcaaaggatgaggtcgctctccaccctcaagcccctgctgaaggcaggccgcatcctgggagcccagcttccccgatattatgaggtcctcacagctcccattaccaaggtgctggatcagtggttcgagtctgagcctttaaaagccactctagccacagatgcagtgattggagccatgacaagtccccacactccggggagtgggtatgtgctgctgcaccatgtgatggggggcctggagggaatgcagggggcctggggctacgtccaggggggcatgggtgccctctctgatgcgatcgcaagctcagccaccacacatggagcaagcatcttcactgaaaagacagtggcgaaggtgcaggtgaacagtgaaggctgtgttcaaggagttgtgctggaagatggcacagaggtgagaagcaaaatggtgctgtccaacacatcaccgcagatcaccttcctgaagctgacgccacaggagtggcttcctgaggagttcctggagagaatctctcagctggacacccggtcgcctgtcaccaagatcaatgtggccgtagacaggctgcccagcttcctggcggcccccaatgctcccaggggccagccgctgccccatcaccaatgctccatccacctgaactgtgaagacaccctcctccttcatcaggcctttgaagatgccatggatggcctgccttcccacaggcctgtgattgagctctgcatcccttcctcgctggaccccaccctggctccccctggctgccatgtagtctccctcttcactcagtacacgccctatacgctggctggaggcaaggcctgggacgagcaggagagagacgcttatgcagacagagtgtttgattgcatcgaggtctatgcccctggcttcaaggactctgtggttggcagagacatcctcacaccaccagatttggagagaatcttcgggcttcctggagggaacatattccactgcgccatgtccctggaccagctctacttcgcccgccccgtgcccctgcattctggctaccgctgccctctccagggcctgtatctctgtggaagtggggctcatcctggaggaggtgtgatgggagctgctgggcgaaatgcagcacatgtggcctttagggacctcaagagcatgtgaccctgaaccagctctgacccaggaagaagactccacccctgaattccaagtgctccattggatcagcttcccaggaagttcagcttcgggttagtacataaggccaccacaatgctcaagaaattattttagaaaaaacgtacgagttacatttagtgcaagttgaccttatgcccatgcctccatacatggactggttctgttttattaaaactaatatttcatacagattaaaaagat

SEQ ID NO: 358409 - DNA, 2255 bp, Homo sapiens
ccaatcgctagcaaactccctgcctagcaaggcccagcctggggcagaaatggctgcaagtggccgaggtctctgcaaggctgtggccgcctctcccttcccggcgtggagacgagataacacggaagccaggggaggtctgaagcctgagtatgatgcggtggtgataggagcaggacacaacggactggtggctgcagcgtacctgcagagactgggggtgaacaccgccgtcttcgagaggcgccatgtgatcgggggtgcagctgtcactgaggagatcatcccagggtttaagttctcccgtgcgtcctacctgctcagcctgctgaggccgcagatttacactgatctggagctgaagaaacatgggctgaggcttcatcttcgaaacccctactccttcacccccatgctggaagagggtgcaggcagcaaggtgcccaggtgccttctgctgggcacagacatggcagaaaaccagaagcagatcgcccagttctcccagaaggatgcccaggtctttcccaaatatgaggagttcatgcatcgcttggcattagccattgaccctctgctggatgcggcccccgtggacatggcggccttccagcatggctccttgctgcaaaggatgaggtcgctctccaccctcaagcccctgctgaaggcaggccgcatcctgggagcccagcttccccgatattatgaggtcctcacagctcccattaccaaggtgctggatcagtggttcgagtctgagcctttaaaagccactctagccacagatgcagtgattggagccatgacaagtccccacactccggggagtgggtatgtgctgctgcaccatgtgatggggggcctggagggaatgcagggggcctggggctacgtccaggggggcatgggtgccctctctgatgcgatcgcaagctcagccaccacacatggagcaagcatcttcactgaaaagacagtggcgaaggtgcaggtgaacagtgaaggctgtgttcaaggagttgtgctggaagatggcacagaggtgagaagcaaaatggtgctgtccaacacatcaccgcagatcaccttcctgaagctgacgccacaggagtggcttcctgaggagttcctggagagaatctctcagctggacacccggtcgcctgtcaccaagatcaatgtggccgtagacaggctgcccagcttcctggcggcccccaatgctcccaggggccagccgctgccccatcaccaatgctccatccacctgaactgtgaagacaccctcctccttcatcaggcctttgaagatgccatggatggcctgccttcccacaggcctgtgattgagctctgcatcccttcctcgctggaccccaccctggctccccctggctgccatgtagtctccctcttcactcagtacacgccctatacgctggctggaggcaaggcctgggacgagcaggagagagacgcttatgcagacagagcacagctgactgcacgaaccaaaggagaagcatgagccagagagacaaggaaggctttcaaaggaagggatggtcaagctgggtttccaaggatgactaggagctggccaggcagcaaagggcattccaagcaagagaaacagcttgatcaggccaggcgtgggggctcatgcctgtaattccagcacttcgggaggccgaggcaggcggatcacccgagtgtttgattgcatcgaggtctatgcccctggcttcaaggactctgtggttggcagagacatcctcacaccaccagatttggagagaatcttcgggcttcctggagggaacatattccactgcgccatgtccctggaccagctctacttcgcccgccccgtgcccctgcattctggctaccgctgccctctccagggcctgtatctctgtggaagtggggctcatcctggaggaggtgtgatgggagctgctgggcgaaatgcagcacatgtggcctttagggacctcaagagcatgtgaccctgaaccagctctgacccaggaagaagactccacccctgaattccaagtgctccattggatcagcttcccaggaagttcagcttcgggttagtacataaggccaccacaatgctcaagaaattattttagaaaaaacgtacgagttacatttagtgcaagttgaccttatgcccatgcctccatacatggactggttctgttttattaaaactaatatttcatacagattaaaaagat

SEQ ID NO: 358410 - DNA, 691 bp, Homo sapiens
ccaatcgctagcaaactccctgcctagcaaggcccagcctggggcagaaatggctgcaagtggccgaggtctctgcaaggctgtggccgcctctcccttcccggcgtggagacgagataacacggaagccaggggaggtctgaagcctgagtatgatgcggtggtgataggagcaggacacaacggactggtggctgcagcgtacctgcagagactgggggtgaacaccgccgtcttcgagaggcgccatgtgatcgggggtgcagctgtcactgaggagatcatcccagggtttaagttctcccgtgcgtcctacctgctcagcctgctgaggccgcagatttacactgatctggagctgaaggtagggcccccccgccggcccgattgcacggagggaggaggcagttccatcttcccaacctgtgtggggggtccctgttctgtgcccgaggtgatgcccgcccctgagggctccctcttccacccaagtcttgtgtatcccacgtggtctccctgctgcattcccacagatgggttttgtctcgtccatgtagtgtcttgaaaagtgggaaatttcatccaaaaatcagacttcttttgaagaatgagctttttcaccctcaggcccacgtgggacacctatctgaagccttgggcgcctgagcttacagctgccttgggacatgag

SEQ ID NO: 358411 - DNA, 2665 bp, Homo sapiens
  misc_feature (930)..(930): n is a, c, g, or t
  misc_feature (984)..(984): n is a, c, g, or t
  misc_feature (1567)..(1567): n is a, c, g, or t
  misc_feature (2084)..(2084): n is a, c, g, or t
gaaatgatgcctccatttactgaaaagaggaagaggtggtgggggtggagcagattttagaggctaatcaggcattggggtttgaacaggggatgtttgagatccctggtggacatccgagttcagcgagaacattgcagctgagggacgcagggagaaggggcatttcccgtggccttgaaggagactcatatttggagatcagagggagaacatgctccaggtagaaaaggtgtggcaggcaaaggtggtggggtgggaagcaggtcacagctctgctggggctcggggcagccctagcagctctgtcttccattggtctgctctggaaaaggcagtcaggccactaaagcctggctgaaatctggctgcttgggcgcctgctgtcttaggcctggcccctttccacactcccactgtctgtgtggaccttcgagacatttgcatttgggagctgtggttagagcacagcgtgtgatgaaggcaggcaaggacaggccatgcattcgggggtctggggtcaggcgagctcctcacaggtgctctggaccacgctagcagccgctaagcccgtgcaggtggacaaccactgtggctgtagagcgacaatcgcccagaattggtgtcatctcagcgcctccactgtgtcccaagtcatctcggatgccctaccctccgccctgctgctctttagacctgccgtctcctccctgcccgcacaggcctgtgattgagctctgcatcccttcctcgctggaccccaccctggctccccctggctgccatgtagtctccctcttcactcagtacacgccctatacgctggctggaggcaaggcctgggacgagcaggagagagacgcttatgcagacagaggtaaagacagctgcacgttctgcctccagagccacagccgggcatgcgacccnactgggcctgctcctcctcactgccccattcaggattgacaactgcaggtgccnttccaaagggaggaaatagtcaagggaacctcaagtcaacatagttgactgcaggggtcaggaactgggctaagaaagtcaagaagacacagttcctgccctccagttgctcacagtctagcaagggatggaggagactaattaagaaaccttttattacagcacagctgactgcacgaaccaaaggagaagcatgagccagagagacaaggaaggctttcaaaggaagggatggtcaagctgggtttccaaggatgactaggagctggccaggcagcaaagggcattccaagcaagagaaacagcttgatcaggccaggcgtgggggctcatgcctgtaattccagcacttcgggaggccgaggcaggcggatcacccgaggtcaggagttcaagaccagcctgaccaacatggtgaaaccccgtagctactaaaaacataaaaaaattagcagggtgtggtggcacatgcctgtaatcttagctgctcaggaggctgaggcaggagaatcgtttgaacccagaggcggaggttgcagtgagctgagattgcgccactgcactccagcctgggtgacagagngagactccgtctcaaaaaaaaaaaaaaaaacagcttgagaaaagtgaagaggtgaaaaaagctgcatatgcaaaaggagatcagcagcttcgtgtttaaggttggggtagggaagtggggaaaactggggactggactggcctacccatgcatctttgggatgaattaatcatttgcttgtggactgatttttgtttttcacctattgaggtataatttgcatatgataaaataagcccatttctgtgtgtaatttaatgactgttagtaaatttgccaagttgtacacccatagtgcctcctcttcttcctaataccatctcatttctctgtttttggcaccccagtgtttgattgcatcgaggtctatgcccctggcttcaaggactctgtggttggcagagacatcctcacaccaccagatttggagagaatcttcgggcttcctggaggggtatgtataagcctagggggtctctcaccatagccttccctctgcaccctcacttcctggctntgacctctctgctttatcttgtccctccatactcagctttcatcaggaagggaggacagtggcagggaccccggctgagagagggcagagaagcggtcaaaccgagggaatgggggatccctagtgggggctcagaaacacaggcaggacagcccccactgagaaggtcaccaggattgtggccctctgccttgacaactatgctggctctgccatctgactttcttgagagagagcacccccttctcaaggcagcagcacatcctcagacttgtcaatttatcaaaaactagagattggagacagggagaccagataggaggccaggttcaatcgcctcattgcagctactgagcacttgaaagatcagagaccaccctaggcaacgtagtgagaccccatctctacaaaaacaaaaaccccgccaggtgtggtggtgcgtacctgtggttccagctacccaggaagctgaaacaggatgatcgcttgagcccaggagtttgagactgcagtgagctgtgatgcgtcattacacttcagcctgggcaacagaatgagaccctatctctagaaagaaaatt

SEQ ID NO: 358412 - DNA, 1755 bp, Homo sapiens
ccaatcgctagcaaactccctgcctagcaaggcccagcctggggcagaaatggctgcaagtggccgaggtctctgcaaggctgtggccgcctctcccttcccggcgtggagacgagataacacggaagccaggggaggtctgaagcctgagtatgatgcggtggtgataggagcaggacacaacggactggtggctgcagcgtacctgcagagactgggggtgaacaccgccgtcttcgagaggcgccatgtgatcgggggtgcagctgtcactgaggagatcatcccagggtttaagttctcccgtgcgtcctacctgctcagcctgctgaggccgcagatttacactgatctggagctgaagaaacatgggctgaggcttcatcttcgaaacccctactccttcacccccatgctggaagagggtgcaggcagcaaggtgcccaggtgccttctgctgggcacagacatggcagaaaaccagaagcagatcgcccagttctcccagaaggatgcccaggtctttcccaaatatgaggagttcatgcatcgcttggcattagccattgaccctctgctggatgcggcccccgtggacatggcggccttccagcatggctccttgctgcaaaggatgaggtcgctctccaccctcaagcccctgctgaaggcaggccgcatcctgggagcccagcttccccgatattatgaggtcctcacagctcccattaccaaggtgctggatcagtggttcgagtctgagcctttaaaagccactctagccacagatgcagtgattggagccatgacaagtccccacactccggggagtgggtatgtgctgctgcaccatgtgatggggggcctggagggaatgcagggggcctggggctacgtccaggggggcatgggtgccctctctgatgcgatcgcaagctcagccaccacacatggagcaagcatcttcactgaaaagacagtggcgaaggtgcaggtgaacagtgaaggctgtgttcaaggagttgtgctggaagatggcacagaggtgagaagcaaaatggtgctgtccaacacatcaccgcagatcaccttcctgaagctgacgccacaggagtggcttcctgaggagttcctggagagaatctctcagctggacacccggtcgcctgtcaccaagatcaatgcatggagcaagcatcttcactgaaaagacagtggcgaaggtgcaggtgaacagtgaaggctgtgttcaaggactctgtggttggcagagacatcctcacaccaccagatttggagagaatcttcgggcttcctggagggaacatattccactgcgccatgtccctggaccagctctacttcgcccgccccgtgcccctgcattctggctaccgctgccctctccagggcctgtatctctgtggaagtggggctcatcctggaggaggtgtgatgggagctgctgggcgaaatgcagcacatgtggcctttagggacctcaagagcatgtgaccctgaaccagctctgacccaggaagaagactccacccctgaattccaagtgctccattggatcagcttcccaggaagttcagcttcgggttagtacataaggccaccacaatgctcaagaaattattttagaaaaaacgtacgagttacatttagtgcaagttgaccttatgcccatgcctccatacatggactggttctgttttattaaaactaatatttcatacagattaaaaagat

SEQ ID NO: 358413 - DNA, 563 bp, Homo sapiens
ccaatcgctagcaaactccctgcctagcaaggcccagcctggggcagaaatggctgcaagtggccgaggtctctgcaaggctgtggccgcctctcccttcccggcgtggagacgagataacacggaagccaggggaggtctgaagcctgagtatgatgcggtggtgataggagcaggacacaacggactggtggctgcagcgtacctgcagagactgggggtgaacaccgccgtcttcgagaggcgccatgtgatcgggggtgcagctgtcactgaggagatcatcccagggtttaagttctcccgtgcgtcctacctgctcagcctgctgaggccgcagatttacactgatctggagctgaaggtcagcccacctgctggctggtgaggactcggaggaaacaggagggggtcgcatgtggagcactaggccgccgctgcagcggttcccaaaatggcggcttggagagacgcgcacagattctggaggcagcggatgggatgtcaaggatgaccaggagagagactaaggatgcctcctgggtatgagtgagtttactaca

SEQ ID NO: 358414 - DNA, 897 bp, Homo sapiens
agagaatcgcttgagcgtgggaggcggaggttgcagtgagccgagactgtgccactgcactgtagcctgggccacagagcgaggctccatctcaaaacaaaacaaacaaaaaacaagagaaacgagaggttacaaattggttgatgctgacctgaagtatttcaatataaaaaaatgtcgcctatctaaaaaaaatggagtgtaaagtcctttgggggggcccccatgattttggttaacttttttaagaaacctgggcccccggctcccccaaaggctggagcaactgccttttcagtcgggcaggcatctcctggttccgctcgtctgtgccgtcctgtctgcctctcaccaccagagccctgctcagggtcttgcaggcagtggaattgtgagcctggatagtgggcggcagtgccgttgtaaagcctcctgactgggtttggaatgctgtttgggtaaacacttttcctttctcaggaaatgctgtctatgatttcttcattggccgtgaattaaaccctcgaattggtacttttgatctcaaatacttttgtgaattgcgccccggattgattggatgggtatgtctggttttttttcttctaaatttcaattcaataggtctaattaactgctagaaagaaatgtagaccattcaaaaataagcagtgggtggtatatttttagggataattatggctttccataaatctatcaaaatactttcttgtaagtattttccagaggtttaagatgccctgttacaggttatgacaaattaaataacttttctttgctttatttttattatatcagtttatatttatgtaggaaagtgatagtgtggatgaattaatgtaagaaaaaatgcattttcctcctttttaaatttta

SEQ ID NO: 358415 - DNA, 886 bp, Homo sapiens
gaaatgatagctgtgtccttctcagtgcattgggtccaggggcccatggtgctgagatgtcttattcctggtggcgggtaggagttacggtggcgtctgccaggtgtctcagctgtgaagctcactcatgcctttgtagtgctaaggtctctggggaggtgctttgaggctatatactttccccttttgtttcaggtggttattaacttggtgatgcttttggctgaaatgaaaatacaggaccgcgctgttccatccttggccatgattttagttaatagtttccagcttctctatgtggtggatgctctctggaatgaggtaattaattttaagagccgaggccttggagtcagatggctttgagtgggtgagtgacctgtcagagcctcggcttcttgcacacaaagtgaggggagcatggcctgcctccaaggctgcttgagaggaggacgaggccatccatgcgaagctgacgagggagcactgacaggtgggaagtttctaggcatttgggagtgcttcagtgtttatcagctgttcttgtgtttaaaagtaatattctaaatatttaagattggtggatcttggttttgtttttgtgggtggtggtaattatggtatcacatgaaaatggatggattattactaaattagaatggtgtttcttggactgtcaagagtcacctagtttttaaataatgggggagatgttttattgttaatgttttaaaatacaaagactagctctaattagatgaatgtaaaatcagaaatcaagatgcattgaggaaaccagttgaaataaggctaagtttccatcttgtgtcttttttcatacattgattagtctttctactagttgaagactggtaaatgttttgtt

SEQ ID NO: 358416 - DNA, 3823 bp, Homo sapiens
gaagcgccgcgaggcggggccggggaggcgcgcgcccggcttgcgggactgcggggcgcgagagcgcggccgggtagcgtcgcgcgcgtggatctgccgccgggttgctgtgcgactattctccgggagccgtccgtgtcaccgccggaacctggcgcaggttaattatagaaaatgccaagtaggaaatttgccgatggtgaagtggtaagaggtcgatggcctgggagttcactttattatgaagtagaaattctgagccacgacagcacctcccagctttacactgtaaagtataaagatggaacagagcttgaattgaaagagaatgatattaagcctttaacttcctttaggcaaaggaaaggtggctcaacttccagttccccttccagacgccgagggagtcgatcaaggtcacgctcccgatcccccggtcgaccacctaaaagtgcccgccgatctgcttctgcttcccaccaggccgacattaaggaagcaaggagggaagtggaagttaaattgactccgctgattctgaagccatttggaaatagcatcagcagatataatggggagcctgagcatattgagagaaatgacgcacctcataaaaatacacaggaaaaattcaatttgtcacaagaaagcagttacatagcaacacagtatagccttcgtccaagaagagaagaagtcaaattaaaagaaatagattctaaggaagaaaaatacgttgcaaaagaactggcagtgagaacctttgaagtgacccccatccgggcaaaggacttggagtttggaggagtacctggtgtgtttctcatcatgtttggcctgcctgtgttcctcttcctgttgctgttgatgtgtaaacagaaagatcccagtcttctgaatttccctcctcctttgccagctttgtatgagttatgggaaaccagagtatttggggtctacctcctgtggtttttgattcaagtcctgttctacctactgccaattggaaaggttgtagaaggaacgcctcttattgatggaagaagactcaagtatagattaaatggattctatgcttttatcctgacatctgcagtcatcggaacatctctcttccagggcgtagagtttcattacgtgtacagtcattttcttcagtttgcacttgcggccactgttttttgtgtggtcttgagtgtgtatctctacatgcgctctttgaaagcgccccggaatgacctgtcgcctgccagctctggaaatgctgtctatgatttcttcattggccgtgaattaaaccctcgaattggtacttttgatctcaaatacttttgtgaattgcgccccggattgattggatgggtggttattaacttggtgatgcttttggctgaaatgaaaatacaggaccgcgctgttccatccttggccatgattttagttaatagtttccagcttctctatgtggtggatgctctctggaatgaggaagcgttgttgacgaccatggacatcatccacgatggatttggattcatgctggcttttggagacttggtgtgggttccctttatttacagcttccaagccttttatttagtcagtcatccaaatgaagtgtcttggccaatggcttctctaattattgttctgaaactttgtggttatgtaatcttccgaggtgcaaattctcagaaaaatgcattccggaaaaatcccagtgatccaaagcttgcacatttaaaaaccattcatacttcaacgggaaaaaatcttctagtttctggatggtggggctttgttcgccaccccaattacttgggtgatctcatcatggccttggcgtggtccctcccatgtggttttaaccacattctgccttatttctacataatttatttcaccatgttgcttgtccaccgagaagctcgtgacgagtaccactgtaagaagaaatacggcgtggcttgggaaaagtactgtcagcgtgtgccctaccgtatatttccatacatctactaatgctcttctggcttttctacaaaatactcctgcaattccagctgccatttgcaaaaacaaggaaaaaaatccgaaactttcttttgttgcactgacagggtctgtacttttttttttctttttgagtcaggactatggagccgagtagttgatcttttaatatagccgtgtttacttgtattaacttacagttaacataggaaaaatacaagtaaggatgtgagaatttgcattttaatgggaaattttcaacccttaatctgaaaacagaagacagtcttaatataaatgtactgtgaagaatgctattgatgtttatggtttctgattacttttcaaattttgatgtttttttgccagttggcttttcttaaatgaaaacactgttccatttaaagtacatttatgttttattcagtaagagaatagaattttcatttgtttttctttaaatcctttactaattatataatttgaaagcaaaaagaagggcctatattaaatgctgaaagtgaaaagtgatgacattattagcagacactgcttaaaggagaccatttgtagcagttggcttaacctcaacttctaaaactacattgaaaatgtaaatacatagcttagttttttgtaatatatggtgacttcagatttttttgtacagtattttgaatgtgagatgattgtcaggactaactgtctttttaacaaaacattttcagtattttaaataaaattttgtaaagtaatgtgaattaaaaattttggaacaattagaattcattcactattgtatagaagatgctgttaaaacataggaagggtatttttcttgatccaaagtttgtgaatttggctttgctacctcaattgcaggtgtttgtttgcctttataaactgttgcaaatagaaaaaaaatagaataagtatatatttttggagtaacatcaatatttaaacatttttacacagatcggtgtttgaaaatttgccatttcaggctaatatttttatatatttttgactttttaaaagttcatcagtgtttttgctactgttaagcttatgcagtttatactgtattttttatgtatcctttatatttaccaaacctgactccctgtaaaggagtgctgtcttaaaaacaactgaaggggttaaagtcgtttcttttagtttaatagatgtgcataaggtagctttagcaattaaattctagtgaagttgatatagtctcatttttaattgtcctgtaatggaacagtagcaaattcactaaacttttgtgttcagagttaaattgttctcagtactttcaatgtaggggaatgtaataaacatagtgtgtatgtttgggttttaattacacattttatatatgagccatttagatatgcagtgttaattctatactgcatttgaagtgtatgtaacttagcttatgttaatgcagtcatgaagttggtttgctccagcatccggtagtctttaaacattcttttagtgaaattgtcattgttttatcagtgctaatgtgtgcaagcagtttttttattttgcttttctcctggcatcagaaagtggtggcgttttctgtactggattgcaccaaggaagcttttggggaggaaggaaggacattaaattctttccctggtaatgaaaagagccctttatcaatacagtgctgcaatttctggatatcagctacactttgtttttaagtttgtttttgacatgtttatttggcaaattttataatgaagttttaagttgaaaataaaatgtagcaacattttgatca

SEQ ID NO: 358417 - DNA, 3883 bp, Homo sapiens
gagcagaaaaaaaaaagcttaggatccgtaacagattcggagtcaacaatgacatgactcagcattttggggttcaattattaccaggcttgtaggttgcaggtcaagttgtgtttcggtgtgtaacgcataaaacttctgttccacgctccgcggtgttggggattttctactgcatctcgacagcatctcgggtaacaaccgagcccctcctcgcagcgttaattatagaaaatgccaagtaggaaatttgccgatggtgaagtggtaagaggtcgatggcctgggagttcactttattatgaagtagaaattctgagccacgacagcacctcccagctttacactgtaaagtataaagatggaacagagcttgaattgaaagagaatgatattaagcctttaacttcctttaggcaaaggaaaggtggctcaacttccagttccccttccagacgccgagggagtcgatcaaggtcacgctcccgatcccccggtcgaccacctaaaagtgcccgccgatctgcttctgcttcccaccaggccgacattaaggaagcaaggagggaagtggaagttaaattgactccgctgattctgaagccatttggaaatagcatcagcagatataatggggagcctgagcatattgagagaaatgacgcacctcataaaaatacacaggaaaaattcaatttgtcacaagaaagcagttacatagcaacacagtatagccttcgtccaagaagagaagaagtcaaattaaaagaaatagattctaaggaagaaaaatacgttgcaaaagaactggcagtgagaacctttgaagtgacccccatccgggcaaaggacttggagtttggaggagtacctggtgtgtttctcatcatgtttggcctgcctgtgttcctcttcctgttgctgttgatgtgtaaacagaaagatcccagtcttctgaatttccctcctcctttgccagctttgtatgagttatgggaaaccagagtatttggggtctacctcctgtggtttttgattcaagtcctgttctacctactgccaattggaaaggttgtagaaggaacgcctcttattgatggaagaagactcaagtatagattaaatggattctatgcttttatcctgacatctgcagtcatcggaacatctctcttccagggcgtagagtttcattacgtgtacagtcattttcttcagtttgcacttgcggccactgttttttgtgtggtcttgagtgtgtatctctacatgcgctctttgaaagcgccccggaatgacctgtcgcctgccagctctggaaatgctgtctatgatttcttcattggccgtgaattaaaccctcgaattggtacttttgatctcaaatacttttgtgaattgcgccccggattgattggatgggtggttattaacttggtgatgcttttggctgaaatgaaaatacaggaccgcgctgttccatccttggccatgattttagttaatagtttccagcttctctatgtggtggatgctctctggaatgaggaagcgttgttgacgaccatggacatcatccacgatggatttggattcatgctggcttttggagacttggtgtgggttccctttatttacagcttccaagccttttatttagtcagtcatccaaatgaagtgtcttggccaatggcttctctaattattgttctgaaactttgtggttatgtaatcttccgaggtgcaaattctcagaaaaatgcattccggaaaaatcccagtgatccaaagcttgcacatttaaaaaccattcatacttcaacgggaaaaaatcttctagtttctggatggtggggctttgttcgccaccccaattacttgggtgatctcatcatggccttggcgtggtccctcccatgtggttttaaccacattctgccttatttctacataatttatttcaccatgttgcttgtccaccgagaagctcgtgacgagtaccactgtaagaagaaatacggcgtggcttgggaaaagtactgtcagcgtgtgccctaccgtatatttccatacatctactaatgctcttctggcttttctacaaaatactcctgcaattccagctgccatttgcaaaaacaaggaaaaaaatccgaaactttcttttgttgcactgacagggtctgtacttttttttttctttttgagtcaggactatggagccgagtagttgatcttttaatatagccgtgtttacttgtattaacttacagttaacataggaaaaatacaagtaaggatgtgagaatttgcattttaatgggaaattttcaacccttaatctgaaaacagaagacagtcttaatataaatgtactgtgaagaatgctattgatgtttatggtttctgattacttttcaaattttgatgtttttttgccagttggcttttcttaaatgaaaacactgttccatttaaagtacatttatgttttattcagtaagagaatagaattttcatttgtttttctttaaatcctttactaattatataatttgaaagcaaaaagaagggcctatattaaatgctgaaagtgaaaagtgatgacattattagcagacactgcttaaaggagaccatttgtagcagttggcttaacctcaacttctaaaactacattgaaaatgtaaatacatagcttagttttttgtaatatatggtgacttcagatttttttgtacagtattttgaatgtgagatgattgtcaggactaactgtctttttaacaaaacattttcagtattttaaataaaattttgtaaagtaatgtgaattaaaaattttggaacaattagaattcattcactattgtatagaagatgctgttaaaacataggaagggtatttttcttgatccaaagtttgtgaatttggctttgctacctcaattgcaggtgtttgtttgcctttataaactgttgcaaatagaaaaaaaatagaataagtatatatttttggagtaacatcaatatttaaacatttttacacagatcggtgtttgaaaatttgccatttcaggctaatatttttatatatttttgactttttaaaagttcatcagtgtttttgctactgttaagcttatgcagtttatactgtattttttatgtatcctttatatttaccaaacctgactccctgtaaaggagtgctgtcttaaaaacaactgaaggggttaaagtcgtttcttttagtttaatagatgtgcataaggtagctttagcaattaaattctagtgaagttgatatagtctcatttttaattgtcctgtaatggaacagtagcaaattcactaaacttttgtgttcagagttaaattgttctcagtactttcaatgtaggggaatgtaataaacatagtgtgtatgtttgggttttaattacacattttatatatgagccatttagatatgcagtgttaattctatactgcatttgaagtgtatgtaacttagcttatgttaatgcagtcatgaagttggtttgctccagcatccggtagtctttaaacattcttttagtgaaattgtcattgttttatcagtgctaatgtgtgcaagcagtttttttattttgcttttctcctggcatcagaaagtggtggcgttttctgtactggattgcaccaaggaagcttttggggaggaaggaaggacattaaattctttccctggtaatgaaaagagccctttatcaatacagtgctgcaatttctggatatcagctacactttgtttttaagtttgtttttgacatgtttatttggcaaattttataatgaagttttaagttgaaaataaaatgtagcaacattttgatca

SEQ ID NO: 358418 - DNA, 3045 bp, Homo sapiens
agagaatcgcttgagcgtgggaggcggaggttgcagtgagccgagactgtgccactgcactgtagcctgggccacagagcgaggctccatctcaaaacaaaacaaacaaaaaacaagagaaacgagaggttacaaattggttgatgctgacctgaagtatttcaatataaaaaaatgtcgcctatctaaaaaaaatggagtgtaaagtcctttgggggggcccccatgattttggttaacttttttaagaaacctgggcccccggctcccccaaaggctggagcaactgccttttcagtcgggcaggcatctcctggttccgctcgtctgtgccgtcctgtctgcctctcaccaccagagccctgctcagggtcttgcaggcagtggaattgtgagcctggatagtgggcggcagtgccgttgtaaagcctcctgactgggtttggaatgctgtttgggtaaacacttttcctttctcaggaaatgctgtctatgatttcttcattggccgtgaattaaaccctcgaattggtacttttgatctcaaatacttttgtgaattgcgccccggattgattggatgggtggttattaacttggtgatgcttttggctgaaatgaaaatacaggaccgcgctgttccatccttggccatgattttagttaatagtttccagcttctctatgtggtggatgctctctggaatgaggaagcgttgttgacgaccatggacatcatccacgatggatttggattcatgctggcttttggagacttggtgtgggttccctttatttacagcttccaagccttttatttagtcagtcatccaaatgaagtgtcttggccaatggcttctctaattattgttctgaaactttgtggttatgtaatcttccgaggtgcaaattctcagaaaaatgcattccggaaaaatcccagtgatccaaagcttgcacatttaaaaaccattcatacttcaacgggaaaaaatcttctagtttctggatggtggggctttgttcgccaccccaattacttgggtgatctcatcatggccttggcgtggtccctcccatgtggttttaaccacattctgccttatttctacataatttatttcaccatgttgcttgtccaccgagaagctcgtgacgagtaccactgtaagaagaaatacggcgtggcttgggaaaagtactgtcagcgtgtgccctaccgtatatttccatacatctactaatgctcttctggcttttctacaaaatactcctgcaattccagctgccatttgcaaaaacaaggaaaaaaatccgaaactttcttttgttgcactgacagggtctgtacttttttttttctttttgagtcaggactatggagccgagtagttgatcttttaatatagccgtgtttacttgtattaacttacagttaacataggaaaaatacaagtaaggatgtgagaatttgcattttaatgggaaattttcaacccttaatctgaaaacagaagacagtcttaatataaatgtactgtgaagaatgctattgatgtttatggtttctgattacttttcaaattttgatgtttttttgccagttggcttttcttaaatgaaaacactgttccatttaaagtacatttatgttttattcagtaagagaatagaattttcatttgtttttctttaaatcctttactaattatataatttgaaagcaaaaagaagggcctatattaaatgctgaaagtgaaaagtgatgacattattagcagacactgcttaaaggagaccatttgtagcagttggcttaacctcaacttctaaaactacattgaaaatgtaaatacatagcttagttttttgtaatatatggtgacttcagatttttttgtacagtattttgaatgtgagatgattgtcaggactaactgtctttttaacaaaacattttcagtattttaaataaaattttgtaaagtaatgtgaattaaaaattttggaacaattagaattcattcactattgtatagaagatgctgttaaaacataggaagggtatttttcttgatccaaagtttgtgaatttggctttgctacctcaattgcaggtgtttgtttgcctttataaactgttgcaaatagaaaaaaaatagaataagtatatatttttggagtaacatcaatatttaaacatttttacacagatcggtgtttgaaaatttgccatttcaggctaatatttttatatatttttgactttttaaaagttcatcagtgtttttgctactgttaagcttatgcagtttatactgtattttttatgtatcctttatatttaccaaacctgactccctgtaaaggagtgctgtcttaaaaacaactgaaggggttaaagtcgtttcttttagtttaatagatgtgcataaggtagctttagcaattaaattctagtgaagttgatatagtctcatttttaattgtcctgtaatggaacagtagcaaattcactaaacttttgtgttcagagttaaattgttctcagtactttcaatgtaggggaatgtaataaacatagtgtgtatgtttgggttttaattacacattttatatatgagccatttagatatgcagtgttaattctatactgcatttgaagtgtatgtaacttagcttatgttaatgcagtcatgaagttggtttgctccagcatccggtagtctttaaacattcttttagtgaaattgtcattgttttatcagtgctaatgtgtgcaagcagtttttttattttgcttttctcctggcatcagaaagtggtggcgttttctgtactggattgcaccaaggaagcttttggggaggaaggaaggacattaaattctttccctggtaatgaaaagagccctttatcaatacagtgctgcaatttctggatatcagctacactttgtttttaagtttgtttttgacatgtttatttggcaaattttataatgaagttttaagttgaaaataaaatgtagcaacattttgatca

SEQ ID NO: 358419 - DNA, 3769 bp, Homo sapiens
gaagcgccgcgaggcggggccggggaggcgcgcgcccggcttgcgggactgcggggcgcgagagcgcggccgggtagcgtcgcgcgcgtggatctgccgccgggttgctgtgcgactattctccgggagccgtccgtgtcaccgccggaacctggcgcaggttaattatagaaaatgccaagtaggaaatttgccgatggtgaagtggtaagaggtcgatggcctgggagttcactttattatgaagtagaaattctgagccacgacagcacctcccagctttacactgtaaagtataaagatggaacagagcttgaattgaaagagaatgatattaagcctttaacttcctttaggcaaaggaaaggtggctcaacttccagttccccttccagacgccgagggagtcgatcaaggtcacgctcccgatcccccggtcgaccacctaaaagtgcccgccgatctgcttctgcttcccaccaggccgacattaaggaagcaaggagggaagtggaagttaaattgactccgctgattctgaagccatttggaaatagcatcagcagatataatggggagcctgagcatattgagagaaatgacgcacctcataaaaatacacaggaaaaattcaatttgtcacaagaaagcagttacatagcaacacagtatagccttcgtccaagaagagaagaagtcaaattaaaagaaatagattctaaggaagaaaaatacgttgcaaaagaactggcagtgagaacctttgaagtgacccccatccgggcaaaggacttggagtttggaggagtacctggtgtgtttctcatcatgtttggcctgcctgtgttcctcttcctgttgctgttgatgtgtaaacagaaagatcccagtcttctgaatttccctcctcctttgccagctttgtatgagttatgggaaaccagagtatttggggtctacctcctgtggtttttgattcaagtcctgttctacctactgccaattggaaaggttgtagaaggaacgcctcttattgatggaagaagactcaagtatagattaaatggattctatgcttttatcctgacatctgcagtcatcggaacatctctcttccagggcgtagagtttcattacgtgtacagtcattttcttcagtttgcacttgcggccactgttttttgtgtggtcttgagtgtgtatctctacatgcgctctttgaaagcgccccggaatgacctgtcgcctgccagctctggaaatgctgtctatgatttcttcattggccgtgaattaaaccctcgaattggtacttttgatctcaaatacttttgtgaattgcgccccggattgattggatgggtggttattaacttggtgatgcttttggctgaaatgaaaatacaggaccgcgctgttccatccttggccatgattttagttaatagtttccagcttctctatgtggtggatgctctctggaatgaggaagcgttgttgacgaccatggacatcatccacgatggatttggattcatgctggcttttggagacttggtgtgggttccctttatttacagcttccaagccttttatttagtcagtcatccaaatgaagtgtcttggccaatggcttctctaattattgttctgaaactttgtggttatgtaatcttccgaggtgcaaattctcagaaaaatgcattccggaaaaatcccagtgatccaaagcttgcacatttaaaaaccattcatacttcaacgggaaaaaatcttctagtttctggatggtggggctttgttcgccaccccaattacttgggtgatctcatcatggccttggcgtggtccctcccatgtggttttaaccacattctgccttatttctacataatttatttcaccatgttgcttgtccaccgagaagctcgtgacgagtaccactgtaagaagaaatacggcgtggcttgggaaaagtactgtcagcgtgtgccctaccgtatatttccatacatctactaatgctcttctggcttttctacaaaatactcctgcaattccagctgccatttgcaaaaacaaggaaaaaaatccgaaactttcttttgttgcactgacagggtctgtacttttttttttctttttgagtcaggactatggagccgagtagttgatcttttaatatagccgtgtttacttgtattaacttacagttaacataggaaaaatacaagtaaggatgtgagaatttgcattttaatgggaaattttcaacccttaatctgaaaacagaagacagtcttaatataaatgtactgtgaagaatgctattgatgtttatggtttctgattacttttcaaattttgatgtttttttgccagttggcttttcttaaatgaaaacactgttccatttaaagtacatttatgttttattcagtaagagaatagaattttcatttgtttttctttaaatcctttactaattatataatttgaaagcaaaaagaagggcctatattaaatgctgaaagtgaaaagtgatgacattattagcagacactgcttaaaggagaccatttgtagcagttggcttaacctcaacttctaaaactacattgaaaatgtaaatacatagcttagttttttgtaatatatggtgacttcagatttttttgtacagtattttgaatgtgagatgattgtcaggactaactgtctttttaacaaaacattttcagtattttaaataaaattttgtaaagtaatgtgaattaaaaattttggaacaattagaattcattcactattgtatagaagatgctgttaaaacataggaagggtatttttcttgatccaaagtttgtgaatttggctttgctacctcaattgcaggtgtttgtttgcctttataaactgttgcaaatagaaaaaaaatagaataagtatatatttttggagtaacatcaatatttaaacatttttacacagatcggtgtttgaaaatttgccatttcaggctaatatttttatatatttttgactttttaaaagttcatcagtgtttttgctactgttaagcttatgcagtttatactgtattttttatgtatcctttatatttaccaaacctgactccctgtaaaggagtgctgtcttagtagctttagcaattaaattctagtgaagttgatatagtctcatttttaattgtcctgtaatggaacagtagcaaattcactaaacttttgtgttcagagttaaattgttctcagtactttcaatgtaggggaatgtaataaacatagtgtgtatgtttgggttttaattacacattttatatatgagccatttagatatgcagtgttaattctatactgcatttgaagtgtatgtaacttagcttatgttaatgcagtcatgaagttggtttgctccagcatccggtagtctttaaacattcttttagtgaaattgtcattgttttatcagtgctaatgtgtgcaagcagtttttttattttgcttttctcctggcatcagaaagtggtggcgttttctgtactggattgcaccaaggaagcttttggggaggaaggaaggacattaaattctttccctggtaatgaaaagagccctttatcaatacagtgctgcaatttctggatatcagctacactttgtttttaagtttgtttttgacatgtttatttggcaaattttataatgaagttttaagttgaaaataaaatgtagcaacattttgatca

SEQ ID NO: 358420 - DNA, 3854 bp, Homo sapiens
gaagcgccgcgaggcggggccggggaggcgcgcgcccggcttgcgggactgcggggcgcgagagcgcggccgggtagcgtcgcgcgcgtggatctgccgccgggttgctgtgcgactattctccgggagccgtccgtgtcaccgccggaacctggcgcaggttaattatagaaaatgccaagtaggaaatttgccgatggtgaagtggtaagaggtcgatggcctgggagttcactttattatgaagtagaaattctgagccacgacagcacctcccagctttacactgtaaagtataaagatggaacagagcttgaattgaaagagaatgatattaagcctttaacttcctttaggcaaaggaaaggtggctcaacttccagttccccttccagacgccgagggagtcgatcaaggtcacgctcccgatcccccggtcgaccacctaaaagtgcccgccgatctgcttctgcttcccaccaggccgacattaaggaagcaaggagggaagtggaagttaaattgactccgctgattctgaagccatttggaaatagcatcagcagatataatggggagcctgagcatattgagagaaatgacgcacctcataaaaatacacaggaaaaattcaatttgtcacaagaaagcagttacatagcaacacagtatagccttcgtccaagaagagaagaagtcaaattaaaagaaatagattctaaggaagaaaaatacgttgcaaaagaactggcagtgagaacctttgaagtgacccccatccgggcaaaggacttggagtttggaggagtacctggtgtgtttctcatcatgtttggcctgcctgtgttcctcttcctgttgctgttgatgtgtaaacagaaagatcccagtcttctgaatttccctcctcctttgccagctttgtatgagttatgggaaaccagagtatttggggtctacctcctgtggtttttgattcaagtcctgttctacctactgccaattggaaaggttgtagaaggaacgcctcttattgatggaagaagactcaagtatagattaaatggattctatgcttttatcctgacatctgcagtcatcggaacatctctcttccagggcgtagagtttcattacgtgtacagtcattttcttcagtttgcacttgcggccactgttttttgtgtggtcttgagtgtgtatctctacatgcgctctttgaaagcgccccggaatgacctgtcgcctgccagctctggaaatgctgtctatgatttcttcattggccgtgaattaaaccctcgaattggtacttttgatctcaaatacttttgtgaattgcgccccggattgattggatgggtggttattaacttggtgatgcttttggctgaaatgaaaatacaggaccgcgctgttccatccttggccatgattttagttaatagtttccagcttctctatgtggtggatgctctctggaatgaggaagcgttgttgacgaccatggacatcatccacgatggatttggattcatgctggcttttggagacttggtgtgggttccctttatttacagcttccaagccttttatttagtcagtcatccaaatgaagtgtcttggccaatggcttctctaattattgttctgaaactttgtggttatgtaatcttccgaggtgcaaattctcagaaaaatgcattccggaaaaatcccagtgatccaaagcttgcacatttaaaaaccattcatacttcaacgggaaaaaatcttctagtttctggatggtggggctttgttcgccaccccaattacttgggtgatctcatcatggccttggcgtggtccctcccatgtggttttaaccacattctgccttatttctacataatttatttcaccatgttgcttgtccaccgagaagctcgtgacgagtaccactgtaagaagaaatacggcgtggcttgggaaaagtactgtcagcgtgtgccctaccgtatatttccatacatctactaatgctcttctggcttttctacaaaatactcctgcaattccagctgccatttgcaaaaacaaggaaaaaaatccgaaactttcttttgttgcactgacagggtctgtacttttttttttctttttgagtcaggactatggagccgagtagttgatcttttaatatagccgtgtttacttgtattaacttacagttaacataggaaaaatacaagtaaggatgtgagaatttgcattttaatgggaaattttcaacccttaatctgaaaacagaagacagtcttaatataaatgtactgtgaagaatgctattgatgtttatggtttctgattacttttcaaattttgatgtttttttgccagttggcttttcttaaatgaaaacactgttccatttaaagtacatttatgttttattcagtaagagaatagaattttcatttgtttttctttaaatcctttactaattatataatttgaaagcaaaaagaagggcctatattaaatgctgaaagtgaaaagtgatgacattattagcagacactgcttaaaggagaccatttgtagcagttggcttaacctcaacttctaaaactacattgaaaatgtaaatacatagcttagttttttgtaatatatggtgacttcagatttttttgtacagtattttgaatgtgagatgattgtcaggactaactgtctttttaacaaaacattttcagtattttaaataaaattttgtaaagtaatgtgaattaaaaattttggaacaattagaattcattcactattgtatagaagatgctgttaaaacataggaagggtatttttcttgatccaaagtttgtgaatttggctttgctacctcaattgcaggtgtttgtttgcctttataaactgttgcaaatagaaaaaaaatagaataagtatatatttttggagtaacatcaatatttaaacatttttacacagatcggtgtttgaaaatttgccatttcaggctaatatttttatatatttttgactttttaaaagttcatcagtgtttttgctactgttaagcttatgcagtttatactgtattttttatgtatcctttatatttaccaaacctgactccctgtaaaggagtgctgtcttaaaaacaactgaaggggttaaagtcgtttcttttagtttaatagatgtgcataaggtagctttagcaattaaattctagtgaagttgatatagtctcatttttaattgtcctgtaatggaacagtagcaaattcactaaacttttgtgttcagagttaaattgttctcagtactttcaatgtaggggaatgtaataaacatagtgtgtatgtttgggttttaattacacattttatatatgagccatttagatatgcagtgttaattctatactgcatttgaagtgtatgtaacttagcttatgttaatgcagtcatgaagttggtttgctccagcatccggtagtctttaaacattcttttagtgaaattgtcattgttttatcagtgctaatgtgtgcaagcagtttttttattttgcttttctcctggcatcagaaagtggtggcgttttctgtactggattgcaccaaggaagcttttggggaggaaggaaggacattaaattctttccctggtaatgaaaagagccctttatcaatacagtgctgcaatttctggatatcagctacactttgtttttaagtttgtttttgacatgtttatttggcaaattttataatgaagttttaagttgaaaataaaatgtagcaacattttgatcaaaaaaaacgagaacaaccaccccccaaaaag

SEQ ID NO: 358421 - DNA, 3898 bp, Homo sapiens
gaagcgccgcgaggcggggccggggaggcgcgcgcccggcttgcgggactgcggggcgcgagagcgcggccgggtagcgtcgcgcgcgtggatctgccgccgggttgctgtgcgactattctccgggagccgtccgtgtcaccgccggaacctggcgcaggttaattatagaaaatgccaagtaggaaatttgccgatggtgaagtggtaagaggtcgatggcctgggagttcactttattatgaagtagaaattctgagccacgacagcacctcccagctttacactgtaaagtataaagatggaacagagcttgaattgaaagagaatgatattaagcctttaacttcctttaggcaaaggaaaggtggctcaacttccagttccccttccagacgccgagggagtcgatcaaggtcacgctcccgatcccccggtcgaccacctaaaagtgcccgccgatctgcttctgcttcccaccaggccgacattaaggaagcaaggagggaagtggaagttaaattgactccgctgattctgaagccatttggaaatagcatcagcagatataatggggagcctgagcatattgagagaaatgacgcacctcataaaaatacacaggaaaaattcaatttgtcacaagaaagcagttacatagcaacacagtatagccttcgtccaagaagagaagaagtcaaattaaaagaaatagattctaaggaagaaaaatacgttgcaaaagaactggcagtgagaacctttgaagtgacccccatccgggcaaaggacttggagtttggaggagtacctggtgtgtttctcatcatgtttggcctgcctgtgttcctcttcctgttgctgttgatgtgtaaacagaaagatcccagtcttctgaatttccctcctcctttgccagctttgtatgagttatgggaaaccagagtatttggggtctacctcctgtggtttttgattcaagtcctgttctacctactgccaattggaaaggttgtagaaggaacgcctcttattgatggaagaagactcaagtatagattaaatggattctatgcttttatcctgacatctgcagtcatcggaacatctctcttccagggcgtagagtttcattacgtgtacagtcattttcttcagtttgcacttgcggccactgttttttgtgtggtcttgagtgtgtatctctacatgcgctctttgaaagcgccccggaatgacctgtcgcctgccagctctggaaatgctgtctatgatttcttcattggccgtgaattaaaccctcgaattggtacttttgatctcaaatacttttgtgaattgcgccccggattgattggatgggtggttattaacttggtgatgcttttggctgaaatgaaaatacaggaccgcgctgttccatccttggccatgattttagttaatagtttccagcttctctatgtggtggatgctctctggaatgaggaagcgttgttgacgaccatggacatcatccacgatggatttggattcatgctggcttttggagacttggtgtgggttccctttatttacagcttccaagccttttatttagtcagtcatccaaatgaagtgtcttggccaatggcttctctaattattgttctgaaactttgtggttatgtaatcttccgaggtgcaaattctcagaaaaatgcattccggaaaaatcccagtgatccaaagcttgcacatttaaaaaccattcatacttcaacgggaaaaaatcttctagtttctggatggtggggctttgttcgccaccccaattacttgggtgatctcatcatggccttggcgtggtccctcccatgtggttttaaccacattctgccttatttctacataatttatttcaccatgttgcttgtccaccgagaagctcgtgacgagtaccactgtaagaagaaatacggcgtggcttgggaaaagtactgtcagcgtgtgccctaccgtatatttccatacatctactaatgctcttctggcttttctacaaaatactcctgcaattccagctgccatttgcaaaaacaaggaaaaaaatccgaaactttcttttgttgcactgacagggtctgtacttttttttttctttttgagtcaggactatggagccgagtagttgatcttttaatatagccgtgtttacttgtattaacttacagttaacataggaaaaatacaagtaaggatgtgagaatttgcattttaatgggaaattttcaacccttaatctgaaaacagaagacagtcttaatataaatgtactgtgaagaatgctattgatgtttatggtttctgattacttttcaaattttgatgtttttttgccagttggcttttcttaaatgaaaacactgttccatttaaagtacatttatgttttattcagtaagagaatagaattttcatttgtttttctttaaatcctttactaattatataatttgaaagcaaaaagaagggcctatattaaatgctgaaagtgaaaagtgatgacattattagcagacactgcttaaaggagaccatttgtagcagttggcttaacctcaacttctaaaactacattgaaaatgtaaatacatagcttagttttttgtaatatatggtgacttcagatttttttgtacagtattttgaatgtgagatgattgtcaggactaactgtctttttaacaaaacattttcagtattttaaataaaattttgtaaagtaatgtgaattaaaaattttggaacaattagaattcattcactattgtatagaagatgctgttaaaacataggaagggtatttttcttgatccaaagtttgtgaatttggctttgctacctcaattgcaggtgtttgtttgcctttataaactgttgcaaatagaaaaaaaatagaataagtatatatttttggagtaacatcaatatttaaacatttttacacagatcggtgtttgaaaatttgccatttcaggctaatatttttatatatttttgactttttaaaagttcatcagtgtttttgctactgttaagcttatgcagtttatactgtattttttatgtatcctttatatttaccaaacctgactccctgtaaaggagtgctgtcttaaaaacaactgaaggggttaaagtcgtttcttttagtttaatagatgtgcataaggtagctttagcaattaaattctagtgaagttgatatagtctcatttttaattgtcctgtaatggaacagtagcaaattcactaaacttttgtgttcagagttaaattgttctcagtactttcaatgtaggggaatgtaataaacatagtgtgtatgtttgggttttaattacacattttatatatgagccatttagatatgcagtgttaattctatactgcatttgaagtgtatgtaacttagcttatgttaatgcagtcatgaagttggtttgctccagcatccggtagtctttaaacattcttttagtgaaattgtcattgttttatcagtgctaatgtgtgcaagcagtttttttattttgcttttctcctggcatcagaaagtggtggcgttttctgtactggattgcaccaaggaagcttttggggaggaaggaaggacattaaattctttccctggtaatgaaaagagccctttatcaatacagtgctgcaatttctggatatcagctacacttggtcataagattgggtcgacctgttaattgggaaatttctatgaagtctcaagggaaataccagttgcacctctggccccaaaaaacaaacacaccacggggggccgtaacaacaaccaaaaaggggtacacaaggcggacaccaggaacacgcagcacccccg

SEQ ID NO: 358422 - DNA, 3011 bp, Homo sapiens
gaagcgccgcgaggcggggccggggaggcgcgcgcccggcttgcgggactgcggggcgcgagagcgcggccgggtagcgtcgcgcgcgtggatctgccgccgggttgctgtgcgactattctccgggagccgtccgtgtcaccgccggaacctggcgcaggttaattatagaaaatgccaagtaggaaatttgccgatggtgaagtggtaagaggtcgatggcctgggagttcactttattatgaagtagaaattctgagccacgacagcacctcccagctttacactgtaaagtataaagatggaacagagcttgaattgaaagagaatgatattaagcctttaacttcctttaggcaaaggaaaggtggctcaacttccagttccccttccagacgccgagggagtcgatcaaggtcacgctcccgatcccccggtcgaccacctaaaagtgcccgccgatctgcttctgcttcccaccaggccgacattaaggaagcaaggagggaagtggaagttaaattgactccgctgattctgaagccatttggaaatagcatcagcagatataatggggagcctgagcatattgagagaaatgacgcacctcataaaaatacacaggaaaaattcaatttgtcacaagaaagcagttacatagcaacacagtatagccttcgtccaagaagagaagaagtcaaattaaaagaaatagattctaaggaagaaaaatacgttgcaaaagaactggcagtgagaacctttgaagtgacccccatccgggcaaaggacttggagtttggaggagtacctggtgtgtttctcatcatgtttggcctgcctgtgttcctcttcctgttgctgttgatgtgtaaacagaaagatcccagtcttctgaatttccctcctcctttgccagctttgtatgagttatgggaaaccagagtatttggggtctacctcctgtggtttttgattcaagtcctgttctacctactgccaattggaaaggttgtagaaggaacgcctcttattgatggaagaagactcaagtatagattaaatggattctatgcttttatcctgacatctgcagtcatcggaacatctctcttccagggcgtagagtttcattacgtgtacagtcattttcttcagtttgcacttgcggccactgttttttgtgtggtcttgagtgtgtatctctacatgcgctctttgaaagcgccccggaatgacctgtcgcctgccagctctggaaatgctgtctatgatttcttcattggccgtgaattaaaccctcgaattggtacttttgatctcaaatacttttgtgaattgcgccccggattgattggatgggtggttattaacttggtgatgcttttggctgaaatgaaaatacaggaccgcgctgttccatccttggccatgattttagttaatagtttccagcttctctatgtggtggatgctctctggaatgaggaagcgttgttgacgaccatggacatcatccacgatggatttggattcatgctggcttttggagacttggtgtgggttccctttatttacagcttccaagccttttatttagtcagtcatccaaatgaagtgtcttggccaatggcttctctaattattgttctgaaactttgtggttatgtaatcttccgaggtgcaaattctcagaaaaatgcattccggaaaaatcccagtgatccaaagcttgcacatttaaaaaccattcatacttcaacgggaaaaaatcttctagtttctggatggtggggctttgttcgccaccccaattacttgggtgatctcatcatggccttggcgtggtccctcccatgtggttttaaccacattctgccttatttctacataatttatttcaccatgttgcttgtccaccgagaagctcgtgacgagtaccactgtaagaagaaatacggcgtggcttgggaaaagtactgtcagcgtgtgccctaccgtatatttccatacatctactaatgctcttctggcttttctacaaaatactcctgcaattccagctgccatttgcaaaaacaaggaaaaaaatccgaaactttcttttgttgcactgacagggtctgtacttttttttttctttttgagtcaggactatggagccgagtagttgatcttttaatatagccgtgtttacttgtattaacttacagttaacataggaaaaatacaagtaaggatgtgagaatttgccatttcaggctaatatttttatatatttttgactttttaaaagttcatcagtgtttttgctactgttaagcttatgcagtttatactgtattttttatgtatcctttatatttaccaaacctgactccctgtaaaggagtgctgtcttagtagctttagcaattaaattctagtgaagttgatatagtctcatttttaattgtcctgtaatggaacagtagcaaattcactaaacttttgtgttcagagttaaattgttctcagtactttcaatgtaggggaatgtaataaacatagtgtgtatgtttgggttttaattacacattttatatatgagccatttagatatgcagtgttaattctatactgcatttgaagtgtatgtaacttagcttatgttaatgcagtcatgaagttggtttgctccagcatccggtagtctttaaacattcttttagtgaaattgtcattgttttatcagtgctaatgtgtgcaagcagtttttttattttgcttttctcctggcatcagaaagtggtggcgttttctgtactggattgcaccaaggaagcttttggggaggaaggaaggacattaaattctttccctggtaatgaaaagagccctttatcaatacagtgctgcaatttctggatatcagctacactttgtttttaagtttgtttttgacatgtttatttggcaaattttataatgaagttttaagttgaaaataaaatgtagcaacattttgatca

SEQ ID NO: 358423 - DNA, 1780 bp, Homo sapiens
gaagcgccgcgaggcggggccggggaggcgcgcgcccggcttgcgggactgcggggcgcgagagcgcggccgggtagcgtcgcgcgcgtggatctgccgccgggttgctgtgcgactattctccgggagccgtccgtgtcaccgccggaacctggcgcaggttaattatagaaaatgccaagtaggaaatttgccgatggtgaagtggtaagaggtcgatggcctgggagttcactttattatgaagtagaaattctgagccacgacagcacctcccagctttacactgtaaagtataaagatggaacagagcttgaattgaaagagaatgatattaagcctttaacttcctttaggcaaaggaaaggtggctcaacttccagttccccttccagacgccgagggagtcgatcaaggtcacgctcccgatcccccggtcgaccacctaaaagtgcccgccgatctgcttctgcttcccaccaggccgacattaaggaagcaaggagggaagtggaagttaaattgactccgctgattctgaagccatttggaaatagcatcagcagatataatggggagcctgagcatattgagagaaatgacgcacctcataaaaatacacaggaaaaattcaatttgtcacaagaaagcagttacatagcaacacagtatagccttcgtccaagaagagaagaagtcaaattaaaagaaatagattctaaggaagaaaaatacgttgcaaaagaactggcagtgagaacctttgaagtgacccccatccgggcaaaggacttggagtttggaggagtacctggtgtgtttctcatcatgtttggcctgcctgtgttcctcttcctgttgctgttgatgtgtaaacagaaagatcccagtcttctgaatttccctcctcctttgccagctttgtatgagttatgggaaaccagagtatttggggtctacctcctgtggtttttgattcaagtcctgttctacctactgccaattggaaaggttgtagaaggaacgcctcttattgatggaagaagactcaagtatagattaaatggattctatgcttttatcctgacatctgcagtcatcggaacatctctcttccagggcgtagagtttcattacgtgtacagtcattttcttcagtttgcacttgcggccactgttttttgtgtggtcttgagtgtgtatctctacatgcgctctttgaaagcgccccggaatgacctgtcgcctgccagctctggaaatgctgtctatgatttcttcattggccgtgaattaaaccctcgaattggtacttttgatctcaaatacttttgtgaattgcgccccggattgattggatgggtggttattaacttggtgatgcttttggctgaaatgaaaatacaggaccgcgctgttccatccttggccatgattttagttaatagtttccagcttctctatgtggtggatgctctctggaatgaggaagcgttgttgacgaccatggacatcatccacgatggatttggattcatgctggcttttggagacttggtgtgggttccctttatttacagcttccaagccttttatttagtcagtcatccaaatgaagtgtcttggccaatggcttctctaattattgttctgaaactttgtggttatgtaatcttccgaggtgcaaattctcagaaaaatgcattccggaaaaatcccagtgatccaaagcttgcacatgtaagaccatcatacttcacgggaaagatcctcgaggtcc

SEQ ID NO: 358424 - DNA, 1675 bp, Homo sapiens
gaagcgccgcgaggcggggccggggaggcgcgcgcccggcttgcgggactgcggggcgcgagagcgcggccgggtagcgtcgcgcgcgtggatctgccgccgggttgctgtgcgactattctccgggagccgtccgtgtcaccgccggaacctggcgcaggttaattatagaaaatgccaagtaggaaatttgccgatggtgaagtggtaagaggtcgatggcctgggagttcactttattatgaagtagaaattctgagccacgacagcacctcccagctttacactgtaaagtataaagatggaacagagcttgaattgaaagagaatgatattaagcctttaacttcctttaggcaaaggaaaggtggctcaacttccagttccccttccagacgccgagggagtcgatcaaggtcacgctcccgatcccccggtcgaccacctaaaagtgcccgccgatctgcttctgcttcccaccaggccgacattaaggaagcaaggagggaagtggaagttaaattgactccgctgattctgaagccatttggaaatagcatcagcagatataatggggagcctgagcatattgagagaaatgacgcacctcataaaaatacacaggaaaaattcaatttgtcacaagaaagcagttacatagcaacacagtatagccttcgtccaagaagagaagaagtcaaattaaaagaaatagattctaaggaagaaaaatacgttgcaaaagaactggcagtgagaacctttgaagtgacccccatccgggcaaaggacttggagtttggaggagtacctggtgtgtttctcatcatgtttggcctgcctgtgttcctcttcctgttgctgttgatgtgtaaacagaaagatcccagtcttctgaatttccctcctcctttgccagctttgtatgagttatgggaaaccagagtatttggggtctacctcctgtggtttttgattcaagtcctgttctacctactgccaattggaaaggttgtagaaggaacgcctcttattgatggaagaagactcaagtatagattaaatggattctatgcttttatcctgacatctgcagtcatcggaacatctctcttccagggcgtagagtttcattacgtgtacagtcattttcttcagtttgcacttgcggccactgttttttgtgtggtcttgagtgtgtatctctacatgcgctctttgaaagcgccccggaatgacctgtcgcctgccagctctggaaatgctgtctatgatttcttcattggccgtgaattaaaccctcgaattggtacttttgatctcaaatacttttgtgaattgcgccccggattgattggatgggtatgtctggttttttttcttctaaatttcaattcaataggtctaattaactgctagaaagaaatgtagaccattcaaaaataagcagtgggtggtatatttttagggataattatggctttccataaatctatcaaaatactttcttgtaagtattttccagaggtttaagatgccctgttacaggttatgacaaattaaataacttttctttgctttatttttattatatcagtttatatttatgtaggaaagtgatagtgtggatgaattaatgtaagaaaaaatgcattttcctcctttttaaatttta

SEQ ID NO: 358425 - DNA, 1409 bp, Homo sapiens
gaagcgccgcgaggcggggccggggaggcgcgcgcccggcttgcgggactgcggggcgcgagagcgcggccgggtagcgtcgcgcgcgtggatctgccgccgggttgctgtgcgactattctccgggagccgtccgtgtcaccgccggaacctggcgcaggttaattatagaaaatgccaagtaggaaatttgccgatggtgaagtggtaagaggtcgatggcctgggagttcactttattatgaagtagaaattctgagccacgacagcacctcccagctttacactgtaaagtataaagatggaacagagcttgaattgaaagagaatgatattaagcctttaacttcctttaggcaaaggaaaggtggctcaacttccagttccccttccagacgccgagggagtcgatcaaggtcacgctcccgatcccccggtcgaccacctaaaagtgcccgccgatctgcttctgcttcccaccaggccgacattaaggaagcaaggagggaagtggaagttaaattgactccgctgattctgaagccatttggaaatagcatcagcagatataatggggagcctgagcatattgagagaaatgacgcacctcataaaaatacacaggaaaaattcaatttgtcacaagaaagcagttacatagcaacacagtatagccttcgtccaagaagagaagaagtcaaattaaaagaaatagattctaaggaagaaaaatacgttgcaaaagaactggcagtgagaacctttgaagtgacccccatccgggcaaaggacttggagtttggaggagtacctggtgtgtttctcatcatgtttggcctgcctgtgttcctcttcctgttgctgttgatgtgtaaacagaaagatcccagtcttctgaatttccctcctcctttgccagctttgtatgagttatgggaaaccagagtatttggggtctacctcctgtggtttttgattcaagtcctgttctacctactgccaattggaaaggtacgtttatggtaattctgttttgttttaataagatgaggtctcactatattgtccaggcgggtctccaatttctgggatcaagtgatcctcttgccgcagcctcctgagtcgctgggaccacaggcctgtgccatgctgcccagccttagagtagtttaaaggttaaaggctgttgttggtcataattcccaaaacttagttcatgaagccatttctcttgtgctgtctgtataacacttgcttattaggaggaacttaaaaaaaaatctgattgagatttcttgtgtaacttttcaaaccaaatagaaaagaataggctattttgcaaagtagccgactctcagtggaggttgctatggaaaaaaaattcactcttagtatgtgtcatttcagat

SEQ ID NO: 358426 - DNA, 797 bp, Homo sapiens
gcagggggatcttgggaagctgggggagctgggggaactgggggagcagggggatccaggggagctggtggaggtggaggagctggcccgtgcctgctgcctgtttggtggcccagcctgtggtggaagacagcagtttttcttctttgctgggggaagaagggcgagaaatgaagagatgtgtattaactatgaggacagatgttttgattgtgatggattgttagaatggattcatcagtctttgagtagcttctaatttagatacgaccttctgccactttccagtgggattttacagacttgtttaattattctcatcattattagagaaaatgaagtaccttgtggttccatttttagagaatttgggggaaagcaggaaaaaatacattgtagtgataataaaaatatctaatactgtgtactattattatccacaggttttaaccacattctgccttatttctacataatttatttcaccatgttgcttgtccaccgagaagctcgtgacgagtaccactgtaagaagaaatacggcgtggcttgggaaaagtactgtcagcgtgtgccctaccgtatatttccatacatctactaatgctcttctggcttttctacaaaatactcctgcaattccagctgccatttgcaaaaacaaggaaaaaaatccgaaactttcttttgttgcactgacagggtctgtacttttttttttctttttgagtcaggactatggagccgagtagttgatcttttaatatagccgtgtttacttgtattaacttacagtt

SEQ ID NO: 358427 - DNA, 4231 bp, Homo sapiens
ggccgctgggggaggaagcccgaggccggcgcagcggccgggccggggaccctgggcgcggggcctggcgcggcggccttcccctcctctcctcgcctcctcgtctcctcccctcctcgccttttctggcccagtcgggtggtcggggcggcggcgggcgaggctggagctcgcccgagccgggcccgctgcggaaatggagctgggggttttaaactgcggacgtttccctccatgttggcggcgcggcgcggctgtggagcggcggcggcagggagggttcgtgggcgcctttgtcctgccccaccgcagcctggctcccggcccctccgagcgcccgtctgacagatgagcaggcggccccgcggtcctgcagtaggaggctgacagggcgcggcggcctggcgggacggggaagggtctgcggccgaggtgggcttagattcgcgctgcttgtcactggctttgagggtcgtggtcgtcgcggtttggtgattctccaggcacactgcatggctgctcgctcctatgcgttgaattccttcgcccggacagtctcaaaaatcgggttaattatagaaaatgccaagtaggaaatttgccgatggtgaagtggtaagaggtcgatggcctgggagttcactttattatgaagtagaaattctgagccacgacagcacctcccagctttacactgtaaagtataaagatggaacagagcttgaattgaaagagaatgatattaagcctttaacttcctttaggcaaaggaaaggtggctcaacttccagttccccttccagacgccgagggagtcgatcaaggtcacgctcccgatcccccggtcgaccacctaaaagtgcccgccgatctgcttctgcttcccaccaggccgacattaaggaagcaaggagggaagtggaagttaaattgactccgctgattctgaagccatttggaaatagcatcagcagatataatggggagcctgagcatattgagagaaatgacgcacctcataaaaatacacaggaaaaattcaatttgtcacaagaaagcagttacatagcaacacagtatagccttcgtccaagaagagaagaagtcaaattaaaagaaatagattctaaggaagaaaaatacgttgcaaaagaactggcagtgagaacctttgaagtgacccccatccgggcaaaggacttggagtttggaggagtacctggtgtgtttctcatcatgtttggcctgcctgtgttcctcttcctgttgctgttgatgtgtaaacagaaagatcccagtcttctgaatttccctcctcctttgccagctttgtatgagttatgggaaaccagagtatttggggtctacctcctgtggtttttgattcaagtcctgttctacctactgccaattggaaaggttgtagaaggaacgcctcttattgatggaagaagactcaagtatagattaaatggattctatgcttttatcctgacatctgcagtcatcggaacatctctcttccagggcgtagagtttcattacgtgtacagtcattttcttcagtttgcacttgcggccactgttttttgtgtggtcttgagtgtgtatctctacatgcgctctttgaaagcgccccggaatgacctgtcgcctgccagctctggaaatgctgtctatgatttcttcattggccgtgaattaaaccctcgaattggtacttttgatctcaaatacttttgtgaattgcgccccggattgattggatgggtggttattaacttggtgatgcttttggctgaaatgaaaatacaggaccgcgctgttccatccttggccatgattttagttaatagtttccagcttctctatgtggtggatgctctctggaatgaggaagcgttgttgacgaccatggacatcatccacgatggatttggattcatgctggcttttggagacttggtgtgggttccctttatttacagcttccaagccttttatttagtcagtcatccaaatgaagtgtcttggccaatggcttctctaattattgttctgaaactttgtggttatgtaatcttccgaggtgcaaattctcagaaaaatgcattccggaaaaatcccagtgatccaaagcttgcacatttaaaaaccattcatacttcaacgggaaaaaatcttctagtttctggatggtggggctttgttcgccaccccaattacttgggtgatctcatcatggccttggcgtggtccctcccatgtggttttaaccacattctgccttatttctacataatttatttcaccatgttgcttgtccaccgagaagctcgtgacgagtaccactgtaagaagaaatacggcgtggcttgggaaaagtactgtcagcgtgtgccctaccgtatatttccatacatctactaatgctcttctggcttttctacaaaatactcctgcaattccagctgccatttgcaaaaacaaggaaaaaaatccgaaactttcttttgttgcactgacagggtctgtacttttttttttctttttgagtcaggactatggagccgagtagttgatcttttaatatagccgtgtttacttgtattaacttacagttaacataggaaaaatacaagtaaggatgtgagaatttgcattttaatgggaaattttcaacccttaatctgaaaacagaagacagtcttaatataaatgtactgtgaagaatgctattgatgtttatggtttctgattacttttcaaattttgatgtttttttgccagttggcttttcttaaatgaaaacactgttccatttaaagtacatttatgttttattcagtaagagaatagaattttcatttgtttttctttaaatcctttactaattatataatttgaaagcaaaaagaagggcctatattaaatgctgaaagtgaaaagtgatgacattattagcagacactgcttaaaggagaccatttgtagcagttggcttaacctcaacttctaaaactacattgaaaatgtaaatacatagcttagttttttgtaatatatggtgacttcagatttttttgtacagtattttgaatgtgagatgattgtcaggactaactgtctttttaacaaaacattttcagtattttaaataaaattttgtaaagtaatgtgaattaaaaattttggaacaattagaattcattcactattgtatagaagatgctgttaaaacataggaagggtatttttcttgatccaaagtttgtgaatttggctttgctacctcaattgcaggtgtttgtttgcctttataaactgttgcaaatagaaaaaaaatagaataagtatatatttttggagtaacatcaatatttaaacatttttacacagatcggtgtttgaaaatttgccatttcaggctaatatttttatatatttttgactttttaaaagttcatcagtgtttttgctactgttaagcttatgcagtttatactgtattttttatgtatcctttatatttaccaaacctgactccctgtaaaggagtgctgtcttaaaaacaactgaaggggttaaagtcgtttcttttagtttaatagatgtgcataaggtagctttagcaattaaattctagtgaagttgatatagtctcatttttaattgtcctgtaatggaacagtagcaaattcactaaacttttgtgttcagagttaaattgttctcagtactttcaatgtaggggaatgtaataaacatagtgtgtatgtttgggttttaattacacattttatatatgagccatttagatatgcagtgttaattctatactgcatttgaagtgtatgtaacttagcttatgttaatgcagtcatgaagttggtttgctccagcatccggtagtctttaaacattcttttagtgaaattgtcattgttttatcagtgctaatgtgtgcaagcagtttttttattttgcttttctcctggcatcagaaagtggtggcgttttctgtactggattgcaccaaggaagcttttggggaggaaggaaggacattaaattctttccctggtaatgaaaagagccctttatcaatacagtgctgcaatttctggatatcagctacactttgtttttaagtttgtttttgacatgtttatttggcaaattttataatgaagttttaagttgaaaataaaatgtagcaacattttgatca

SEQ ID NO: 358428 - DNA, 3773 bp, Homo sapiens
gaagcgccgcgaggcggggccggggaggcgcgcgcccggcttgcgggactgcggggcgcgagagcgcggccgggtagcgtcgcgcgcgtggatctgccgccgggttgctgtgcgactattctccgggagccgtccgtgtcaccgccggaacctggcgcaggttaattatagaaaatgccaagtaggaaatttgccgatggtgaagtggtaagaggtcgatggcctgggagttcactttattatgaagtagaaattctgagccacgacagcacctcccagctttacactgtaaagtataaagatggaacagagcttgaattgaaagagaatgatattaagcctttaacttcctttaggcaaaggaaaggtggctcaacttccagttccccttccagacgccgagggagtcgatcaaggtcacgctcccgatcccccggtcgaccacctaaaagtgcccgccgatctgcttctgcttcccaccaggccgacattaaggaagcaaggagggaagtggaagttaaattgactccgctgattctgaagccatttggaaatagcatcagcagatataatggggagcctgagcatattgagagaaatgacgcacctcataaaaatacacaggaaaaattcaatttgtcacaagaaagcagttacatagcaacacagtatagccttcgtccaagaagagaagaagtcaaattaaaagaaatagattctaaggaagaaaaatacgttgcaaaagaactggcagtgagaacctttgaagtgacccccatccgggcaaaggacttggagtttggaggagtacctggtgtgtttctcatcatgtttggcctgcctgtgttcctcttcctgttgctgttgatgtgtaaacagaaagatcccagtcttctgaatttccctcctcctttgccagctttgtatgagttatgggaaaccagagtatttggggtctacctcctgtggtttttgattcaagtcctgttctacctactgccaattggaaaggttgtagaaggaacgcctcttattgatggaagaagactcaagtatagattaaatggattctatgcttttatcctgacatctgcagtcatcggaacatctctcttccagggcgtagagtttcattacgtgtacagtcattttcttcagtttgcacttgcggccactgttttttgtgtggtcttgagtgtgtatctctacatgcgctctttgaaagcgccccggaatgacctgtcgcctgccagctctggaaatgctgtctatgatttcttcattggccgtgaattaaaccctcgaattggtacttttgatctcaaatacttttgtgaattgcgccccggattgattggatgggtggttattaacttggtgatgcttttggctgaaatgaaaatacaggaccgcgctgttccatccttggccatgattttagttaatagtttccagcttctctatgtggtggatgctctctggaatgaggaagcgttgttgacgaccatggacatcatccacgatggatttggattcatgctggcttttggagacttggtgtgggttccctttatttacagcttccaagccttttatttagtcagtcatccaaatgaagtgtcttggccaatggcttctctaattattgttctgaaactttgtggttatgtaatcttccgaggtgcaaattctcagaaaaatgcattccggaaaaatcccagtgatccaaagcttgcacatttaaaaaccattcatacttcaacgggaaaaaatcttctagtttctggatggtggggctttgttcgccaccccaattacttgggtgatctcatcatggccttggcgtggtccctcccatgtggttttaaccacattctgccttatttctacataatttatttcaccatgttgcttgtccaccgagaagctcgtgacgagtaccactgtaagaagaaatacggcgtggcttgggaaaagtactgtcagcgtgtgccctaccgtatatttccatacatctactaatgctcttctggcttttctacaaaatactcctgcaattccagctgccatttgcaaaaacaaggaaaaaaatccgaaactttcttttgttgcactgacagggtctgtacttttttttttctttttgagtcaggactatggagccgagtagttgatcttttaatatagccgtgtttacttgtattaacttacagttaacataggaaaaatacaagtaaggatgtgagaatttgcattttaatgggaaattttcaacccttaatctgaaaacagaagacagtcttaatataaatgtactgtgaagaatgctattgatgtttatggtttctgattacttttcaaattttgatgtttttttgccagttggcttttcttaaatgaaaacactgttccatttaaagtacatttatttactaattatataatttgaaagcaaaaagaagggcctatattaaatgctgaaagtgaaaagtgatgacattattagcagacactgcttaaaggagaccatttgtagcagttggcttaacctcaacttctaaaactacattgaaaatgtaaatacatagcttagttttttgtaatatatggtgacttcagatttttttgtacagtattttgaatgtgagatgattgtcaggactaactgtctttttaacaaaacattttcagtattttaaataaaattttgtaaagtaatgtgaattaaaaattttggaacaattagaattcattcactattgtatagaagatgctgttaaaacataggaagggtatttttcttgatccaaagtttgtgaatttggctttgctacctcaattgcaggtgtttgtttgcctttataaactgttgcaaatagaaaaaaaatagaataagtatatatttttggagtaacatcaatatttaaacatttttacacagatcggtgtttgaaaatttgccatttcaggctaatatttttatatatttttgactttttaaaagttcatcagtgtttttgctactgttaagcttatgcagtttatactgtattttttatgtatcctttatatttaccaaacctgactccctgtaaaggagtgctgtcttaaaaacaactgaaggggttaaagtcgtttcttttagtttaatagatgtgcataaggtagctttagcaattaaattctagtgaagttgatatagtctcatttttaattgtcctgtaatggaacagtagcaaattcactaaacttttgtgttcagagttaaattgttctcagtactttcaatgtaggggaatgtaataaacatagtgtgtatgtttgggttttaattacacattttatatatgagccatttagatatgcagtgttaattctatactgcatttgaagtgtatgtaacttagcttatgttaatgcagtcatgaagttggtttgctccagcatccggtagtctttaaacattcttttagtgaaattgtcattgttttatcagtgctaatgtgtgcaagcagtttttttattttgcttttctcctggcatcagaaagtggtggcgttttctgtactggattgcaccaaggaagcttttggggaggaaggaaggacattaaattctttccctggtaatgaaaagagccctttatcaatacagtgctgcaatttctggatatcagctacactttgtttttaagtttgtttttgacatgtttatttggcaaattttataatgaagttttaagttgaaaataaaatgtagcaacattttgatca

SEQ ID NO: 358429 - DNA, 2125 bp, Homo sapiens
gtctcgacatcattaaaaatgtacttttatttttatatagatttaaaaaccattcatacttcaacgggaaaaaatcttctagtttctggatggtggggctttgttcgccaccccaattacttgggtgatctcatcatggccttggcgtggtccctcccatgtggttttaaccacattctgccttatttctacataatttatttcaccatgttgcttgtccaccgagaagctcgtgacgagtaccactgtaagaagaaatacggcgtggcttgggaaaagtactgtcagcgtgtgccctaccgtatatttccatacatctactaatgctcttctggcttttctacaaaatactcctgcaattccagctgccatttgcaaaaacaaggaaaaaaatccgaaactttcttttgttgcactgacagggtctgtacttttttttttctttttgagtcaggactatggagccgagtagttgatcttttaatatagccgtgtttacttgtattaacttacagttaacataggaaaaatacaagtaaggatgtgagaatttgcattttaatgggaaattttcaacccttaatctgaaaacagaagacagtcttaatataaatgtactgtgaagaatgctattgatgtttatggtttctgattacttttcaaattttgatgtttttttgccagttggcttttcttaaatgaaaacactgttccatttaaagtacatttatgttttattcagtaagagaatagaattttcatttgtttttctttaaatcctttactaattatataatttgaaagcaaaaagaagggcctatattaaatgctgaaagtgaaaagtgatgacattattagcagacactgcttaaaggagaccatttgtagcagttggcttaacctcaacttctaaaactacattgaaaatgtaaatacatagcttagttttttgtaatatatggtgacttcagatttttttgtacagtattttgaatgtgagatgattgtcaggactaactgtctttttaacaaaacattttcagtattttaaataaaattttgtaaagtaatgtgaattaaaaattttggaacaattagaattcattcactattgtatagaagatgctgttaaaacataggaagggtatttttcttgatccaaagtttgtgaatttggctttgctacctcaattgcaggtgtttgtttgcctttataaactgttgcaaatagaaaaaaaatagaataagtatatatttttggagtaacatcaatatttaaacatttttacacagatcggtgtttgaaaatttgccatttcaggctaatatttttatatatttttgactttttaaaagttcatcagtgtttttgctactgttaagcttatgcagtttatactgtattttttatgtatcctttatatttaccaaacctgactccctgtaaaggagtgctgtcttaaaaacaactgaaggggttaaagtcgtttcttttagtttaatagatgtgcataaggtagctttagcaattaaattctagtgaagttgatatagtctcatttttaattgtcctgtaatggaacagtagcaaattcactaaacttttgtgttcagagttaaattgttctcagtactttcaatgtaggggaatgtaataaacatagtgtgtatgtttgggttttaattacacattttatatatgagccatttagatatgcagtgttaattctatactgcatttgaagtgtatgtaacttagcttatgttaatgcagtcatgaagttggtttgctccagcatccggtagtctttaaacattcttttagtgaaattgtcattgttttatcagtgctaatgtgtgcaagcagtttttttattttgcttttctcctggcatcagaaagtggtggcgttttctgtactggattgcaccaaggaagcttttggggaggaaggaaggacattaaattctttccctggtaatgaaaagagccctttatcaatacagtgctgcaatttctggatatcagctacactttgtttttaagtttgtttttgacatgtttatttggcaaattttataatgaagttttaagttgaaaataaaatgtagcaacattttgatca

SEQ ID NO: 358430 - DNA, 3065 bp, Homo sapiens
gaagcgccgcgaggcggggccggggaggcgcgcgcccggcttgcgggactgcggggcgcgagagcgcggccgggtagcgtcgcgcgcgtggatctgccgccgggttgctgtgcgactattctccgggagccgtccgtgtcaccgccggaacctggcgcaggttaattatagaaaatgccaagtaggaaatttgccgatggtgaagtggtaagaggtcgatggcctgggagttcactttattatgaagtagaaattctgagccacgacagcacctcccagctttacactgtaaagtataaagatggaacagagcttgaattgaaagagaatgatattaagcctttaacttcctttaggcaaaggaaaggtggctcaacttccagttccccttccagacgccgagggagtcgatcaaggtcacgctcccgatcccccggtcgaccacctaaaagtgcccgccgatctgcttctgcttcccaccaggccgacattaaggaagcaaggagggaagtggaagttaaattgactccgctgattctgaagccatttggaaatagcatcagcagatataatggggagcctgagcatattgagagaaatgacgcacctcataaaaatacacaggaaaaattcaatttgtcacaagaaagcagttacatagcaacacagtatagccttcgtccaagaagagaagaagtcaaattaaaagaaatagattctaaggaagaaaaatacgttgcaaaagaactggcagtgagaacctttgaagtgacccccatccgggcaaaggacttggagtttggaggagtacctggtgtgtttctcatcatgtttggcctgcctgtgttcctcttcctgttgctgttgatgtgtaaacagaaagatcccagtcttctgaatttccctcctcctttgccagctttgtatgagttatgggaaaccagagtatttggggtctacctcctgtggtttttgattcaagtcctgttctacctactgccaattggaaaggttgtagaaggaacgcctcttattgatggaagaagactcaagtatagattaaatggattctatgcttttatcctgacatctgcagtcatcggaacatctctcttccagggcgtagagtttcattacgtgtacagtcattttcttcagtttgcacttgcggccactgttttttgtgtggtcttgagtgtgtatctctacatgcgctctttgaaagcgccccggaatgacctgtcgcctgccagctctggaaatgctgtctatgatttcttcattggccgtgaattaaaccctcgaattggtacttttgatctcaaatacttttgtgaattgcgccccggattgattggatgggtggttattaacttggtgatgcttttggctgaaatgaaaatacaggaccgcgctgttccatccttggccatgattttagttaatagtttccagcttctctatgtggtggatgctctctggaatgaggaagcgttgttgacgaccatggacatcatccacgatggatttggattcatgctggcttttggagacttggtgtgggttccctttatttacagcttccaagccttttatttagtcagtcatccaaatgaagtgtcttggccaatggcttctctaattattgttctgaaactttgtggttatgtaatcttccgaggtgcaaattctcagaaaaatgcattccggaaaaatcccagtgatccaaagcttgcacatttaaaaaccattcatacttcaacgggaaaaaatcttctagtttctggatggtggggctttgttcgccaccccaattacttgggtgatctcatcatggccttggcgtggtccctcccatgtggttttaaccacattctgccttatttctacataatttatttcaccatgttgcttgtccaccgagaagctcgtgacgagtaccactgtaagaagaaatacggcgtggcttgggaaaagtactgtcagcgtgtgccctaccgtatatttccatacatctactaatgctcttctggcttttctacaaaatactcctgcaattccagctgccatttgcaaaaacaaggaaaaaaatccgaaactttcttttgttgcactgacagggtctgtacttttttttttctttttgagtcaggactatggagccgagtagttgatcttttaatatagccgtgtttacttgtattaacttacagttaacataggaaaaatacaagtaaggatgtgagaatttgccatttcaggctaatatttttatatatttttgactttttaaaagttcatcagtgtttttgctactgttaagcttatgcagtttatactgtattttttatgtatcctttatatttaccaaacctgactccctgtaaaggagtgctgtcttaaaaacaactgaaggggttaaagtcgtttcttttagtttaatagatgtgcataaggtagctttagcaattaaattctagtgaagttgatatagtctcatttttaattgtcctgtaatggaacagtagcaaattcactaaacttttgtgttcagagttaaattgttctcagtactttcaatgtaggggaatgtaataaacatagtgtgtatgtttgggttttaattacacattttatatatgagccatttagatatgcagtgttaattctatactgcatttgaagtgtatgtaacttagcttatgttaatgcagtcatgaagttggtttgctccagcatccggtagtctttaaacattcttttagtgaaattgtcattgttttatcagtgctaatgtgtgcaagcagtttttttattttgcttttctcctggcatcagaaagtggtggcgttttctgtactggattgcaccaaggaagcttttggggaggaaggaaggacattaaattctttccctggtaatgaaaagagccctttatcaatacagtgctgcaatttctggatatcagctacactttgtttttaagtttgtttttgacatgtttatttggcaaattttataatgaagttttaagttgaaaataaaatgtagcaacattttgatca

SEQ ID NO: 358431 - DNA, 2071 bp, Homo sapiens
gaagcgccgcgaggcggggccggggaggcgcgcgcccggcttgcgggactgcggggcgcgagagcgcggccgggtagcgtcgcgcgcgtggatctgccgccgggttgctgtgcgactattctccgggagccgtccgtgtcaccgccggaacctggcgcaggttaattatagaaaatgccaagtaggaaatttgccgatggtgaagtggtaagaggtcgatggcctgggagttcactttattatgaagtagaaattctgagccacgacagcacctcccagctttacactgtaaagtataaagatggaacagagcttgaattgaaagagaatgatattaagcctttaacttcctttaggcaaaggaaaggtggctcaacttccagttccccttccagacgccgagggagtcgatcaaggtcacgctcccgatcccccggtcgaccacctaaaagtgcccgccgatctgcttctgcttcccaccaggccgacattaaggaagcaaggagggaagtggaagttaaattgactccgctgattctgaagccatttggaaatagcatcagcagatataatggggagcctgagcatattgagagaaatgacgcacctcataaaaatacacaggaaaaattcaatttgtcacaagaaagcagttacatagcaacacagtatagccttcgtccaagaagagaagaagtcaaattaaaagaaatagattctaaggaagaaaaatacgttgcaaaagaactggcagtgagaacctttgaagtgacccccatccgggcaaaggacttggagtttggaggagtacctggtgtgtttctcatcatgtttggcctgcctgtgttcctcttcctgttgctgttgatgtgtaaacagaaagatcccagtcttctgaatttccctcctcctttgccagctttgtatgagttatgggaaaccagagtatttggggtctacctcctgtggtttttgattcaagtcctgttctacctactgccaattggaaaggttgtagaaggaacgcctcttattgatggaagaagactcaagtatagattaaatggattctatgcttttatcctgacatctgcagtcatcggaacatctctcttccagggcgtagagtttcattacgtgtacagtcattttcttcagtttgcacttgcggccactgttttttgtgtggtcttgagtgtgtatctctacatgcgctctttgaaagcgccccggaatgacctgtcgcctgccagctctggaaatgctgtctatgatttcttcattggccgtgaattaaaccctcgaattggtacttttgatctcaaatacttttgtgaattgcgccccggattgattggatgggtggttattaacttggtgatgcttttggctgaaatgaaaatacaggaccgcgctgttccatccttggccatgattttagttaatagtttccagcttctctatgtggtggatgctctctggaatgaggaagcgttgttgacgaccatggacatcatccacgatggatttggattcatgctggcttttggagacttggtgtgggttccctttatttacagcttccaagccttttatttagtcagtcatccaaatgaagtgtcttggccaatggcttctctaattattgttctgaaacgtgagtattaattttagtctcagtttaatttattaaatattatgtactgaggcttttatgccctgctgtctacatacttgaaacatgccattttgaatggccagcattagctcagtttgaagccatttatcatgagtaataaaaaatctgcattttgcaaagagaatggatggttcgtacttgggttctcagtagtacttgaaacagattattttaaaccatcttgcttttaaatttaataaatttaagttgttttaattcgttttggtaaccatacgtcttttctcttgagtgcctgctttttctggtaggcatcttataaagtaagaagatttgtcttgccttcatagagctcacattctaacaggagaaataagacattcctgccttgctgtgaggtgtgtgagtgagcac

SEQ ID NO: 358432 - DNA, 1142 bp, Homo sapiens
gaagcgccgcgaggcggggccggggaggcgcgcgcccggcttgcgggactgcggggcgcgagagcgcggccgggtagcgtcgcgcgcgtggatctgccgccgggttgctgtgcgactattctccgggagccgtccgtgtcaccgccggaacctggcgcaggttaattatagaaaatgccaagtaggaaatttgccgatggtgaagtggtaagaggtcgatggcctgggagttcactttattatgaagtagaaattctgagccacgacagcacctcccagctttacactgtaaagtataaagatggaacagagcttgaattgaaagagaatgatattaagcctttaacttcctttaggcaaaggaaaggtggctcaacttccagttccccttccagacgccgagggagtcgatcaaggtcacgctcccgatcccccggtcgaccacctaaaagtgcccgccgatctgcttctgcttcccaccaggccgacattaaggaagcaaggagggaagtggaagttaaattgactccgctgattctgaagccatttggaaatagcatcagcagatataatggggagcctgagcatattgagagaaatgacgcacctcataaaaatacacaggaaaaattcaatttgtcacaagaaagcagttacatagcaacacagtatagccttcgtccaagaagagaagaagtcaaattaaaagaaatagattctaaggaagaaaaatacgttgcaaaagaactggcagtgagaacctttgaagtgacccccatccgggcaaaggacttggagtttggaggagtacctggtgtgtttctcatcatgtttggcctgcctgtgttcctcttcctgttgctgttgatgtgtaaacagaaagatcccagtcttctgaatttccctcctcctttgccagctttgtatgagttatgggaaaccagagtatttggggtctacctcctgtggtttttgattcaagtcctgttctacctactgccaattggaaaggttgtagaaggaacgcctcttactgatgggagcaagacccagtcttgctcccatcagtcccatcaaccacgtcacttgtgtaaccctcgttggactgctgttttgataacctacagaggtcatgtatagta

SEQ ID NO: 358433 - DNA, 1575 bp, Homo sapiens
gaagcgccgcgaggcggggccggggaggcgcgcgcccggcttgcgggactgcggggcgcgagagcgcggccgggtagcgtcgcgcgcgtggatctgccgccgggttgctgtgcgactattctccgggagccgtccgtgtcaccgccggaacctggcgcaggttaattatagaaaatgccaagtaggaaatttgccgatggtgaagtggtaagaggtcgatggcctgggagttcactttattatgaagtagaaattctgagccacgacagcacctcccagctttacactgtaaagtataaagatggaacagagcttgaattgaaagagaatgatattaagcctttaacttcctttaggcaaaggaaaggtggctcaacttccagttccccttccagacgccgagggagtcgatcaaggtcacgctcccgatcccccggtcgaccacctaaaagtgcccgccgatctgcttctgcttcccaccaggccgacattaaggaagcaaggagggaagtggaagttaaattgactccgctgattctgaagccatttggaaatagcatcagcagatataatggggagcctgagcatattgagagaaatgacgcacctcataaaaatacacaggaaaaattcaatttgtcacaagaaagcagttacatagcaacacagtatagccttcgtccaagaagagaagaagtcaaattaaaagaaatagattctaaggaagaaaaatacgttgcaaaagaactggcagtgagaacctttgaagtgacccccatccgggcaaaggacttggagtttggaggagtacctggtgtgtttctcatcatgtttggcctgcctgtgttcctcttcctgttgctgttgatgtgtaaacagaaagatcccagtcttctgaatttccctcctcctttgccagctttgtatgagttatgggaaaccagagtatttggggtctacctcctgtggtttttgattcaagtcctgttctacctactgccaattggaaaggttgtagaaggaacgcctcttattgatggaagaagactcaagtatagattaaatggattctatgcttttatcctgacatctgcagtcatcggaacatctctcttccagggcgtagagtttcattacgtgtacagtcattttcttcagtttgcacttgcggccactgttttttgtgtggtcttgagtgtgtatctctacatgcgctctttgaaagcgccccggaatgacctgtcgcctgccagctctggtgagcagtgatgaattgcatgttggatgaatgcgtcccagagccctccagcagccatttccagatttgaatagattgctttttttctaacttcatttttgggaaatgaagagaagtaagaaaaaatgaaaagatgaagaaaaacgttaaagagatatgaatttaaaggaagaaaatatttttgttttaccttcatactttcttactcatttcttttttttgcagttgcttgatgacagtaagacgtttagtaaacttacaggcattttgacttatgacaaatattatttctttgtccaaaatagtaaacactcttt

SEQ ID NO: 358434 - DNA, 312 bp, Homo sapiens
ttataggaagaaaatgtataacatcattaaacaattaaattctataaactgtattaattcttggagttatgaaattttaacaatattatctaaaccttgggacaaatcatctctacatctgatttagttatttgtttgtttatcatatatctttcctggtacaatgtaagcaccataaaagcagagatcatatagatcttgcttactgttgactcccagggcctaaaagacaacacatagaataggtatttaagaatattttgatgaacaagtaaattggtgaataaagcagtaaactaactatatgggagt

SEQ ID NO: 358435 - DNA, 270 bp, Homo sapiens
ctgaaacagcaatcttttgaccataactactggggggggaaagcagcccttgctgtaatcatcgttcataaaaactctggaatttacttgcacaaagagctcattgagagctgacagttctgctacagccattcctttctttccaaggaggaagcatcagaaaaatgagtggcccagcttgtgccatttctgcaaagggagtgttcaaaagtcggtgccttgggtatcagcaggcttggcttcccaaatgggtggaggtagcagtgtggt

SEQ ID NO: 358436 - DNA, 640 bp, Homo sapiens
gccagcctgggtgacagagcaagactccgtctcaaaaataaaaaaataaaaaaaaataagctgggcatagcagtgggtgcctgtgatcccagctactcgagaggctgaggcaggagaatcccttgaacccgggaggcggaggttgcagtgagccgagatcttgccactgccctccagcccgggcaatagagtgagattctgtctcaaaaataataataataaaaataaataaataaatggagaactccactggttaagagcgaagggaaggattacttctggatttaggagacgaactgctggacaggtcactcgacctgtagagttttgtgcattttggattttgctgattgtataaccccatggtgaggtttaacatgttcctctggaacaggaattaaaagaaattaaagaacgtgtaagcagaaactcagttgtatgtaagaaaacccaatttcccctgagaaaaagaaggagctgaagtcctttaaaaattaactgcctgtttttctgtggctagtgagccttatctctcctcctttcccaggcactgtgaagatcctgtttccctagctgtgcagctgcaaggtcactagacagataaactcaagttgtaaaaaatgtttttccttgaaaagta

SEQ ID NO: 358437 - DNA, 1098 bp, Homo sapiens
  misc_feature (1)..(5): n is a, c, g, or t
nnnnngactctactagaaattgagttttaatatgaaattgaaaataatggtaaataaatgatgctcctagtgagaggcagtaattctttaatccaataatattaaggccaaagaaaggagagcactgaagcttatctggtgctggtcagaactcttgtaaaatgcaagttacaaaaacaataagatattatctcacacttagttaaaaaaaagtatatatataaaatctgtgatgaatcaacccatttcctgggcaagaataccaaagaaactacctcgcagatttataagggaacatgtatgagtatgctctcatggtgtttttatagtggcagggaaccagaaacaatctggttgtttatcaaacacatggtcttttatgattttctgcttcttttcacattgttccctttgccctcttttcttcctggaaagttgagatcactcttcaggagcctactgaaaaaccacctgcatgtgggggaacataagagattcctgtagagaaggctgaataaatgtcagtcagaagaaagcaaagagagacaggagtgacgtcacagtgaattcagcaccacggacagctcacagcactccagcccgggcgacagagtgagactgcgcctgaaaaaaaaaagttattggaatgttttgatatcagaatttctggggaacatttggatttccagaatctctttcacatcagctgtaatgtggggcaagtccgtgggcatcatgttgaccgagctggagaaagccttgaactctatcatcgacgtctaccacaagtactccctgataaaggggaatttccatgccgtctacagggatgacctgaagaaattgctagagaccgagtgtcctcagtatatcaggaaaaagggtgcagacgtctggttcaaagagttggatatcaacactgatggtgcagttaacttccaggagttcctcattctggtgataaagatgggcgtggcagcccacaaaaaaagccatgaagaaagccacaaagagtagctgagttactgggcccagaggctgggcccctggacatgtacctgcagaataataaagtcatcaatacctcaaaaaaaaaaa

SEQ ID NO: 358438 - DNA, 434 bp, Homo sapiens
agcggccgcctactactactaaattcgcggccgcgtcgacgaagacctggtggggcaagtccgtgggcatcatgttgaccgagctggagaaagccttgaactctatcatcgacgtctaccacaagtactccctgataaaggggaatttccatgccgtctacagggatgacctgaagaaattgctagagaccgagtgtcctcagtatatcaggaaaaagggtgcagacgtctggttcaaagagttggatatcaacactgatggtgcagttaacttccaggagttcctcattctggtgataaagatgggcgtggcagcccacaaaaaaagccatgaagaaagccacaaagagtagctgagttactgggcccagaggctgggcccctggacatgtacctgcagaataataaagtcatcaatacctcaaaaaaaaaaa

SEQ ID NO: 358439 - DNA, 452 bp, Homo sapiens
  misc_feature (31)..(31): n is a, c, g, or t
ttttcgacatgatgcccacggacttgcgtcnaccaggtcttctgaaagacagctgacaagagacatggtggggcaagtccgtgggcatcatgttgaccgagctggagaaagccttgaactctatcatcgacgtctaccacaagtactccctgataaaggggaatttccatgccgtctacagggatgacctgaagaaattgctagagaccgagtgtcctcagtatatcaggaaaaagggtgcagacgtctggttcaaagagttggatatcaacactgatggtgcagttaacttccaggagttcctcattctggtgataaagatgggcgtggcagcccacaaaaaaagccatgaagaaagccacaaagagtagctgagttactgggcccagaggctgggcccctggacatgtacctgcagaataataaagtcatcaatacctcaaaaaaaaaaa

SEQ ID NO: 358440 - DNA, 754 bp, Homo sapiens
  misc_feature (585)..(585): n is a, c, g, or t
agcggccgcctactactactaaattcgcggccgcgtcgacgaagacctggtggggcaagtccgtgggcatcatgttgaccgagctggagaaagccttgaactctatcatcgacgtctaccacaagtactccctgataaaggggaatttccatgccgtctacagggatgacctgaagaaattgctagagaccgagtgtcctcagtatatcaggaaaaagggtgcagacgtctggttcaaagagttggatatcaacactgatggtgcagttaacttccaggagttcctcattctggtgataaagatgggcgtggcagcccacaaaaaaagccatgaagaaagccacaaagagtagctgagttactgggcccagaggctgggcccctggacatgtacctgcagaataataaagtcatcaatacctcaaaaaaaaaaaaaaaaaaaaaaaaaaaaaaaaaaaaaaaaaaaaaaaaaaaaaaaaaaaaaaaaaaaaaaaaaaaaaaaaaaaaaaaaaaaaaaaaaaaaaaaaaaaaaaaaaaaaaaaaaaaaaaaaaaaaaaaaaaatttgtttgcgcccttggcccccnttttttttttattcgggcaagtttttacttgcgccccgaatttgggctctttggccaattccccttttggggggggttaaaaaaaaagggggcggttttaaacgggtgaggggaaaaacccggggtcccaaataaatggttggaaatacccctttgcaggggggaaaaa

SEQ ID NO: 358441 - DNA, 425 bp, Homo sapiens
aagtaccacctgcagatgggtactagtacccacctgcacgtggggcaagtccgtgggcatcatgttgaccgagctggagaaagccttgaactctatcatcgacgtctaccacaagtactccctgataaaggggaatttccatgccgtctacagggatgacctgaagaaattgctagagaccgagtgtcctcagtatatcaggaaaaagggtgcagacgtctggttcaaagagttggatatcaacactgatggtgcagttaacttccaggagttcctcattctggtgataaagatgggcgtggcagcccacaaaaaaagccatgaagaaagccacaaagagtagctgagttactgggcccagaggctgggcccctggacatgtacctgcaggtgggaagtacccacctgcagtaagggtaccgagc

SEQ ID NO: 358442 - DNA, 437 bp, Homo sapiens
gcgtagaccgatagctgtggtgttgaccgtagctagtagggttgaccgtagctagtagggtagaccgtggtcagtgggttgacgtggcttgagaaagcttgaactctatcatcgacgtctaccacaagtactccctgataaaggggaatttccatgccgtctacagggatgacctgaagaaattgctagagaccgagtgtcctcagtatatcaggaaaaagggtgcagacgtctggttcaaagagttggatatcaacactgatggtgcagttaacttccaggagttcctcattctggtgataaagatgggcgtggcagcccacaaaaaaagccatgaagaaagccacaaagagtagctgagttactgggcccagaggctgggcccctggacatgtacctgcagaataataaagtcatcaatacctcaaaaaaaaaaa

SEQ ID NO: 358443 - DNA, 523 bp, Homo sapiens
gacttatgttaaccactgatgccatgatgggaactccccatatgcaatatatttttaactagaatgttattaaatatgtacattaatcaagaagtgaaataactgaaaagctaacatggtgggctaggaattgtcaacagcagttttaacacagggagttatatgccactccagcctgtagtggcatataactctatcatcgacgtctaccacaagtactccctgataaaggggaatttccatgccgtctacagggatgacctgaagaaattgctagagaccgagtgtcctcagtatatcaggaaaaagggtgcagacgtctggttcaaagagttggatatcaacactgatggtgcagttaacttccaggagttcctcattctggtgataaagatgggcgtggcagcccacaaaaaaagccatgaagaaagccacaaagagtagctgagttatatgccactccagtgcgcttcctgtagagtggagctgtgggcgttcgggcttggcccgtggtcgtcgttcg

SEQ ID NO: 358444 - DNA, 337 bp, Homo sapiens
gcggccgcctactactactactaaattcgcggccgcgtcgacggggaatttccatgccgtctacagggatgacctgaagaaattgctagagaccgagtgtcctcagtatatcaggaaaaagggtgcagacgtctggttcaaagagttggatatcaacactgatggtgcagttaacttccaggagttcctcattctggtgataaagatgggcgtggcagcccacaaaaaaagccatgaagaaagccacaaagagtagctgagttactgggcccagaggctgggcccctggacatgtacctgcagaataataaagtcatcaatacctcaaaaaaaaaaa

SEQ ID NO: 358445 - DNA, 422 bp, Homo sapiens
ctgttttatccatgtgttgaagaagccgacctggtgtgcacacgagtatatttatgttgttgatcctctcagcttctgttctataagccaccttggtgagtttggaatgacacagttctcttgacgacctgccatagcaaatcagcaatatctcaggatttgggatcttaactaggaactgtatgccattcttgctgcagcaagaatggcatatcaggatagttcagacggtttctatttcctgagcgtctgagatgttagtattagttagttttgttgtgagtgttaggaaaagggcatacaggactaggaagcagataaggaaaatgattatgagggcgtgatcatgaaaggtgataagctcttctatgatagggaagtagcgtcttgtagacctacttgcgctgatatgccatcatgct

SEQ ID NO: 358446 - DNA, 531 bp, Homo sapiens
cagttcccaacaagtaaacttgactttccttctgataacggatctggatgttgtaaacttaatctttgtacaacaccatgaggacatatggattggttgttgttttttgagagatgtctcttgtcagctgtctttcagaagacctggtggggcaagtccgtgggcatcatgttgaccgagctggagaaagccttgaactctatcatcgacgtctaccacaagtactccctgataaaggggaatttccatgccgtctacagggatgacctgaagaaattgctagagaccgagtgtcctcagtatatcaggaaaaagggtgcagacgtctggttcaaagagttggatatcaacactgatggtgcagttaacttccaggagttcctcattctggtgataaagatgggcgtggcagcccacaaaaaaagccatgaagaaagccacaaagagtagctgagttactgggcccagaggctgggcccctggacatgtacctgcagaataataaagtcatcaatacctcaaaaaaaaaaa

SEQ ID NO: 358447 - DNA, 598 bp, Homo sapiens
tcacgtctgataccaccgctactactatgtcctatcataacattccatacatacttaaaaccaagcaaagggtggagttccatctttaaaaactaaacaggcattttggacaacacattcttggcaatagaacctgggtggtatagggtggtatagggtggtataggagctataccaccgatgtctcttgtcagctgtctttcagaagacctggtggggcaagtccgtgggcatcatgttgaccgagctggagaaagccttgaactctatcatcgacgtctaccacaagtactccctgataaaggggaatttccatgccgtctacagggatgacctgaagaaattgctagagaccgagtgtcctcagtatatcaggaaaaagggtgcagacgtctggttcaaagagttggatatcaacactgatggtgcagttaacttccaggagttcctcattctggtgataaagatgggcgtggcagcccacaaaaaaagccatgaagaaagccacaaagagtagctgagttactgggcccagaggctgggcccctggacatgtacctgcagaataataaagtcatcaatacctcaaaaaaaaaaa

SEQ ID NO: 358448 - DNA, 946 bp, Homo sapiens
tgcagcctgcagtccgacttagaggaccccgactacatacttccgatgtctcttgtcagctgtctttcagaagacctggtaagtgggactgtctgggttggccccgcactttgggcttctcttggggagggtcagggaagtggagcagccttcctgagagaggagagagaaagctcagggaggtctggagcaaagatactcctggaggtggggagtgaggcagggataaggaaggagagtatcctccagcaccttccagtgggtaagggcacattgtctcctaggctggacttttcttgagcagagggtggggtggtaaggaaagtctacgggccccgtgtgtgtgcacatgtctctgtgtgaatggacccttccccttcccacacgtgtatccctatcatcccacccttcccaccagagccatagccatctgctggtttggttatttggagagtgcaggccaggacaaggccatcgcttggggcatgaatcctctgcgtactgccctggccagatgcaaattccctgccatgggattccccagaaggttctgtttttcaggtggggcaagtccgtgggcatcatgttgaccgagctggagaaagccttgaactctatcatcgacgtctaccacaagtactccctgataaaggggaatttccatgccgtctacagggatgacctgaagaaattgctagagaccgagtgtcctcagtatatcaggaaaaagggtgcagacgtctggttcaaagagttggatatcaacactgatggtgcagttaacttccaggagttcctcattctggtgataaagatgggcgtggcagcccacaaaaaaagccatgaagaaagccacaaagagtagctgagttactgggcccagaggctgggcccctggacatgtacctgcagaataataaagtcatcaatacctcaaaaaaaaaaa

SEQ ID NO: 358449 - DNA, 424 bp, Homo sapiens
aagtaccacctgcagatgggtactagtacccacctgcacgtggggcaagtccgtgggcatcatgttgaccgagctggagaaagccttgaactctatcatcgacgtctaccacaagtactccctgataaaggggaatttccatgccgtctacagggatgacctgaagaaattgctagagaccgagtgtcctcagtatatcaggaaaaagggtgcagacgtctggttcaaagagttggatatcaacactgatggtgcagttaacttccaggagttcctcattctggtgataaagatgggcgtggcagcccacaaaaaaagccatgaagaaagccacaaagagtagctgagttactgggcccagaggctgggcccctggacatgtacctgcagaataataaagtcatcaatacctcaaaaaaaaaaa

SEQ ID NO: 358450 - DNA, 646 bp, Homo sapiens
tgcagcctgcagtccgacttagaggaccccgactacatacttccgatgtctcttgtcagctgtctttcagaagacctggtaagtgggactgtctgggttggccccgcactttgggcttctcttggggagggtcagggaagtggagcagccttcctgagagaggagagagaaagctcagggaggtctggagcaaagatactcctggaggtggggagtgaggcagggataaggaaggagagtatcctccagcaccttccagtggtggggcaagtccgtgggcatcatgttgaccgagctggagaaagccttgaactctatcatcgacgtctaccacaagtactccctgataaaggggaatttccatgccgtctacagggatgacctgaagaaattgctagagaccgagtgtcctcagtatatcaggaaaaagggtgcagacgtctggttcaaagagttggatatcaacactgatggtgcagttaacttccaggagttcctcattctggtgataaagatgggcgtggcagcccacaaaaaaagccatgaagaaagccacaaagagtagctgagttactgggcccagaggctgggcccctggacatgtacctgcagaataataaagtcatcaatacctcaaaaaaaaaaa

SEQ ID NO: 358451 - DNA, 465 bp, Homo sapiens
  misc_feature (74)..(75): n is a, c, g, or t
gcgtcgacaacatgatgcccacggacttgccccacctgaaaaacagaaccttcaggtcttctgaaagacagctnncaagagtggggcaagtccgtgggcatcatgttgaccgagctggagaaagccttgaactctatcatcgacgtctaccacaagtactccctgataaaggggaatttccatgccgtctacagggatgacctgaagaaattgctagagaccgagtgtcctcagtatatcaggaaaaagggtgcagacgtctggttcaaagagttggatatcaacactgatggtgcagttaacttccaggagttcctcattctggtgataaagatgggcgtggcagcccacaaaaaaagccatgaagaaagccacaaagagtagctgagttactgggcccagaggctgggcccctggacatgtacctgcagaataataaagtcatcaatacctcaaaaaaaaaaa

SEQ ID NO: 358452 - DNA, 467 bp, Homo sapiens
taaaataaaatacacaaaaaataaataaataaaaataaaataaaataaaataaaaacaaaaaataaaaaaatagccaccggtgtggggcaagtccgtgggcatcatgttgaccgagctggagaaagccttgaactctatcatcgacgtctaccacaagtactccctgataaaggggaatttccatgccgtctacagggatgacctgaagaaattgctagagaccgagtgtcctcagtatatcaggaaaaagggtgcagacgtctggttcaaagagttggatatcaacactgatggtgcagttaacttccaggagttcctcattctggtgataaagatgggcgtggcagcccacaaaaaaagccatgaagaaagccacaaagagtagctgagttactgggcccagaggctgggcccctggacatgtacctgcagaataataaagtcatcaatacctcaaaaaaaaaaa

SEQ ID NO: 358453 - DNA, 757 bp, Homo sapiens
  misc_feature (588)..(588): n is a, c, g, or t
tgcagcctgcagtccgacttagaggaccccgactacatacttccgatgtctcttgtcagctgtctttcagaagacctggtggggcaagtccgtgggcatcatgttgaccgagctggagaaagccttgaactctatcatcgacgtctaccacaagtactccctgataaaggggaatttccatgccgtctacagggatgacctgaagaaattgctagagaccgagtgtcctcagtatatcaggaaaaagggtgcagacgtctggttcaaagagttggatatcaacactgatggtgcagttaacttccaggagttcctcattctggtgataaagatgggcgtggcagcccacaaaaaaagccatgaagaaagccacaaagagtagctgagttactgggcccagaggctgggcccctggacatgtacctgcagaataataaagtcatcaatacctcaaaaaaaaaaaaaaaaaaaaaaaaaaaaaaaaaaaaaaaaaaaaaaaaaaaaaaaaaaaaaaaaaaaaaaaaaaaaaaaaaaaaaaaaaaaaaaaaaaaaaaaaaaaaaaaaatttgtttgcgcccttggcccccnttttttttttattcgggcaagtttttacttgcgccccgaatttgggctctttggccaattccccttttggggggggttaaaaaaaaagggggcggttttaaacgggtgaggggaaaaacccggggtcccaaataaatggttggaaatacccctttgcaggggggaaaaa

SEQ ID NO: 358454 - DNA, 756 bp, Homo sapiens
  misc_feature (488)..(488): n is a, c, g, or t
  misc_feature (490)..(490): n is a, c, g, or t
  misc_feature (492)..(492): n is a, c, g, or t
  misc_feature (502)..(502): n is a, c, g, or t
  misc_feature (506)..(506): n is a, c, g, or t
  misc_feature (508)..(508): n is a, c, g, or t
  misc_feature (519)..(519): n is a, c, g, or t
tgcagcctgcagtccgacttagaggaccccgactacatacttccgatgtctcttgtcagctgtctttcagaagacctggtggggcaagtccgtgggcatcatgttgaccgagctggagaaagccttgaactctatcatcgacgtctaccacaagtactccctgataaaggggaatttccatgccgtctacagggatgacctgaagaaattgctagagaccgagtgtcctcagtatatcaggaaaaagggtgcagacgtctggttcaaagagttggatatcaacactgatggtgcagttaacttccaggagttcctcattctggtgataaagatgggcgtggcagcccacaaaaaaagccatgaagaaagccacaaagagtagctgagttactgggcccagaggctgggcccctggacatgtacctgcagaataataaagtcatcaatacctcaaaaaaaaaaaaaaaaaaaaaaaaaaaaaaaaaaanananaaaaaaaaanaaananaaaaaaaaaanaaataaaaaaataaaataaaaaaaaaaccatgtcggccgccttggcccagctgattttagactcgggcaagtttaggcatgcggcccgaaattggggctaacttgcccaattccgcctaatggggagcgtattcaaattaactgcccgtggtttaacaagtcggaattgaaaaacccttgctgtacccaacttaatcgccttggagaaaatcccttttgccagttggcgtaaatacc

SEQ ID NO: 358455 - DNA, 760 bp, Homo sapiens
tgcagcctgcagtccgacttagaggaccccgactacatacttccgatgtctcttgtcagctgtctttcagaagacctggtggggcaagtccgtgggcatcatgttgaccgagctggagaaagccttgaactctatcatcgacgtctaccacaagtactccctgataaaggggaatttccatgccgtctacagggatgacctgaagaaattgctagagaccgagtgtcctcagtatatcaggaaaaagggtgcagacgtctggttcaaagagttggatatcaacactgatggtgcagttaacttccaggagttcctcattctggtgataaagatgggcgtggcagcccacaaaaaaagccatgaagaaagccacaaagagtagctgagttactgggcccagaggctgggcccctggacatgtacctgcagaataataaagtcatcaatacctcattgaacgatgacaaatcgagtagaactcccgaattgaagcccccattcgtataataattacatcacaagacgtcttgctctcatgagctgtccccacattaggcttaacctctgtggcgcttcccggccatgtaaaccaaaccactttgaccgttaaacgaccgggcctatattagggtcaatgggtcagaattccccttaggaaccacagatacatgcccattggcctagaattaacacccctatttgcaggtggggtataagggaaaggccccccccggtcgccttcccacaccagccactctta

SEQ ID NO: 358456 - DNA, 732 bp, Homo sapiens
  misc_feature (464)..(464): n is a, c, g, or t
  misc_feature (466)..(466): n is a, c, g, or t
  misc_feature (468)..(468): n is a, c, g, or t
  misc_feature (478)..(478): n is a, c, g, or t
  misc_feature (482)..(482): n is a, c, g, or t
  misc_feature (484)..(484): n is a, c, g, or t
  misc_feature (495)..(495): n is a, c, g, or t
tgcagcctgcagtccgacttagaggaccccgactacatacttccgatgtctcttgtcagctgtctttcagaagacctggtggggcaagtccgtgggcatcatgttgaccgagctggagaaagccttgaactctatcatcgacgtctaccacaagtactccctgataaaggggaatttccatgccgtctacagggatgacctgaagaaattgctagagaccgagtgtcctcagtatatcaggaaaaagggtgcagacgtctggttcaaagagttggatatcaacactgatggtgcagttaacttccaggagttcctcattctggtgataaagatgggcgtggcagcccacaaaaaaagccatgaagaaagccacaaagagtagctgagttactgggcccagaggctgggcccctggacatgtacctgcagaataataaagtcatcaatacctcaaaaaaaaaaanananaaaaaaaaanaaananaaaaaaaaaanaaataaaaaaataaaataaaaaaaaaaccatgtcggccgccttggcccagctgattttagactcgggcaagtttaggcatgcggcccgaaattggggctaacttgcccaattccgcctaatggggagcgtattcaaattaactgcccgtggtttaacaagtcggaattgaaaaacccttgctgtacccaacttaatcgccttggagaaaatcccttttgccagttggcgtaaatacc

SEQ ID NO: 358457 - DNA, 469 bp, Homo sapiens
  misc_feature (454)..(454): n is a, c, g, or t
tgcagcctgcagtccgacttagaggaccccgactacatacttccgatgtctcttgtcagctgtctttcagaagacctggtggggcaagtccgtgggcatcatgttgaccgagctggagaaagccttgaactctatcatcgacgtctaccacaagtactccctgataaaggggaatttccatgccgtctacagggatgacctgaagaaattgctagagaccgagtgtcctcagtatatcaggaaaaagggtgcagacgtctggttcaaagagttggatatcaacactgatggtgcagttaacttccaggagttcctcattctggtgataaagatgggcgtggcagcccacaaaaaaagccatgaagaaagccacaaagagtagctgagttactgggcccagaggctgggcccctggacatgtacctgcagaataataaagtcatcaatctgtcantcatatggaccgccg

SEQ ID NO: 358458 - DNA, 525 bp, Homo sapiens
gacttatgttaaccactgatgccatgatgggaactccccatatgcaatatatttttaactagaatgttattaaatatgtacattaatcaagaagtgaaataactgaaaagctaacatggtgggctaggaattgtcaacagcagttttaacacagggagttatatgccactccagcctgtagtggcatataactctatcatcgacgtctaccacaagtactccctgataaaggggaatttccatgccgtctacagggatgacctgaagaaattgctagagaccgagtgtcctcagtatatcaggaaaaagggtgcagacgtctggttcaaagagttggatatcaacactgatggtgcagttaacttccaggagttcctcattctggtgataaagatgggcgtggcagcccacaaaaaaagccatgaagaaagccacaaagagtagctgagttactgggcccagaggctgggcccctggacatgtacctgcagaataataaagtcatcaatacctcaaaaaaaaaaa

SEQ ID NO: 358459 - DNA, 374 bp, Homo sapiens
  misc_feature (29)..(29): n is a, c, g, or t
tcgcacccaatgtatggatatgagttggngaaagccttaactctatcatcgacgtctaccacaagtactccctgataaaggggaatttccatgccgtctacagggatgacctgaagaaattgctagagaccgagtgtcctcagtatatcaggaaaaagggtgcagacgtctggttcaaagagttggatatcaacactgatggtgcagttaacttccaggagttcctcattctggtgataaagatgggcgtggcagcccacaaaaaaagccatgaagaaagccacaaagagtagctgagttactgggcccagaggctgggcccctggacatgtacctgcagaataataaagtcatcaatacctcaaaaaaaaaaa

SEQ ID NO: 358460 - DNA, 2862 bp, Homo sapiens
  misc_feature (1)..(5): n is a, c, g, or t
nnnnngactctactagaaattgagttttaatatgaaattgaaaataatggtaaataaatgatgctcctagtgagaggcagtaattctttaatccaataatattaaggccaaagaaaggagagcactgaagcttatctggtgctggtcagaactcttgtaaaatgcaagttacaaaaacaataagatattatctcacacttagttaaaaaaaagtatatatataaaatctgtgatgaatcaacccatttcctgggcaagaataccaaagaaactacctcgcagatttataagggaacatgtatgagtatgctctcatggtgtttttatagtggcagggaaccagaaacaatctggttgtttatcaaacacatggtcttttatgattttctgcttcttttcacattgttccctttgccctcttttcttcctggaaagttgagatcactcttcaggagcctactgaaaaaccacctgcatgtgggggaacataagagattcctgtagagaaggctgaataaatgtcagtcagaagaaagcaaagagagacaggagtgacgtcacagtgaattcagcaccacggacagctcacagcactccagcccgggcgacagagtgagactgcgcctgaaaaaaaaaagttattggaatgttttgatatcagaatttctggggaacatttggatttccagaatctctttcacatcagctgtaatgtgagtgtgggcatagagctgtcaagtattctttctctttagtaccaatataatgtccagtagctattaattattccaaatcaagtaaattcttgctctagtatgtgttagaacaaaggttgaattctgatcaatatgacactaatacctgtgcccttaggccttgctctaaaatgtcctccttccaatgcagaatgacacattgccccaccctattccttgacactctttcgaaggaatattggatgaaatcaaatcaattttctatctggtgactggagctctgggctgtggttgcggagatggtctggtcccctctcctcttcatatccatctgcttctgttctataagccaccttggtgagtttggaatgacacagttctcttgacgacctgccatagcaaatcagcaatatctcaggatttgggatcttaactaggaactgtatgccacacatgtgtccctgccctgtgatcacctctctgggatgacatgggtgtgtaaacagaatatccgaatagatgtgatgagtcctgcattgacataagcatggagagtgtgaaatagtctcaggaacattagacaaggctcccttgagaaggtgatttctaaaacctagacaagaagatgaagaagtatttgtccacacactccatcctaatttttatgtgccattgccaattggacggaatattatcaggtgaaataagaactggaaaaataaagggagggcaggcccacattaggagtggccaattgccttctggactgtagcgatggattgaaggtccagcaaccccaccccagggagaccctctcttcttttgggagatcagtacgtgagtcctgagggaactgttcagtcatttgccttatcctttctggcctgcttccagactctggggtccagattctggggtcctcccctaagctgcacaacctgcctccaggactggaagtttttggattttacactgctgtttacataaagtagtattgactagaatttgcacaaatacattttatattgaaaaatgatatagagtacttattatgagctggaatccagtactactatgtgctgggtaaccaggagatccgaggtaacaatgttttccctccatgattccaagtctggctggaaagacattaggggaatctgaagtaatgtagccactatggtaagagtggggtcatggtgagggaggcacaaatgaagcagagatcatttctttggggtgaagggatggtggttcaccctctgaatgtctaagagacactgacattaaagctcagccttgaaatgtaatgttaatgagacagaagaagtattaaaagacatttctggtagaggcagtagtttaaaagattggtattgagacatgaaatactgagatatattgatggggggtatgttgcgcattcggggaataacagcagcaaggtgaataggagggattcagagagtgctgcacagagaggaagtcaggcacccacacttttgggaccctggcatgacggttctaagcagtgaccagcagtcccggtggaggagagaggaggacaacaggggaagatggttctgggctggagatctgcagggaaggtatggcccaaggaaagtgggcaacagagctaagagaggaaagagagcaattctggggtggatgatggagggcaggctgcatagagaaggcagcagggggctgggaggagaaaatgaaagcccagggactgtaggtctccgtgagttccaagaacaggtggaatgagaatgagaaagggagagaaggaaagagaagaaaactaatggtcagacatggggatttagaggtgaaaatggcagatcagtcctgaaggctgacgaggtgcagaatatgttcaggaaggaatgttcctgataaggagaggagatgctggtctgtgaatagaggtgtgagtgtggagtggagcagtcattccaaagaacaaatagcccatcttacacactgctgctggtaggatggaaagagaatttttgagatgtttgcctgattcctccaagaagaatgtttgcctgattgagaggttagctggagactgaccagagtagtaagagtgatagggacacatgattagcctcaaggaagaatactaagagcggctgca

SEQ ID NO: 358461 - DNA, 461 bp, Homo sapiens
tgcagcctgcagtccgacttagaggaccccgactacatacttccgatgtctcttgtcagctgtctttcagaagacctggtggggcaagtccgtgggcatcatgttgaccgagctggagaaagccttgaactctatcatcgacgtctaccacaagtactccctgataaaggggaatttccatgccgtctacagggatgacctgaagaaattgctagagaccgagtgtcctcagtatatcaggaaaaagggtgcagacgtctggttcaaagagttggatatcaacactgatggtgcagttaacttccaggagttcctcattctggtgataaagatgggcgtggcagcccacaaaaaaagccatgaagaaagccacaaagagtagctgagttatatgccactccagtgcgcttcctgtagagtggagctgtgggcgttcgggcttggcccgtggtcgtcgttcg

SEQ ID NO: 358462 - DNA, 437 bp, Homo sapiens
tgcagcctgcagtccgacttagaggaccccgactacatacttccgatgtctcttgtcagctgtctttcagaagacctggtggggcaagtccgtgggcatcatgttgaccgagctggagaaagccttgaactctatcatcgacgtctaccacaagtactccctgataaaggggaatttccatgccgtctacagggatgacctgaagaaattgctagagaccgagtgtcctcagtatatcaggaaaaagggtgcagacgtctggttcaaagagttggatatcaacactgatggtgcagttaacttccaggagttcctcattctggtgataaagatgggcgtggcagcccacaaaaaaagccatgaagaaagccacaaagagtagctgagttaggtcaacccacaagccacggtcaacccacaagccacggtcaacccac

SEQ ID NO: 358463 - DNA, 518 bp, Homo sapiens
tgcagcctgcagtccgacttagaggaccccgactacatacttccgatgtctcttgtcagctgtctttcagaagacctggtggggcaagtccgtgggcatcatgttgaccgagctggagaaagccttgaactctatcatcgacgtctaccacaagtactccctgataaaggggaatttccatgccgtctacagggatgacctgaagaaattgctagagaccgagtgtcctcagtatatcaggaaaaagggtgcagacgtctggttcaaagagttggatatcaacactgatggtgcagttaacttccaggagttcctcattctggtgataaagatgggcgtggcagcccacaaaaaaagccatgaagaaagccacaaagagtagctgagttaccactaggtagcagtaccactaggtagcagtaccactaggtagcagtaccactaggtagcagtaccactaggtagcagtaccactaggtagcagtaccactaggtagcagtaccactaggtagcagta

SEQ ID NO: 358464 - DNA, 1097 bp, Homo sapiens
tgcagcctgcagtccgacttagaggaccccgactacatacttccgatgtctcttgtcagctgtctttcagaagacctggtaagtgggactgtctgggttggccccgcactttgggcttctcttggggagggtcagggaagtggagcagccttcctgagagaggagagagaaagctcagggaggtctggagcaaagatactcctggaggtggggagtgaggcagggataaggaaggagagtatcctccagcaccttccagtgggtaagggcacattgtctcctaggctggacttttcttgagcagagggtggggtggtaaggaaagtctacgggccccgtgtgtgtgcacatgtctctgtgtgaatggacccttccccttcccacacgtgtatccctatcatcccacccttcccaccagagccatagccatctgctggtttggttatttggagagtgcaggccaggacaaggccatcgcttggggcatgaatcctctgcgtactgccctggccagatgcaaattccctgccatgggattccccagaaggttctgtttttcaggtggggcaagtccgtgggcatcatgttgaccgagctggagaaagccttgaactctatcatcgacgtctaccacaagtactccctgataaaggggaatttccatgccgtctacagggatgacctgaagaaattgctagagaccgagtgtcctcagtatatcagggtgaggaggggctgggtgtggcgggggctctctgcctggtcctggggctgccctgggccagcggtcctccctgccacccttcatagatggctatgcctcggctctctctgagatctttaaactctggcttcttcctcctcaatcttgacagaaaaagggtgcagacgtctggttcaaagagttggatatcaacactgatggtgcagttaacttccaggagttcctcattctggtgataaagatgggcgtggcagcccacaaaaaaagccatgaagaaagccacaaagagtagctgagttactgggcccagaggctgggcccctggacatgtacctgcagaataataaagtcatcaatacctcaaaaaaaaaaa

SEQ ID NO: 358465 - DNA, 645 bp, Homo sapiens
gcgtcgactttgaaccagacgtctgcaccctttttcctgatatactgagaacactcggtctctagcaatttcttcaggtcatccctgtagacggcatggaaattcccctttatcagggagtacttgtggtagacgtcgatgatagagttcaaagagttggatatcaacactgatggtgcagttaacttccaggagttcctcattctggtgataaagatgggcgtggcagcccacaaaaaaagccatgaagaaagccacaaagagtagctgagttactgggcccagaggctgggcccctggacatgtacctgcagaataataaagtcatcaatacctcattgaacgatgacaaatcgagtagaactcccgaattgaagcccccattcgtataataattacatcacaagacgtcttgctctcatgagctgtccccacattaggcttaacctctgtggcgcttcccggccatgtaaaccaaaccactttgaccgttaaacgaccgggcctatattagggtcaatgggtcagaattccccttaggaaccacagatacatgcccattggcctagaattaacacccctatttgcaggtggggtataagggaaaggccccccccggtcgccttcccacaccagccactctta

SEQ ID NO: 358466 - DNA, 771 bp, Homo sapiens
tgcagcctgcagtccgacttagaggaccccgactacatacttccgatgtctcttgtcagctgtctttcagaagacctggtaagtgggactgtctgggttggccccgcactttgggcttctcttggggagggtcagggaagtggagcagccttcctgagagaggagagagaaagctcagggaggtctggagcaaagatactcctggaggtggggagtgaggcagggataaggaaggagagtatcctccagcaccttccagtgggtaagggcacattgtctcctaggctggacttttcttgagcagagggtggggtggtaaggaaagtctacgggccccgtgtgtgtgcacatgtctctgtgtgaatggacccttccccttcccacacgtgtatccctatcatcccacccttcccaccagagccatagccatctgctggtttggttatttggagagtgcaggccaggacaaggccatcgcttggggcatgaatcctctgcgtactgccctggccagatgcaaattccctgccatgggattccccagaaggttctgtttttcaggtggggcaagtccgtgggcatcatgttgaccgagctggagaaagccttgaactctatcatcgacgtctaccacaagtactccctgataaaggggaatttccatgctctactcctgagctaactaaaggcattggaataaccctctgtactcggtacactcgagtccatgtacaaatgccacaaataaattgaatgtttaaagccaaaaaa

SEQ ID NO: 358467 - DNA, 391 bp, Homo sapiens
  misc_feature (376)..(376): n is a, c, g, or t
agcggccgcctactactactaaattcgcggccgcgtcgacgaagacctgaactctatcatcgacgtctaccacaagtactccctgataaaggggaatttccatgccgtctacagggatgacctgaagaaattgctagagaccgagtgtcctcagtatatcaggaaaaagggtgcagacgtctggttcaaagagttggatatcaacactgatggtgcagttaacttccaggagttcctcattctggtgataaagatgggcgtggcagcccacaaaaaaagccatgaagaaagccacaaagagtagctgagttactgggcccagaggctgggcccctggacatgtacctgcagaataataaagtcatcaatctgtcantcatatggaccgccg

SEQ ID NO: 358468 - DNA, 483 bp, Homo sapiens
gcctgaagctgtgggcagctggccaagcctaaccgctataaaaaggagctgcctctcagccctgcatgtctcttgtcagctgtctttcagaagacctggtggggcaagtccgtgggcatcatgttgaccgagctggagaaagccttgaactctatcatcgacgtctaccacaagtactccctgataaaggggaatttccatgccgtctacagggatgacctgaagaaattgctagagaccgagtgtcctcagtatatcaggaaaaagggtgcagacgtctggttcaaagagttggatatcaacactgatggtgcagttaacttccaggagttcctcattctggtgataaagatgggcgtggcagcccacaaaaaaagccatgaagaaagccacaaagagtagctgagttactgggcccagaggctgggcccctggacatgtacctgcagaataataaagtcatcaatacctcaaaaaaaaaaa

SEQ ID NO: 358469 - DNA, 762 bp, Homo sapiens
  misc_feature (74)..(75): n is a, c, g, or t
gcgtcgacaacatgatgcccacggacttgccccacctgaaaaacagaaccttcaggtcttctgaaagacagctnncaagagtggggcaagtccgtgggcatcatgttgaccgagctggagaaagccttgaactctatcatcgacgtctaccacaagtactccctgataaaggggaatttccatgccgtctacagggatgacctgaagaaattgctagagaccgagtgtcctcagtatatcaggaaaaagggtgcagacgtctggttcaaagagttggatatcaacactgatggtgcagttaacttccaggagttcctcattctggtgataaagatgggcgtggcagcccacaaaaaaagccatgaagaaagccacaaagagtagctgagttactgggcccagaggctgggcccctggacatgtacctgcagaataataaagtcatcaatacctcattgaacgatgacaaatcgagtagaactcccgaattgaagcccccattcgtataataattacatcacaagacgtcttgctctcatgagctgtccccacattaggcttaacctctgtggcgcttcccggccatgtaaaccaaaccactttgaccgttaaacgaccgggcctatattagggtcaatgggtcagaattccccttaggaaccacagatacatgcccattggcctagaattaacacccctatttgcaggtggggtataagggaaaggccccccccggtcgccttcccacaccagccactctta

SEQ ID NO: 358470 - DNA, 813 bp, Homo sapiens
gcggccgcctactactactactaaattcgcggccgcgtcgacgggatgacctgaagaaattgctagagaccgagtgtcctcagtatatcaggaaaaagggtgcagacgtctggttcaaagagttggatatcaacactgatggtgcagttaacttccaggagttcctcattctggtgataaagatgggcgtggcagcccacaaaaaaagccatgaagaaagccacaaagagtagctgagttactgggcccagaggctgggcccctggacatgtacctgcagaataataaagtcatcaatacctcaaaaaaaaaaaaaaaaaaaaaaaaaaaaaaaaaaaaaaaaaaaaaaaaaaaaaaaaaaaaaaaaaaaaaaaaaaaaaaaaaaaaaaaaaaaaaaaaaaaaaaaaaaaaaaaaaaaaaaaaaaaaaaaaaaaaaaaaaaaaaaaaaaaagaggggcgagggcgcgcgagcgcagccacatcctaccccgcagcgacgacaggagaacgccgacaaaaaaacacaggagagagagagcgagaccacagagaggagcggaactagaaaaacaaggagaaggaggggggggctcagaaaccacgcaaacggagagagggagaccaccgcacgagcgaaagggtcgtgcagcacatttagtgggcggaaagatacacaagctcttcagtggaggggtagagaacattagaggtaaaagcgcagcggtgagataggcagtatgctacgaaggaagagatagaagcaaaataatgagaggcaagtaagtgaggagctaaaaaaaggcaaggcaaagg

SEQ ID NO: 358471 - DNA, 962 bp, Homo sapiens
tgcagcctgcagtccgacttagaggaccccgactacatacttccgatgtctcttgtcagctgtctttcagaagacctggtggggcaagtccgtgggcatcatgttgaccgagctggagaaagccttgaactctatcatcgacgtctaccacaagtactccctgataaaggggaatttccatgccgtctacagggatgacctgaagaaattgctagagaccgagtgtcctcagtatatcaggaaaaagggtgcagacgtctggttcaaagagttggatatcaacactgatggtgcagttaacttccaggagttcctcattctggtgataaagatgggcgtggcagcccacaaaaaaagccatgaagaaagccacaaagagtagctgagttactgggcccagaggctgggcccctggacatgtacctgcagaataataaagtcatcaatacctcaaaaaaaaaaaaaaaaaaaaaaaaaaaaaaaaaaaaaaaaaaaaaaaaaaaaaaaaaaaaaaaaaaaaaaaaaaaaaaaaaaaaaaaaaaaaaaaaaaaaaaaaaaaaaaaaaaaaaaaaaaaaaaaaaaaaaaaaaaaaaaaaaaaagaggggcgagggcgcgcgagcgcagccacatcctaccccgcagcgacgacaggagaacgccgacaaaaaaacacaggagagagagagcgagaccacagagaggagcggaactagaaaaacaaggagaaggaggggggggctcagaaaccacgcaaacggagagagggagaccaccgcacgagcgaaagggtcgtgcagcacatttagtgggcggaaagatacacaagctcttcagtggaggggtagagaacattagaggtaaaagcgcagcggtgagataggcagtatgctacgaaggaagagatagaagcaaaataatgagaggcaagtaagtgaggagctaaaaaaaggcaaggcaaagg

SEQ ID NO: 358472 - DNA, 753 bp, Homo sapiens
  misc_feature (550)..(550): n is a, c, g, or t
  misc_feature (554)..(554): n is a, c, g, or t
  misc_feature (562)..(562): n is a, c, g, or t
  misc_feature (569)..(569): n is a, c, g, or t
  misc_feature (571)..(571): n is a, c, g, or t
  misc_feature (573)..(573): n is a, c, g, or t
  misc_feature (575)..(575): n is a, c, g, or t
  misc_feature (581)..(581): n is a, c, g, or t
  misc_feature (587)..(587): n is a, c, g, or t
  misc_feature (598)..(598): n is a, c, g, or t
  misc_feature (600)..(600): n is a, c, g, or t
  misc_feature (604)..(604): n is a, c, g, or t
  misc_feature (614)..(614): n is a, c, g, or t
  misc_feature (616)..(616): n is a, c, g, or t
  misc_feature (619)..(619): n is a, c, g, or t
  misc_feature (625)..(625): n is a, c, g, or t
  misc_feature (645)..(645): n is a, c, g, or t
  misc_feature (651)..(651): n is a, c, g, or t
  misc_feature (657)..(657): n is a, c, g, or t
  misc_feature (659)..(659): n is a, c, g, or t
  misc_feature (663)..(663): n is a, c, g, or t
tgcagcctgcagtccgacttagaggaccccgactacatacttccgatgtctcttgtcagctgtctttcagaagacctggtggggcaagtccgtgggcatcatgttgaccgagctggagaaagccttgaactctatcatcgacgtctaccacaagtactccctgataaaggggaatttccatgccgtctacagggatgacctgaagaaattgctagagaccgagtgtcctcagtatatcaggaaaaagggtgcagacgtctggttcaaagagttggatatcaacactgatggtgcagttaacttccaggagttcctcattctggtgataaagatgggcgtggcagcccacaaaaaaagccatgaagaaagccacaaagagtagctgagttactgggcccagaggctgggcccctggacatgtacctgcagaataataaagtcatcaatacctcaaaaaaaaaaaaaaaaaaaaaaaaaaaaaaaaaaaaaaaaaaaaaaaaaaaaaaaaaaaaaaaaaaaaaaaaaaaaaaaaaaaaaaaaaaaaaaaccnttgngggccgcntggcccnancnanttttanattggncaaggttattntngcgnccgaatttgngnttnattggnccattccccctatggggggnggattnacattnantggnccggggtttacaacggccgggactggaaaacccctggcggtacccaaattatatcggctttggaaaaaacccctttttgggagctggggt

SEQ ID NO: 358473 - DNA, 752 bp, Homo sapiens
  misc_feature (549)..(549): n is a, c, g, or t
  misc_feature (553)..(553): n is a, c, g, or t
  misc_feature (561)..(561): n is a, c, g, or t
  misc_feature (568)..(568): n is a, c, g, or t
  misc_feature (570)..(570): n is a, c, g, or t
  misc_feature (572)..(572): n is a, c, g, or t
  misc_feature (574)..(574): n is a, c, g, or t
  misc_feature (580)..(580): n is a, c, g, or t
  misc_feature (586)..(586): n is a, c, g, or t
  misc_feature (597)..(597): n is a, c, g, or t
  misc_feature (599)..(599): n is a, c, g, or t
  misc_feature (603)..(603): n is a, c, g, or t
  misc_feature (613)..(613): n is a, c, g, or t
  misc_feature (615)..(615): n is a, c, g, or t
  misc_feature (618)..(618): n is a, c, g, or t
  misc_feature (624)..(624): n is a, c, g, or t
  misc_feature (644)..(644): n is a, c, g, or t
  misc_feature (650)..(650): n is a, c, g, or t
  misc_feature (656)..(656): n is a, c, g, or t
  misc_feature (658)..(658): n is a, c, g, or t
  misc_feature (662)..(662): n is a, c, g, or t
tgcagcctgcagtccgacttagaggaccccgactacatacttccgatgtctcttgtcagctgtctttcagaagacctggtggggcaagtccgtgggcatcatgttgaccgagctggagaaagccttgaactctatcatcgacgtctaccacaagtactccctgataaaggggaatttccatgccgtctacagggatgacctgaagaaattgctagagaccgagtgtcctcagtatatcaggaaaaagggtgcagacgtctggttcaaagagttggatatcaacactgatggtgcagttaacttccaggagttcctcattctggtgataaagatgggcgtggcagcccacaaaaaaagccatgaagaaagccacaaagagtagctgagttactgggcccagaggctgggcccctggacatgtacctgcagaataataaagtcatcaatacctcaaaaaaaaaaaaaaaaaaaaaaaaaaaaaaaaaaaaaaaaaaaaaaaaaaaaaaaaaaaaaaaaaaaaaaaaaaaaaaaaaaaaaaaaaaaaaaccnttgngggccgcntggcccnancnanttttanattggncaaggttattntngcgnccgaatttgngnttnattggnccattccccctatggggggnggattnacattnantggnccggggtttacaacggccgggactggaaaacccctggcggtacccaaattatatcggctttggaaaaaacccctttttgggagctggggt

SEQ ID NO: 358474 - DNA, 467 bp, Homo sapiens
agcggccgcctactactactaaattcgcggccgcgtcgacgaagacctgatgtctcttgtcagctgtctttcagaagacctggtggggcaagtccgtgggcatcatgttgaccgagctggagaaagccttgaactctatcatcgacgtctaccacaagtactccctgataaaggggaatttccatgccgtctacagggatgacctgaagaaattgctagagaccgagtgtcctcagtatatcaggaaaaagggtgcagacgtctggttcaaagagttggatatcaacactgatggtgcagttaacttccaggagttcctcattctggtgataaagatgggcgtggcagcccacaaaaaaagccatgaagaaagccacaaagagtagctgagttactgggcccagaggctgggcccctggacatgtacctgcagaataataaagtcatcaatacctcaaaaaaaaaaa

SEQ ID NO: 358475 - DNA, 463 bp, Homo sapiens
tgcagcctgcagtccgacttagaggaccccgactacatacttccgatgtctcttgtcagctgtctttcagaagacctggtggggcaagtccgtgggcatcatgttgaccgagctggagaaagccttgaactctatcatcgacgtctaccacaagtactccctgataaaggggaatttccatgccgtctacagggatgacctgaagaaattgctagagaccgagtgtcctcagtatatcaggaaaaagggtgcagacgtctggttcaaagagttggatatcaacactgatggtgcagttaacttccaggagttcctcattctggtgataaagatgggcgtggcagcccacaaaaaaagccatgaagaaagccacaaagagtagctgagttactgggcccagaggctgggcccctggacatgtacctgcagaataataaagtcatcaatacctcaaaaaaaaaaa

SEQ ID NO: 358476 - DNA, 637 bp, Homo sapiens
gttcttattgaaactgactgcgggaacccatgtgctttactgtgactatatactgcatctctcacacactatctgaaaatgtgtcactatttgtttagcacttatccacaggaaatactgttaggtattatgtaggacacaggcattttttaaaacaccaaaccccacagtctctgtcttctgagagcttacagtacagtcagcgagatgaggcaggtatgaagattccagtgcatgcaatgcagtgtgttataaaagtcccatgactaccagagggaatacagatgtaaaacttaggaggaaaagaaatcactctggatgagccagtcaggtaagtttacatggaataagtagaaatgggtcttgaaagatgggtacgagtttgataggtgaatttgaagatacagatagcaccttctgtgtagaggaaacaagaaaagacaaaagcagtaaagcaagaagaaatgtgggaggttagtcaagtttttttttctagaattctcaagttgtagagccagaattaagagtagcttaagtgttaagctaaaaaaaattgaattttattttggtaggcaactaaaactagaaatagtttatcatgcgcctctgggtgagggtatgctacttttaaaagcag

SEQ ID NO: 358477 - DNA, 5172 bp, Homo sapiens
gcgtcgtttgcggcggcgcaggcgcggtgcgggcggcggacgggcgggcgcttcgccgtttgaatggctgcgggcccgggccctcacctcacctgaggtccggccgcccaggggtgcgctatgccgtcgggaggtgaccagtcgccaccgcccccgcctccccctccggcggcggcagcctcggatgaggaggaggaggacgacggcgaggcggaagacgccgcgccgcctgccgagtcgcccacccctcagatccagcagcggttcgacgagctgtgcagccgcctcaacatggacgaggcggcgcgggccgaggcctgggacagctaccgcagcatgagcgaaagctacacgctggagggaaatgatcttcattggttagcatgtgccttatatgtggcttgcagaaaatctgttccaactgtaagcaaagggacagtggaaggaaactatgtatctttaactagaatcctgaaatgttcagagcagagcttaatcgaattttttaataagatgaagaagtgggaagacatggcaaatctacccccacatttcagagaacgtactgagagattagaaagaaacttcactgtttctgctgtaatttttaagaaatatgaacccatttttcaggacatctttaaataccctcaagaggagcaacctcgtcagcagcgaggaaggaaacagcggcgacagccctgtactgtgtctgaaattttccatttttgttgggtgctttttatatatgcaaaaggtaatttccccatgattagtgatgatttggtcaattcttatcacctgctgctgtgtgctttggacttagtttatggaaatgcacttcagtgttctaatcgtaaagaacttgtgaaccctaattttaaaggcttatctgaagattttcatgctaaagattctaaaccttcctctgaccccccttgtatcattgagaaactgtgttccttacatgatggcctagttttggaagcaaaggggataaaggaacatttctggaaaccctatattaggaaactttatgaaaaaaagctccttaagggaaaagaagaaaatctcactgggtttctagaacctgggaactttggagagagttttaaagccatcaataaggcctatgaggagtatgttttatctgttgggaatttagatgagcggatatttcttggagaggatgctgaggaggaaattgggactctctcaaggtgtctgaacgctggttcaggaacagagactgctgaaagggtgcagatgaaaaacatcttacagcagcattttgacaagtccaaagcacttagaatctccacaccactaactggtgttaggtacattaaggagaatagcccttgtgtgactccagtttctacagctacgcatagcttgagtcgtcttcacaccatgctgacaggcctcaggaatgcaccaagtgagaaactggaacagattctcaggacatgttccagagatccaacccaggctattgctaacagactgaaagaaatgtttgaaatatattctcagcatttccagccagacgaggatttcagtaattgtgctaaagaaattgccagcaaacattttcgttttgcggagatgctttactataaagtattagaatctgttattgagcaggaacaaaaaagactaggagacatggatttatctggtattctggaacaagatgcgttccacagatctctcttggcctgctgccttgaggtcgtcactttttcttataagcctcctgggaattttccatttattactgaaatatttgatgtgcctctttatcatttttataaggtgatagaagtattcattagagcagaagatggcctttgtagagaggtggtaaaacaccttaatcagattgaagaacagatcttagatcatttggcatggaaaccagagtctccactctgggaaaaaattagagacaatgaaaacagagttcctacatgtgaagaggtcatgccacctcagaacctggaaagggcagatgaaatttgcattgctggctcccctttgactcccagaagggtgactgaagttcgtgctgatactggaggacttggaaggagcataacatctccaaccacattatacgataggtacagctccccaccagccagcactaccagaaggcggctatttgttgagaatgatagcccctctgatggagggacgcctgggcgcatgcccccacagcccctagtcaatgctgtccctgtgcagaatgtatctggggagactgtttctgtcacaccagttcctggacagactttggtcaccatggcaaccgccactgtcacagccaacaatgggcaaacggtaaccattcctgtgcaaggtattgccaatgaaaatggagggataacattcttccctgtccaagtcaatgttggggggcaggcacaagctgtgacaggctccatccagcccctcagtgctcaggccctggctggaagtctgagctctcaacaggtgacaggaacaactttgcaagtccctggtcaagtggccattcaacagatttccccaggtggccaacagcagaagcaaggccagtctgtaaccagcagtagtaatagacccaggaagaccagctctttatcgcttttctttagaaaggtataccatttagcagctgtccgccttcgggatctctgtgccaaactagatatttcagatgaattgaggaaaaaaatctggacctgctttgaattctccataattcagtgtcctgaacttatgatggacagacatctggaccagttattaatgtgtgccatttatgtgatggcaaaggtcacaaaagaagataagtccttccagaacattatgcgttgttataggactcagccgcaggcccggagccaggtgtatagaagtgttttgataaaagggaaaagaaaaagaagaaattctggcagcagtgatagcagaagccatcagaattctccaacagaactaaacaaagatagaaccagtagagactccagtccagttatgaggtcaagcagcaccttgccagttccacagcccagcagtgctcctcccacacctactcgcctcacaggtgccaacagtgacatggaagaagaggagaggggagacctcattcagttctacaacaacatctacatcaaacagattaagacatttgccatgaagtactcacaggcaaatatggatgctcctccactctctccctatccatttgtaagaacaggctcccctcgccgaatacagttgtctcaaaatcatcctgtctacatttccccacataaaaatgaaacaatgctttctcctcgagaaaagattttctattacttcagcaacagtccttcaaagagactgagagaaattaatagtatgatacgcacaggagaaactcctactaaaaagagaggaattcttttggaagatggaagtgaatcacctgcaaaaagaatttgcccagaaaatcattctgccttattacgccgtctccaagatgtagctaatgaccgtggttcccactgaggttagtctcttgtattaaactcttcacaaaatctgtttagcagcagcctttaatgcatctagattatggagcttttttccttaatccagctgatgagttacagcctgttagtaacatgaggggacattttggtgagaaatgggacttaactccttccagtgtccttagaacattttaattcatcccaactgtctttttttccctaccattcagtgattactgtcaaggctgcttagaatccaaacttggatttttgactctggcaaagcttttagaaatactgcaagaaaatgatgtgtacccaaacgtgagcataggaggcttctgttgacgtactccaacagaagaactgtgtttcaagttcaatcctacctgttttgtggtcagctgtagtcctcataaaaagcaaaacaaaaattaggtattttgtcctaaaacacctggtaggagtgtgtgatttttttgcattcctgacaaaggagagcacacccaggtttggaggtcctaggtcattagccctcgtctcccgttccctttgtgcacatcttccctctccccattcggtgtggtgcagtgtgaaaagtccttgattgttcgggtgtgcaatgtctgagtgaacctgtataagtggaggcactttagggctgtaaaatgcatgattttgtaacccagattttgctgtatatttgtgatagcactttctacaatgtgaactttattaaatacaaaacttccaggctaaacatccaatattttctttaatgcttttatatttttttaaaatgttaaaacccctatagccaccttttgggaatgttttaaattctccagttttttgttatatagggatcaaccagctaagaaaagattttaatcaagttgaattgaggggattaatatgaaaacttatgacctcttcctttaggagggagttatctaaaagaaatgtctattaaggtgatatatttaaaaatatttttgggtgttcctggcagtttaaaaaaattggttggagaatttaggtttttattagtaccatagtaccatttatacaaattagaaaatgttatttaacagctgaattatctatacatatctttattaatcactattgttccagcagttttcaagtcaaattaataatcttattagggagaaaattcaattgtaaattgaatcagtataaacaaagttactaggtaacttcatattgctgagagaaatatggaacttacattgttcaattagaatagtgttctgcaaaaatatttataaaacttctcaagatactgctactgtaattttatatgaagataagtgtatttttcaataaagcatttataaattagcctttgtttggttatattgagaaaagggtagtttcctgcataaatggcaaagaacaatcatttattggtttattttgtctctactaaacacattagtcatttatcatttaaataccggacttcattagaaaccgttgtaacactttttctccctcctgccataaaaatacagtaagtaatttgcttaaaaaaaacaacacaacactaggaacaagtgttctggtttcttctcactgaactaaagacatttctcagtgatttcagtttgtaaatcagtaagac

SEQ ID NO: 358478 - DNA, 4528 bp, Homo sapiens
gttcttattgaaactgactgcgggaacccatgtgctttactgtgactatatactgcatctctcacacactatctgaaaatgtgtcactatttgtttagcacttatccacaggaaatactgttaggtattatgtaggacacaggcattttttaaaacaccaaaccccacagtctctgtcttctgagagcttacagtacagtcagcgagatgaggcaggtatgaagattccagtgcatgcaatgcagtgtgttataaaagtcccatgactaccagagggaatacagatgtaaaacttaggaggaaaagaaatcactctggatgagccagtcaggcgacagccctgtactgtgtctgaaattttccatttttgttgggtgctttttatatatgcaaaaggtaatttccccatgattagtgatgatttggtcaattcttatcacctgctgctgtgtgctttggacttagtttatggaaatgcacttcagtgttctaatcgtaaagaacttgtgaaccctaattttaaaggcttatctgaagattttcatgctaaagattctaaaccttcctctgaccccccttgtatcattgagaaactgtgttccttacatgatggcctagttttggaagcaaaggggataaaggaacatttctggaaaccctatattaggaaactttatgaaaaaaagctccttaagggaaaagaagaaaatctcactgggtttctagaacctgggaactttggagagagttttaaagccatcaataaggcctatgaggagtatgttttatctgttgggaatttagatgagcggatatttcttggagaggatgctgaggaggaaattgggactctctcaaggtgtctgaacgctggttcaggaacagagactgctgaaagggtgcagatgaaaaacatcttacagcagcattttgacaagtccaaagcacttagaatctccacaccactaactggtgttaggtacattaaggagaatagcccttgtgtgactccagtttctacagctacgcatagcttgagtcgtcttcacaccatgctgacaggcctcaggaatgcaccaagtgagaaactggaacagattctcaggacatgttccagagatccaacccaggctattgctaacagactgaaagaaatgtttgaaatatattctcagcatttccagccagacgaggatttcagtaattgtgctaaagaaattgccagcaaacattttcgttttgcggagatgctttactataaagtattagaatctgttattgagcaggaacaaaaaagactaggagacatggatttatctggtattctggaacaagatgcgttccacagatctctcttggcctgctgccttgaggtcgtcactttttcttataagcctcctgggaattttccatttattactgaaatatttgatgtgcctctttatcatttttataaggtgatagaagtattcattagagcagaagatggcctttgtagagaggtggtaaaacaccttaatcagattgaagaacagatcttagatcatttggcatggaaaccagagtctccactctgggaaaaaattagagacaatgaaaacagagttcctacatgtgaagaggtcatgccacctcagaacctggaaagggcagatgaaatttgcattgctggctcccctttgactcccagaagggtgactgaagttcgtgctgatactggaggacttggaaggagcataacatctccaaccacattatacgataggtacagctccccaccagccagcactaccagaaggcggctatttgttgagaatgatagcccctctgatggagggacgcctgggcgcatgcccccacagcccctagtcaatgctgtccctgtgcagaatgtatctggggagactgtttctgtcacaccagttcctggacagactttggtcaccatggcaaccgccactgtcacagccaacaatgggcaaacggtaaccattcctgtgcaaggtattgccaatgaaaatggagggataacattcttccctgtccaagtcaatgttggggggcaggcacaagctgtgacaggctccatccagcccctcagtgctcaggccctggctggaagtctgagctctcaacaggtgacaggaacaactttgcaagtccctggtcaagtggccattcaacagatttccccaggtggccaacagcagaagcaaggccagtctgtaaccagcagtagtaatagacccaggaagaccagctctttatcgcttttctttagaaaggtataccatttagcagctgtccgccttcgggatctctgtgccaaactagatatttcagatgaattgaggaaaaaaatctggacctgctttgaattctccataattcagtgtcctgaacttatgatggacagacatctggaccagttattaatgtgtgccatttatgtgatggcaaaggtcacaaaagaagataagtccttccagaacattatgcgttgttataggactcagccgcaggcccggagccaggtgtatagaagtgttttgataaaagggaaaagaaaaagaagaaattctggcagcagtgatagcagaagccatcagaattctccaacagaactaaacaaagatagaaccagtagagactccagtccagttatgaggtcaagcagcaccttgccagttccacagcccagcagtgctcctcccacacctactcgcctcacaggtgccaacagtgacatggaagaagaggagaggggagacctcattcagttctacaacaacatctacatcaaacagattaagacatttgccatgaagtactcacaggcaaatatggatgctcctccactctctccctatccatttgtaagaacaggctcccctcgccgaatacagttgtctcaaaatcatcctgtctacatttccccacataaaaatgaaacaatgctttctcctcgagaaaagattttctattacttcagcaacagtccttcaaagagactgagagaaattaatagtatgatacgcacaggagaaactcctactaaaaagagaggaattcttttggaagatggaagtgaatcacctgcaaaaagaatttgcccagaaaatcattctgccttattacgccgtctccaagatgtagctaatgaccgtggttcccactgaggttagtctcttgtattaaactcttcacaaaatctgtttagcagcagcctttaatgcatctagattatggagcttttttccttaatccagctgatgagttacagcctgttagtaacatgaggggacattttggtgagaaatgggacttaactccttccagtgtccttagaacattttaattcatcccaactgtctttttttccctaccattcagtgattactgtcaaggctgcttagaatccaaacttggatttttgactctggcaaagcttttagaaatactgcaagaaaatgatgtgtacccaaacgtgagcataggaggcttctgttgacgtactccaacagaagaactgtgtttcaagttcaatcctacctgttttgtggtcagctgtagtcctcataaaaagcaaaacaaaaattaggtattttgtcctaaaacacctggtaggagtgtgtgatttttttgcattcctgacaaaggagagcacacccaggtttggaggtcctaggtcattagccctcgtctcccgttccctttgtgcacatcttccctctccccattcggtgtggtgcagtgtgaaaagtccttgattgttcgggtgtgcaatgtctgagtgaacctgtataagtggaggcactttagggctgtaaaatgcatgattttgtaacccagattttgctgtatatttgtgatagcactttctacaatgtgaactttattaaatacaaaacttccaggctaaacatccaatattttctttaatgcttttatatttttttaaaatgttaaaacccctatagccaccttttgggaatgttttaaattctccagttttttgttatatagggatcaaccagctaagaaaagattttaatcaagttgaattgaggggattaatatgaaaacttatgacctcttcctttaggagggagttatctaaaagaaatgtctattaaggtgatatatttaaaaatatttttgggtgttcctggcagtttaaaaaaattggttggagaatttaggtttttattagtaccatagtaccatttatacaaattagaaaatgttatttaacagctgaattatctatacatatctttattaatcactattgttccagcagttttcaagtcaaattaataatcttattagggagaaaattcaattgtaaattgaatcagtataaacaaagttactaggtaacttcatattgctgagagaaatatggaacttacattgttcaattagaatagtgttctgcaaaaatatttataaaacttctcaagatactgctactgtaattttatatgaagataagtgtatttttcaataaagcatttataaatta

SEQ ID NO: 358479 - DNA, 2556 bp, Homo sapiens
gtctcgagtgttttttttttctctgtcactaggtattgccaatgaaaatggagggataacattcttccctgtccaagtcaatgttggggggcaggcacaagctgtgacaggctccatccagcccctcagtgctcaggccctggctggaagtctgagctctcaacaggtgacaggaacaactttgcaagtccctggtcaagtggccattcaacagatttccccaggtggccaacagcagaagcaaggccagtctgtaaccagcagtagtaatagacccaggaagaccagctctttatcgcttttctttagaaaggtataccatttagcagctgtccgccttcgggatctctgtgccaaactagatatttcagatgaattgaggaaaaaaatctggacctgctttgaattctccataattcagtgtcctgaacttatgatggacagacatctggaccagttattaatgtgtgccatttatgtgatggcaaaggtcacaaaagaagataagtccttccagaacattatgcgttgttataggactcagccgcaggcccggagccaggtgtatagaagtgttttgataaaagggaaaagaaaaagaagaaattctggcagcagtgatagcagaagccatcagaattctccaacagaactaaacaaagatagaaccagtagagactccagtccagttatgaggtcaagcagcaccttgccagttccacagcccagcagtgctcctcccacacctactcgcctcacaggtgccaacagtgacatggaagaagaggagaggggagacctcattcagttctacaacaacatctacatcaaacagattaagacatttgccatgaagtactcacaggcaaatatggatgctcctccactctctccctatccatttgtaagaacaggctcccctcgccgaatacagttgtctcaaaatcatcctgtctacatttccccacataaaaatgaaacaatgctttctcctcgagaaaagattttctattacttcagcaacagtccttcaaagagactgagagaaattaatagtatgatacgcacaggagaaactcctactaaaaagagaggaattcttttggaagatggaagtgaatcacctgcaaaaagaatttgcccagaaaatcattctgccttattacgccgtctccaagatgtagctaatgaccgtggttcccactgaggttagtctcttgtattaaactcttcacaaaatctgtttagcagcagcctttaatgcatctagattatggagcttttttccttaatccagctgatgagttacagcctgttagtaacatgaggggacattttggtgagaaatgggacttaactccttccagtgtccttagaacattttaattcatcccaactgtctttttttccctaccattcagtgattactgtcaaggctgcttagaatccaaacttggatttttgactctggcaaagcttttagaaatactgcaagaaaatgatgtgtacccaaacgtgagcataggaggcttctgttgacgtactccaacagaagaactgtgtttcaagttcaatcctacctgttttgtggtcagctgtagtcctcataaaaagcaaaacaaaaattaggtattttgtcctaaaacacctggtaggagtgtgtgatttttttgcattcctgacaaaggagagcacacccaggtttggaggtcctaggtcattagccctcgtctcccgttccctttgtgcacatcttccctctccccattcggtgtggtgcagtgtgaaaagtccttgattgttcgggtgtgcaatgtctgagtgaacctgtataagtggaggcactttagggctgtaaaatgcatgattttgtaacccagattttgctgtatatttgtgatagcactttctacaatgtgaactttattaaatacaaaacttccaggctaaacatccaatattttctttaatgcttttatatttttttaaaatgttaaaacccctatagccaccttttgggaatgttttaaattctccagttttttgttatatagggatcaaccagctaagaaaagattttaatcaagttgaattgaggggattaatatgaaaacttatgacctcttcctttaggagggagttatctaaaagaaatgtctattaaggtgatatatttaaaaatatttttgggtgttcctggcagtttaaaaaaattggttggagaatttaggtttttattagtaccatagtaccatttatacaaattagaaaatgttatttaacagctgaattatctatacatatctttattaatcactattgttccagcagttttcaagtcaaattaataatcttattagggagaaaattcaattgtaaattgaatcagtataaacaaagttactaggtaacttcatattgctgagagaaatatggaacttacattgttcaattagaatagtgttctgcaaaaatatttataaaacttctcaagatactgctactgtaattttatatgaagataagtgtatttttcaataaagcatttataaatta

SEQ ID NO: 358480 - DNA, 2108 bp, Homo sapiens
tcttcagacaattgctattatcaatcatagcaaaaaataaaaaataaatacagctgggatgagagaggacattctagatgcatcagaacttacataaagattgacagaagccaggtgtatagaagtgttttgataaaagggaaaagaaaaagaagaaattctggcagcagtgatagcagaagccatcagaattctccaacagaactaaacaaagatagaaccagtagagactccagtccagttatgaggtcaagcagcaccttgccagttccacagcccagcagtgctcctcccacacctactcgcctcacaggtgccaacagtgacatggaagaagaggagaggggagacctcattcagttctacaacaacatctacatcaaacagattaagacatttgccatgaagtactcacaggcaaatatggatgctcctccactctctccctatccatttgtaagaacaggctcccctcgccgaatacagttgtctcaaaatcatcctgtctacatttccccacataaaaatgaaacaatgctttctcctcgagaaaagattttctattacttcagcaacagtccttcaaagagactgagagaaattaatagtatgatacgcacaggagaaactcctactaaaaagagaggaattcttttggaagatggaagtgaatcacctgcaaaaagaatttgcccagaaaatcattctgccttattacgccgtctccaagatgtagctaatgaccgtggttcccactgaggttagtctcttgtattaaactcttcacaaaatctgtttagcagcagcctttaatgcatctagattatggagcttttttccttaatccagctgatgagttacagcctgttagtaacatgaggggacattttggtgagaaatgggacttaactccttccagtgtccttagaacattttaattcatcccaactgtctttttttccctaccattcagtgattactgtcaaggctgcttagaatccaaacttggatttttgactctggcaaagcttttagaaatactgcaagaaaatgatgtgtacccaaacgtgagcataggaggcttctgttgacgtactccaacagaagaactgtgtttcaagttcaatcctacctgttttgtggtcagctgtagtcctcataaaaagcaaaacaaaaattaggtattttgtcctaaaacacctggtaggagtgtgtgatttttttgcattcctgacaaaggagagcacacccaggtttggaggtcctaggtcattagccctcgtctcccgttccctttgtgcacatcttccctctccccattcggtgtggtgcagtgtgaaaagtccttgattgttcgggtgtgcaatgtctgagtgaacctgtataagtggaggcactttagggctgtaaaatgcatgattttgtaacccagattttgctgtatatttgtgatagcactttctacaatgtgaactttattaaatacaaaacttccaggctaaacatccaatattttctttaatgcttttatatttttttaaaatgttaaaacccctatagccaccttttgggaatgttttaaattctccagttttttgttatatagggatcaaccagctaagaaaagattttaatcaagttgaattgaggggattaatatgaaaacttatgacctcttcctttaggagggagttatctaaaagaaatgtctattaaggtgatatatttaaaaatatttttgggtgttcctggcagtttaaaaaaattggttggagaatttaggtttttattagtaccatagtaccatttatacaaattagaaaatgttatttaacagctgaattatctatacatatctttattaatcactattgttccagcagttttcaagtcaaattaataatcttattagggagaaaattcaattgtaaattgaatcagtataaacaaagttactaggtaacttcatattgctgagagaaatatggaacttacattgttcaattagaatagtgttctgcaaaaatatttataaaacttctcaagatactgctactgtaattttatatgaagataagtgtatttttcaataaagcatttataaatta

SEQ ID NO: 358481 - DNA, 1460 bp, Homo sapiens
tgtctgctctagagatcccccgaagccactgcaaaaagaatttgcccagaaaatcattctgccttattacgccgtctccaagatgtagctaatgaccgtggttcccactgaggttagtctcttgtattaaactcttcacaaaatctgtttagcagcagcctttaatgcatctagattatggagcttttttccttaatccagctgatgagttacagcctgttagtaacatgaggggacattttggtgagaaatgggacttaactccttccagtgtccttagaacattttaattcatcccaactgtctttttttccctaccattcagtgattactgtcaaggctgcttagaatccaaacttggatttttgactctggcaaagcttttagaaatactgcaagaaaatgatgtgtacccaaacgtgagcataggaggcttctgttgacgtactccaacagaagaactgtgtttcaagttcaatcctacctgttttgtggtcagctgtagtcctcataaaaagcaaaacaaaaattaggtattttgtcctaaaacacctggtaggagtgtgtgatttttttgcattcctgacaaaggagagcacacccaggtttggaggtcctaggtcattagccctcgtctcccgttccctttgtgcacatcttccctctccccattcggtgtggtgcagtgtgaaaagtccttgattgttcgggtgtgcaatgtctgagtgaacctgtataagtggaggcactttagggctgtaaaatgcatgattttgtaacccagattttgctgtatatttgtgatagcactttctacaatgtgaactttattaaatacaaaacttccaggctaaacatccaatattttctttaatgcttttatatttttttaaaatgttaaaacccctatagccaccttttgggaatgttttaaattctccagttttttgttatatagggatcaaccagctaagaaaagattttaatcaagttgaattgaggggattaatatgaaaacttatgacctcttcctttaggagggagttatctaaaagaaatgtctattaaggtgatatatttaaaaatatttttgggtgttcctggcagtttaaaaaaattggttggagaatttaggtttttattagtaccatagtaccatttatacaaattagaaaatgttatttaacagctgaattatctatacatatctttattaatcactattgttccagcagttttcaagtcaaattaataatcttattagggagaaaattcaattgtaaattgaatcagtataaacaaagttactaggtaacttcatattgctgagagaaatatggaacttacattgttcaattagaatagtgttctgcaaaaatatttataaaacttctcaagatactgctactgtaattttatatgaagataagtgtatttttcaataaagcatttataaatta

SEQ ID NO: 358482 - DNA, 2332 bp, Homo sapiens
gcgtcgtttgcggcggcgcaggcgcggtgcgggcggcggacgggcgggcgcttcgccgtttgaatggctgcgggcccgggccctcacctcacctgaggtccggccgcccaggggtgcgctatgccgtcgggaggtgaccagtcgccaccgcccccgcctccccctccggcggcggcagcctcggatgaggaggaggaggacgacggcgaggcggaagacgccgcgccgcctgccgagtcgcccacccctcagatccagcagcggttcgacgagctgtgcagccgcctcaacatggacgaggcggcgcgggccgaggcctgggacagctaccgcagcatgagcgaaagctacacgctggagggaaatgatcttcattggttagcatgtgccttatatgtggcttgcagaaaatctgttccaactgtaagcaaagggacagtggaaggaaactatgtatctttaactagaatcctgaaatgttcagagcagagcttaatcgaattttttaataagatgaagaagtgggaagacatggcaaatctacccccacatttcagagaacgtactgagagattagaaagaaacttcactgtttctgctgtaatttttaagaaatatgaacccatttttcaggacatctttaaataccctcaagaggagcaacctcgtcagcagcgaggaaggaaacagcggcgacagccctgtactgtgtctgaaattttccatttttgttgggtgctttttatatatgcaaaaggtaatttccccatgattagtgatgatttggtcaattcttatcacctgctgctgtgtgctttggacttagtttatggaaatgcacttcagtgttctaatcgtaaagaacttgtgaaccctaattttaaaggcttatctgaagattttcatgctaaagattctaaaccttcctctgaccccccttgtatcattgagaaactgtgttccttacatgatggcctagttttggaagcaaaggggataaaggaacatttctggaaaccctatattaggaaactttatgaaaaaaagctccttaagggaaaagaagaaaatctcactgggtttctagaacctgggaactttggagagagttttaaagccatcaataaggcctatgaggagtatgttttatctgttgggaatttagatgagcggatatttcttggagaggatgctgaggaggaaattgggactctctcaaggtgtctgaacgctggttcaggaacagagactgctgaaagggtgcagatgaaaaacatcttacagcagcattttgacaagtccaaagcacttagaatctccacaccactaactggtgttaggtacattaaggagaatagcccttgtgtgactccagtttctacagctacgcatagcttgagtcgtcttcacaccatgctgacaggcctcaggaatgcaccaagtgagaaactggaacagattctcaggacatgttccagagatccaacccaggctattgctaacagactgaaagaaatgtttgaaatatattctcagcatttccagccagacgaggatttcagtaattgtgctaaagaaattgccagcaaacattttcgttttgcggagatgctttactataaagtattagaatctgttattgagcaggaacaaaaaagactaggagacatggatttatctggtattctggaacaagatgcgttccacagatctctcttggcctgctgccttgaggtcgtcactttttcttataagcctcctgggaattttccatttattactgaaatatttgatgtgcctctttatcatttttataaggtatttttaaaaatatgatactaatggggatattgtagatgagaccaacttcctgttgttagtcatttagttcaagttaacatctaagaacatttattctgtttttatttacatagttaatctctatttgtggagtagaaaagaaatagaatcttaagacctatgtaaattcttttaatattgtatgaaagatctattttgggtaaaagctttgattcctctctatctaataaaagtttttagaatactgtgatttttatgagctgagaaggcttaaaaaaagtagcacacatgtcactagctaatcttgtatagcagcctttttttattttatgaaaattaaataccattgaaaatgtcagaaaaaaaataaaaagttctctttcatgtgttacagagaggcatagagttaaagcattgatttggtagctagttcttttttttttttgagatggagtcttgctctgtcgcccaggctggagtgcagtggcgccatctcagctcacagcaagct

SEQ ID NO: 358483 - DNA, 355 bp, Homo sapiens
acattttgtctgtatttgtttttcctatagtaaagccatcaataaggcctatgaggagtatgttttatctgttgggaatttagatgagcggatatttcttggagaggatgctgaggaggaaattgggactctctcaaggtgtctgaacgctggttcaggaacagagactgctgaaagggtgcagatgaaaaacatcttacagcagcattttgacaaggtgagtttagccatgccagaagagtagaaatacaggagcaggtaagccaggggttcttttttattttggtaatttcatgtttgtgttttacttgcctacagtatgaaggagaaaattctcatcatacttctcttaatt

SEQ ID NO: 358484 - DNA, 480 bp, Homo sapiens
ataatgttctttaaaaaatgtttattaattctgtgtaattttttttttctttagtccaaagcacttagaatctccacaccactaactggtgttaggtacattaaggagaatagcccttgtgtgactccagtttctacagctacgcatagcttgagtcgtcttcacaccatgctgacaggcctcaggaatgcaccaagtgagaaactggaacagattctcaggttagtttgagccctgtctgctttctaagatttggttattgaccattttccaatttcctattctttcattattaatgccttaattcacccatgaataattttttatcaattgtatactcagtcctgttgtgagtctatagaggacctagcaataagatgtataagtggaagatcttctttccttagatttctttaatataatacaagacacagtaactaataacaccagacagtgtagagtaaaacacaaaagtgtctt

SEQ ID NO: 358485 - DNA, 4889 bp, Homo sapiens
gcgtcgtttgcggcggcgcaggcgcggtgcgggcggcggacgggcgggcgcttcgccgtttgaatggctgcgggcccgggccctcacctcacctgaggtccggccgcccaggggtgcgctatgccgtcgggaggtgaccagtcgccaccgcccccgcctccccctccggcggcggcagcctcggatgaggaggaggaggacgacggcgaggcggaagacgccgcgccgcctgccgagtcgcccacccctcagatccagcagcggttcgacgagctgtgcagccgcctcaacatggacgaggcggcgcgggccgaggcctgggacagctaccgcagcatgagcgaaagctacacgctggagggaaatgatcttcattggttagcatgtgccttatatgtggcttgcagaaaatctgttccaactgtaagcaaagggacagtggaaggaaactatgtatctttaactagaatcctgaaatgttcagagcagagcttaatcgaattttttaataagatgaagaagtgggaagacatggcaaatctacccccacatttcagagaacgtactgagagattagaaagaaacttcactgtttctgctgtaatttttaagaaatatgaacccatttttcaggacatctttaaataccctcaagaggagcaacctcgtcagcagcgaggaaggaaacagcggcgacagccctgtactgtgtctgaaattttccatttttgttgggtgctttttatatatgcaaaaggtaatttccccatgattagtgatgatttggtcaattcttatcacctgctgctgtgtgctttggacttagtttatggaaatgcacttcagtgttctaatcgtaaagaacttgtgaaccctaattttaaaggcttatctgaagattttcatgctaaagattctaaaccttcctctgaccccccttgtatcattgagaaactgtgttccttacatgatggcctagttttggaagcaaaggggataaaggaacatttctggaaaccctatattaggaaactttatgaaaaaaagctccttaagggaaaagaagaaaatctcactgggtttctagaacctgggaactttggagagagttttaaagccatcaataaggcctatgaggagtatgttttatctgttgggaatttagatgagcggatatttcttggagaggatgctgaggaggaaattgggactctctcaaggtgtctgaacgctggttcaggaacagagactgctgaaagggtgcagatgaaaaacatcttacagcagcattttgacaagtccaaagcacttagaatctccacaccactaactggtgttaggtacattaaggagaatagcccttgtgtgactccagtttctacagctacgcatagcttgagtcgtcttcacaccatgctgacaggcctcaggaatgcaccaagtgagaaactggaacagattctcaggacatgttccagagatccaacccaggctattgctaacagactgaaagaaatgtttgaaatatattctcagcatttccagccagacgaggatttcagtaattgtgctaaagaaattgccagcaaacattttcgttttgcggagatgctttactataaagtattagaatctgttattgagcaggaacaaaaaagactaggagacatggatttatctggtattctggaacaagatgcgttccacagatctctcttggcctgctgccttgaggtcgtcactttttcttataagcctcctgggaattttccatttattactgaaatatttgatgtgcctctttatcatttttataaggtgatagaagtattcattagagcagaagatggcctttgtagagaggtggtaaaacaccttaatcagattgaagaacagatcttagatcatttggcatggaaaccagagtctccactctgggaaaaaattagagacaatgaaaacagagttcctacatgtgaagaggtcatgccacctcagaacctggaaagggcagatgaaatttgcattgctggctcccctttgactcccagaagggtgactgaagttcgtgctgatactggaggacttggaaggagcataacatctccaaccacattatacgataggtacagctccccaccagccagcactaccagaaggcggctatttgttgagaatgatagcccctctgatggagggacgcctgggcgcatgcccccacagcccctagtcaatgctgtccctgtgcagaatgtatctggggagactgtttctgtcacaccagttcctggacagactttggtcaccatggcaaccgccactgtcacagccaacaatgggcaaacggtaaccattcctgtgcaaggtattgccaatgaaaatggagggataacattcttccctgtccaagtcaatgttggggggcaggcacaagctgtgacaggctccatccagcccctcagtgctcaggccctggctggaagtctgagctctcaacaggtgacaggaacaactttgcaagtccctggtcaagtggccattcaacagatttccccaggtggccaacagcagaagcaaggccagtctgtaaccagcagtagtaatagacccaggaagaccagctctttatcgcttttctttagaaaggtataccatttagcagctgtccgccttcgggatctctgtgccaaactagatatttcagatgaattgaggaaaaaaatctggacctgctttgaattctccataattcagtgtcctgaacttatgatggacagacatctggaccagttattaatgtgtgccatttatgtgatggcaaaggtcacaaaagaagataagtccttccagaacattatgcgttgttataggactcagccgcaggcccggagccaggtgtatagaagtgttttgataaaagggaaaagaaaaagaagaaattctggcagcagtgatagcagaagccatcagaattctccaacagaactaaacaaagatagaaccagtagagactccagtccagttatgaggtcaagcagcaccttgccagttccacagcccagcagtgctcctcccacacctactcgcctcacaggtgccaacagtgacatggaagaagaggagaggggagacctcattcagttctacaacaacatctacatcaaacagattaagacatttgccatgaagtactcacaggcaaatatggatgctcctccactctctccctatccatttgtaagaacaggctcccctcgccgaatacagttgtctcaaaatcatcctgtctacatttccccacataaaaatgaaacaatgctttctcctcgagaaaagattttctattacttcagcaacagtccttcaaagagactgagagaaattaatagtatgatacgcacaggagaaactcctactaaaaagagaggaattcttttggaagatggaagtgaatcacctgcaaaaagaatttgcccagaaaatcattctgccttattacgccgtctccaagatgtagctaatgaccgtggttcccactgaggttagtctcttgtattaaactcttcacaaaatctgtttagcagcagcctttaatgcatctagattatggagcttttttccttaatccagctgatgagttacagcctgttagtaacatgaggggacattttggtgagaaatgggacttaactccttccagtgtccttagaacattttaattcatcccaactgtctttttttccctaccattcagtgattactgtcaaggctgcttagaatccaaacttggatttttgactctggcaaagcttttagaaatactgcaagaaaatgatgtgtacccaaacgtgagcataggaggcttctgttgacgtactccaacagaagaactgtgtttcaagttcaatcctacctgttttgtggtcagctgtagtcctcataaaaagcaaaacaaaaattaggtattttgtcctaaaacacctggtaggagtgtgtgatttttttgcattcctgacaaaggagagcacacccaggtttggaggtcctaggtcattagccctcgtctcccgttccctttgtgcacatcttccctctccccattcggtgtggtgcagtgtgaaaagtccttgattgttcgggtgtgcaatgtctgagtgaacctgtataagtggaggcactttagggctgtaaaatgcatgattttgtaacccagattttgctgtatatttgtgatagcactttctacaatgtgaactttattaaatacaaaacttccaggctaaacatccaatattttctttaatgcttttatatttttttaaaatgttaaaacccctatagccaccttttgggaatgttttaaattctccagttttttgttatatagggatcaaccagctaagaaaagattttaatcaagttgaattgaggggattaatatgaaaacttatgacctcttcctttaggagggagttatctaaaagaaatgtctattaaggtgatatatttaaaaatatttttgggtgttcctggcagtttaaaaaaattggttggagaatttaggtttttattagtaccatagtaccatttatacaaattagaaaatgttatttaacagctgaattatctatacatatctttattaatcactattgttccagcagttttcaagtcaaattaataatcttattagggagaaaattcaattgtaaattgaatcagtataaacaaagttactaggtaacttcatattgctgagagaaatatggaacttacattgttcaattagaatagtgttctgcaaaaatatttataaaacttctcaagatactgctactgtaattttatatgaagataagtgtatttttcaataaagcatttataaatta

SEQ ID NO: 358486 - DNA, 4676 bp, Homo sapiens
gcgtcgtttgcggcggcgcaggcgcggtgcgggcggcggacgggcgggcgcttcgccgtttgaatggctgcgggcccgggccctcacctcacctgaggtccggccgcccaggggtgcgctatgccgtcgggaggtgaccagtcgccaccgcccccgcctccccctccggcggcggcagcctcggatgaggaggaggaggacgacggcgaggcggaagacgccgcgccgcctgccgagtcgcccacccctcagatccagcagcggttcgacgagctgtgcagccgcctcaacatggacgaggcggcgcgggccgaggcctgggacagctaccgcagcatgagcgaaagctacacgctggagggaaatgatcttcattggttagcatgtgccttatatgtggcttgcagaaaatctgttccaactgtaagcaaagggacagtggaaggaaactatgtatctttaactagaatcctgaaatgttcagagcagagcttaatcgaattttttaataagatgaagaagtgggaagacatggcaaatctacccccacatttcagagaacgtactgagagattagaaagaaacttcactgtttctgctgtaatttttaagaaatatgaacccatttttcaggacatctttaaataccctcaagaggagcaacctcgtcagcagcgaggaaggaaacagcggcgacagccctgtactgtgtctgaaattttccatttttgttgggtgctttttatatatgcaaaaggtaatttccccatgattagtgatgatttggtcaattcttatcacctgctgctgtgtgctttggacttagtttatggaaatgcacttcagtgttctaatcgtaaagaacttgtgaaccctaattttaaaggcttatctgaagattttcatgctaaagattctaaaccttcctctgaccccccttgtatcattgagaaactgtgttccttacatgatggcctagttttggaagcaaaggggataaaggaacatttctggaaaccctatattaggaaactttatgaaaaaaagctccttaagggaaaagaagaaaatctcactgggtttctagaacctgggaactttggagagagttttaaagccatcaataaggcctatgaggagtatgttttatctgttgggaatttagatgagcggatatttcttggagaggatgctgaggaggaaattgggactctctcaaggtgtctgaacgctggttcaggaacagagactgctgaaagggtgcagatgaaaaacatcttacagcagcattttgacaagtccaaagcacttagaatctccacaccactaactggtgttaggtacattaaggagaatagcccttgtgtgactccagtttctacagctacgcatagcttgagtcgtcttcacaccatgctgacaggcctcaggaatgcaccaagtgagaaactggaacagattctcaggacatgttccagagatccaacccaggctattgctaacagactgaaagaaatgtttgaaatatattctcagcatttccagccagacgaggatttcagtaattgtgctaaagaaattgccagcaaacattttcgttttgcggagatgctttactataaagtattagaatctgttattgagcaggaacaaaaaagactaggagacatggatttatctggtattctggaacaagatgcgttccacagatctctcttggcctgctgccttgaggtcgtcactttttcttataagcctcctgggaattttccatttattactgaaatatttgatgtgcctctttatcatttttataaggtgatagaagtattcattagagcagaagatggcctttgtagagaggtggtaaaacaccttaatcagattgaagaacagatcttagatcatttggcatggaaaccagagtctccactctgggaaaaaattagagacaatgaaaacagagttcctacatgtgaagaggtcatgccacctcagaacctggaaagggcagatgaaatttgcattgctggctcccctttgactcccagaagggtgactgaagttcgtgctgatactggaggacttggaaggagcataacatctccaaccacattatacgataggtacagctccccaccagccagcactaccagaaggcggctatttgttgagaatgatagcccctctgatggagggacgcctgggcgcatgcccccacagcccctagtcaatgctgtccctgtgcagaatgtatctggggagactgtttctgtcacaccagttcctggacagactttggtcaccatggcaaccgccactgtcacagccaacaatgggcaaacggtaaccattcctgtgcaaggtattgccaatgaaaatggagggataacattcttccctgtccaagtcaatgttggggggcaggcacaagctgtgacaggctccatccagcccctcagtgctcaggccctggctggaagtctgagctctcaacaggtgacaggaacaactttgcaagtccctggtcaagtggccattcaacagatttccccaggtggccaacagcagaagcaaggccagtctgtaaccagcagtagtaatagacccaggaagaccagctctttatcgcttttctttagaaaggtataccatttagcagctgtccgccttcgggatctctgtgccaaactagatatttcagatgaattgaggaaaaaaatctggacctgctttgaattctccataattcagtgtcctgaacttatgatggacagacatctggaccagttattaatgtgtgccatttatgtgatggcaaaggtcacaaaagaagataagtccttccagaacattatgcgttgttataggactcagccgcaggcccggagccaggtgtatagaagtgttttgataaaagggaaaagaaaaagaagaaattctggcagcagtgatagcagaagccatcagaattctccaacagaactaaacaaagatagaaccagtagagactccagtccagttatgaggtcaagcagcaccttgccagttccacagcccagcagtgctcctcccacacctactcgcctcacaggtgccaacagtgacatggaagaagaggagaggggagacctcattcagttctacaacaacatctacatcaaacagattaagacatttgccatgaagtactcacaggcaaatatggatgctcctccactctctccctatccatttgtaagaacaggctcccctcgccgaatacagttgtctcaaaatcatcctgtctacatttccccacataaaaatgaaacaatgctttctcctcgagaaaagattttctattacttcagcaacagtccttcaaagagactgagagaaattaatagtatgatacgcacaggagaaactcctactaaaaagagaggaattcttttggaagatggaagtgaatcacctgcaaaaagaatttgcccagaaaatcattctgccttattacgccgtctccaagatgtagctaatgaccgtggttcccactgagtgattactgtcaaggctgcttagaatccaaacttggatttttgactctggcaaagcttttagaaatactgcaagaaaatgatgtgtacccaaacgtgagcataggaggcttctgttgacgtactccaacagaagaactgtgtttcaagttcaatcctacctgttttgtggtcagctgtagtcctcataaaaagcaaaacaaaaattaggtattttgtcctaaaacacctggtaggagtgtgtgatttttttgcattcctgacaaaggagagcacacccaggtttggaggtcctaggtcattagccctcgtctcccgttccctttgtgcacatcttccctctccccattcggtgtggtgcagtgtgaaaagtccttgattgttcgggtgtgcaatgtctgagtgaacctgtataagtggaggcactttagggctgtaaaatgcatgattttgtaacccagattttgctgtatatttgtgatagcactttctacaatgtgaactttattaaatacaaaacttccaggctaaacatccaatattttctttaatgcttttatatttttttaaaatgttaaaacccctatagccaccttttgggaatgttttaaattctccagttttttgttatatagggatcaaccagctaagaaaagattttaatcaagttgaattgaggggattaatatgaaaacttatgacctcttcctttaggagggagttatctaaaagaaatgtctattaaggtgatatatttaaaaatatttttgggtgttcctggcagtttaaaaaaattggttggagaatttaggtttttattagtaccatagtaccatttatacaaattagaaaatgttatttaacagctgaattatctatacatatctttattaatcactattgttccagcagttttcaagtcaaattaataatcttattagggagaaaattcaattgtaaattgaatcagtataaacaaagttactaggtaacttcatattgctgagagaaatatggaacttacattgttcaattagaatagtgttctgcaaaaatatttataaaacttctcaagatactgctactgtaattttatatgaagataagtgtatttttcaataaagcatttataaatta

SEQ ID NO: 358487 - DNA, 4817 bp, Homo sapiens
gcgtcgtttgcggcggcgcaggcgcggtgcgggcggcggacgggcgggcgcttcgccgtttgaatggctgcgggcccgggccctcacctcacctgaggtccggccgcccaggggtgcgctatgccgtcgggaggtgaccagtcgccaccgcccccgcctccccctccggcggcggcagcctcggatgaggaggaggaggacgacggcgaggcggaagacgccgcgccgcctgccgagtcgcccacccctcagatccagcagcggttcgacgagctgtgcagccgcctcaacatggacgaggcggcgcgggccgaggcctgggacagctaccgcagcatgagcgaaagctacacgctggagggaaatgatcttcattggttagcatgtgccttatatgtggcttgcagaaaatctgttccaactgtaagcaaagggacagtggaaggaaactatgtatctttaactagaatcctgaaatgttcagagcagagcttaatcgaattttttaataagatgaagaagtgggaagacatggcaaatctacccccacatttcagagaacgtactgagagattagaaagaaacttcactgtttctgctgtaatttttaagaaatatgaacccatttttcaggacatctttaaataccctcaagaggagcaacctcgtcagcagcgaggaaggaaacagcggcgacagccctgtactgtgtctgaaattttccatttttgttgggtgctttttatatatgcaaaaggtaatttccccatgattagtgatgatttggtcaattcttatcacctgctgctgtgtgctttggacttagtttatggaaatgcacttcagtgttctaatcgtaaagaacttgtgaaccctaattttaaaggcttatctgaagattttcatgctaaagattctaaaccttcctctgaccccccttgtatcattgagaaactgtgttccttacatgatggcctagttttggaagcaaaggggataaaggaacatttctggaaaccctatattaggaaactttatgaaaaaaagctccttaagggaaaagaagaaaatctcactgggtttctagaacctgggaactttggagagagttttaaagccatcaataaggcctatgaggagtatgttttatctgttgggaatttagatgagcggatatttcttggagaggatgctgaggaggaaattgggactctctcaaggtgtctgaacgctggttcaggaacagagactgctgaaagggtgcagatgaaaaacatcttacagcagcattttgacaagtccaaagcacttagaatctccacaccactaactggtgttaggtacattaaggagaatagcccttgtgtgactccagtttctacagctacgcatagcttgagtcgtcttcacaccatgctgacaggcctcaggaatgcaccaagtgagaaactggaacagattctcaggacatgttccagagatccaacccaggctattgctaacagactgaaagaaatgtttgaaatatattctcagcatttccagccagacgaggatttcagtaattgtgctaaagaaattgccagcaaacattttcgttttgcggagatgctttactataaagtattagaatctgttattgagcaggaacaaaaaagactaggagacatggatttatctggtattctggaacaagatgcgttccacagatctctcttggcctgctgccttgaggtcgtcactttttcttataagcctcctgggaattttccatttattactgaaatatttgatgtgcctctttatcatttttataaggtgatagaagtattcattagagcagaagatggcctttgtagagaggtggtaaaacaccttaatcagattgaagaacagatcttagatcatttggcatggaaaccagagtctccactctgggaaaaaattagagacaatgaaaacagagttcctacatgtgaagaggtcatgccacctcagaacctggaaagggcagatgaaatttgcattgctggctcccctttgactcccagaagggtgactgaagttcgtgctgatactggaggacttggaaggagcataacatctccaaccacattatacgataggtacagctccccaccagccagcactaccagaaggcggctatttgttgagaatgatagcccctctgatggagggacgcctgggcgcatgcccccacagcccctagtcaatgctgtccctgtgcagaatgtatctggggagactgtttctgtcacaccagttcctggacagactttggtcaccatggcaaccgccactgtcacagccaacaatgggcaaacggtaaccattcctgtgcaaggtattgccaatgaaaatggagggataacattcttccctgtccaagtcaatgttggggggcaggcacaagctgtgacaggctccatccagcccctcagtgctcaggccctggctggaagtctgagctctcaacaggtgacaggaacaactttgcaagtccctggtcaagtggccattcaacagatttccccaggtggccaacagcagaagcaaggccagtctgtaaccagcagtagtaatagacccaggaagaccagctctttatcgcttttctttagaaaggtataccatttagcagctgtccgccttcgggatctctgtgccaaactagatatttcagatgaattgaggaaaaaaatctggacctgctttgaattctccataattcagtgtcctgaacttatgatggacagacatctggaccagttattaatgtgtgccatttatgtgatggcaaaggtgtatagaagtgttttgataaaagggaaaagaaaaagaagaaattctggcagcagtgatagcagaagccatcagaattctccaacagaactaaacaaagatagaaccagtagagactccagtccagttatgaggtcaagcagcaccttgccagttccacagcccagcagtgctcctcccacacctactcgcctcacaggtgccaacagtgacatggaagaagaggagaggggagacctcattcagttctacaacaacatctacatcaaacagattaagacatttgccatgaagtactcacaggcaaatatggatgctcctccactctctccctatccatttgtaagaacaggctcccctcgccgaatacagttgtctcaaaatcatcctgtctacatttccccacataaaaatgaaacaatgctttctcctcgagaaaagattttctattacttcagcaacagtccttcaaagagactgagagaaattaatagtatgatacgcacaggagaaactcctactaaaaagagaggaattcttttggaagatggaagtgaatcacctgcaaaaagaatttgcccagaaaatcattctgccttattacgccgtctccaagatgtagctaatgaccgtggttcccactgaggttagtctcttgtattaaactcttcacaaaatctgtttagcagcagcctttaatgcatctagattatggagcttttttccttaatccagctgatgagttacagcctgttagtaacatgaggggacattttggtgagaaatgggacttaactccttccagtgtccttagaacattttaattcatcccaactgtctttttttccctaccattcagtgattactgtcaaggctgcttagaatccaaacttggatttttgactctggcaaagcttttagaaatactgcaagaaaatgatgtgtacccaaacgtgagcataggaggcttctgttgacgtactccaacagaagaactgtgtttcaagttcaatcctacctgttttgtggtcagctgtagtcctcataaaaagcaaaacaaaaattaggtattttgtcctaaaacacctggtaggagtgtgtgatttttttgcattcctgacaaaggagagcacacccaggtttggaggtcctaggtcattagccctcgtctcccgttccctttgtgcacatcttccctctccccattcggtgtggtgcagtgtgaaaagtccttgattgttcgggtgtgcaatgtctgagtgaacctgtataagtggaggcactttagggctgtaaaatgcatgattttgtaacccagattttgctgtatatttgtgatagcactttctacaatgtgaactttattaaatacaaaacttccaggctaaacatccaatattttctttaatgcttttatatttttttaaaatgttaaaacccctatagccaccttttgggaatgttttaaattctccagttttttgttatatagggatcaaccagctaagaaaagattttaatcaagttgaattgaggggattaatatgaaaacttatgacctcttcctttaggagggagttatctaaaagaaatgtctattaaggtgatatatttaaaaatatttttgggtgttcctggcagtttaaaaaaattggttggagaatttaggtttttattagtaccatagtaccatttatacaaattagaaaatgttatttaacagctgaattatctatacatatctttattaatcactattgttccagcagttttcaagtcaaattaataatcttattagggagaaaattcaattgtaaattgaatcagtataaacaaagttactaggtaacttcatattgctgagagaaatatggaacttacattgttcaattagaatagtgttctgcaaaaatatttataaaacttctcaagatactgctactgtaattttatatgaagataagtgtatttttcaataaagcatttataaatta

SEQ ID NO: 358488 - DNA, 4174 bp, Homo sapiens
gcgtcgtttgcggcggcgcaggcgcggtgcgggcggcggacgggcgggcgcttcgccgtttgaatggctgcgggcccgggccctcacctcacctgaggtccggccgcccaggggtgcgctatgccgtcgggaggtgaccagtcgccaccgcccccgcctccccctccggcggcggcagcctcggatgaggaggaggaggacgacggcgaggcggaagacgccgcgccgcctgccgagtcgcccacccctcagatccagcagcggttcgacgagctgtgcagccgcctcaacatggacgaggcggcgcgggccgaggcctgggacagctaccgcagcatgagcgaaagctacacgctggagggaaatgatcttcattggttagcatgtgccttatatgtggcttgcagaaaatctgttccaactgtaagcaaagggacagtggaaggaaactatgtatctttaactagaatcctgaaatgttcagagcagagcttaatcgaattttttaataagatgaagaagtgggaagacatggcaaatctacccccacatttcagagaacgtactgagagattagaaagaaacttcactgtttctgctgtaatttttaagaaatatgaacccatttttcaggacatctttaaataccctcaagaggagcaacctcgtcagcagcgaggaaggaaacagcggcgacagccctgtactgtgtctgaaattttccatttttgttgggtgctttttatatatgcaaaaggtaatttccccatgattagtgatgatttggtcaattcttatcacctgctgctgtgtgctttggacttagtttatggaaatgcacttcagtgttctaatcgtaaagaacttgtgaaccctaattttaaaggcttatctgaagattttcatgctaaagattctaaaccttcctctgaccccccttgtatcattgagaaactgtgttccttacatgatggcctagttttggaagcaaaggggataaaggaacatttctggaaaccctatattaggaaactttatgaaaaaaagctccttaagggaaaagaagaaaatctcactgggtttctagaacctgggaactttggagagagttttaaagccatcaataaggcctatgaggagtatgttttatctgttgggaatttagatgagcggatatttcttggagaggatgctgaggaggaaattgggactctctcaaggtgtctgaacgctggttcaggaacagagactgctgaaagggtgcagatgaaaaacatcttacagcagcattttgacaagtccaaagcacttagaatctccacaccactaactggtgttaggtacattaaggagaatagcccttgtgtgactccagtttctacagctacgcatagcttgagtcgtcttcacaccatgctgacaggcctcaggaatgcaccaagtgagaaactggaacagattctcaggacatgttccagagatccaacccaggctattgctaacagactgaaagaaatgtttgaaatatattctcagcatttccagccagacgaggatttcagtaattgtgctaaagaaattgccagcaaacattttcgttttgcggagatgctttactataaagtattagaatctgttattgagcaggaacaaaaaagactaggagacatggatttatctggtattctggaacaagatgcgttccacagatctctcttggcctgctgccttgaggtcgtcactttttcttataagcctcctgggaattttccatttattactgaaatatttgatgtgcctctttatcatttttataaggtgatagaagtattcattagagcagaagatggcctttgtagagaggtggtaaaacaccttaatcagattgaagaacagatcttagatcatttggcatggaaaccagagtctccactctgggaaaaaattagagacaatgaaaacagagttcctacatgtgaagaggtcatgccacctcagaacctggaaagggcagatgaaatttgcattgctggctcccctttgactcccagaagggtgactgaagttcgtgctgatactggaggacttggaaggagcataacatctccaaccacattatacgataggtacagctccccaccagccagcactaccagaaggcggctatttgttgagaatgatagcccctctgatggagggacgcctgggcgcatgcccccacagcccctagtcaatgctgtccctgtgcagaatgtatctggggagactgtttctgtcacaccagttcctggacagactttggtcaccatggcaaccgccactgtcacagccaacaatgggcaaacggtaaccattcctgtgcaaggtattgccaatgaaaatggagggataacattcttccctgtccaagtcaatgttggggggcaggcacaagctgtgacaggctccatccagcccctcagtgctcaggccctggctggaagtctgagctctcaacaggtgacaggaacaactttgcaagtccctggtcaagtggccattcaacagatttccccaggtggccaacagcagaagcaaggccagtctgtaaccagcagtagtaatagacccaggaagaccagctctttatcgcttttctttagaaaggtataccatttagcagctgtccgccttcgggatctctgtgccaaactagatatttcagatgaattgaggaaaaaaatctggacctgctttgaattctccataattcagtgtcctgaacttatgatggacagacatctggaccagttattaatgtgtgccatttatgtgatggcaaaggtcacaaaagaagataagtccttccagaacattatgcgttgttataggactcagccgcaggcccggagccaggtgtatagaagtgttttgataaaagggaaaagaaaaagaagaaattctggcagcagtgatagcagaagccatcagaattctccaacagaactaaacaaagatagaaccagtagagactccagtccagttatgaggtcaagcagcaccttgccagttccacagcccagcagtgctcctcccacacctactcgcctcacaggtgccaacagtgacatggaagaagaggagaggggagacctcattcagttctacaacaacatctacatcaaacagattaagacatttgccatgaagtactcacaggcaaatatggatgctcctccactctctccctatccatttgtaagaacaggctcccctcgccgaatacagttgtctcaaaatcatcctgtctacatttccccacataaaaatgaaacaatgctttctcctcgagaaaagattttctattacttcagcaacagtccttcaaaggtgagcctaacatcaatcttggcctttactaacctcaaaatgcttcagatgctagaaacagggtttgtgctaagcttaggcactcattagagtgatgagagctgccagggagcagtgatcagtcagtcctcatgaagcaaaacccagggtttgttttgttttttgccttttttgagggggagggggtggaattttagggtgggaaacagggtaagggatttggatttctttttattccctctcctatttgtacattttgctgtaaacctgaaatttgtgtttatcccatttgtaacaattttccacatttgttagggaaagaaattttggattccttaccaaaggcctgtttctgggacaggcagtgtcctcaggactctggctaatgggagaagttgacatttttgacattgcagtgcaatagtcatattagcacagatgtatgtggcaacagccacctcattctaagaaggggaaggaagcttgagtcaggccttaatgttgaaaagtcagggagctgttgaggtatggaagggcactcagcaggaagcaggttaaggggaagaaaacagtgtccttgaggcagacagtgatccaaagcttaattacgggcatcatgctatgttagcgagtggaactggattgtgaaggcccttacataatgagatttttattgataaaggttgcttagaggctgggcgttgtggctcacacctgtaatcccaacactttgggaggccacagtgggcagatcacctgaggtcaggagttcaagaccagcctagtcaacagggtgaaacctcat

SEQ ID NO: 358489 - DNA, 2110 bp, Homo sapiens
  misc_feature (2051)..(2051): n is a, c, g, or t
gcgtcgtttgcggcggcgcaggcgcggtgcgggcggcggacgggcgggcgcttcgccgtttgaatggctgcgggcccgggccctcacctcacctgaggtccggccgcccaggggtgcgctatgccgtcgggaggtgaccagtcgccaccgcccccgcctccccctccggcggcggcagcctcggatgaggaggaggaggacgacggcgaggcggaagacgccgcgccgcctgccgagtcgcccacccctcagatccagcagcggttcgacgagctgtgcagccgcctcaacatggacgaggcggcgcgggccgaggcctgggacagctaccgcagcatgagcgaaagctacacgctggagggaaatgatcttcattggttagcatgtgccttatatgtggcttgcagaaaatctgttccaactgtaagcaaagggacagtggaaggaaactatgtatctttaactagaatcctgaaatgttcagagcagagcttaatcgaattttttaataagatgaagaagtgggaagacatggcaaatctacccccacatttcagagaacgtactgagagattagaaagaaacttcactgtttctgctgtaatttttaagaaatatgaacccatttttcaggacatctttaaataccctcaagaggagcaacctcgtcagcagcgaggaaggaaacagcggcgacagccctgtactgtgtctgaaattttccatttttgttgggtgctttttatatatgcaaaaggtaatttccccatgattagtgatgatttggtcaattcttatcacctgctgctgtgtgctttggacttagtttatggaaatgcacttcagtgttctaatcgtaaagaacttgtgaaccctaattttaaaggcttatctgaagattttcatgctaaagattctaaaccttcctctgaccccccttgtatcattgagaaactgtgttccttacatgatggcctagttttggaagcaaaggggataaaggaacatttctggaaaccctatattaggaaactttatgaaaaaaagctccttaagggaaaagaagaaaatctcactgggtttctagaacctgggaactttggagagagttttaaagccatcaataaggcctatgaggagtatgttttatctgttgggaatttagatgagcggatatttcttggagaggatgctgaggaggaaattgggactctctcaaggtgtctgaacgctggttcaggaacagagactgctgaaagggtgcagatgaaaaacatcttacagcagcattttgacaagtccaaagcacttagaatctccacaccactaactggtgttaggtacattaaggagaatagcccttgtgtgactccagtttctacagctacgcatagcttgagtcgtcttcacaccatgctgacaggcctcaggaatgcaccaagtgagaaactggaacagattctcaggacatgttccagagatccaacccaggctattgctaacagactgaaagaaatgtttgaaatatattctcagcatttccagccagacgaggatttcagtaattgtgctaaagaaattgccagcaaacattttcgttttgcggagatgctttactataaagtattagaatctgttattgagcaggaacaaaaaagactaggagacatggatttatctggtattctggaacaagatgcgttccacagatctctcttggcctgctgccttgaggtcgtcactttttcttataagcctcctgggaattttccatttattactgaaatatttgatgtgcctctttatcatttttataaggtgatagaagtattcattagagcagaagatggcctttgtagagaggtggtaaaacaccttaatcagattgaagaacagatcttagatcatttggcatggaaaccagagtctccactctgggaaaaaattagagacaatgaaaacagagttcctacatgtgaagaggaactatttacattttaatatagatggcaccactggtacagaagcatctggtctagcttacttacagntttgggggaattggctatttaaaatgaacattctgagccaggccgggttggcttacgcc

SEQ ID NO: 358490 - DNA, 1979 bp, Homo sapiens
tccttgcacaccatggcagcctctccttgcaccttctcctgcctctccacactccaggttccctcaggcttgtgtccccactgctgcatcgtggcggggtgtcacagaccctctgcagcccctggctgccctggactgtgcagagatgcctgactccagggaaacctgaaagcaagaagttaatggactgtggccttctgtgacgcgcagtcgacgcaggaaatccacgagaaggttctaaacgaagccgtgggcgccatgatgtaccacaccatcaccctcaccagggaggacctggagaagttcaaggccctgagagtgatcgtgcggataggcagtggctatgacaacgtggacatcaaggctgccggcgagctcggaattgccgtgtgcaacatcccgtctgcagccgtggaagagacagcggactctaccatctgccacatcctcaacctgtaccggaggaacacgtggctgtaccaggcactgcgggaaggcacgcgggttcagagcgtggagcagatccgcgaggtggcctcgggagcggcccgcatccgtggggagacgctgggcctcattggctttggtcgcacggggcaggcggttgcagttcgagccaaggcctttggattcagcgtcatattttatgacccctacttgcaggatgggatcgagcggtccctgggcgtgcagagggtctacaccctgcaggatttgctgtatcagagcgactgcgtctccttgcactgcaatctcaacgaacataaccaccacctcatcaatgactttaccataaagcagatgaggcagggagcattccttgtgaacgcagcccgtggcggcctggtggacgagaaagccttagcacaagccctcaaggagggcaggatacgaggggcagccctcgacgtgcatgagtcagagcccttcagctttgctcagggtccgttgaaagatgccccgaatctcatctgcactcctcacactgcctggtacagtgagcaggcgtcactggagatgagggaggcagctgccaccgagatccgccgagccatcacaggtcgcatcccagaaagcttaagaaattgtgtgaacaaggaattctttgtcacatcagcgccttggtcagtaatagaccagcaagcaattcatcctgagctcaatggtgccacatacagatatccgccaggcatcgtgggtgtggctccaggaggacttcctgcagccatggaagggatcatccctggaggcatcccagtgactcacaacctcccgacagtggcacatccttcccaagcgccctctcccaaccagcccacaaaacacggggacaatcgagagcaccccaacgagcaatagcagagaatgccagaaggtaatcactcagatacacttgggaccaagagacagtgaaaaatagatgaactaagagaaaaagaatcggatggtctttgtaactgattctggacatatgcatcattgatgttgcagtgttgaaactacaagagctagaaaactgaagatgtcgtctgcttacggaagcgctgaaagactaggatgtgatttattaacgaccaacttctgttattgtgtgttaagtttttcatctgtgcatcaaatcacaaaaagaataaatagagctttttcctttatcagtcccttgggcacagcaggtcctgaacaccctgctctacaatgttgcatcaagagttcaaacaacaaaataaaaaatattaagaggaaatccccatcctgtgacttgagtcccttaagtctacaggggctggtgacctctttttgctaataggaaaatcacattactacaaaatggggagaaaactgtttgcctgtggtagacacctgcacgcataggattgaagacagtacaggctgctgtacagagaagcgcctctcacatctgaactgcatactgagcgggcaagtcggttgtaagttcagtaaaaccctctgatgatgca

SEQ ID NO: 358491 - DNA, 525 bp, Homo sapiens
acccagagacagtgaaaaatagatgaactaagagaacaagaatcggatggtcttagtaactagattctggacatatgcatcattgatgttgcagtgtggttccccggaagcacactgcaacacggggacaatcgagagcaccccaacgagcaatagcagagaatgccagaaggtaatcactcagatacacttgggaccaagagacagtgaaaaatagatgaactaagagaaaaagaatcggatggtctttgtaactgattctggacatatgcatcattgatgttgcagtgttgaaactacaagagctagaaaactgaagatgtcgtctgcttacggaagcgctgaaagactaggatgtgatttattaacgaccaacttctgttattgtgtgttaagtttttcatctgtgcatcaaatcacaaaaagaataaatagagctttttcctttatcagtcccttgggcacagcaggtcctgaacaccctgctctacaatgttgcagtgtgcttccggggtaccgagctct

SEQ ID NO: 358492 - DNA, 929 bp, Homo sapiens
ccccgcccggtactttttccggaggcggcccaagcggcagttggctgcagaggaccccacgtttaggattttatagggaagaggaggaatttttcgtagaaatccccgctctgcgtgctcgtggtggaggctgctggcaatggcctacgtcgtcataccgggcttccttgccctgtccggggtaaacaatccttctgtgtatttacccccttttttctttaaagattggagatcgggttaagttcttagagagtctgatgcgagtggctggaaggatagacaagagaattctattctataaatatgcattgggaatttaaaatgctaaacgccttatttgcaattctgttggatattctagagactggtatatttttatctgacatggataattttgaggggacgttatattttggggaagtttacaaagtgattctttctgcctttctaacttgggcgaaatatatcgactcataccaccctttcaaaaaagatagctttctctactaggtgtttgggttcgaagacagtttaaaaattacctcgtgttcagtacctaagattgctgttttgcctcgagggttttccaagtagaagtgggtagttttcatgtactttgagaattctgaggtttttaacccccccctttttttttaaatataaatcttttctattttgaagtaatgagactttaaaggatcttgtttttgtaatcacttgatttcaaaggatacttcttacagcaattataaagtaatagtcaaaatgctaattagacattttcagtcatagctgctttaatgttgaaacagaatttttttctttagcagagactgtatcgtagagttgaaacgctaaatattcttttgtctggcatcagatctctgaactgctctgacattctcctgaaaaacccctagtgccctttt

SEQ ID NO: 358493 - DNA, 384 bp, Homo sapiens
aattcgagctcgggtacacggaatgtgtggtgttatggtgacaagtagagctggtcatgtcgacagccccctcttacctcgtcgcgtctcagcagatgtccatggggtcgtattgggagtgacttttgtaccagttggcttggctgattttggaaagagtggaagaacccccttcaccttgtgagttttgttcatctgtgttgcatgtgtttgcacagtgtacattgactgaaacgtgaagaaacagcccttgggcttttgagtctcggttttctttcttggcgctcatgctctcagaataataatacgtgtggtgcaggcccggtgcaccaggcaagtgagggctgtgctggcatggtttctttaggaggaaggcctgttgca

SEQ ID NO: 358494 - DNA, 738 bp, Homo sapiens
gcgagcggcgaccctcacctcgcctcccgcctagctcctgcgcagccagcgggtaccgggagctgcggccagcgccgcttctttcctttccttttctctccgttttccttctccttccccggaggagaaaacaaataaagaagagcaaatagccgggaggcgctcggcatccaggacgttccctcccccgatccaagttggaattagcatcctctcgggggtggctcgggagcggcccggaggagccggcggcggcccgaggagcgagggaccgaaccgggagccatgccgcgctgagggggggccgcacagccgccgccaccgccaccgccgccgggtggggtgggaggggcgggatacgccgccgccgccgcctccagggtgggcgcctttcgccgtggacgccgaccgtccgggacgagggttcatagtggcgtcatgcacgcagactcctgcaagttcccctaagttcttagaggactgctttgccttttgatctgagagttgcaaagttccataaagaatggcccttgtggataagcacaaagtcaagagacagcgattggacagaatttgtgaaggttcatagtggcgtcatgcacgcagactcctgcaagttcccctaagttcttagaggactgctttgcctttgatctgagagttgcaaagttccataaagaatggcccttgttggataagcacaaagtcaagagacagcgattggacagaattgtgagg

SEQ ID NO: 358495 - DNA, 6136 bp, Homo sapiens
  misc_feature (4)..(4): n is a, c, g, or t
gaanccgattaatcctccagttggttgtccctgccgtctcggaagggttagcacacagccaggtctgtttttgatgtatgtaattgaagatttataaagaaaagcttctcctctgcctcatccacagtcattttttttccaatgccagttcccagcaggcatataaatattggtcgttctcagagctgggatgctgctgggtggtacgagggcccctgggagaacgccgagtccctgcggcctctggggaggagaagctccctgacgtatggcacagcagaggggacttggtttgagccaaaccaccgaccacaggacgctgccctgcccgtggccgccgagccctacctgtaccgggaggccgtttataactcagtggctgcaagaaaggggtctactcctgacttcaccttctacgacagcagacaggcagtgatgtctggtcgcagccccctgctgccacgggagtactacagtgatccgtctggagctgctagggtacccaaagagcctcccctctatcgggacccaggagtcagccggccggtccccagctacggagtgcttggcagcagaacgtcatgggatccaatgcaaggccggtcacctgccctgcaggacgccggtcacctgtaccgggatcctggaggtaaaatgatccctcaggggcggcagacacagagcagggctgcatctcccgggcggtatggacgggagcagcccgacaccaggtatggggcggaggtgcctgcctaccccctcagccaggtcttcagcgacatcagcgaaagacccattgaccctgcccctgccagacaggtggccccgacgtgcctggttgtggaccccagttcagctgctgcccccgaaggcagcacaggggtggccccaggggccctgaatcgtggctacgggcctgcccgggaaagcatcccatccaagatggcttacgagacttacgaagctgacctgtccaccttccagggtcctggtggcaagaggaccgtgctccctgagttcctggcctttctgcgggcggaggggctggcagaggccacgctgggagccctactgcagcagggctttgactccccggccgtcctggctaccctggaggacgcggatatcaagtctgtcgcacccaacctgggccaggcccgtgttctgagccgcctggccaatagctgcaggaccgaaatgcagctgcggaggcaggaccgggggggcccgctgccccgggcgcggtccagcagcttcagccaccgaagcgaactgctccatggtgacttggcttctctgggcgctgcggctcctctgcagacagcatccccccgagctggagacccggctcgccgtccctccagcgcaccatctcagcacctcctggagacggcagccacctattctgcccctggcgtgggcacccatgccccacacttcccctccaactccgggtacagctctcccaccccttgcgccctgacagcgcgtctgagccccacgcaccccctgcaggcaggggtggccttgactaacccgggcccctcaaacccccttcacccaggccccagaacagcttactccacggcatacacggtgcccatggagctgctaaagagggagcgcaacgtggccgcctctccgctgcccagccctcacggcagcccccaggtcttgcggaagccaggtgcacccctggggccatccaccctgccgccggccagccagagcctccacacgcctcactcaccgtacgagaaggtggcccggcgcacaggggcacccatcatcgtgtccaccatgcttgcaccagaaccaaggtatccgcccccagatcatgaacggccccctgcacccccgccccctggtggcgctgctggacggccgcgactgcactgtggagatgcccatcctgaaggacctggccactgtggccttctgtgacgcgcagtcgacgcaggaaatccacgagaaggttctaaacgaagccgtgggcgccatgatgtaccacaccatcaccctcaccagggaggacctggagaagttcaaggccctgagagtgatcgtgcggataggcagtggctatgacaacgtggacatcaaggctgccggcgagctcggaattgccgtgtgcaacatcccgtctgcagccgtggaagagacagcggactctaccatctgccacatcctcaacctgtaccggaggaacacgtggctgtaccaggcactgcgggaaggcacgcgggttcagagcgtggagcagatccgcgaggtggcctcgggagcggcccgcatccgtggggagacgctgggcctcattggctttggtcgcacggggcaggcggttgcagttcgagccaaggcctttggattcagcgtcatattttatgacccctacttgcaggatgggatcgagcggtccctgggcgtgcagagggtctacaccctgcaggatttgctgtatcagagcgactgcgtctccttgcactgcaatctcaacgaacataaccaccacctcatcaatgactttaccataaagcagatgaggcagggagcattccttgtgaacgcagcccgtggcggcctggtggacgagaaagccttagcacaagccctcaaggagggcaggatacgaggggcagccctcgacgtgcatgagtcagagcccttcagctttgctcagggtccgttgaaagatgccccgaatctcatctgcactcctcacactgcctggtacagtgagcaggcgtcactggagatgagggaggcagctgccaccgagatccgccgagccatcacaggtcgcatcccagaaagcttaagaaattgtgtgaacaaggaattctttgtcacatcagcgccttggtcagtaatagaccagcaagcaattcatcctgagctcaatggtgccacatacagatatccgccaggcatcgtgggtgtggctccaggaggacttcctgcagccatggaagggatcatccctggaggcatcccagtgactcacaacctcccgacagtggcacatccttcccaagcgccctctcccaaccagcccacaaaacacggggacaatcgagagcaccccaacgagcaatagcagagaatgccagaaggtaatcactcagatacacttgggaccaagagacagtgaaaaatagatgaactaagagaaaaagaatcggatggtctttgtaactgattctggacatatgcatcattgatgttgcagtgttgaaactacaagagctagaaaactgaagatgtcgtctgcttacggaagcgctgaaagactaggatgtgatttattaacgaccaacttctgttattgtgtgttaagtttttcatctgtgcatcaaatcacaaaaagaataaatagagctttttcctttatcagtcccttgggcacagcaggtcctgaacaccctgctctacaatgttgcatcaagagttcaaacaacaaaataaaaaatattaagaggaaatccccatcctgtgacttgagtcccttaagtctacaggggctggtgacctctttttgctaataggaaaatcacattactacaaaatggggagaaaactgtttgcctgtggtagacacctgcacgcataggattgaagacagtacaggctgctgtacagagaagcgcctctcacatctgaactgcatactgagcgggcaagtcggttgtaagttcagtaaaaccctctgatgatgcaaaaaaaaaaaaaaaaagtattaagtttcacaagctgtttgtactcaaatatattttctcagtttcagatcctctgctattttattgagtggaaagtcttgagctaaaagggttcaagaagaataatgttgcatttccttatgtctcaggaaacactttttatggtaacttgtcagattgtctatgaacaaacccacttttttagacattgataaagtcttcttttcttcacgtgatattttatacaagaacacttcagatgtattagatgtgactgattttaacaaatcctattagatttgtatcaactagttacatgttctattcatagtcttttgtgaatcattgcctttttgtttaaaaagatggcctattttgagcctttgtataggtacattcctgtttttgtgacaaaagaaaaactttaaaattgtcccaaacagaaaaataatggctatcagaagtatgttttgttttagtgtgagttaccgttactgtatttgtttattgtaaaggtggacatttagcgttcagtgcagttttcaataaaaagtaattaaaatttgttaagttctgaaattcaagtacatctcactaatgtaaatgttctctacttgagatgtttaaggcagttgcattgtcaattagccaatttccagctcttgttactacagggttccataaccagactcaagaccgctgacaattaattacctgtgataacaaaaagtttaattgaaaaatcaaaacctcacacaagtccatcattatcacgtcatgccgtccttaagatgcaatggtgggttagtgctaaatcaattcaaaaaaaaacaaagttgctcaacttttagagttctgactttaatctaccccaaagcaaaatgacctggacctggttcaagggagggaagtgaaccttgaaactgttttgccaataacctaacaaacaaaatgatatttacaaagaagtgttgcaaatagtcccatgagttaagagcttgatttaatggatcttctttttaaatagaattaaacctttatactaaaagtatttgcaagtgtcaattaagtccaacaattccaggtatgaaactccctctgagctcttccttatacttcccttcccaattaaaacaaaacaagaaaatcatggtgtcttaaagcctttggcttgcctggccttgtctgctcactcattttaaggtggtggccccatcccaactctaccataaaagtgtctattaacacaagctcacatggagagagacggcgctcatagttactgacctattaccccagggaacaaaaaaggtagtttaacgtcttcgtaaccactcatcaaagaggcaatgaaatatgcgtgaaaaggaggccaagcgcacacagaatatcttaccttcacgaatatgtgaagaagtctgggacacgatgaacctaagagtcaaaaacataaaaggcaggtctgaatccatggtccacctgggttttaattattagatcttggtcgcccaaacaaaaatttatatatatatatataaatttgaccccaaggaagaacaagtcaaaacaaaatgccacgctctgtttgctctagaaaaagaaccatcaagtccacagagtgcaggtatgacttactctccagagtcagtcattaatgtctgtcacctagccacgtataatcatctttgaaaaaggactatattctatcttgggacaataattatggctgttttaatagttcaagagcataatatagcattgatttaccaaaatttttggcctttaacagccagtctatgaaaaccatttagagccccattcctgtctgtagcctaggaaatggaaccatctttaattctttcccacagggaagaatgctgcacctatcacactatgtggtcagggtcactgattgataataaataaataaataatagagcgctcaggggaaacaacactcaccagaccacaacacacagtagaagctaagtgctgagcgtgtactctctggacaacgctggctgcaatgcagactgcaatggctacatgcttttccctctaacaattctctttggctttttcaattgggagggcagattttgcttaacaggcaactagaacaggatctctgcccactaaaaaattatccctatacatagagaaattactacagatgctaagtagtcagaatgctaacattttctacaaacttgattacttattggccaaaatgaaagcaaacagccaatttttaacaacacattcaccacttgaaacaaacagcagcatttacattatatcaaagattcatttctacagaatcgtactaaaaaatcatttttcctgcaagatttagcatgcagcaaaaaatgatcttttcatcctgggaacacctttttactgagttttcgggggga

SEQ ID NO: 358496 - DNA, 4703 bp, Homo sapiens
tccctgtgtgcgtgtgtcattttaaggtggctcgggagcggcccggaggagccggcggcggcccgaggagcgagggaccgaaccgggagccatgccgcgctgagggggggccgcacagccgccgccaccgccaccgccgccgggtggggtgggaggggcgggagacgccgccgccgccgcctccagggtgggcgcctttcgccgtggacgccgaccgtccgggacgagggttcatagtggcgtcatgcacgcagactcctgcaagttcccctaagttcttagaggactgctttgccttttgatctgagagttgcaaagttccataaagaatggcccttgtggataagcacaaagtcaagagacagcgattggacagaatttgtgaaggtatccgcccccagatcatgaacggccccctgcacccccgccccctggtggcgctgctggacggccgcgactgcactgtggagatgcccatcctgaaggacctggccactgtggccttctgtgacgcgcagtcgacgcaggaaatccacgagaaggttctaaacgaagccgtgggcgccatgatgtaccacaccatcaccctcaccagggaggacctggagaagttcaaggccctgagagtgatcgtgcggataggcagtggctatgacaacgtggacatcaaggctgccggcgagctcggaattgccgtgtgcaacatcccgtctgcagccgtggaagagacagcggactctaccatctgccacatcctcaacctgtaccggaggaacacgtggctgtaccaggcactgcgggaaggcacgcgggttcagagcgtggagcagatccgcgaggtggcctcgggagcggcccgcatccgtggggagacgctgggcctcattggctttggtcgcacggggcaggcggttgcagttcgagccaaggcctttggattcagcgtcatattttatgacccctacttgcaggatgggatcgagcggtccctgggcgtgcagagggtctacaccctgcaggatttgctgtatcagagcgactgcgtctccttgcactgcaatctcaacgaacataaccaccacctcatcaatgactttaccataaagcagatgaggcagggagcattccttgtgaacgcagcccgtggcggcctggtggacgagaaagccttagcacaagccctcaaggagggcaggatacgaggggcagccctcgacgtgcatgagtcagagcccttcagctttgctcagggtccgttgaaagatgccccgaatctcatctgcactcctcacactgcctggtacagtgagcaggcgtcactggagatgagggaggcagctgccaccgagatccgccgagccatcacaggtcgcatcccagaaagcttaagaaattgtgtgaacaaggaattctttgtcacatcagcgccttggtcagtaatagaccagcaagcaattcatcctgagctcaatggtgccacatacagatatccgccaggcatcgtgggtgtggctccaggaggacttcctgcagccatggaagggatcatccctggaggcatcccagtgactcacaacctcccgacagtggcacatccttcccaagcgccctctcccaaccagcccacaaaacacggggacaatcgagagcaccccaacgagcaatagcagagaatgccagaaggtaatcactcagatacacttgggaccaagagacagtgaaaaatagatgaactaagagaaaaagaatcggatggtctttgtaactgattctggacatatgcatcattgatgttgcagtgttgaaactacaagagctagaaaactgaagatgtcgtctgcttacggaagcgctgaaagactaggatgtgatttattaacgaccaacttctgttattgtgtgttaagtttttcatctgtgcatcaaatcacaaaaagaataaatagagctttttcctttatcagtcccttgggcacagcaggtcctgaacaccctgctctacaatgttgcatcaagagttcaaacaacaaaataaaaaatattaagaggaaatccccatcctgtgacttgagtcccttaagtctacaggggctggtgacctctttttgctaataggaaaatcacattactacaaaatggggagaaaactgtttgcctgtggtagacacctgcacgcataggattgaagacagtacaggctgctgtacagagaagcgcctctcacatctgaactgcatactgagcgggcaagtcggttgtaagttcagtaaaaccctctgatgatgcaaaaaaaaaaaaaaaaagtattaagtttcacaagctgtttgtactcaaatatattttctcagtttcagatcctctgctattttattgagtggaaagtcttgagctaaaagggttcaagaagaataatgttgcatttccttatgtctcaggaaacactttttatggtaacttgtcagattgtctatgaacaaacccacttttttagacattgataaagtcttcttttcttcacgtgatattttatacaagaacacttcagatgtattagatgtgactgattttaacaaatcctattagatttgtatcaactagttacatgttctattcatagtcttttgtgaatcattgcctttttgtttaaaaagatggcctattttgagcctttgtataggtacattcctgtttttgtgacaaaagaaaaactttaaaattgtcccaaacagaaaaataatggctatcagaagtatgttttgttttagtgtgagttaccgttactgtatttgtttattgtaaaggtggacatttagcgttcagtgcagttttcaataaaaagtaattaaaatttgttaagttctgaaattcaagtacatctcactaatgtaaatgttctctacttgagatgtttaaggcagttgcattgtcaattagccaatttccagctcttgttactacagggttccataaccagactcaagaccgctgacaattaattacctgtgataacaaaaagtttaattgaaaaatcaaaacctcacacaagtccatcattatcacgtcatgccgtccttaagatgcaatggtgggttagtgctaaatcaattcaaaaaaaaacaaagttgctcaacttttagagttctgactttaatctaccccaaagcaaaatgacctggacctggttcaagggagggaagtgaaccttgaaactgttttgccaataacctaacaaacaaaatgatatttacaaagaagtgttgcaaatagtcccatgagttaagagcttgatttaatggatcttctttttaaatagaattaaacctttatactaaaagtatttgcaagtgtcaattaagtccaacaattccaggtatgaaactccctctgagctcttccttatacttcccttcccaattaaaacaaaacaagaaaatcatggtgtcttaaagcctttggcttgcctggccttgtctgctcactcattttaaggtggtggccccatcccaactctaccataaaagtgtctattaacacaagctcacatggagagagacggcgctcatagttactgacctattaccccagggaacaaaaaaggtagtttaacgtcttcgtaaccactcatcaaagaggcaatgaaatatgcgtgaaaaggaggccaagcgcacacagaatatcttaccttcacgaatatgtgaagaagtctgggacacgatgaacctaagagtcaaaaacataaaaggcaggtctgaatccatggtccacctgggttttaattattagatcttggtcgcccaaacaaaaatttatatatatatatataaatttgaccccaaggaagaacaagtcaaaacaaaatgccacgctctgtttgctctagaaaaagaaccatcaagtccacagagtgcaggtatgacttactctccagagtcagtcattaatgtctgtcacctagccacgtataatcatctttgaaaaaggactatattctatcttgggacaataattatggctgttttaatagttcaagagcataatatagcattgatttaccaaaatttttggcctttaacagccagtctatgaaaaccatttagagccccattcctgtctgtagcctaggaaatggaaccatctttaattctttcccacagggaagaatgctgcacctatcacactatgtggtcagggtcactgattgataataaataaataaataatagagcgctcaggggaaacaacactcaccagaccacaacacacagtagaagctaagtgctgagcgtgtactctctggacaacgctggctgcaatgcagactgcaatggctacatgcttttccctctaacaattctctttggctttttcaattgggagggcagattttgcttaacaggcaactagaacaggatctctgcccactaaaaaattatccctatacatagagaaattactacagatgctaagtagtcagaatgctaacattttctacaaacttgattacttattggccaaaatgaaagcaaacagccaatttttaacaacacattcaccacttgaaacaaacagcagcatttacattatatcaaagattcatttctacagaatcgtactaaaaaatcatttttcctgcaagatttagcatgcagcaaaaaatgatcttttcatcctgggaacacctttttactgagttttcgggggga

SEQ ID NO: 358497 - DNA, 4920 bp, Homo sapiens
aaaattgttatccgccatccagatcgacgacgtgcatacgatggttatgaaccaatgaaggtgtattcccttaaaaagacggacagcccatcgtgtgaactatagagtttgtggacagatttatattgccttagaccagaacactgcggaagaggaaatccatcatggaaacccgagagtgacaggacccttgctatggtgacaagtagagctggtcatgtcgacagccccctcttacctcgtcgcgtctcagcagatgtccatggggtcgtattgggagtgacttttgtaccagttggcttggctgattttggaaagagtggaagaacccccttcaccttggtttcatcaccttaaatggttttgaaccaatgaaggtgtattcccttaaaaagacggacagcccatcgtgtgaactatagagtttgtggacagatttatattgggttcatagtggcgtcatgcacgcagactcctgcaagttcccctaagttcttagaggactgctttgccttttgatctgagagttgcaaagttccataaagaatggcccttgtggataagcacaaagtcaagagacagcgattggacagaatttgtgaaggtatccgcccccagatcatgaacggccccctgcacccccgccccctggtggcgctgctggacggccgcgactgcactgtggagatgcccatcctgaaggacctggccactgtggccttctgtgacgcgcagtcgacgcaggaaatccacgagaaggttctaaacgaagccgtgggcgccatgatgtaccacaccatcaccctcaccagggaggacctggagaagttcaaggccctgagagtgatcgtgcggataggcagtggctatgacaacgtggacatcaaggctgccggcgagctcggaattgccgtgtgcaacatcccgtctgcagccgtggaagagacagcggactctaccatctgccacatcctcaacctgtaccggaggaacacgtggctgtaccaggcactgcgggaaggcacgcgggttcagagcgtggagcagatccgcgaggtggcctcgggagcggcccgcatccgtggggagacgctgggcctcattggctttggtcgcacggggcaggcggttgcagttcgagccaaggcctttggattcagcgtcatattttatgacccctacttgcaggatgggatcgagcggtccctgggcgtgcagagggtctacaccctgcaggatttgctgtatcagagcgactgcgtctccttgcactgcaatctcaacgaacataaccaccacctcatcaatgactttaccataaagcagatgaggcagggagcattccttgtgaacgcagcccgtggcggcctggtggacgagaaagccttagcacaagccctcaaggagggcaggatacgaggggcagccctcgacgtgcatgagtcagagcccttcagctttgctcagggtccgttgaaagatgccccgaatctcatctgcactcctcacactgcctggtacagtgagcaggcgtcactggagatgagggaggcagctgccaccgagatccgccgagccatcacaggtcgcatcccagaaagcttaagaaattgtgtgaacaaggaattctttgtcacatcagcgccttggtcagtaatagaccagcaagcaattcatcctgagctcaatggtgccacatacagatatccgccaggcatcgtgggtgtggctccaggaggacttcctgcagccatggaagggatcatccctggaggcatcccagtgactcacaacctcccgacagtggcacatccttcccaagcgccctctcccaaccagcccacaaaacacggggacaatcgagagcaccccaacgagcaatagcagagaatgccagaaggtaatcactcagatacacttgggaccaagagacagtgaaaaatagatgaactaagagaaaaagaatcggatggtctttgtaactgattctggacatatgcatcattgatgttgcagtgttgaaactacaagagctagaaaactgaagatgtcgtctgcttacggaagcgctgaaagactaggatgtgatttattaacgaccaacttctgttattgtgtgttaagtttttcatctgtgcatcaaatcacaaaaagaataaatagagctttttcctttatcagtcccttgggcacagcaggtcctgaacaccctgctctacaatgttgcatcaagagttcaaacaacaaaataaaaaatattaagaggaaatccccatcctgtgacttgagtcccttaagtctacaggggctggtgacctctttttgctaataggaaaatcacattactacaaaatggggagaaaactgtttgcctgtggtagacacctgcacgcataggattgaagacagtacaggctgctgtacagagaagcgcctctcacatctgaactgcatactgagcgggcaagtcggttgtaagttcagtaaaaccctctgatgatgcaaaaaaaaaaaaaaaaagtattaagtttcacaagctgtttgtactcaaatatattttctcagtttcagatcctctgctattttattgagtggaaagtcttgagctaaaagggttcaagaagaataatgttgcatttccttatgtctcaggaaacactttttatggtaacttgtcagattgtctatgaacaaacccacttttttagacattgataaagtcttcttttcttcacgtgatattttatacaagaacacttcagatgtattagatgtgactgattttaacaaatcctattagatttgtatcaactagttacatgttctattcatagtcttttgtgaatcattgcctttttgtttaaaaagatggcctattttgagcctttgtataggtacattcctgtttttgtgacaaaagaaaaactttaaaattgtcccaaacagaaaaataatggctatcagaagtatgttttgttttagtgtgagttaccgttactgtatttgtttattgtaaaggtggacatttagcgttcagtgcagttttcaataaaaagtaattaaaatttgttaagttctgaaattcaagtacatctcactaatgtaaatgttctctacttgagatgtttaaggcagttgcattgtcaattagccaatttccagctcttgttactacagggttccataaccagactcaagaccgctgacaattaattacctgtgataacaaaaagtttaattgaaaaatcaaaacctcacacaagtccatcattatcacgtcatgccgtccttaagatgcaatggtgggttagtgctaaatcaattcaaaaaaaaacaaagttgctcaacttttagagttctgactttaatctaccccaaagcaaaatgacctggacctggttcaagggagggaagtgaaccttgaaactgttttgccaataacctaacaaacaaaatgatatttacaaagaagtgttgcaaatagtcccatgagttaagagcttgatttaatggatcttctttttaaatagaattaaacctttatactaaaagtatttgcaagtgtcaattaagtccaacaattccaggtatgaaactccctctgagctcttccttatacttcccttcccaattaaaacaaaacaagaaaatcatggtgtcttaaagcctttggcttgcctggccttgtctgctcactcattttaaggtggtggccccatcccaactctaccataaaagtgtctattaacacaagctcacatggagagagacggcgctcatagttactgacctattaccccagggaacaaaaaaggtagtttaacgtcttcgtaaccactcatcaaagaggcaatgaaatatgcgtgaaaaggaggccaagcgcacacagaatatcttaccttcacgaatatgtgaagaagtctgggacacgatgaacctaagagtcaaaaacataaaaggcaggtctgaatccatggtccacctgggttttaattattagatcttggtcgcccaaacaaaaatttatatatatatatataaatttgaccccaaggaagaacaagtcaaaacaaaatgccacgctctgtttgctctagaaaaagaaccatcaagtccacagagtgcaggtatgacttactctccagagtcagtcattaatgtctgtcacctagccacgtataatcatctttgaaaaaggactatattctatcttgggacaataattatggctgttttaatagttcaagagcataatatagcattgatttaccaaaatttttggcctttaacagccagtctatgaaaaccatttagagccccattcctgtctgtagcctaggaaatggaaccatctttaattctttcccacagggaagaatgctgcacctatcacactatgtggtcagggtcactgattgataataaataaataaataatagagcgctcaggggaaacaacactcaccagaccacaacacacagtagaagctaagtgctgagcgtgtactctctggacaacgctggctgcaatgcagactgcaatggctacatgcttttccctctaacaattctctttggctttttcaattgggagggcagattttgcttaacaggcaactagaacaggatctctgcccactaaaaaattatccctatacatagagaaattactacagatgctaagtagtcagaatgctaacattttctacaaacttgattacttattggccaaaatgaaagcaaacagccaatttttaacaacacattcaccacttgaaacaaacagcagcatttacattatatcaaagattcatttctacagaatcgtactaaaaaatcatttttcctgcaagatttagcatgcagcaaaaaatgatcttttcatcctgggaacacctttttactgagttttcgggggga

SEQ ID NO: 358498 - DNA, 4799 bp, Homo sapiens
gcgagcggcgaccctcacctcgcctcccgcctagctcctgcgcagccagcgggtaccgggagctgcggccagcgccgcttctttcctttccttttctctccgttttccttctccttccccggaggagaaaacaaataaagaagagcaaatagccgggaggcgctcggcatccaggacgttccctcccccgatccaagttggaattagcatcctctcggggggtttcatcaccttaaatggttttgaaccaatgaaggtgtattcccttaaaaagacggacagcccatcgtgtgaactatagagtttgtggacagatttatattgggttcatagtggcgtcatgcacgcagactcctgcaagttcccctaagttcttagaggactgctttgccttttgatctgagagttgcaaagttccataaagaatggcccttgtggataagcacaaagtcaagagacagcgattggacagaatttgtgaaggtatccgcccccagatcatgaacggccccctgcacccccgccccctggtggcgctgctggacggccgcgactgcactgtggagatgcccatcctgaaggacctggccactgtggccttctgtgacgcgcagtcgacgcaggaaatccacgagaaggttctaaacgaagccgtgggcgccatgatgtaccacaccatcaccctcaccagggaggacctggagaagttcaaggccctgagagtgatcgtgcggataggcagtggctatgacaacgtggacatcaaggctgccggcgagctcggaattgccgtgtgcaacatcccgtctgcagccgtggaagagacagcggactctaccatctgccacatcctcaacctgtaccggaggaacacgtggctgtaccaggcactgcgggaaggcacgcgggttcagagcgtggagcagatccgcgaggtggcctcgggagcggcccgcatccgtggggagacgctgggcctcattggctttggtcgcacggggcaggcggttgcagttcgagccaaggcctttggattcagcgtcatattttatgacccctacttgcaggatgggatcgagcggtccctgggcgtgcagagggtctacaccctgcaggatttgctgtatcagagcgactgcgtctccttgcactgcaatctcaacgaacataaccaccacctcatcaatgactttaccataaagcagatgaggcagggagcattccttgtgaacgcagcccgtggcggcctggtggacgagaaagccttagcacaagccctcaaggagggcaggatacgaggggcagccctcgacgtgcatgagtcagagcccttcagctttgctcagggtccgttgaaagatgccccgaatctcatctgcactcctcacactgcctggtacagtgagcaggcgtcactggagatgagggaggcagctgccaccgagatccgccgagccatcacaggtcgcatcccagaaagcttaagaaattgtgtgaacaaggaattctttgtcacatcagcgccttggtcagtaatagaccagcaagcaattcatcctgagctcaatggtgccacatacagatatccgccaggcatcgtgggtgtggctccaggaggacttcctgcagccatggaagggatcatccctggaggcatcccagtgactcacaacctcccgacagtggcacatccttcccaagcgccctctcccaaccagcccacaaaacacggggacaatcgagagcaccccaacgagcaatagcagagaatgccagaaggtaatcactcagatacacttgggaccaagagacagtgaaaaatagatgaactaagagaaaaagaatcggatggtctttgtaactgattctggacatatgcatcattgatgttgcagtgttgaaactacaagagctagaaaactgaagatgtcgtctgcttacggaagcgctgaaagactaggatgtgatttattaacgaccaacttctgttattgtgtgttaagtttttcatctgtgcatcaaatcacaaaaagaataaatagagctttttcctttatcagtcccttgggcacagcaggtcctgaacaccctgctctacaatgttgcatcaagagttcaaacaacaaaataaaaaatattaagaggaaatccccatcctgtgacttgagtcccttaagtctacaggggctggtgacctctttttgctaataggaaaatcacattactacaaaatggggagaaaactgtttgcctgtggtagacacctgcacgcataggattgaagacagtacaggctgctgtacagagaagcgcctctcacatctgaactgcatactgagcgggcaagtcggttgtaagttcagtaaaaccctctgatgatgcaaaaaaaaaaaaaaaaagtattaagtttcacaagctgtttgtactcaaatatattttctcagtttcagatcctctgctattttattgagtggaaagtcttgagctaaaagggttcaagaagaataatgttgcatttccttatgtctcaggaaacactttttatggtaacttgtcagattgtctatgaacaaacccacttttttagacattgataaagtcttcttttcttcacgtgatattttatacaagaacacttcagatgtattagatgtgactgattttaacaaatcctattagatttgtatcaactagttacatgttctattcatagtcttttgtgaatcattgcctttttgtttaaaaagatggcctattttgagcctttgtataggtacattcctgtttttgtgacaaaagaaaaactttaaaattgtcccaaacagaaaaataatggctatcagaagtatgttttgttttagtgtgagttaccgttactgtatttgtttattgtaaaggtggacatttagcgttcagtgcagttttcaataaaaagtaattaaaatttgttaagttctgaaattcaagtacatctcactaatgtaaatgttctctacttgagatgtttaaggcagttgcattgtcaattagccaatttccagctcttgttactacagggttccataaccagactcaagaccgctgacaattaattacctgtgataacaaaaagtttaattgaaaaatcaaaacctcacacaagtccatcattatcacgtcatgccgtccttaagatgcaatggtgggttagtgctaaatcaattcaaaaaaaaacaaagttgctcaacttttagagttctgactttaatctaccccaaagcaaaatgacctggacctggttcaagggagggaagtgaaccttgaaactgttttgccaataacctaacaaacaaaatgatatttacaaagaagtgttgcaaatagtcccatgagttaagagcttgatttaatggatcttctttttaaatagaattaaacctttatactaaaagtatttgcaagtgtcaattaagtccaacaattccaggtatgaaactccctctgagctcttccttatacttcccttcccaattaaaacaaaacaagaaaatcatggtgtcttaaagcctttggcttgcctggccttgtctgctcactcattttaaggtggtggccccatcccaactctaccataaaagtgtctattaacacaagctcacatggagagagacggcgctcatagttactgacctattaccccagggaacaaaaaaggtagtttaacgtcttcgtaaccactcatcaaagaggcaatgaaatatgcgtgaaaaggaggccaagcgcacacagaatatcttaccttcacgaatatgtgaagaagtctgggacacgatgaacctaagagtcaaaaacataaaaggcaggtctgaatccatggtccacctgggttttaattattagatcttggtcgcccaaacaaaaatttatatatatatatataaatttgaccccaaggaagaacaagtcaaaacaaaatgccacgctctgtttgctctagaaaaagaaccatcaagtccacagagtgcaggtatgacttactctccagagtcagtcattaatgtctgtcacctagccacgtataatcatctttgaaaaaggactatattctatcttgggacaataattatggctgttttaatagttcaagagcataatatagcattgatttaccaaaatttttggcctttaacagccagtctatgaaaaccatttagagccccattcctgtctgtagcctaggaaatggaaccatctttaattctttcccacagggaagaatgctgcacctatcacactatgtggtcagggtcactgattgataataaataaataaataatagagcgctcaggggaaacaacactcaccagaccacaacacacagtagaagctaagtgctgagcgtgtactctctggacaacgctggctgcaatgcagactgcaatggctacatgcttttccctctaacaattctctttggctttttcaattgggagggcagattttgcttaacaggcaactagaacaggatctctgcccactaaaaaattatccctatacatagagaaattactacagatgctaagtagtcagaatgctaacattttctacaaacttgattacttattggccaaaatgaaagcaaacagccaatttttaacaacacattcaccacttgaaacaaacagcagcatttacattatatcaaagattcatttctacagaatcgtactaaaaaatcatttttcctgcaagatttagcatgcagcaaaaaatgatcttttcatcctgggaacacctttttactgagttttcgggggga

SEQ ID NO: 358499 - DNA, 4842 bp, Homo sapiens
gcctcactattgctagtcgaggctggctttaatcggccgagggtcctcttgcgttgtatttaaggtggctcgggagcggcccggaggagccggcggcggcccgaggagcgagggaccgaaccgggagccatgccgcgctgagggggggccgcacagccgccgccaccgccaccgccgccgggtggggtgggaggggcgggagacgccgccgccgccgcctccagggtgggcgcctttcgccgtggacgccgaccgtccgggacgagatggagaaaacaaaggattcagattgaaggactgctcagacaccctccgaagaggtggccctgcctgcgctcctcctggctgcagagtaccccaccagcgcggttcatagtggcgtcatgcacgcagactcctgcaagttcccctaagttcttagaggactgctttgccttttgatctgagagttgcaaagttccataaagaatggcccttgtggataagcacaaagtcaagagacagcgattggacagaatttgtgaaggtatccgcccccagatcatgaacggccccctgcacccccgccccctggtggcgctgctggacggccgcgactgcactgtggagatgcccatcctgaaggacctggccactgtggccttctgtgacgcgcagtcgacgcaggaaatccacgagaaggttctaaacgaagccgtgggcgccatgatgtaccacaccatcaccctcaccagggaggacctggagaagttcaaggccctgagagtgatcgtgcggataggcagtggctatgacaacgtggacatcaaggctgccggcgagctcggaattgccgtgtgcaacatcccgtctgcagccgtggaagagacagcggactctaccatctgccacatcctcaacctgtaccggaggaacacgtggctgtaccaggcactgcgggaaggcacgcgggttcagagcgtggagcagatccgcgaggtggcctcgggagcggcccgcatccgtggggagacgctgggcctcattggctttggtcgcacggggcaggcggttgcagttcgagccaaggcctttggattcagcgtcatattttatgacccctacttgcaggatgggatcgagcggtccctgggcgtgcagagggtctacaccctgcaggatttgctgtatcagagcgactgcgtctccttgcactgcaatctcaacgaacataaccaccacctcatcaatgactttaccataaagcagatgaggcagggagcattccttgtgaacgcagcccgtggcggcctggtggacgagaaagccttagcacaagccctcaaggagggcaggatacgaggggcagccctcgacgtgcatgagtcagagcccttcagctttgctcagggtccgttgaaagatgccccgaatctcatctgcactcctcacactgcctggtacagtgagcaggcgtcactggagatgagggaggcagctgccaccgagatccgccgagccatcacaggtcgcatcccagaaagcttaagaaattgtgtgaacaaggaattctttgtcacatcagcgccttggtcagtaatagaccagcaagcaattcatcctgagctcaatggtgccacatacagatatccgccaggcatcgtgggtgtggctccaggaggacttcctgcagccatggaagggatcatccctggaggcatcccagtgactcacaacctcccgacagtggcacatccttcccaagcgccctctcccaaccagcccacaaaacacggggacaatcgagagcaccccaacgagcaatagcagagaatgccagaaggtaatcactcagatacacttgggaccaagagacagtgaaaaatagatgaactaagagaaaaagaatcggatggtctttgtaactgattctggacatatgcatcattgatgttgcagtgttgaaactacaagagctagaaaactgaagatgtcgtctgcttacggaagcgctgaaagactaggatgtgatttattaacgaccaacttctgttattgtgtgttaagtttttcatctgtgcatcaaatcacaaaaagaataaatagagctttttcctttatcagtcccttgggcacagcaggtcctgaacaccctgctctacaatgttgcatcaagagttcaaacaacaaaataaaaaatattaagaggaaatccccatcctgtgacttgagtcccttaagtctacaggggctggtgacctctttttgctaataggaaaatcacattactacaaaatggggagaaaactgtttgcctgtggtagacacctgcacgcataggattgaagacagtacaggctgctgtacagagaagcgcctctcacatctgaactgcatactgagcgggcaagtcggttgtaagttcagtaaaaccctctgatgatgcaaaaaaaaaaaaaaaaagtattaagtttcacaagctgtttgtactcaaatatattttctcagtttcagatcctctgctattttattgagtggaaagtcttgagctaaaagggttcaagaagaataatgttgcatttccttatgtctcaggaaacactttttatggtaacttgtcagattgtctatgaacaaacccacttttttagacattgataaagtcttcttttcttcacgtgatattttatacaagaacacttcagatgtattagatgtgactgattttaacaaatcctattagatttgtatcaactagttacatgttctattcatagtcttttgtgaatcattgcctttttgtttaaaaagatggcctattttgagcctttgtataggtacattcctgtttttgtgacaaaagaaaaactttaaaattgtcccaaacagaaaaataatggctatcagaagtatgttttgttttagtgtgagttaccgttactgtatttgtttattgtaaaggtggacatttagcgttcagtgcagttttcaataaaaagtaattaaaatttgttaagttctgaaattcaagtacatctcactaatgtaaatgttctctacttgagatgtttaaggcagttgcattgtcaattagccaatttccagctcttgttactacagggttccataaccagactcaagaccgctgacaattaattacctgtgataacaaaaagtttaattgaaaaatcaaaacctcacacaagtccatcattatcacgtcatgccgtccttaagatgcaatggtgggttagtgctaaatcaattcaaaaaaaaacaaagttgctcaacttttagagttctgactttaatctaccccaaagcaaaatgacctggacctggttcaagggagggaagtgaaccttgaaactgttttgccaataacctaacaaacaaaatgatatttacaaagaagtgttgcaaatagtcccatgagttaagagcttgatttaatggatcttctttttaaatagaattaaacctttatactaaaagtatttgcaagtgtcaattaagtccaacaattccaggtatgaaactccctctgagctcttccttatacttcccttcccaattaaaacaaaacaagaaaatcatggtgtcttaaagcctttggcttgcctggccttgtctgctcactcattttaaggtggtggccccatcccaactctaccataaaagtgtctattaacacaagctcacatggagagagacggcgctcatagttactgacctattaccccagggaacaaaaaaggtagtttaacgtcttcgtaaccactcatcaaagaggcaatgaaatatgcgtgaaaaggaggccaagcgcacacagaatatcttaccttcacgaatatgtgaagaagtctgggacacgatgaacctaagagtcaaaaacataaaaggcaggtctgaatccatggtccacctgggttttaattattagatcttggtcgcccaaacaaaaatttatatatatatatataaatttgaccccaaggaagaacaagtcaaaacaaaatgccacgctctgtttgctctagaaaaagaaccatcaagtccacagagtgcaggtatgacttactctccagagtcagtcattaatgtctgtcacctagccacgtataatcatctttgaaaaaggactatattctatcttgggacaataattatggctgttttaatagttcaagagcataatatagcattgatttaccaaaatttttggcctttaacagccagtctatgaaaaccatttagagccccattcctgtctgtagcctaggaaatggaaccatctttaattctttcccacagggaagaatgctgcacctatcacactatgtggtcagggtcactgattgataataaataaataaataatagagcgctcaggggaaacaacactcaccagaccacaacacacagtagaagctaagtgctgagcgtgtactctctggacaacgctggctgcaatgcagactgcaatggctacatgcttttccctctaacaattctctttggctttttcaattgggagggcagattttgcttaacaggcaactagaacaggatctctgcccactaaaaaattatccctatacatagagaaattactacagatgctaagtagtcagaatgctaacattttctacaaacttgattacttattggccaaaatgaaagcaaacagccaatttttaacaacacattcaccacttgaaacaaacagcagcatttacattatatcaaagattcatttctacagaatcgtactaaaaaatcatttttcctgcaagatttagcatgcagcaaaaaatgatcttttcatcctgggaacacctttttactgagttttcgggggga

SEQ ID NO: 358500 - DNA, 4788 bp, Homo sapiens
atcttgtgacaatggcctctcaggctccccagacgcatcagcggctctggattcccaccttgcgcccagcgtggttttcctgtgtggctaccatttaacgaacagcttggatttcttataatcaggcactctctccgataaccatcctgccagcacccctgaaagtgaagttggggtgttcctcactgtgtgtgggcgaccgcctggggcatgagaccaggacttccaggccccacagggttgtgcgctcagacctcaagtaggggccagaagagtgtactgaaacagaaggaatcttgtggaatttggcagttgtaccattttcttagcagaaaacaggagcccaggtgggagccatgtgtgtcgggttcctcgtcaggtgacggtgctgttgcggatctcgcggatgagctgagggggtatccagctttgtgctgcacgcttcctgtccactcatacaggtcgtgggctggtatccgcccccagatcatgaacggccccctgcacccccgccccctggtggcgctgctggacggccgcgactgcactgtggagatgcccatcctgaaggacctggccactgtggccttctgtgacgcgcagtcgacgcaggaaatccacgagaaggttctaaacgaagccgtgggcgccatgatgtaccacaccatcaccctcaccagggaggacctggagaagttcaaggccctgagagtgatcgtgcggataggcagtggctatgacaacgtggacatcaaggctgccggcgagctcggaattgccgtgtgcaacatcccgtctgcagccgtggaagagacagcggactctaccatctgccacatcctcaacctgtaccggaggaacacgtggctgtaccaggcactgcgggaaggcacgcgggttcagagcgtggagcagatccgcgaggtggcctcgggagcggcccgcatccgtggggagacgctgggcctcattggctttggtcgcacggggcaggcggttgcagttcgagccaaggcctttggattcagcgtcatattttatgacccctacttgcaggatgggatcgagcggtccctgggcgtgcagagggtctacaccctgcaggatttgctgtatcagagcgactgcgtctccttgcactgcaatctcaacgaacataaccaccacctcatcaatgactttaccataaagcagatgaggcagggagcattccttgtgaacgcagcccgtggcggcctggtggacgagaaagccttagcacaagccctcaaggagggcaggatacgaggggcagccctcgacgtgcatgagtcagagcccttcagctttgctcagggtccgttgaaagatgccccgaatctcatctgcactcctcacactgcctggtacagtgagcaggcgtcactggagatgagggaggcagctgccaccgagatccgccgagccatcacaggtcgcatcccagaaagcttaagaaattgtgtgaacaaggaattctttgtcacatcagcgccttggtcagtaatagaccagcaagcaattcatcctgagctcaatggtgccacatacagatatccgccaggcatcgtgggtgtggctccaggaggacttcctgcagccatggaagggatcatccctggaggcatcccagtgactcacaacctcccgacagtggcacatccttcccaagcgccctctcccaaccagcccacaaaacacggggacaatcgagagcaccccaacgagcaatagcagagaatgccagaaggtaatcactcagatacacttgggaccaagagacagtgaaaaatagatgaactaagagaaaaagaatcggatggtctttgtaactgattctggacatatgcatcattgatgttgcagtgttgaaactacaagagctagaaaactgaagatgtcgtctgcttacggaagcgctgaaagactaggatgtgatttattaacgaccaacttctgttattgtgtgttaagtttttcatctgtgcatcaaatcacaaaaagaataaatagagctttttcctttatcagtcccttgggcacagcaggtcctgaacaccctgctctacaatgttgcatcaagagttcaaacaacaaaataaaaaatattaagaggaaatccccatcctgtgacttgagtcccttaagtctacaggggctggtgacctctttttgctaataggaaaatcacattactacaaaatggggagaaaactgtttgcctgtggtagacacctgcacgcataggattgaagacagtacaggctgctgtacagagaagcgcctctcacatctgaactgcatactgagcgggcaagtcggttgtaagttcagtaaaaccctctgatgatgcaaaaaaaaaaaaaaaaagtattaagtttcacaagctgtttgtactcaaatatattttctcagtttcagatcctctgctattttattgagtggaaagtcttgagctaaaagggttcaagaagaataatgttgcatttccttatgtctcaggaaacactttttatggtaacttgtcagattgtctatgaacaaacccacttttttagacattgataaagtcttcttttcttcacgtgatattttatacaagaacacttcagatgtattagatgtgactgattttaacaaatcctattagatttgtatcaactagttacatgttctattcatagtcttttgtgaatcattgcctttttgtttaaaaagatggcctattttgagcctttgtataggtacattcctgtttttgtgacaaaagaaaaactttaaaattgtcccaaacagaaaaataatggctatcagaagtatgttttgttttagtgtgagttaccgttactgtatttgtttattgtaaaggtggacatttagcgttcagtgcagttttcaataaaaagtaattaaaatttgttaagttctgaaattcaagtacatctcactaatgtaaatgttctctacttgagatgtttaaggcagttgcattgtcaattagccaatttccagctcttgttactacagggttccataaccagactcaagaccgctgacaattaattacctgtgataacaaaaagtttaattgaaaaatcaaaacctcacacaagtccatcattatcacgtcatgccgtccttaagatgcaatggtgggttagtgctaaatcaattcaaaaaaaaacaaagttgctcaacttttagagttctgactttaatctaccccaaagcaaaatgacctggacctggttcaagggagggaagtgaaccttgaaactgttttgccaataacctaacaaacaaaatgatatttacaaagaagtgttgcaaatagtcccatgagttaagagcttgatttaatggatcttctttttaaatagaattaaacctttatactaaaagtatttgcaagtgtcaattaagtccaacaattccaggtatgaaactccctctgagctcttccttatacttcccttcccaattaaaacaaaacaagaaaatcatggtgtcttaaagcctttggcttgcctggccttgtctgctcactcattttaaggtggtggccccatcccaactctaccataaaagtgtctattaacacaagctcacatggagagagacggcgctcatagttactgacctattaccccagggaacaaaaaaggtagtttaacgtcttcgtaaccactcatcaaagaggcaatgaaatatgcgtgaaaaggaggccaagcgcacacagaatatcttaccttcacgaatatgtgaagaagtctgggacacgatgaacctaagagtcaaaaacataaaaggcaggtctgaatccatggtccacctgggttttaattattagatcttggtcgcccaaacaaaaatttatatatatatatataaatttgaccccaaggaagaacaagtcaaaacaaaatgccacgctctgtttgctctagaaaaagaaccatcaagtccacagagtgcaggtatgacttactctccagagtcagtcattaatgtctgtcacctagccacgtataatcatctttgaaaaaggactatattctatcttgggacaataattatggctgttttaatagttcaagagcataatatagcattgatttaccaaaatttttggcctttaacagccagtctatgaaaaccatttagagccccattcctgtctgtagcctaggaaatggaaccatctttaattctttcccacagggaagaatgctgcacctatcacactatgtggtcagggtcactgattgataataaataaataaataatagagcgctcaggggaaacaacactcaccagaccacaacacacagtagaagctaagtgctgagcgtgtactctctggacaacgctggctgcaatgcagactgcaatggctacatgcttttccctctaacaattctctttggctttttcaattgggagggcagattttgcttaacaggcaactagaacaggatctctgcccactaaaaaattatccctatacatagagaaattactacagatgctaagtagtcagaatgctaacattttctacaaacttgattacttattggccaaaatgaaagcaaacagccaatttttaacaacacattcaccacttgaaacaaacagcagcatttacattatatcaaagattcatttctacagaatcgtactaaaaaatcatttttcctgcaagatttagcatgcagcaaaaaatgatcttttcatcctgggaacacctttttactgagttttcgggggga

SEQ ID NO: 358501 - DNA, 4395 bp, Homo sapiens
tccttgcacaccatggcagcctctccttgcaccttctcctgcctctccacactccaggttccctcaggcttgtgtccccactgctgcatcgtggcggggtgtcacagaccctctgcagcccctggctgccctggactgtgcagagatgcctgactccagggaaacctgaaagcaagaagttaatggactgtggccttctgtgacgcgcagtcgacgcaggaaatccacgagaaggttctaaacgaagccgtgggcgccatgatgtaccacaccatcaccctcaccagggaggacctggagaagttcaaggccctgagagtgatcgtgcggataggcagtggctatgacaacgtggacatcaaggctgccggcgagctcggaattgccgtgtgcaacatcccgtctgcagccgtggaagagacagcggactctaccatctgccacatcctcaacctgtaccggaggaacacgtggctgtaccaggcactgcgggaaggcacgcgggttcagagcgtggagcagatccgcgaggtggcctcgggagcggcccgcatccgtggggagacgctgggcctcattggctttggtcgcacggggcaggcggttgcagttcgagccaaggcctttggattcagcgtcatattttatgacccctacttgcaggatgggatcgagcggtccctgggcgtgcagagggtctacaccctgcaggatttgctgtatcagagcgactgcgtctccttgcactgcaatctcaacgaacataaccaccacctcatcaatgactttaccataaagcagatgaggcagggagcattccttgtgaacgcagcccgtggcggcctggtggacgagaaagccttagcacaagccctcaaggagggcaggatacgaggggcagccctcgacgtgcatgagtcagagcccttcagctttgctcagggtccgttgaaagatgccccgaatctcatctgcactcctcacactgcctggtacagtgagcaggcgtcactggagatgagggaggcagctgccaccgagatccgccgagccatcacaggtcgcatcccagaaagcttaagaaattgtgtgaacaaggaattctttgtcacatcagcgccttggtcagtaatagaccagcaagcaattcatcctgagctcaatggtgccacatacagatatccgccaggcatcgtgggtgtggctccaggaggacttcctgcagccatggaagggatcatccctggaggcatcccagtgactcacaacctcccgacagtggcacatccttcccaagcgccctctcccaaccagcccacaaaacacggggacaatcgagagcaccccaacgagcaatagcagagaatgccagaaggtaatcactcagatacacttgggaccaagagacagtgaaaaatagatgaactaagagaaaaagaatcggatggtctttgtaactgattctggacatatgcatcattgatgttgcagtgttgaaactacaagagctagaaaactgaagatgtcgtctgcttacggaagcgctgaaagactaggatgtgatttattaacgaccaacttctgttattgtgtgttaagtttttcatctgtgcatcaaatcacaaaaagaataaatagagctttttcctttatcagtcccttgggcacagcaggtcctgaacaccctgctctacaatgttgcatcaagagttcaaacaacaaaataaaaaatattaagaggaaatccccatcctgtgacttgagtcccttaagtctacaggggctggtgacctctttttgctaataggaaaatcacattactacaaaatggggagaaaactgtttgcctgtggtagacacctgcacgcataggattgaagacagtacaggctgctgtacagagaagcgcctctcacatctgaactgcatactgagcgggcaagtcggttgtaagttcagtaaaaccctctgatgatgcaaaaaaaaaaaaaaaaagtattaagtttcacaagctgtttgtactcaaatatattttctcagtttcagatcctctgctattttattgagtggaaagtcttgagctaaaagggttcaagaagaataatgttgcatttccttatgtctcaggaaacactttttatggtaacttgtcagattgtctatgaacaaacccacttttttagacattgataaagtcttcttttcttcacgtgatattttatacaagaacacttcagatgtattagatgtgactgattttaacaaatcctattagatttgtatcaactagttacatgttctattcatagtcttttgtgaatcattgcctttttgtttaaaaagatggcctattttgagcctttgtataggtacattcctgtttttgtgacaaaagaaaaactttaaaattgtcccaaacagaaaaataatggctatcagaagtatgttttgttttagtgtgagttaccgttactgtatttgtttattgtaaaggtggacatttagcgttcagtgcagttttcaataaaaagtaattaaaatttgttaagttctgaaattcaagtacatctcactaatgtaaatgttctctacttgagatgtttaaggcagttgcattgtcaattagccaatttccagctcttgttactacagggttccataaccagactcaagaccgctgacaattaattacctgtgataacaaaaagtttaattgaaaaatcaaaacctcacacaagtccatcattatcacgtcatgccgtccttaagatgcaatggtgggttagtgctaaatcaattcaaaaaaaaacaaagttgctcaacttttagagttctgactttaatctaccccaaagcaaaatgacctggacctggttcaagggagggaagtgaaccttgaaactgttttgccaataacctaacaaacaaaatgatatttacaaagaagtgttgcaaatagtcccatgagttaagagcttgatttaatggatcttctttttaaatagaattaaacctttatactaaaagtatttgcaagtgtcaattaagtccaacaattccaggtatgaaactccctctgagctcttccttatacttcccttcccaattaaaacaaaacaagaaaatcatggtgtcttaaagcctttggcttgcctggccttgtctgctcactcattttaaggtggtggccccatcccaactctaccataaaagtgtctattaacacaagctcacatggagagagacggcgctcatagttactgacctattaccccagggaacaaaaaaggtagtttaacgtcttcgtaaccactcatcaaagaggcaatgaaatatgcgtgaaaaggaggccaagcgcacacagaatatcttaccttcacgaatatgtgaagaagtctgggacacgatgaacctaagagtcaaaaacataaaaggcaggtctgaatccatggtccacctgggttttaattattagatcttggtcgcccaaacaaaaatttatatatatatatataaatttgaccccaaggaagaacaagtcaaaacaaaatgccacgctctgtttgctctagaaaaagaaccatcaagtccacagagtgcaggtatgacttactctccagagtcagtcattaatgtctgtcacctagccacgtataatcatctttgaaaaaggactatattctatcttgggacaataattatggctgttttaatagttcaagagcataatatagcattgatttaccaaaatttttggcctttaacagccagtctatgaaaaccatttagagccccattcctgtctgtagcctaggaaatggaaccatctttaattctttcccacagggaagaatgctgcacctatcacactatgtggtcagggtcactgattgataataaataaataaataatagagcgctcaggggaaacaacactcaccagaccacaacacacagtagaagctaagtgctgagcgtgtactctctggacaacgctggctgcaatgcagactgcaatggctacatgcttttccctctaacaattctctttggctttttcaattgggagggcagattttgcttaacaggcaactagaacaggatctctgcccactaaaaaattatccctatacatagagaaattactacagatgctaagtagtcagaatgctaacattttctacaaacttgattacttattggccaaaatgaaagcaaacagccaatttttaacaacacattcaccacttgaaacaaacagcagcatttacattatatcaaagattcatttctacagaatcgtactaaaaaatcatttttcctgcaagatttagcatgcagcaaaaaatgatcttttcatcctgggaacacctttttactgagttttcgggggga

SEQ ID NO: 358502 - DNA, 3932 bp, Homo sapiens
  misc_feature (4)..(4): n is a, c, g, or t
gaanccgattaatcctccagttggttgtccctgccgtctcggaagggttagcacacagccaggtctgtttttgatgtatgtaattgaagatttataaagaaaagcttctcctctgcctcatccacagtcattttttttccaatgccagttcccagcaggcatataaatattggtcgttctcagagctgggatgctgctgggtggtacgagggcccctgggagaacgccgagtccctgcggcctctggggaggagaagctccctgacgtatggcacagcagaggggacttggtttgagccaaaccaccgaccacaggacgctgccctgcccgtggccgccgagccctacctgtaccgggaggccgtttataactcagtggctgcaagaaaggggtctactcctgacttcaccttctacgacagcagacaggcagtgatgtctggtcgcagccccctgctgccacgggagtactacagtgatccgtctggagctgctagggtacccaaagagcctcccctctatcgggacccaggagtcagccggccggtccccagctacggagtgcttggcagcagaacgtcatgggatccaatgcaaggccggtcacctgccctgcaggacgccggtcacctgtaccgggatcctggaggtaaaatgatccctcaggggcggcagacacagagcagggctgcatctcccgggcggtatggacgggagcagcccgacaccaggtatggggcggaggtgcctgcctaccccctcagccaggtcttcagcgacatcagcgaaagacccattgaccctgcccctgccagacaggtggccccgacgtgcctggttgtggaccccagttcagctgctgcccccgaaggcagcacaggggtggccccaggggccctgaatcgtggctacgggcctgcccgggaaagcatcccatccaagatggcttacgagacttacgaagctgacctgtccaccttccagggtcctggtggcaagaggaccgtgctccctgagttcctggcctttctgcgggcggaggggctggcagaggccacgctgggagccctactgcagcagggctttgactccccggccgtcctggctaccctggaggacgcggatatcaagtctgtcgcacccaacctgggccaggcccgtgttctgagccgcctggccaatagctgcaggaccgaaatgcagctgcggaggcaggaccgggggggcccgctgccccgggcgcggtccagcagcttcagccaccgaagcgaactgctccatggtgacttggcttctctgggcgctgcggctcctctgcagacagcatccccccgagctggagacccggctcgccgtccctccagcgcaccatctcagcacctcctggagacggcagccacctattctgcccctggcgtgggcacccatgccccacacttcccctccaactccgggtacagctctcccaccccttgcgccctgacagcgcgtctgagccccacgcaccccctgcaggcaggggtggccttgactaacccgggcccctcaaacccccttcacccaggccccagaacagcttactccacggcatacacggtgcccatggagctgctaaagagggagcgcaacgtggccgcctctccgctgcccagccctcacggcagcccccaggtcttgcggaagccaggtgcacccctggggccatccaccctgccgccggccagccagagcctccacacgcctcactcaccgtacgagaaggtggcccggcgcacaggggcacccatcatcgtgtccaccatgcttgcaccagaaccaaggtatccgcccccagatcatgaacggccccctgcacccccgccccctggtggcgctgctggacggccgcgactgcactgtggagatgcccatcctgaaggacctggccactgtggccttctgtgacgcgcagtcgacgcaggaaatccacgagaaggttctaaacgaagccgtgggcgccatgatgtaccacaccatcaccctcaccagggaggacctggagaagttcaaggccctgagagtgatcgtgcggataggcagtggctatgacaacgtggacatcaaggctgccggcgagctcggaattgccgtgtgcaacatcccgtctgcagccgtggaagagacagcggactctaccatctgccacatcctcaacctgtaccggaggaacacgtggctgtaccaggcactgcgggaaggcacgcgggttcagagcgtggagcagatccgcgaggtggcctcgggagcggcccgcatccgtggggagacgctgggcctcattggctttggtcgcacggggcaggcggttgcagttcgagccaaggcctttggattcagcgtcatattttatgacccctacttgcaggatgggatcgagcggtccctgggcgtgcagagggtctacaccctgcaggatttgctgtatcagagcgactgcgtctccttgcactgcaatctcaacgaacataaccaccacctcatcaatgactttaccataaagcagatgaggcagggagcattccttgtgaacgcagcccgtggcggcctggtggacgagaaagccttagcacaagccctcaaggagggcaggatacgaggggcagccctcgacgtgcatgagtcagagcccttcagctttgctcagggtccgttgaaagatgccccgaatctcatctgcactcctcacactgcctggtacagtgagcaggcgtcactggagatgagggaggcagctgccaccgagatccgccgagccatcacaggtcgcatcccagaaagcttaagaaattgtgtgaacaaggaattctttgtcacatcagcgccttggtcagtaatagaccagcaagcaattcatcctgagctcaatggtgccacatacagatatccgccaggcatcgtgggtgtggctccaggaggacttcctgcagccatggaagggatcatccctggaggcatcccagtgactcacaacctcccgacagtggcacatccttcccaagcgccctctcccaaccagcccacaaaacacggggacaatcgagagcaccccaacgagcaatagcagagaatgccagaaggtaatcactcagatacacttgggaccaagagacagtgaaaaatagatgaactaagagaaaaagaatcggatggtctttgtaactgattctggacatatgcatcattgatgttgcagtgttgaaactacaagagctagaaaactgaagatgtcgtctgcttacggaagcgctgaaagactaggatgtgatttattaacgaccaacttctgttattgtgtgttaagtttttcatctgtgcatcaaatcacaaaaagaataaatagagctttttcctttatcagtcccttgggcacagcaggtcctgaacaccctgctctacaatgttgcatcaagagttcaaacaacaaaataaaaaatattaagaggaaatccccatcctgtgacttgagtcccttaagtctacaggggctggtgacctctttttgctaataggaaaatcacattactacaaaatggggagaaaactgtttgcctgtggtagacacctgcacgcataggattgaagacagtacaggctgctgtacagagaagcgcctctcacatctgaactgcatactgagcgggcaagtcggttgtaagttcagtaaaaccctctgatgatgcaaaaaaaaaaaaaaaaagtattaagtttcacaagctgtttgtactcaaatatattgtgaaacttaatactttttttttttttttgcctgtggtagacacctgcacgcataggattgaagacagtacaggtctgctgtacagagaagcgcctctcacatctgaactgcatactgagcgggcaagtcggttgtaagttcagtaaaaccctctgat

SEQ ID NO: 358503 - DNA, 4104 bp, Homo sapiens
tccctgtgtgcgtgtgtcattttaaggtggctcgggagcggcccggaggagccggcggcggcccgaggagcgagggaccgaaccgggagccatgccgcgctgagggggggccgcacagccgccgccaccgccaccgccgccgggtggggtgggaggggcgggagacgccgccgccgccgcctccagggtgggcgcctttcgccgtggacgccgaccgtccgggacgagggttcatagtggcgtcatgcacgcagactcctgcaagttcccctaagttcttagaggactgctttgccttttgatctgagagttgcaaagttccataaagaatggcccttgtggataagcacaaagtcaagagacagcgattggacagaatttgtgaaggtatccgcccccagatcatgaacggccccctgcacccccgccccctggtggcgctgctggacggccgcgactgcactgtggagatgcccatcctgaaggacctggccactgtggccttctgtgacgcgcagtcgacgcaggaaatccacgagaaggttctaaacgaagccgtgggcgccatgatgtaccacaccatcaccctcaccagggaggacctggagaagttcaaggccctgagagtgatcgtgcggataggcagtggctatgacaacgtggacatcaaggctgccggcgagctcggaattgccgtgtgcaacatcccgtctgcagccgtggaagagacagcggactctaccatctgccacatcctcaacctgtaccggaggaacacgtggctgtaccaggcactgcgggaaggcacgcgggttcagagcgtggagcagatccgcgaggtggcctcgggagcggcccgcatccgtggggagacgctgggcctcattggctttggtcgcacggggcaggcggttgcagttcgagccaaggcctttggattcagcgtcatattttatgacccctacttgcaggatgggatcgagcggtccctgggcgtgcagagggtctacaccctgcaggatttgctgtatcagagcgactgcgtctccttgcactgcaatctcaacgaacataaccaccacctcatcaatgactttaccataaagcagatgaggcagggagcattccttgtgaacgcagcccgtggcggcctggtggacgagaaagccttagcacaagccctcaaggagggcaggatacgaggggcagccctcgacgtgcatgagtcagagcccttcagctttgctcagggtccgttgaaagatgccccgaatctcatctgcactcctcacactgcctggtacagtgagcaggcgtcactggagatgagggaggcagctgccaccgagatccgccgagccatcacaggtcgcatcccagaaagcttaagaaattgtgtgaacaaggaattctttgtcacatcagcgccttggtcagtaatagaccagcaagcaattcatcctgtgacttgagtcccttaagtctacaggggctggtgacctctttttgctaataggaaaatcacattactacaaaatggggagaaaactgtttgcctgtggtagacacctgcacgcataggattgaagacagtacaggctgctgtacagagaagcgcctctcacatctgaactgcatactgagcgggcaagtcggttgtaagttcagtaaaaccctctgatgatgcaaaaaaaaaaaaaaaaagtattaagtttcacaagctgtttgtactcaaatatattttctcagtttcagatcctctgctattttattgagtggaaagtcttgagctaaaagggttcaagaagaataatgttgcatttccttatgtctcaggaaacactttttatggtaacttgtcagattgtctatgaacaaacccacttttttagacattgataaagtcttcttttcttcacgtgatattttatacaagaacacttcagatgtattagatgtgactgattttaacaaatcctattagatttgtatcaactagttacatgttctattcatagtcttttgtgaatcattgcctttttgtttaaaaagatggcctattttgagcctttgtataggtacattcctgtttttgtgacaaaagaaaaactttaaaattgtcccaaacagaaaaataatggctatcagaagtatgttttgttttagtgtgagttaccgttactgtatttgtttattgtaaaggtggacatttagcgttcagtgcagttttcaataaaaagtaattaaaatttgttaagttctgaaattcaagtacatctcactaatgtaaatgttctctacttgagatgtttaaggcagttgcattgtcaattagccaatttccagctcttgttactacagggttccataaccagactcaagaccgctgacaattaattacctgtgataacaaaaagtttaattgaaaaatcaaaacctcacacaagtccatcattatcacgtcatgccgtccttaagatgcaatggtgggttagtgctaaatcaattcaaaaaaaaacaaagttgctcaacttttagagttctgactttaatctaccccaaagcaaaatgacctggacctggttcaagggagggaagtgaaccttgaaactgttttgccaataacctaacaaacaaaatgatatttacaaagaagtgttgcaaatagtcccatgagttaagagcttgatttaatggatcttctttttaaatagaattaaacctttatactaaaagtatttgcaagtgtcaattaagtccaacaattccaggtatgaaactccctctgagctcttccttatacttcccttcccaattaaaacaaaacaagaaaatcatggtgtcttaaagcctttggcttgcctggccttgtctgctcactcattttaaggtggtggccccatcccaactctaccataaaagtgtctattaacacaagctcacatggagagagacggcgctcatagttactgacctattaccccagggaacaaaaaaggtagtttaacgtcttcgtaaccactcatcaaagaggcaatgaaatatgcgtgaaaaggaggccaagcgcacacagaatatcttaccttcacgaatatgtgaagaagtctgggacacgatgaacctaagagtcaaaaacataaaaggcaggtctgaatccatggtccacctgggttttaattattagatcttggtcgcccaaacaaaaatttatatatatatatataaatttgaccccaaggaagaacaagtcaaaacaaaatgccacgctctgtttgctctagaaaaagaaccatcaagtccacagagtgcaggtatgacttactctccagagtcagtcattaatgtctgtcacctagccacgtataatcatctttgaaaaaggactatattctatcttgggacaataattatggctgttttaatagttcaagagcataatatagcattgatttaccaaaatttttggcctttaacagccagtctatgaaaaccatttagagccccattcctgtctgtagcctaggaaatggaaccatctttaattctttcccacagggaagaatgctgcacctatcacactatgtggtcagggtcactgattgataataaataaataaataatagagcgctcaggggaaacaacactcaccagaccacaacacacagtagaagctaagtgctgagcgtgtactctctggacaacgctggctgcaatgcagactgcaatggctacatgcttttccctctaacaattctctttggctttttcaattgggagggcagattttgcttaacaggcaactagaacaggatctctgcccactaaaaaattatccctatacatagagaaattactacagatgctaagtagtcagaatgctaacattttctacaaacttgattacttattggccaaaatgaaagcaaacagccaatttttaacaacacattcaccacttgaaacaaacagcagcatttacattatatcaaagattcatttctacagaatcgtactaaaaaatcatttttcctgcaagatttagcatgcagcaaaaaatgatcttttcatcctgggaacacctttttactgagttttcgggggga

SEQ ID NO: 358504 - DNA, 3192 bp, Homo sapiens
acccagagacagtgaaaaatagatgaactaagagaacaagaatcggatggtcttagtaactagattctggacatatgcatcattgatgttgcagtgtggttccccggaagcacactgcaacacggggacaatcgagagcaccccaacgagcaatagcagagaatgccagaaggtaatcactcagatacacttgggaccaagagacagtgaaaaatagatgaactaagagaaaaagaatcggatggtctttgtaactgattctggacatatgcatcattgatgttgcagtgttgaaactacaagagctagaaaactgaagatgtcgtctgcttacggaagcgctgaaagactaggatgtgatttattaacgaccaacttctgttattgtgtgttaagtttttcatctgtgcatcaaatcacaaaaagaataaatagagctttttcctttatcagtcccttgggcacagcaggtcctgaacaccctgctctacaatgttgcatcaagagttcaaacaacaaaataaaaaatattaagaggaaatccccatcctgtgacttgagtcccttaagtctacaggggctggtgacctctttttgctaataggaaaatcacattactacaaaatggggagaaaactgtttgcctgtggtagacacctgcacgcataggattgaagacagtacaggctgctgtacagagaagcgcctctcacatctgaactgcatactgagcgggcaagtcggttgtaagttcagtaaaaccctctgatgatgcaaaaaaaaaaaaaaaaagtattaagtttcacaagctgtttgtactcaaatatattttctcagtttcagatcctctgctattttattgagtggaaagtcttgagctaaaagggttcaagaagaataatgttgcatttccttatgtctcaggaaacactttttatggtaacttgtcagattgtctatgaacaaacccacttttttagacattgataaagtcttcttttcttcacgtgatattttatacaagaacacttcagatgtattagatgtgactgattttaacaaatcctattagatttgtatcaactagttacatgttctattcatagtcttttgtgaatcattgcctttttgtttaaaaagatggcctattttgagcctttgtataggtacattcctgtttttgtgacaaaagaaaaactttaaaattgtcccaaacagaaaaataatggctatcagaagtatgttttgttttagtgtgagttaccgttactgtatttgtttattgtaaaggtggacatttagcgttcagtgcagttttcaataaaaagtaattaaaatttgttaagttctgaaattcaagtacatctcactaatgtaaatgttctctacttgagatgtttaaggcagttgcattgtcaattagccaatttccagctcttgttactacagggttccataaccagactcaagaccgctgacaattaattacctgtgataacaaaaagtttaattgaaaaatcaaaacctcacacaagtccatcattatcacgtcatgccgtccttaagatgcaatggtgggttagtgctaaatcaattcaaaaaaaaacaaagttgctcaacttttagagttctgactttaatctaccccaaagcaaaatgacctggacctggttcaagggagggaagtgaaccttgaaactgttttgccaataacctaacaaacaaaatgatatttacaaagaagtgttgcaaatagtcccatgagttaagagcttgatttaatggatcttctttttaaatagaattaaacctttatactaaaagtatttgcaagtgtcaattaagtccaacaattccaggtatgaaactccctctgagctcttccttatacttcccttcccaattaaaacaaaacaagaaaatcatggtgtcttaaagcctttggcttgcctggccttgtctgctcactcattttaaggtggtggccccatcccaactctaccataaaagtgtctattaacacaagctcacatggagagagacggcgctcatagttactgacctattaccccagggaacaaaaaaggtagtttaacgtcttcgtaaccactcatcaaagaggcaatgaaatatgcgtgaaaaggaggccaagcgcacacagaatatcttaccttcacgaatatgtgaagaagtctgggacacgatgaacctaagagtcaaaaacataaaaggcaggtctgaatccatggtccacctgggttttaattattagatcttggtcgcccaaacaaaaatttatatatatatatataaatttgaccccaaggaagaacaagtcaaaacaaaatgccacgctctgtttgctctagaaaaagaaccatcaagtccacagagtgcaggtatgacttactctccagagtcagtcattaatgtctgtcacctagccacgtataatcatctttgaaaaaggactatattctatcttgggacaataattatggctgttttaatagttcaagagcataatatagcattgatttaccaaaatttttggcctttaacagccagtctatgaaaaccatttagagccccattcctgtctgtagcctaggaaatggaaccatctttaattctttcccacagggaagaatgctgcacctatcacactatgtggtcagggtcactgattgataataaataaataaataatagagcgctcaggggaaacaacactcaccagaccacaacacacagtagaagctaagtgctgagcgtgtactctctggacaacgctggctgcaatgcagactgcaatggctacatgcttttccctctaacaattctctttggctttttcaattgggagggcagattttgcttaacaggcaactagaacaggatctctgcccactaaaaaattatccctatacatagagaaattactacagatgctaagtagtcagaatgctaacattttctacaaacttgattacttattggccaaaatgaaagcaaacagccaatttttaacaacacattcaccacttgaaacaaacagcagcatttacattatatcaaagattcatttctacagaatcgtactaaaaaatcatttttcctgcaagatttagcatgcagcaaaaaatgatcttttcatcctgggaacacctttttactgagttttcgggggga

SEQ ID NO: 358505 - DNA, 2198 bp, Homo sapiens
gcctcactattgctagtcgaggctggctttaatcggccgagggtcctcttgcgttgtatttaaggtggctcgggagcggcccggaggagccggcggcggcccgaggagcgagggaccgaaccgggagccatgccgcgctgagggggggccgcacagccgccgccaccgccaccgccgccgggtggggtgggaggggcgggagacgccgccgccgccgcctccagggtgggcgcctttcgccgtggacgccgaccgtccgggacgagggtttcatcaccttaaatggttttgaaccaatgaaggtgtattcccttaaaaagacggacagcccatcgtgtgaactatagagtttgtggacagatttatattgggttcatagtggcgtcatgcacgcagactcctgcaagttcccctaagttcttagaggactgctttgccttttgatctgagagttgcaaagttccataaagaatggcccttgtggataagcacaaagtcaagagacagcgattggacagaatttgtgaaggtatccgcccccagatcatgaacggccccctgcacccccgccccctggtggcgctgctggacggccgcgactgcactgtggagatgcccatcctgaaggacctggccactgtggccttctgtgacgcgcagtcgacgcaggaaatccacgagaaggttctaaacgaagccgtgggcgccatgatgtaccacaccatcaccctcaccagggaggacctggagaagttcaaggccctgagagtgatcgtgcggataggcagtggctatgacaacgtggacatcaaggctgccggcgagctcggaattgccgtgtgcaacatcccgtctgcagccgtggaagagacagcggactctaccatctgccacatcctcaacctgtaccggaggaacacgtggctgtaccaggcactgcgggaaggcacgcgggttcagagcgtggagcagatccgcgaggtggcctcgggagcggcccgcatccgtggggagacgctgggcctcattggctttggtcgcacggggcaggcggttgcagttcgagccaaggcctttggattcagcgtcatattttatgacccctacttgcaggatgggatcgagcggtccctgggcgtgcagagggtctacaccctgcaggatttgctgtatcagagcgactgcgtctccttgcactgcaatctcaacgaacataaccaccacctcatcaatgactttaccataaagcagatgaggcagggagcattccttgtgaacgcagcccgtggcggcctggtggacgagaaagccttagcacaagccctcaaggagggcaggatacgaggggcagccctcgacgtgcatgagtcagagcccttcagctttgctcagggtccgttgaaagatgccccgaatctcatctgcactcctcacactgcctggtacagtgagcaggcgtcactggagatgagggaggcagctgccaccgagatccgccgagccatcacaggtcgcatcccagaaagcttaagaaattgtgtgaacaaggaattctttgtcacatcagcgccttggtcagtaatagaccagcaagcaattcatcctgagctcaatggtgccacatacagatatccgccaggcatcgtgggtgtggctccaggaggacttcctgcagccatggaagggatcatccctggaggcatcccagtgactcacaacctcccgacagtggcacatccttcccaagcgccctctcccaaccagcccacaaaacacggggacaatcgagagcaccccaacgagcaatagcagagaatgccagaaggtaatcactcagatacacttgggaccaagagacagtgaaaaatagatgaactaagagaaaaagaatcggatggtctttgtaactgattctggacatatgcatcattgatgttgcagtgttgaaactacaagagctagaaaactgaagatgtcgtctgcttacggaagcgctgaaagactaggatgtgatttattaacgaccaacttctgttattgtgtgttaagtttttcatctgtgcatcaaatcacaaaaagaataaatagagctttttcctttatcagtcccttgggcacagcaggtcctgaacaccctgctctacaatgttgcatcaagagttcaaacaacaaaataaaaaatattaagaggaaatccc

SEQ ID NO: 358506 - DNA, 1957 bp, Homo sapiens
tccctgtgtgcgtgtgtcattttaaggtggctcgggagcggcccggaggagccggcggcggcccgaggagcgagggaccgaaccgggagccatgccgcgctgagggggggccgcacagccgccgccaccgccaccgccgccgggtggggtgggaggggcgggagacgccgccgccgccgcctccagggtgggcgcctttcgccgtggacgccgaccgtccgggacgagggttcatagtggcgtcatgcacgcagactcctgcaagttcccctaagttcttagaggactgctttgccttttgatctgagagttgcaaagttccataaagaatggcccttgtggataagcacaaagtcaagagacagcgattggacagaatttgtgaaggtatccgcccccagatcatgaacggccccctgcacccccgccccctggtggcgctgctggacggccgcgactgcactgtggagatgcccatcctgaaggacctggccactgtggccttctgtgacgcgcagtcgacgcaggaaatccacgagaaggttctaaacgaagccgtgggcgccatgatgtaccacaccatcaccctcaccagggaggacctggagaagttcaaggccctgagagtgatcgtgcggataggcagtggctatgacaacgtggacatcaaggctgccggcgagctcggaattgccgtgtgcaacatcccgtctgcagccgtggaagagacagcggactctaccatctgccacatcctcaacctgtaccggaggaacacgtggctgtaccaggcactgcgggaaggcacgcgggttcagagcgtggagcagatccgcgaggtggcctcgggagcggcccgcatccgtggggagacgctgggcctcattggctttggtcgcacggggcaggcggttgcagttcgagccaaggcctttggattcagcgtcatattttatgacccctacttgcaggatgggatcgagcggtccctgggcgtgcagagggtctacaccctgcaggatttgctgtatcagagcgactgcgtctccttgcactgcaatctcaacgaacataaccaccacctcatcaatgactttaccataaagcagatgaggcagggagcattccttgtgaacgcagcccgtggcggcctggtggacgagaaagccttagcacaagccctcaaggagggcaggatacgaggggcagccctcgacgtgcatgagtcagagcccttcagctttgctcagggtccgttgaaagatgccccgaatctcatctgcactcctcacactgcctggtacagtgagcaggcgtcactggagatgagggaggcagctgccaccgagatccgccgagccatcacaggtcgcatcccagaaagcttaagaaattgtgtgaacaaggaattctttgtcacatcagcgccttggtcagtaatagaccagcaagcaattcatcctgagctcaatggtgccacatacaggtgagaaaaggaactgactttgtctcagcttgtgagcaccacggccccggggccagggagagaagcccaaacttggcggaagcttaacctcccgcagatgctaagtcagggtcagaacaatcagccttctcagcaggaactgtgtacaccgcccccatttcttccaatgcctaatttcatggaacaaacagaagctcctattttaaaagggggtgtgttcggtcagatgtgattgaccacaggtgctaggaactgcctttcattctaaagccatcttaaaaccagaaggcttcccagtcacgtgtggtggcgcacacctgcagtctcagctgctagggaggctgaggtgggagaggtgcttgaagctgggaggtggagattgcagtgagccgagatcacccactgcactccagcctaggccacagagtgagacaatgctgctaccccccgaccccaccccaccaccaaaaa

SEQ ID NO: 358507 - DNA, 863 bp, Homo sapiens
tccctgtgtgcgtgtgtcattttaaggtggctcgggagcggcccggaggagccggcggcggcccgaggagcgagggaccgaaccgggagccatgccgcgctgagggggggccgcacagccgccgccaccgccaccgccgccgggtggggtgggaggggcgggagacgccgccgccgccgcctccagggtgggcgcctttcgccgtggacgccgaccgtccgggacgagggttcatagtggcgtcatgcacgcagactcctgcaagttcccctaagttcttagaggactgctttgccttttgatctgagagttgcaaagttccataaagaatggcccttgtggataagcacaaagtcaagagacagcgattggacagaatttgtgaagtcgccacagcgagatcgactgaacggcgcacaccgtgcgcacacacccggggggcacttgagataagcggcatgacgtcggacggcccagggacatgcacgggaaaagaaagtagcgacaatcgctgagaggcacctggccaacgagtaggcattcatgtgaccgcgcaagacaagaaggacaacgcagaaaagtcggaacggaagaaaacgggaagcactaaagaacaggaagcgcccaggaggaggaagcacaggccgaagtggaattggatgtaacacaaaagacgaccaaaaatctcaagcaccacttaccgacgaaacagaggacacaggagaacccattgggagacgcaaaaagaattaccaagaagggccacccattgcaaaacaaggctgcaatcaggcaagaaagggagaagacagcagcaaaaagggggcggcaaagggaagcaaagaaaggcgggaaaaaaatag

SEQ ID NO: 358508 - DNA, 1324 bp, Homo sapiens
aaaattgttatccgccatccagatcgacgacgtgcatacgatggttatgaaccaatgaaggtgtattcccttaaaaagacggacagcccatcgtgtgaactatagagtttgtggacagatttatattgccttagaccagaacactgcggaagaggaaatccatcatggaaacccgagagtgacaggacccttgctatggtgacaagtagagctggtcatgtcgacagccccctcttacctcgtcgcgtctcagcagatgtccatggggtcgtattgggagtgacttttgtaccagttggcttggctgattttggaaagagtggaagaacccccttcaccttggtttcatcaccttaaatggttttgaaccaatgaaggtgtattcccttaaaaagacggacagcccatcgtgtgaactatagagtttgtggacagatttatattgatcgactgcaatatatagagtgggcactgtttacatgtctgggtatcatgctgagagaatatgatgaaaagatcaatgctgtagtaaaaacagcatttgttctagtagtgctctcgagtttttattcttctttatcattatgtgggttatgacaggccttggttctgatcgacgttctagacttcgaatggttatgtaacagactgttataaaagtgcgtatttaagttatttgagaagttatatgaagataattgtgtcagctatctggggagtatgttaatgtgaacctgagagttataagagtactcttatatctacctggaatactccttctggtcgtaacacagttgtatcttgtgtaaggctacatctctattaccttcaggtttcttctaacgtctggaagctacttcaggttagaatgtgctaatactgcatctgatcaatcacgctgctagcgtctacaacctacttcagtgttaacacttgtctaatacagtactgcttcagagacacaaccctgcattgtcacaagctggcacgtgtctgactcgtgtaaaccgatgcctaagcacattgggactttttgcgttacagtatatggtcgcgtccttgcaacgaaggtgaaacgacacaggaccaggatggtaacggacgtctatcacccacaacggcatgcagcaccacgcgctcgtgctcctatgacagcatctcacaaattcaccaccacctctacgaactcactaaacacaaccgaggaccctggcacagcggacaccgagcgacgaccctcacaaaccccggagaaaaggggcacacaaggaggccactaccagcagaaagcaataacaacagcgaacaagaaaaccgcagacgc

SEQ ID NO: 358509 - DNA, 3720 bp, Homo sapiens
  misc_feature (4)..(4): n is a, c, g, or t
gaanccgattaatcctccagttggttgtccctgccgtctcggaagggttagcacacagccaggtctgtttttgatgtatgtaattgaagatttataaagaaaagcttctcctctgcctcatccacagtcattttttttccaatgccagttcccagcaggcatataaatattggtcgttctcagagctgggatgctgctgggtggtacgagggcccctgggagaacgccgagtccctgcggcctctggggaggagaagctccctgacgtatggcacagcagaggggacttggtttgagccaaaccaccgaccacaggacgctgccctgcccgtggccgccgagccctacctgtaccgggaggccgtttataactcagtggctgcaagaaaggggtctactcctgacttcaccttctacgacagcagacaggcagtgatgtctggtcgcagccccctgctgccacgggagtactacagtgatccgtctggagctgctagggtacccaaagagcctcccctctatcgggacccaggagtcagccggccggtccccagctacggagtgcttggcagcagaacgtcatgggatccaatgcaaggccggtcacctgccctgcaggacgccggtcacctgtaccgggatcctggaggtaaaatgatccctcaggggcggcagacacagagcagggctgcatctcccgggcggtatggacgggagcagcccgacaccaggtatggggcggaggtgcctgcctaccccctcagccaggtcttcagcgacatcagcgaaagacccattgaccctgcccctgccagacaggtggccccgacgtgcctggttgtggaccccagttcagctgctgcccccgaaggcagcacaggggtggccccaggggccctgaatcgtggctacgggcctgcccgggaaagcatcccatccaagatggcttacgagacttacgaagctgacctgtccaccttccagggtcctggtggcaagaggaccgtgctccctgagttcctggcctttctgcgggcggaggggctggcagaggccacgctgggagccctactgcagcagggctttgactccccggccgtcctggctaccctggaggacgcggatatcaagtctgtcgcacccaacctgggccaggcccgtgttctgagccgcctggccaatagctgcaggaccgaaatgcagctgcggaggcaggaccgggggggcccgctgccccgggcgcggtccagcagcttcagccaccgaagcgaactgctccatggtgacttggcttctctgggcgctgcggctcctctgcagacagcatccccccgagctggagacccggctcgccgtccctccagcgcaccatctcagcacctcctggagacggcagccacctattctgcccctggcgtgggcacccatgccccacacttcccctccaactccgggtacagctctcccaccccttgcgccctgacagcgcgtctgagccccacgcaccccctgcaggcaggggtggccttgactaacccgggcccctcaaacccccttcacccaggccccagaacagcttactccacggcatacacggtgcccatggagctgctaaagagggagcgcaacgtggccgcctctccgctgcccagccctcacggcagcccccaggtcttgcggaagccaggtgcacccctggggccatccaccctgccgccggccagccagagcctccacacgcctcactcaccgtacgagaaggtggcccggcgcacaggggcacccatcatcgtgtccaccatgcttgcaccagaaccaaggtatccgcccccagatcatgaacggccccctgcacccccgccccctggtggcgctgctggacggccgcgactgcactgtggagatgcccatcctgaaggacctggccactgtggccttctgtgacgcgcagtcgacgcaggaaatccacgagaaggttctaaacgaagccgtgggcgccatgatgtaccacaccatcaccctcaccagggaggacctggagaagttcaaggccctgagagtgatcgtgcggataggcagtggctatgacaacgtggacatcaaggctgccggcgagctcggaattgccgtgtgcaacatcccgtctgcagccgtggaagagacagcggactctaccatctgccacatcctcaacctgtaccggaggaacacgtggctgtaccaggcactgcgggaaggcacgcgggttcagagcgtggagcagatccgcgaggtggcctcgggagcggcccgcatccgtggggagacgctgggcctcattggctttggtcgcacggggcaggcggttgcagttcgagccaaggcctttggattcagcgtcatattttatgacccctacttgcaggatgggatcgagcggtccctgggcgtgcagagggtctacaccctgcaggatttgctgtatcagagcgactgcgtctccttgcactgcaatctcaacgaacataaccaccacctcatcaatgactttaccataaagcagatgaggcagggagcattccttgtgaacgcagcccgtggcggcctggtggacgagaaagccttagcacaagccctcaaggagggcaggatacgaggggcagccctcgacgtgcatgagtcagagcccttcagctttgctcagggtccgttgaaagatgccccgaatctcatctgcactcctcacactgcctggtacagtgagcaggcgtcactggagatgagggaggcagctgccaccgagatccgccgagccatcacaggtcgcatcccagaaagcttaagaaattgtgtgaacaaggaattctttgtcacatcagcgccttggtcagtaatagaccagcaagcaattcatcctgagctcaatggtgccacatacagatatccgccaggcatcgtgggtgtggctccaggaggacttcctgcagccatggaagggatcatccctggaggcatcccagtgactcacaacctcccgacagtggcacatccttcccaagcgccctctcccaaccagcccacaaaacacggggacaatcgagagcaccccaacgagcaatagcagagaatgccagaaggtaatcactcagatacacttgggaccaagagacagtgaaaaatagatgaactaagagaaaaagaatcggatggtctttgtaactgattctggacatatgcatcattgatgttgcagtgttgaaactacaagagctagaaaactgaagatgtcgtctgcttacggaagcgctgaaagactaggatgtgatttattaacgaccaacttctgttattgtgtgttaagtttttcatctgtgcatcaaatcacaaaaagaataaatagagctttttcctttatcagtcccttgggcacagcaggtcctgaacaccctgctctacaatgttgcatcaagagttcaaacaacaaaataaaaaatattaagaggaaatccccatcctgtgacttgagtcccttaagtctacaggggctggtgacctctttttgctaataggaaaatcacattactacaaaatggggagaaaactgtttgcctgtggtagacacctgcacgcataggattgaagacagtacaggctgctgtacagagaagcgcctctcacatctgaactgcatactgagcgggcaagtcggttgtaagttcagtaaaaccctctgatgatgca

SEQ ID NO: 358510 - DNA, 2310 bp, Homo sapiens
  misc_feature (4)..(4): n is a, c, g, or t
gaanccgattaatcctccagttggttgtccctgccgtctcggaagggttagcacacagccaggtctgtttttgatgtatgtaattgaagatttataaagaaaagcttctcctctgcctcatccacagtcattttttttccaatgccagttcccagcaggcatataaatattggtcgttctcagagctgggatgctgctgggtggtacgagggcccctgggagaacgccgagtccctgcggcctctggggaggagaagctccctgacgtatggcacagcagaggggacttggtttgagccaaaccaccgaccacaggacgctgccctgcccgtggccgccgagccctacctgtaccgggaggccgtttataactcagtggctgcaagaaaggggtctactcctgacttcaccttctacgacagcagacaggcagtgatgtctggtcgcagccccctgctgccacgggagtactacagtgatccgtctggagctgctagggtacccaaagagcctcccctctatcgggacccaggagtcagccggccggtccccagctacggagtgcttggcagcagaacgtcatgggatccaatgcaaggccggtcacctgccctgcaggacgccggtcacctgtaccgggatcctggaggtaaaatgatccctcaggggcggcagacacagagcagggctgcatctcccgggcggtatggacgggagcagcccgacaccaggtatggggcggaggtgcctgcctaccccctcagccaggtcttcagcgacatcagcgaaagacccattgaccctgcccctgccagacaggtggccccgacgtgcctggttgtggaccccagttcagctgctgcccccgaaggcagcacaggggtggccccaggggccctgaatcgtggctacgggcctgcccgggaaagcatcccatccaagatggcttacgagacttacgaagctgacctgtccaccttccagggtcctggtggcaagaggaccgtgctccctgagttcctggcctttctgcgggcggaggggctggcagaggccacgctgggagccctactgcagcagggctttgactccccggccgtcctggctaccctggaggacgcggatatcaagtctgtcgcacccaacctgggccaggcccgtgttctgagccgcctggccaatagctgcaggaccgaaatgcagctgcggaggcaggaccgggggggcccgctgccccgggcgcggtccagcagcttcagccaccgaagcgaactgctccatggtgacttggcttctctgggcgctgcggctcctctgcagacagcatccccccgagctggagacccggctcgccgtccctccagcgcaccatctcagcacctcctggagacggcagccacctattctgcccctggcgtgggcacccatgccccacacttcccctccaactccgggtacagctctcccaccccttgcgccctgacagcgcgtctgagccccacgcaccccctgcaggcaggggtggccttgactaacccgggcccctcaaacccccttcacccaggccccagaacagcttactccacggcatacacggtgcccatggagctgctaaagagggagcgcaacgtggccgcctctccgctgcccagccctcacggcagcccccaggtcttgcggaagccaggtgcacccctggggccatccaccctgccgccggccagccagagcctccacacgcctcactcaccgtacgagaaggtggcccggcgcacaggggcacccatcatcgtgtccaccatgcttgcaccagaaccaagtgcggctcccaggatgactgaagctggtcacttggtagtcccactgactccgctctgtgaggccgactcgaccgtgaccagtgacagagccaaaagatctcacactgatgagagaaagttcctcacataccatgagatagcgatcatagacggcatctctccttgacacttttcttgtccaacagcggcaacgccctcagcagacgaatctatgatcacacagcaaaacagaggttacataacccgtgtacctccctcactagggacgccttagctgaaatagtaaccatcaactgcacatcactcccgtctgacttagaggtaccggaaccatgggtaccaagggttcctacaagatcgcgtagaaagcccgatcgagtatccaggaactgggcactgggtcgcattccaccttgcgacgctgacccgtctacgcggacttgcgcgctgaaccccacactcctaattagccggccatcgcaagcgcatg

SEQ ID NO: 358511 - DNA, 2429 bp, Homo sapiens
gcctcactattgctagtcgaggctggctttaatcggccgagggtcctcttgcgttgtatttaaggtggctcgggagcggcccggaggagccggcggcggcccgaggagcgagggaccgaaccgggagccatgccgcgctgagggggggccgcacagccgccgccaccgccaccgccgccgggtggggtgggaggggcgggagacgccgccgccgccgcctccagggtgggcgcctttcgccgtggacgccgaccgtccgggacgagggtttcatcaccttaaatggttttgaaccaatgaaggtgtattcccttaaaaagacggacagcccatcgtgtgaactatagagtttgtggacagatttatattgggttcatagtggcgtcatgcacgcagactcctgcaagttcccctaagttcttagaggactgctttgccttttgatctgagagttgcaaagttccataaagaatggcccttgtggataagcacaaagtcaagagacagcgattggacagaatttgtgaaggtatccgcccccagatcatgaacggccccctgcacccccgccccctggtggcgctgctggacggccgcgactgcactgtggagatgcccatcctgaaggacctggccactgtggccttctgtgacgcgcagtcgacgcaggaaatccacgagaaggttctaaacgaagccgtgggcgccatgatgtaccacaccatcaccctcaccagggaggacctggagaagttcaaggccctgagagtgatcgtgcggataggcagtggctatgacaacgtggacatcaaggctgccggcgagctcggaattgccgtgtgcaacatcccgtctgcagccgtggaagagacagcggactctaccatctgccacatcctcaacctgtaccggaggaacacgtggctgtaccaggcactgcgggaaggcacgcgggttcagagcgtggagcagatccgcgaggtggcctcgggagcggcccgcatccgtggggagacgctgggcctcattggctttggtcgcacggggcaggcggttgcagttcgagccaaggcctttggattcagcgtcatattttatgacccctacttgcaggatgggatcgagcggtccctgggcgtgcagagggtctacaccctgcaggatttgctgtatcagagcgactgcgtctccttgcactgcaatctcaacgaacataaccaccacctcatcaatgactttaccataaagcagatgaggcagggagcattccttgtgaacgcagcccgtggcggcctggtggacgagaaagccttagcacaagccctcaaggagggcaggatacgaggggcagccctcgacgtgcatgagtcagagcccttcagctttgctcagggtccgttgaaagatgccccgaatctcatctgcactcctcacactgcctggtacagtgagcaggcgtcactggagatgagggaggcagctgccaccgagatccgccgagccatcacaggtcgcatcccagaaagcttaagaaattgtgtgaacaaggaattctttgtcacatcagcgccttggtcagtaatagaccagcaagcaattcatcctgagctcaatggtgccacatacagatatccgccaggcatcgtgggtgtggctccaggaggacttcctgcagccatggaagggatcatccctggaggcatcccagtgactcacaacctcccgacagtggcacatccttcccaagcgccctctcccaaccagcccacaaaacacggggacaatcgagagcaccccaacgagcaatagcagagaatgccagaaggtaatcactcagatacacttgggaccaagagacagtgaaaaatagatgaactaagagaaaaagaatcggatggtctttgtaactgattctggacatatgcatcattgatgttgcagtgttgaaactacaagagctagaaaactgaagatgtcgtctgcttacggaagcgctgaaagactaggatgtgatttattaacgaccaacttctgttattgtgtgttaagtttttcatctgtgcatcaaatcacaaaaagaataaatagagctttttcctttatcagtcccttgggcacagcaggtcctgaacaccctgctctacaatgttgcatcaagagttcaaacaacaaaataaaaaatattaagaggaaatccccatcctgtgacttgagtcccttaagtctacaggggctggtgacctctttttgctaataggaaaatcacattactacaaaatggggagaaaactgtttgcctgtggtagacacctgcacgcataggattgaagacagtacaggctgctgtacagagaagcgcctctcacatctgaactgcatactgagcgggcaagtcggttgtaagttcagtaaaaccctctgatgatgca

SEQ ID NO: 358512 - DNA, 4741 bp, Homo sapiens
gcctcactattgctagtcgaggctggctttaatcggccgagggtcctcttgcgttgtatttaaggtggctcgggagcggcccggaggagccggcggcggcccgaggagcgagggaccgaaccgggagccatgccgcgctgagggggggccgcacagccgccgccaccgccaccgccgccgggtggggtgggaggggcgggagacgccgccgccgccgcctccagggtgggcgcctttcgccgtggacgccgaccgtccgggacgagggttcatagtggcgtcatgcacgcagactcctgcaagttcccctaagttcttagaggactgctttgccttttgatctgagagttgcaaagttccataaagaatggcccttgtggataagcacaaagtcaagagacagcgattggacagaatttgtgaaggtatccgcccccagatcatgaacggccccctgcacccccgccccctggtggcgctgctggacggccgcgactgcactgtggagatgcccatcctgaaggacctggccactgtggccttctgtgacgcgcagtcgacgcaggaaatccacgagaaggttctaaacgaagccgtgggcgccatgatgtaccacaccatcaccctcaccagggaggacctggagaagttcaaggccctgagagtgatcgtgcggataggcagtggctatgacaacgtggacatcaaggctgccggcgagctcggaattgccgtgtgcaacatcccgtctgcagccgtggaagagacagcggactctaccatctgccacatcctcaacctgtaccggaggaacacgtggctgtaccaggcactgcgggaaggcacgcgggttcagagcgtggagcagatccgcgaggtggcctcgggagcggcccgcatccgtggggagacgctgggcctcattggctttggtcgcacggggcaggcggttgcagttcgagccaaggcctttggattcagcgtcatattttatgacccctacttgcaggatgggatcgagcggtccctgggcgtgcagagggtctacaccctgcaggatttgctgtatcagagcgactgcgtctccttgcactgcaatctcaacgaacataaccaccacctcatcaatgactttaccataaagcagatgaggcagggagcattccttgtgaacgcagcccgtggcggcctggtggacgagaaagccttagcacaagccctcaaggagggcaggatacgaggggcagccctcgacgtgcatgagtcagagcccttcagctttgctcagggtccgttgaaagatgccccgaatctcatctgcactcctcacactgcctggtacagtgagcaggcgtcactggagatgagggaggcagctgccaccgagatccgccgagccatcacaggtcgcatcccagaaagcttaagaaattgtgtgaacaaggaattctttgtcacatcagcgccttggtcagtaatagaccagcaagcaattcatcctgagctcaatggtgccacatacagatatccgccaggcatcgtgggtgtggctccaggaggacttcctgcagccatggaagggatcatccctggaggcatcccagtgactcacaacctcccgacagtggcacatccttcccaagcgccctctcccaaccagcccacaaaacacggggacaatcgagagcaccccaacgagcaatagcagagaatgccagaaggtaatcactcagatacacttgggaccaagagacagtgaaaaatagatgaactaagagaaaaagaatcggatggtctttgtaactgattctggacatatgcatcattgatgttgcagtgttgaaactacaagagctagaaaactgaagatgtcgtctgcttacggaagcgctgaaagactaggatgtgatttattaacgaccaacttctgttattgtgtgttaagtttttcatctgtgcatcaaatcacaaaaagaataaatagagctttttcctttatcagtcccttgggcacagcaggtcctgaacaccctgctctacaatgttgcatcaagagttcaaacaacaaaataaaaaatattaagaggaaatccccatcctgtgacttgagtcccttaagtctacaggggctggtgacctctttttgctaataggaaaatcacattactacaaaatggggagaaaactgtttgcctgtggtagacacctgcacgcataggattgaagacagtacaggctgctgtacagagaagcgcctctcacatctgaactgcatactgagcgggcaagtcggttgtaagttcagtaaaaccctctgatgatgcaaaaaaaaaaaaaaaaagtattaagtttcacaagctgtttgtactcaaatatattttctcagtttcagatcctctgctattttattgagtggaaagtcttgagctaaaagggttcaagaagaataatgttgcatttccttatgtctcaggaaacactttttatggtaacttgtcagattgtctatgaacaaacccacttttttagacattgataaagtcttcttttcttcacgtgatattttatacaagaacacttcagatgtattagatgtgactgattttaacaaatcctattagatttgtatcaactagttacatgttctattcatagtcttttgtgaatcattgcctttttgtttaaaaagatggcctattttgagcctttgtataggtacattcctgtttttgtgacaaaagaaaaactttaaaattgtcccaaacagaaaaataatggctatcagaagtatgttttgttttagtgtgagttaccgttactgtatttgtttattgtaaaggtggacatttagcgttcagtgcagttttcaataaaaagtaattaaaatttgttaagttctgaaattcaagtacatctcactaatgtaaatgttctctacttgagatgtttaaggcagttgcattgtcaattagccaatttccagctcttgttactacagggttccataaccagactcaagaccgctgacaattaattacctgtgataacaaaaagtttaattgaaaaatcaaaacctcacacaagtccatcattatcacgtcatgccgtccttaagatgcaatggtgggttagtgctaaatcaattcaaaaaaaaacaaagttgctcaacttttagagttctgactttaatctaccccaaagcaaaatgacctggacctggttcaagggagggaagtgaaccttgaaactgttttgccaataacctaacaaacaaaatgatatttacaaagaagtgttgcaaatagtcccatgagttaagagcttgatttaatggatcttctttttaaatagaattaaacctttatactaaaagtatttgcaagtgtcaattaagtccaacaattccaggtatgaaactccctctgagctcttccttatacttcccttcccaattaaaacaaaacaagaaaatcatggtgtcttaaagcctttggcttgcctggccttgtctgctcactcattttaaggtggtggccccatcccaactctaccataaaagtgtctattaacacaagctcacatggagagagacggcgctcatagttactgacctattaccccagggaacaaaaaaggtagtttaacgtcttcgtaaccactcatcaaagaggcaatgaaatatgcgtgaaaaggaggccaagcgcacacagaatatcttaccttcacgaatatgtgaagaagtctgggacacgatgaacctaagagtcaaaaacataaaaggcaggtctgaatccatggtccacctgggttttaattattagatcttggtcgcccaaacaaaaatttatatatatatatataaatttgaccccaaggaagaacaagtcaaaacaaaatgccacgctctgtttgctctagaaaaagaaccatcaagtccacagagtgcaggtatgacttactctccagagtcagtcattaatgtctgtcacctagccacgtataatcatctttgaaaaaggactatattctatcttgggacaataattatggctgttttaatagttcaagagcataatatagcattgatttaccaaaatttttggcctttaacagccagtctatgaaaaccatttagagccccattcctgtctgtagcctaggaaatggaaccatctttaattctttcccacagggaagaatgctgcacctatcacactatgtggtcagggtcactgattgataataaataaataaataatagagcgctcaggggaaacaacactcaccagaccacaacacacagtagaagctaagtgctgagcgtgtactctctggacaacgctggctgcaatgcagactgcaatggctacatgcttttccctctaacaattctctttggctttttcaattgggagggcagattttgcttaacaggcaactagaacaggatctctgcccactaaaaaattatccctatacatagagaaattactacagatgctaagtagtcagaatgctaacattttctacaaacttgattacttattggccaaaatgaaagcaaacagccaatttttaacaacacattcaccacttgaaacaaacagcagcatttacattatatcaaagattcatttctacagaatcgtactaaaaaatcatttttcctgcaagatttagcatgcagcaaaaaatgatcttttcatcctgggaacacctttttactgagttttcgggggga

SEQ ID NO: 358513 - DNA, 4760 bp, Homo sapiens
ccccgcccggtactttttccggaggcggcccaagcggcagttggctgcagaggaccccacgtttaggattttatagggaagaggaggaatttttcgtagaaatccccgctctgcgtgctcgtggtggaggctgctggcaatggcctacgtcgtcataccgggcttccttgccctgtccgggggtttcatcaccttaaatggttttgaaccaatgaaggtgtattcccttaaaaagacggacagcccatcgtgtgaactatagagtttgtggacagatttatattgggttcatagtggcgtcatgcacgcagactcctgcaagttcccctaagttcttagaggactgctttgccttttgatctgagagttgcaaagttccataaagaatggcccttgtggataagcacaaagtcaagagacagcgattggacagaatttgtgaaggtatccgcccccagatcatgaacggccccctgcacccccgccccctggtggcgctgctggacggccgcgactgcactgtggagatgcccatcctgaaggacctggccactgtggccttctgtgacgcgcagtcgacgcaggaaatccacgagaaggttctaaacgaagccgtgggcgccatgatgtaccacaccatcaccctcaccagggaggacctggagaagttcaaggccctgagagtgatcgtgcggataggcagtggctatgacaacgtggacatcaaggctgccggcgagctcggaattgccgtgtgcaacatcccgtctgcagccgtggaagagacagcggactctaccatctgccacatcctcaacctgtaccggaggaacacgtggctgtaccaggcactgcgggaaggcacgcgggttcagagcgtggagcagatccgcgaggtggcctcgggagcggcccgcatccgtggggagacgctgggcctcattggctttggtcgcacggggcaggcggttgcagttcgagccaaggcctttggattcagcgtcatattttatgacccctacttgcaggatgggatcgagcggtccctgggcgtgcagagggtctacaccctgcaggatttgctgtatcagagcgactgcgtctccttgcactgcaatctcaacgaacataaccaccacctcatcaatgactttaccataaagcagatgaggcagggagcattccttgtgaacgcagcccgtggcggcctggtggacgagaaagccttagcacaagccctcaaggagggcaggatacgaggggcagccctcgacgtgcatgagtcagagcccttcagctttgctcagggtccgttgaaagatgccccgaatctcatctgcactcctcacactgcctggtacagtgagcaggcgtcactggagatgagggaggcagctgccaccgagatccgccgagccatcacaggtcgcatcccagaaagcttaagaaattgtgtgaacaaggaattctttgtcacatcagcgccttggtcagtaatagaccagcaagcaattcatcctgagctcaatggtgccacatacagatatccgccaggcatcgtgggtgtggctccaggaggacttcctgcagccatggaagggatcatccctggaggcatcccagtgactcacaacctcccgacagtggcacatccttcccaagcgccctctcccaaccagcccacaaaacacggggacaatcgagagcaccccaacgagcaatagcagagaatgccagaaggtaatcactcagatacacttgggaccaagagacagtgaaaaatagatgaactaagagaaaaagaatcggatggtctttgtaactgattctggacatatgcatcattgatgttgcagtgttgaaactacaagagctagaaaactgaagatgtcgtctgcttacggaagcgctgaaagactaggatgtgatttattaacgaccaacttctgttattgtgtgttaagtttttcatctgtgcatcaaatcacaaaaagaataaatagagctttttcctttatcagtcccttgggcacagcaggtcctgaacaccctgctctacaatgttgcatcaagagttcaaacaacaaaataaaaaatattaagaggaaatccccatcctgtgacttgagtcccttaagtctacaggggctggtgacctctttttgctaataggaaaatcacattactacaaaatggggagaaaactgtttgcctgtggtagacacctgcacgcataggattgaagacagtacaggctgctgtacagagaagcgcctctcacatctgaactgcatactgagcgggcaagtcggttgtaagttcagtaaaaccctctgatgatgcaaaaaaaaaaaaaaaaagtattaagtttcacaagctgtttgtactcaaatatattttctcagtttcagatcctctgctattttattgagtggaaagtcttgagctaaaagggttcaagaagaataatgttgcatttccttatgtctcaggaaacactttttatggtaacttgtcagattgtctatgaacaaacccacttttttagacattgataaagtcttcttttcttcacgtgatattttatacaagaacacttcagatgtattagatgtgactgattttaacaaatcctattagatttgtatcaactagttacatgttctattcatagtcttttgtgaatcattgcctttttgtttaaaaagatggcctattttgagcctttgtataggtacattcctgtttttgtgacaaaagaaaaactttaaaattgtcccaaacagaaaaataatggctatcagaagtatgttttgttttagtgtgagttaccgttactgtatttgtttattgtaaaggtggacatttagcgttcagtgcagttttcaataaaaagtaattaaaatttgttaagttctgaaattcaagtacatctcactaatgtaaatgttctctacttgagatgtttaaggcagttgcattgtcaattagccaatttccagctcttgttactacagggttccataaccagactcaagaccgctgacaattaattacctgtgataacaaaaagtttaattgaaaaatcaaaacctcacacaagtccatcattatcacgtcatgccgtccttaagatgcaatggtgggttagtgctaaatcaattcaaaaaaaaacaaagttgctcaacttttagagttctgactttaatctaccccaaagcaaaatgacctggacctggttcaagggagggaagtgaaccttgaaactgttttgccaataacctaacaaacaaaatgatatttacaaagaagtgttgcaaatagtcccatgagttaagagcttgatttaatggatcttctttttaaatagaattaaacctttatactaaaagtatttgcaagtgtcaattaagtccaacaattccaggtatgaaactccctctgagctcttccttatacttcccttcccaattaaaacaaaacaagaaaatcatggtgtcttaaagcctttggcttgcctggccttgtctgctcactcattttaaggtggtggccccatcccaactctaccataaaagtgtctattaacacaagctcacatggagagagacggcgctcatagttactgacctattaccccagggaacaaaaaaggtagtttaacgtcttcgtaaccactcatcaaagaggcaatgaaatatgcgtgaaaaggaggccaagcgcacacagaatatcttaccttcacgaatatgtgaagaagtctgggacacgatgaacctaagagtcaaaaacataaaaggcaggtctgaatccatggtccacctgggttttaattattagatcttggtcgcccaaacaaaaatttatatatatatatataaatttgaccccaaggaagaacaagtcaaaacaaaatgccacgctctgtttgctctagaaaaagaaccatcaagtccacagagtgcaggtatgacttactctccagagtcagtcattaatgtctgtcacctagccacgtataatcatctttgaaaaaggactatattctatcttgggacaataattatggctgttttaatagttcaagagcataatatagcattgatttaccaaaatttttggcctttaacagccagtctatgaaaaccatttagagccccattcctgtctgtagcctaggaaatggaaccatctttaattctttcccacagggaagaatgctgcacctatcacactatgtggtcagggtcactgattgataataaataaataaataatagagcgctcaggggaaacaacactcaccagaccacaacacacagtagaagctaagtgctgagcgtgtactctctggacaacgctggctgcaatgcagactgcaatggctacatgcttttccctctaacaattctctttggctttttcaattgggagggcagattttgcttaacaggcaactagaacaggatctctgcccactaaaaaattatccctatacatagagaaattactacagatgctaagtagtcagaatgctaacattttctacaaacttgattacttattggccaaaatgaaagcaaacagccaatttttaacaacacattcaccacttgaaacaaacagcagcatttacattatatcaaagattcatttctacagaatcgtactaaaaaatcatttttcctgcaagatttagcatgcagcaaaaaatgatcttttcatcctgggaacacctttttactgagttttcgggggga

SEQ ID NO: 358514 - DNA, 4695 bp, Homo sapiens
gcgagcggcgaccctcacctcgcctcccgcctagctcctgcgcagccagcgggtaccgggagctgcggccagcgccgcttctttcctttccttttctctccgttttccttctccttccccggaggagaaaacaaataaagaagagcaaatagccgggaggcgctcggcatccaggacgttccctcccccgatccaagttggaattagcatcctctcggggggttcatagtggcgtcatgcacgcagactcctgcaagttcccctaagttcttagaggactgctttgccttttgatctgagagttgcaaagttccataaagaatggcccttgtggataagcacaaagtcaagagacagcgattggacagaatttgtgaaggtatccgcccccagatcatgaacggccccctgcacccccgccccctggtggcgctgctggacggccgcgactgcactgtggagatgcccatcctgaaggacctggccactgtggccttctgtgacgcgcagtcgacgcaggaaatccacgagaaggttctaaacgaagccgtgggcgccatgatgtaccacaccatcaccctcaccagggaggacctggagaagttcaaggccctgagagtgatcgtgcggataggcagtggctatgacaacgtggacatcaaggctgccggcgagctcggaattgccgtgtgcaacatcccgtctgcagccgtggaagagacagcggactctaccatctgccacatcctcaacctgtaccggaggaacacgtggctgtaccaggcactgcgggaaggcacgcgggttcagagcgtggagcagatccgcgaggtggcctcgggagcggcccgcatccgtggggagacgctgggcctcattggctttggtcgcacggggcaggcggttgcagttcgagccaaggcctttggattcagcgtcatattttatgacccctacttgcaggatgggatcgagcggtccctgggcgtgcagagggtctacaccctgcaggatttgctgtatcagagcgactgcgtctccttgcactgcaatctcaacgaacataaccaccacctcatcaatgactttaccataaagcagatgaggcagggagcattccttgtgaacgcagcccgtggcggcctggtggacgagaaagccttagcacaagccctcaaggagggcaggatacgaggggcagccctcgacgtgcatgagtcagagcccttcagctttgctcagggtccgttgaaagatgccccgaatctcatctgcactcctcacactgcctggtacagtgagcaggcgtcactggagatgagggaggcagctgccaccgagatccgccgagccatcacaggtcgcatcccagaaagcttaagaaattgtgtgaacaaggaattctttgtcacatcagcgccttggtcagtaatagaccagcaagcaattcatcctgagctcaatggtgccacatacagatatccgccaggcatcgtgggtgtggctccaggaggacttcctgcagccatggaagggatcatccctggaggcatcccagtgactcacaacctcccgacagtggcacatccttcccaagcgccctctcccaaccagcccacaaaacacggggacaatcgagagcaccccaacgagcaatagcagagaatgccagaaggtaatcactcagatacacttgggaccaagagacagtgaaaaatagatgaactaagagaaaaagaatcggatggtctttgtaactgattctggacatatgcatcattgatgttgcagtgttgaaactacaagagctagaaaactgaagatgtcgtctgcttacggaagcgctgaaagactaggatgtgatttattaacgaccaacttctgttattgtgtgttaagtttttcatctgtgcatcaaatcacaaaaagaataaatagagctttttcctttatcagtcccttgggcacagcaggtcctgaacaccctgctctacaatgttgcatcaagagttcaaacaacaaaataaaaaatattaagaggaaatccccatcctgtgacttgagtcccttaagtctacaggggctggtgacctctttttgctaataggaaaatcacattactacaaaatggggagaaaactgtttgcctgtggtagacacctgcacgcataggattgaagacagtacaggctgctgtacagagaagcgcctctcacatctgaactgcatactgagcgggcaagtcggttgtaagttcagtaaaaccctctgatgatgcaaaaaaaaaaaaaaaaagtattaagtttcacaagctgtttgtactcaaatatattttctcagtttcagatcctctgctattttattgagtggaaagtcttgagctaaaagggttcaagaagaataatgttgcatttccttatgtctcaggaaacactttttatggtaacttgtcagattgtctatgaacaaacccacttttttagacattgataaagtcttcttttcttcacgtgatattttatacaagaacacttcagatgtattagatgtgactgattttaacaaatcctattagatttgtatcaactagttacatgttctattcatagtcttttgtgaatcattgcctttttgtttaaaaagatggcctattttgagcctttgtataggtacattcctgtttttgtgacaaaagaaaaactttaaaattgtcccaaacagaaaaataatggctatcagaagtatgttttgttttagtgtgagttaccgttactgtatttgtttattgtaaaggtggacatttagcgttcagtgcagttttcaataaaaagtaattaaaatttgttaagttctgaaattcaagtacatctcactaatgtaaatgttctctacttgagatgtttaaggcagttgcattgtcaattagccaatttccagctcttgttactacagggttccataaccagactcaagaccgctgacaattaattacctgtgataacaaaaagtttaattgaaaaatcaaaacctcacacaagtccatcattatcacgtcatgccgtccttaagatgcaatggtgggttagtgctaaatcaattcaaaaaaaaacaaagttgctcaacttttagagttctgactttaatctaccccaaagcaaaatgacctggacctggttcaagggagggaagtgaaccttgaaactgttttgccaataacctaacaaacaaaatgatatttacaaagaagtgttgcaaatagtcccatgagttaagagcttgatttaatggatcttctttttaaatagaattaaacctttatactaaaagtatttgcaagtgtcaattaagtccaacaattccaggtatgaaactccctctgagctcttccttatacttcccttcccaattaaaacaaaacaagaaaatcatggtgtcttaaagcctttggcttgcctggccttgtctgctcactcattttaaggtggtggccccatcccaactctaccataaaagtgtctattaacacaagctcacatggagagagacggcgctcatagttactgacctattaccccagggaacaaaaaaggtagtttaacgtcttcgtaaccactcatcaaagaggcaatgaaatatgcgtgaaaaggaggccaagcgcacacagaatatcttaccttcacgaatatgtgaagaagtctgggacacgatgaacctaagagtcaaaaacataaaaggcaggtctgaatccatggtccacctgggttttaattattagatcttggtcgcccaaacaaaaatttatatatatatatataaatttgaccccaaggaagaacaagtcaaaacaaaatgccacgctctgtttgctctagaaaaagaaccatcaagtccacagagtgcaggtatgacttactctccagagtcagtcattaatgtctgtcacctagccacgtataatcatctttgaaaaaggactatattctatcttgggacaataattatggctgttttaatagttcaagagcataatatagcattgatttaccaaaatttttggcctttaacagccagtctatgaaaaccatttagagccccattcctgtctgtagcctaggaaatggaaccatctttaattctttcccacagggaagaatgctgcacctatcacactatgtggtcagggtcactgattgataataaataaataaataatagagcgctcaggggaaacaacactcaccagaccacaacacacagtagaagctaagtgctgagcgtgtactctctggacaacgctggctgcaatgcagactgcaatggctacatgcttttccctctaacaattctctttggctttttcaattgggagggcagattttgcttaacaggcaactagaacaggatctctgcccactaaaaaattatccctatacatagagaaattactacagatgctaagtagtcagaatgctaacattttctacaaacttgattacttattggccaaaatgaaagcaaacagccaatttttaacaacacattcaccacttgaaacaaacagcagcatttacattatatcaaagattcatttctacagaatcgtactaaaaaatcatttttcctgcaagatttagcatgcagcaaaaaatgatcttttcatcctgggaacacctttttactgagttttcgggggga

SEQ ID NO: 358515 - DNA, 4387 bp, Homo sapiens
cctcctctccgggactgagctgtaaggaacagacctctctggctatcgttggggagtgaggcaaagttaccgtatccgcccccagatcatgaacggccccctgcacccccgccccctggtggcgctgctggacggccgcgactgcactgtggagatgcccatcctgaaggacctggccactgtggccttctgtgacgcgcagtcgacgcaggaaatccacgagaaggttctaaacgaagccgtgggcgccatgatgtaccacaccatcaccctcaccagggaggacctggagaagttcaaggccctgagagtgatcgtgcggataggcagtggctatgacaacgtggacatcaaggctgccggcgagctcggaattgccgtgtgcaacatcccgtctgcagccgtggaagagacagcggactctaccatctgccacatcctcaacctgtaccggaggaacacgtggctgtaccaggcactgcgggaaggcacgcgggttcagagcgtggagcagatccgcgaggtggcctcgggagcggcccgcatccgtggggagacgctgggcctcattggctttggtcgcacggggcaggcggttgcagttcgagccaaggcctttggattcagcgtcatattttatgacccctacttgcaggatgggatcgagcggtccctgggcgtgcagagggtctacaccctgcaggatttgctgtatcagagcgactgcgtctccttgcactgcaatctcaacgaacataaccaccacctcatcaatgactttaccataaagcagatgaggcagggagcattccttgtgaacgcagcccgtggcggcctggtggacgagaaagccttagcacaagccctcaaggagggcaggatacgaggggcagccctcgacgtgcatgagtcagagcccttcagctttgctcagggtccgttgaaagatgccccgaatctcatctgcactcctcacactgcctggtacagtgagcaggcgtcactggagatgagggaggcagctgccaccgagatccgccgagccatcacaggtcgcatcccagaaagcttaagaaattgtgtgaacaaggaattctttgtcacatcagcgccttggtcagtaatagaccagcaagcaattcatcctgagctcaatggtgccacatacagatatccgccaggcatcgtgggtgtggctccaggaggacttcctgcagccatggaagggatcatccctggaggcatcccagtgactcacaacctcccgacagtggcacatccttcccaagcgccctctcccaaccagcccacaaaacacggggacaatcgagagcaccccaacgagcaatagcagagaatgccagaaggtaatcactcagatacacttgggaccaagagacagtgaaaaatagatgaactaagagaaaaagaatcggatggtctttgtaactgattctggacatatgcatcattgatgttgcagtgttgaaactacaagagctagaaaactgaagatgtcgtctgcttacggaagcgctgaaagactaggatgtgatttattaacgaccaacttctgttattgtgtgttaagtttttcatctgtgcatcaaatcacaaaaagaataaatagagctttttcctttatcagtcccttgggcacagcaggtcctgaacaccctgctctacaatgttgcatcaagagttcaaacaacaaaataaaaaatattaagaggaaatccccatcctgtgacttgagtcccttaagtctacaggggctggtgacctctttttgctaataggaaaatcacattactacaaaatggggagaaaactgtttgcctgtggtagacacctgcacgcataggattgaagacagtacaggctgctgtacagagaagcgcctctcacatctgaactgcatactgagcgggcaagtcggttgtaagttcagtaaaaccctctgatgatgcaaaaaaaaaaaaaaaaagtattaagtttcacaagctgtttgtactcaaatatattttctcagtttcagatcctctgctattttattgagtggaaagtcttgagctaaaagggttcaagaagaataatgttgcatttccttatgtctcaggaaacactttttatggtaacttgtcagattgtctatgaacaaacccacttttttagacattgataaagtcttcttttcttcacgtgatattttatacaagaacacttcagatgtattagatgtgactgattttaacaaatcctattagatttgtatcaactagttacatgttctattcatagtcttttgtgaatcattgcctttttgtttaaaaagatggcctattttgagcctttgtataggtacattcctgtttttgtgacaaaagaaaaactttaaaattgtcccaaacagaaaaataatggctatcagaagtatgttttgttttagtgtgagttaccgttactgtatttgtttattgtaaaggtggacatttagcgttcagtgcagttttcaataaaaagtaattaaaatttgttaagttctgaaattcaagtacatctcactaatgtaaatgttctctacttgagatgtttaaggcagttgcattgtcaattagccaatttccagctcttgttactacagggttccataaccagactcaagaccgctgacaattaattacctgtgataacaaaaagtttaattgaaaaatcaaaacctcacacaagtccatcattatcacgtcatgccgtccttaagatgcaatggtgggttagtgctaaatcaattcaaaaaaaaacaaagttgctcaacttttagagttctgactttaatctaccccaaagcaaaatgacctggacctggttcaagggagggaagtgaaccttgaaactgttttgccaataacctaacaaacaaaatgatatttacaaagaagtgttgcaaatagtcccatgagttaagagcttgatttaatggatcttctttttaaatagaattaaacctttatactaaaagtatttgcaagtgtcaattaagtccaacaattccaggtatgaaactccctctgagctcttccttatacttcccttcccaattaaaacaaaacaagaaaatcatggtgtcttaaagcctttggcttgcctggccttgtctgctcactcattttaaggtggtggccccatcccaactctaccataaaagtgtctattaacacaagctcacatggagagagacggcgctcatagttactgacctattaccccagggaacaaaaaaggtagtttaacgtcttcgtaaccactcatcaaagaggcaatgaaatatgcgtgaaaaggaggccaagcgcacacagaatatcttaccttcacgaatatgtgaagaagtctgggacacgatgaacctaagagtcaaaaacataaaaggcaggtctgaatccatggtccacctgggttttaattattagatcttggtcgcccaaacaaaaatttatatatatatatataaatttgaccccaaggaagaacaagtcaaaacaaaatgccacgctctgtttgctctagaaaaagaaccatcaagtccacagagtgcaggtatgacttactctccagagtcagtcattaatgtctgtcacctagccacgtataatcatctttgaaaaaggactatattctatcttgggacaataattatggctgttttaatagttcaagagcataatatagcattgatttaccaaaatttttggcctttaacagccagtctatgaaaaccatttagagccccattcctgtctgtagcctaggaaatggaaccatctttaattctttcccacagggaagaatgctgcacctatcacactatgtggtcagggtcactgattgataataaataaataaataatagagcgctcaggggaaacaacactcaccagaccacaacacacagtagaagctaagtgctgagcgtgtactctctggacaacgctggctgcaatgcagactgcaatggctacatgcttttccctctaacaattctctttggctttttcaattgggagggcagattttgcttaacaggcaactagaacaggatctctgcccactaaaaaattatccctatacatagagaaattactacagatgctaagtagtcagaatgctaacattttctacaaacttgattacttattggccaaaatgaaagcaaacagccaatttttaacaacacattcaccacttgaaacaaacagcagcatttacattatatcaaagattcatttctacagaatcgtactaaaaaatcatttttcctgcaagatttagcatgcagcaaaaaatgatcttttcatcctgggaacacctttttactgagttttcgggggga

SEQ ID NO: 358516 - DNA, 4284 bp, Homo sapiens
  misc_feature (4)..(4): n is a, c, g, or t
gaanccgattaatcctccagttggttgtccctgccgtctcggaagggttagcacacagccaggtctgtttttgatgtatgtaattgaagatttataaagaaaagcttctcctctgcctcatccacagtcattttttttccaatgccagttcccagcaggcatataaatattggtcgttctcagagctgggatgctgctgggtggtacgagggcccctgggagaacgccgagtccctgcggcctctggggaggagaagctccctgacgtatggcacagcagaggggacttggtttgagccaaaccaccgaccacaggacgctgccctgcccgtggccgccgagccctacctgtaccgggaggccgtttataactcagtggctgcaagaaaggggtctactcctgacttcaccttctacgacagcagacaggcagtgatgtctggtcgcagccccctgctgccacgggagtactacagtgatccgtctggagctgctagggtacccaaagagcctcccctctatcgggacccaggagtcagccggccggtccccagctacggagtgcttggcagcagaacgtcatgggatccaatgcaaggccggtcacctgccctgcaggacgccggtcacctgtaccgggatcctggaggtaaaatgatccctcaggggcggcagacacagagcagggctgcatctcccgggcggtatggacgggagcagcccgacaccaggtatggggcggaggtgcctgcctaccccctcagccaggtcttcagcgacatcagcgaaagacccattgaccctgcccctgccagacaggtggccccgacgtgcctggttgtggaccccagttcagctgctgcccccgaaggcagcacaggggtggccccaggggccctgaatcgtggctacgggcctgcccgggaaagcatcccatccaagatggcttacgagacttacgaagctgacctgtccaccttccagggtcctggtggcaagaggaccgtgctccctgagttcctggcctttctgcgggcggaggggctggcagaggccacgctgggagccctactgcagcagggctttgactccccggccgtcctggctaccctggaggacgcggatatcaagtctgtcgcacccaacctgggccaggcccgtgttctgagccgcctggccaatagctgcaggaccgaaatgcagctgcggaggcaggaccgggggggcccgctgccccgggcgcggtccagcagcttcagccaccgaagcgaactgctccatggtgacttggcttctctgggcgctgcggctcctctgcagacagcatccccccgagctggagacccggctcgccgtccctccagcgcaccatctcagcacctcctggagacggcagccacctattctgcccctggcgtgggcacccatgccccacacttcccctccaactccgggtacagctctcccaccccttgcgccctgacagcgcgtctgagccccacgcaccccctgcaggcaggggtggccttgactaacccgggcccctcaaacccccttcacccaggccccagaacagcttactccacggcatacacggtgcccatggagctgctaaagagggagcgcaacgtggccgcctctccgctgcccagccctcacggcagcccccaggtcttgcggaagccaggtgcacccctggggccatccaccctgccgccggccagccagagcctccacacgcctcactcaccgtacgagaaggtggcccggcgcacaggggcacccatcatcgtgtccaccatgcttgcaccagaaccaaggtatccgcccccagatcatgaacggccccctgcacccccgccccctggtggcgctgctggacggccgcgactgcactgtggagatgcccatcctgaaggacctggccactgtggccttctgtgacgcgcagtcgacgcaggaaatccacgagaaggttctaaacgaagccgtgggcgccatgatgtaccacaccatcaccctcaccagggaggacctggagaagttcaaggccctgagagtgatcgtgcggataggcagtggctatgacaacgtggacatcaaggctgccggcgagctcggaattgccgtgtgcaacatcccgtctgcagccgtggaagagacagcggactctaccatctgccacatcctcaacctgtaccggaggaacacgtggctgtaccaggcactgcgggaaggcacgcgggttcagagcgtggagcagatccgcgaggtggcctcgggagcggcccgcatccgtggggagacgctgggcctcattggctttggtcgcacggggcaggcggttgcagttcgagccaaggcctttggattcagcgtcatattttatgacccctacttgcaggatgggatcgagcggtccctgggcgtgcagagggtctacaccctgcaggatttgctgtatcagagcgactgcgtctccttgcactgcaatctcaacgaacataaccaccacctcatcaatgactttaccataaagcagatgaggcagggagcattccttgtgaacgcagcccgtggcggcctggtggacgagaaagccttagcacaagccctcaaggagggcaggatacgaggggcagccctcgacgtgcatgagtcagagcccttcagctttgctcagggtccgttgaaagatgccccgaatctcatctgcactcctcacactgcctggtacagtgagcaggcgtcactggagatgagggaggcagctgccaccgagatccgccgagccatcacaggtcgcatcccagaaagcttaagaaattgtgtgaacaaggaattctttgtcacatcagcgccttggtcagtaatagaccagcaagcaattcatcctgagctcaatggtgccacatacagatatccgccaggcatcgtgggtgtggctccaggaggacttcctgcagccatggaagggatcatccctggaggcatcccagtgactcacaacctcccgacagtggcacatccttcccaagcgccctctcccaaccagcccacaaaacacggggacaatcgagagcaccccaacgagcaatagcagagaatgccagaaggtaatcactcagatacacttgggaccaagagacagtgaaaaatagatgaactaagagaaaaagaatcggatggtctttgtaactgattctggacatatgcatcattgatgttgcagtgttgaaactacaagagctagaaaactgaagatgtcgtctgcttacggaagcgctgaaagactaggatgtgatttattaacgaccaacttctgttattgtgtgttaagtttttcatctgtgcatcaaatcacaaaaagaataaatagagctttttcctttatcagtcccttgggcacagcaggtcctgaacaccctgctctacaatgttgcatcaagagttcaaacaacaaaataaaaaatattaagaggaaatccccatcctgtgacttgagtcccttaagtctacaggggctggtgacctctttttgctaataggaaaatcacattactacaaaatggggagaaaactgtttgcctgtggtagacacctgcacgcataggattgaagacagtacaggctgctgtacagagaagcgcctctcacatctgaactgcatactgagcgggcaagtcggttgtaagttcagtaaaaccctctgatgatgcaaaaaaaaaaaaaaaaagtattaagtttcacaagctgtttgtactcaaatatattttctcagtttcagatcctctgctattttattgagtggaaagtcttgagctaaaagggttcaagaagaataatgttgcatttccttatgtctcaggaaacactttttatggtaacttgtcagattgtctatgaacaaacccacttttttagacattgataaagtcttcttttcttcacgtgatattttatacaagaacacttcagatgtattagatgtgactgattttaacaaatcctattagatttgtatcaactagttacatgttctattcatagtcttttgtgaatcattgcctttttgtttaaaaagatggcctattttgagcctttgtataggtacattcctgtttttgtgacaaaagaaaaactttaaaattgtcccaaacagaaaaataatggctatcagaagtatgttttgttttagtgtgagttaccgttactgtatttgtttattgtaaaggtggacatttagcgttcagtgcagttttcaataaaaagtaattaaaattt

SEQ ID NO: 358517 - DNA, 4585 bp, Homo sapiens
tccctgtgtgcgtgtgtcattttaaggtggctcgggagcggcccggaggagccggcggcggcccgaggagcgagggaccgaaccgggagccatgccgcgctgagggggggccgcacagccgccgccaccgccaccgccgccgggtggggtgggaggggcgggagacgccgccgccgccgcctccagggtgggcgcctttcgccgtggacgccgaccgtccgggacgagggttcatagtggcgtcatgcacgcagactcctgcaagttcccctaagttcttagaggactgctttgccttttgatctgagagttgcaaagttccataaagaatggcccttgtggataagcacaaagtcaagagacagcgattggacagaatttgtgaaggtatccgcccccagatcatgaacggccccctgcacccccgccccctggtggcgctgctggacggccgcgactgcactgtggagatgcccatcctgaaggacctggccactgtggccttctgtgacgcgcagtcgacgcaggaaatccacgagaaggttctaaacgaagccgtgggcgccatgatgtaccacaccatcaccctcaccagggaggacctggagaagttcaaggccctgagagtgatcgtgcggataggcagtggctatgacaacgtggacatcaaggctgccggcgagctcggaattgccgtgtgcaacatcccgtctgcagccgtggaagagacagcggactctaccatctgccacatcctcaacctgtaccggaggaacacgtggctgtaccaggcactgcgggaaggcacgcgggttcagagcgtggagcagatccgcgaggtggcctcgggagcggcccgcatccgtggggagacgctgggcctcattggctttggtcgcacggggcaggcggttgcagttcgagccaaggcctttggattcagcgtcatattttatgacccctacttgcaggatgggatcgagcggtccctgggcgtgcagagggtctacaccctgcaggatttgctgtatcagagcgactgcgtctccttgcactgcaatctcaacgaacataaccaccacctcatcaatgactttaccataaagcagatgaggcagggagcattccttgtgaacgcagcccgtggcggcctggtggacgagaaagccttagcacaagccctcaaggagggcaggatacgaggggcagccctcgacgtgcatgagtcagagcccttcagctttgctcagggtccgttgaaagatgccccgaatctcatctgcactcctcacactgcctggtacagtgagcaggcgtcactggagatgagggaggcagctgccaccgagatccgccgagccatcacagatatccgccaggcatcgtgggtgtggctccaggaggacttcctgcagccatggaagggatcatccctggaggcatcccagtgactcacaacctcccgacagtggcacatccttcccaagcgccctctcccaaccagcccacaaaacacggggacaatcgagagcaccccaacgagcaatagcagagaatgccagaaggtaatcactcagatacacttgggaccaagagacagtgaaaaatagatgaactaagagaaaaagaatcggatggtctttgtaactgattctggacatatgcatcattgatgttgcagtgttgaaactacaagagctagaaaactgaagatgtcgtctgcttacggaagcgctgaaagactaggatgtgatttattaacgaccaacttctgttattgtgtgttaagtttttcatctgtgcatcaaatcacaaaaagaataaatagagctttttcctttatcagtcccttgggcacagcaggtcctgaacaccctgctctacaatgttgcatcaagagttcaaacaacaaaataaaaaatattaagaggaaatccccatcctgtgacttgagtcccttaagtctacaggggctggtgacctctttttgctaataggaaaatcacattactacaaaatggggagaaaactgtttgcctgtggtagacacctgcacgcataggattgaagacagtacaggctgctgtacagagaagcgcctctcacatctgaactgcatactgagcgggcaagtcggttgtaagttcagtaaaaccctctgatgatgcaaaaaaaaaaaaaaaaagtattaagtttcacaagctgtttgtactcaaatatattttctcagtttcagatcctctgctattttattgagtggaaagtcttgagctaaaagggttcaagaagaataatgttgcatttccttatgtctcaggaaacactttttatggtaacttgtcagattgtctatgaacaaacccacttttttagacattgataaagtcttcttttcttcacgtgatattttatacaagaacacttcagatgtattagatgtgactgattttaacaaatcctattagatttgtatcaactagttacatgttctattcatagtcttttgtgaatcattgcctttttgtttaaaaagatggcctattttgagcctttgtataggtacattcctgtttttgtgacaaaagaaaaactttaaaattgtcccaaacagaaaaataatggctatcagaagtatgttttgttttagtgtgagttaccgttactgtatttgtttattgtaaaggtggacatttagcgttcagtgcagttttcaataaaaagtaattaaaatttgttaagttctgaaattcaagtacatctcactaatgtaaatgttctctacttgagatgtttaaggcagttgcattgtcaattagccaatttccagctcttgttactacagggttccataaccagactcaagaccgctgacaattaattacctgtgataacaaaaagtttaattgaaaaatcaaaacctcacacaagtccatcattatcacgtcatgccgtccttaagatgcaatggtgggttagtgctaaatcaattcaaaaaaaaacaaagttgctcaacttttagagttctgactttaatctaccccaaagcaaaatgacctggacctggttcaagggagggaagtgaaccttgaaactgttttgccaataacctaacaaacaaaatgatatttacaaagaagtgttgcaaatagtcccatgagttaagagcttgatttaatggatcttctttttaaatagaattaaacctttatactaaaagtatttgcaagtgtcaattaagtccaacaattccaggtatgaaactccctctgagctcttccttatacttcccttcccaattaaaacaaaacaagaaaatcatggtgtcttaaagcctttggcttgcctggccttgtctgctcactcattttaaggtggtggccccatcccaactctaccataaaagtgtctattaacacaagctcacatggagagagacggcgctcatagttactgacctattaccccagggaacaaaaaaggtagtttaacgtcttcgtaaccactcatcaaagaggcaatgaaatatgcgtgaaaaggaggccaagcgcacacagaatatcttaccttcacgaatatgtgaagaagtctgggacacgatgaacctaagagtcaaaaacataaaaggcaggtctgaatccatggtccacctgggttttaattattagatcttggtcgcccaaacaaaaatttatatatatatatataaatttgaccccaaggaagaacaagtcaaaacaaaatgccacgctctgtttgctctagaaaaagaaccatcaagtccacagagtgcaggtatgacttactctccagagtcagtcattaatgtctgtcacctagccacgtataatcatctttgaaaaaggactatattctatcttgggacaataattatggctgttttaatagttcaagagcataatatagcattgatttaccaaaatttttggcctttaacagccagtctatgaaaaccatttagagccccattcctgtctgtagcctaggaaatggaaccatctttaattctttcccacagggaagaatgctgcacctatcacactatgtggtcagggtcactgattgataataaataaataaataatagagcgctcaggggaaacaacactcaccagaccacaacacacagtagaagctaagtgctgagcgtgtactctctggacaacgctggctgcaatgcagactgcaatggctacatgcttttccctctaacaattctctttggctttttcaattgggagggcagattttgcttaacaggcaactagaacaggatctctgcccactaaaaaattatccctatacatagagaaattactacagatgctaagtagtcagaatgctaacattttctacaaacttgattacttattggccaaaatgaaagcaaacagccaatttttaacaacacattcaccacttgaaacaaacagcagcatttacattatatcaaagattcatttctacagaatcgtactaaaaaatcatttttcctgcaagatttagcatgcagcaaaaaatgatcttttcatcctgggaacacctttttactgagttttcgggggga

SEQ ID NO: 358518 - DNA, 2036 bp, Homo sapiens
tccctgtgtgcgtgtgtcattttaaggtggctcgggagcggcccggaggagccggcggcggcccgaggagcgagggaccgaaccgggagccatgccgcgctgagggggggccgcacagccgccgccaccgccaccgccgccgggtggggtgggaggggcgggagacgccgccgccgccgcctccagggtgggcgcctttcgccgtggacgccgaccgtccgggacgagggttcatagtggcgtcatgcacgcagactcctgcaagttcccctaagttcttagaggactgctttgccttttgatctgagagttgcaaagttccataaagaatggcccttgtggataagcacaaagtcaagagacagcgattggacagaatttgtgaaggtatccgcccccagatcatgaacggccccctgcacccccgccccctggtggcgctgctggacggccgcgactgcactgtggagatgcccatcctgaaggacctggccactgtggccttctgtgacgcgcagtcgacgcaggaaatccacgagaaggttctaaacgaagccgtgggcgccatgatgtaccacaccatcaccctcaccagggaggacctggagaagttcaaggccctgagagtgatcgtgcggataggcagtggctatgacaacgtggacatcaaggctgccggcgagctcggaattgccgtgtgcaacatcccgtctgcagccgtggaagagacagcggactctaccatctgccacatcctcaacctgtaccggaggaacacgtggctgtaccaggcactgcgggaaggcacgcgggttcagagcgtggagcagatccgcgaggtggcctcgggagcggcccgcatccgtggggagacgctgggcctcattggctttggtcgcacggggcaggcggttgcagttcgagccaaggcctttggattcagcgtcatattttatgacccctacttgcaggatgggatcgagcggtccctgggcgtgcagagggtctacaccctgcaggatttgctgtatcagagcgactgcgtctccttgcactgcaatctcaacgaacataaccaccacctcatcaatgactttaccataaagcagatgaggcagggagcattccttgtgaacgcagcccgtggcggcctggtggacgagaaagccttagcacaagccctcaaggagggcaggatacgaggggcagccctcgacgtgcatgagtcagagcccttcagctttgctcagggtccgttgaaagatgccccgaatctcatctgcactcctcacactgcctggtacagtgagcaggcgtcactggagatgagggaggcagctgccaccgagatccgccgagccatcacaggtcgcatcccagaaagcttaagaaattgtgtgaacaaggaattctttgtcacatcagcgccttggtcagtaatagaccagcaagcaattcatcctgagctcaatggtgccacatacagatatccgccaggcatcgtgggtgtggctccaggaggacttcctgcagccatggaagggatcatccctggaggcatcccagtgactcacaacctcccgacagtggcacatccttcccaagcgccctctcccaaccagcccacaaaacacggggacaatcgagagcaccccaacgagcaatagcagagaatgccagaaggtaatcactcagatacacttgggaccaagagacagtgaaaaatagatgaactaagagaaaaagaatcggatggtctttgtaactgattctggacatatgcatcattgatgttgcagtgttgaaactacaagagctagaaaactgaagatgtcgtctgcttacggaagcgctgaaagactaggatgtgatttattaacgaccaacttctgttattgtgtgttaagtttttcatctgtgcatcaaatcacaaaaagaataaatagagctttttcctttatcagtcccttgggcacagcaggtcctgaacaccctgctctacaatgttgcagtgtgcttccggggtaccgagctct

SEQ ID NO: 358519 - DNA, 1259 bp, Homo sapiens
tccctgtgtgcgtgtgtcattttaaggtggctcgggagcggcccggaggagccggcggcggcccgaggagcgagggaccgaaccgggagccatgccgcgctgagggggggccgcacagccgccgccaccgccaccgccgccgggtggggtgggaggggcgggagacgccgccgccgccgcctccagggtgggcgcctttcgccgtggacgccgaccgtccgggacgagggttcatagtggcgtcatgcacgcagactcctgcaagttcccctaagttcttagaggactgctttgccttttgatctgagagttgcaaagttccataaagaatggcccttgtggataagcacaaagtcaagagacagcgattggacagaatttgtgaaggtatccgcccccagatcatgaacggccccctgcacccccgccccctggtggcgctgctggacggccgcgactgcactgtggagatgcccatcctgaaggacctggccactgtggccttctgtgacgcgcagtcgacgcaggaaatccacgagaaggttctaaacgaagccgtgggcgccatgatgtaccacaccatcaccctcaccagggaggacctggagaagttcaaggccctgagagtgatcgtgcggataggcagtggctatgacaacgtggacatcaaggctgccggcgagctcggaattgccgtgtgcaacatcccgtctgcagccgtggaagagacagcggactctaccatctgccacatcctcaacctgtaccggaggaacacgtggctgtaccaggcactgcgggaaggcacgcgggttcagagcgtggagcagatccgcgaggtggcctcgggagcggcccgcatccgtggggagacgctgggcctcattggctttggtcgcacggggcaggcggttgcagttcgagccaaggcctttggattcagcgtcatattttatgacccctacttgcaggatgggatcgagcggtccctgggcgtgcagagggtctacaccctgcaggatttgctgtatcagagcgactgcgtctccttgcactgcaatctcaacgaacataaccaccacctcatcaatgactttaccataaagcagatgaggcagggagcattccttgtgaacgcagcccgtggcggcctggtggacgagaaagccttagcacaagccctcaaggagggcagatgagattcgggcatctttcaacgacatgacaaagtgaaggctctactatgcacgtcaggcgcg

SEQ ID NO: 358520 - DNA, 924 bp, Homo sapiens
taaaggcaggctgttacggcccggattttaggatcagccagcgcccgcgatgactgccactctccgcccctacctgagtgccgtgcgggccacattgcaggctgccctctgcctggagaacttctcctcccaggttgtggaacgacacaacaagccggaagtggaagtcaggagtagcaaagagctcctgttacaacctgtgaccatcagcaggaatgagaaggaaaaggttctgattgagggctccatcaactctgtccgggtcagcattgctgtgaaacaggctgatgagatcgagaagattttgtgccacaagttcatgcgcttcatgatgatgcgagcagagaacttctttatccttcgaaggaagcctgtggaggggtatgatatcagctttctgatcaccaacttccacacagagcagatgtacaaacacaagttggtggactttgtgatccacttcatggaggagattgacaaggagatcagtgagatgaagctgtcagtcaatgcccgtgcccgcattgtggctgaagagttccttaagaatttttaaaccatctggctggatctcgtggccttccccctcagactacccatgtctccacgaaggcgtcctggagtcactccccgagcagcgcggcggcggcagggagttgggttggggtgggcatttgatgcgggaggtgggtggtgtgcttgctagctgggcaagaaagcagcagtggacctgccccaaggccacacgtgcctggtcaggctggcttctgatgttcagtcccctgggccgggacagattttttttaacgtcttgaaacttaaactctgtgcttgtaggatactgtaacctttttgtctttttttttttttttaaacctcccctaattaaagtctctttatccctttggggctgcaaaaaaaaaa

SEQ ID NO: 358521 - DNA, 1531 bp, Homo sapiens
ggcgagtgcaagcttgatgcgtgtggtcgaacttaggaggatccccctcactagactgcgcccgcgatgactgccactctccgcccctacctgagtgccgtgcgggccacattgcaggctgccctctgcctggagaacttctcctcccaggttgtggaacgacacaacaagccggaagtggaagtcaggagtagcaaagagctcctgttacaacctgtgaccatcagcaggaatgagaaggaaaaggttctgattgagggctccatcaactctgtccgggtcagcattgctgtgaaacaggctgatgagatcgagaagattttgtgccacaagttcatgcgcttcatgatgatgcgagcagagaacttctttatccttcgaaggaagcctgtggaggggtatgatatcagctttctgatcaccaacttccacacagagcagatgtacaaacacaagttggtggactttgtgatccacttcatggaggagattgacaaggagatcagtgagatgaagctgtcagtcaatgcccgtgcccgcattgtggctgaagagttccttaagaatttttaaaccatctggctggatctcgtggccttccccctcagactacccatgtctccacgaaggcgtcctggagtcactccccgagcagcgcggcggcggcagggagttgggttggggtgggcatttgatgcgggaggtgggtggtgtgcttgctagctgggcaagaaagcagcagtggacctgccccaaggccacacgtgcctggtcaggctggcttctgatgttcagtcccctgggccgggacagattttttttaacgtcttgaaacttaaactctgtgcttgtaggatactgtaacctttttgtctttttttttttttttttttttaaacctccacctccagtggctgtgactggtcccagtgattatacgttattggttgctgtgggtctgggcgggcctggagccagaaggcgacttattttttctctcctatgccaccccaggtggggagggagggaggtttcagactccagtttctcccttgcccttttattcccaagcctccttggccccagtataagtgttgggaactctctgccagcttcctgagttctgcctaaagatggccccccagcactggttggggacaagggccaaattggtgaccaccagtcatgcctaggacctggggcccaaaagccgggcaacctctggctacaggggccattgggtgccctcccagttgagaggggccgctgtttcgccttgtccgtcagtgccagtgcctgtgccagaggtggcgaggtgagtcctccagagcttcctggccgggccctcctcctgcctgttctggctcctctgctcccacgctagctgtcccttttctgattctggtggatcctccctcccctaattaaagtctctttttgcccctttggggctgcataaaaaaaaaaaaaaaaaaacaaaaaaacaaaaaaaaaaaaaaaaaaaaaagaacaaaaaacaaaaaacaacaaa

SEQ ID NO: 358522 - DNA, 1450 bp, Homo sapiens
aggcatcgcggggctggccacttccgtacttccgctttccggcccagccagcgcccgcgatgactgccactctccgcccctacctgagtgccgtgcgggccacattgcaggctgccctctgcctggagaacttctcctcccaggttgtggaacgacacaacaagccggaagtggaagtcaggagtagcaaagagctcctgttacaacctgtgaccatcagcaggaatgagaaggaaaaggttctgattgagggctccatcaactctgtccgggtcagcattgctgtgaaacaggctgatgagatcgagaagattttgtgccacaagttcatgcgcttcatgatgatgcgagcagagaacttctttatccttcgaaggaagcctgtggaggggtatgatatcagctttctgatcaccaacttccacacagagcagatgtacaaacacaagttggtggactttgtgatccacttcatggaggagattgacaaggagatcagtgagatgaagctgtcagtcaatgcccgtgcccgcattgtggctgaagagttccttaagaatttttaaaccatctggctggatctcgtggccttccccctcagactacccatgtctccacgaaggcgtcctggagtcactccccgagcagcgcggcggcggcagggagttgggttggggtgggcatttgatgcgggaggtgggtggtgtgcttgctagctgggcaagaaagcagcagtggacctgccccaaggccacacgtgcctggtcaggctggcttctgatgttcagtcccctgggccgggacagattttttttaacgtcttgaaacttaaactctgtgcttgtaggatactgtaacctttttgtctttttttttttttttttttttaaacctccacctccagtggctgtgactggtcccagtgattatacgttattggttgctgtgggtctgggcgggcctggagccagaaggcgacttattttttctctcctatgccaccccaggtggggagggagggaggtttcagactccagtttctcccttgcccttttattcccaagcctccttggccccagtataagtgttgggaactctctgccagcttcctgagttctgcctaaagatggccccccagcactggttggggacaagggccaaattggtgaccaccagtcatgcctaggacctggggcccaaaagccgggcaacctctggctacaggggccattgggtgccctcccagttgagaggggccgctgtttcgccttgtccgtcagtgccagtgcctgtgccagaggtggcgaggtgagtcctccagagcttcctggccgggccctcctcctgcctgttctggctcctctgctcccacgctagctgtcccttttctgattctggtggatcctccctcccctaattaaagtctctttttgcccctttggggctgcat

SEQ ID NO: 358523 - DNA, 1583 bp, Homo sapiens
gggagtcagcgagggcgagcctactggagtttgccgggggtgggaagaaggtgggcctcgagcaaagccgctagaggtggggtgcgggtggtcggcctcaggcgagccccggggcacagcccggggcgggaggcggagcttggcggccgagatctccgcgctgcagttagccccgccgagcgccaggagctgcggactgccactctccgcccctacctgagtgccgtgcgggccacattgcaggctgccctctgcctggagaacttctcctcccaggttgtggaacgacacaacaagccggaagtggaagtcaggagtagcaaagagctcctgttacaacctgtgaccatcagcaggaatgagaaggaaaaggttctgattgagggctccatcaactctgtccgggtcagcattgctgtgaaacaggctgatgagatcgagaagattttgtgccacaagttcatgcgcttcatgatgatgcgagcagagaacttctttatccttcgaaggaagcctgtggaggggtatgatatcagctttctgatcaccaacttccacacagagcagatgtacaaacacaagttggtggactttgtgatccacttcatggaggagattgacaaggagatcagtgagatgaagctgtcagtcaatgcccgtgcccgcattgtggctgaagagttccttaagaatttttaaaccatctggctggatctcgtggccttccccctcagactacccatgtctccacgaaggcgtcctggagtcactccccgagcagcgcggcggcggcagggagttgggttggggtgggcatttgatgcgggaggtgggtggtgtgcttgctagctgggcaagaaagcagcagtggacctgccccaaggccacacgtgcctggtcaggctggcttctgatgttcagtcccctgggccgggacagattttttttaacgtcttgaaacttaaactctgtgcttgtaggatactgtaacctttttgtctttttttttttttttttttttaaacctccacctccagtggctgtgactggtcccagtgattatacgttattggttgctgtgggtctgggcgggcctggagccagaaggcgacttattttttctctcctatgccaccccaggtggggagggagggaggtttcagactccagtttctcccttgcccttttattcccaagcctccttggccccagtataagtgttgggaactctctgccagcttcctgagttctgcctaaagatggccccccagcactggttggggacaagggccaaattggtgaccaccagtcatgcctaggacctggggcccaaaagccgggcaacctctggctacaggggccattgggtgccctcccagttgagaggggccgctgtttcgccttgtccgtcagtgccagtgcctgtgccagaggtggcgaggtgagtcctccagagcttcctggccgggccctcctcctgcctgttctggctcctctgctcccacgctagctgtcccttttctgattctggtggatcctccctcccctaattaaagtctctttttgcccctttggggctgcat

SEQ ID NO: 358524 - DNA, 1438 bp, Homo sapiens
gggagtcagcgagggcgagcctactggagtttgccgggggtgggaagaagactgccactctccgcccctacctgagtgccgtgcgggccacattgcaggctgccctctgcctggagaacttctcctcccaggttgtggaacgacacaacaagccggaagtggaagtcaggagtagcaaagagctcctgttacaacctgtgaccatcagcaggaatgagaaggaaaaggttctgattgagggctccatcaactctgtccgggtcagcattgctgtgaaacaggctgatgagatcgagaagattttgtgccacaagttcatgcgcttcatgatgatgcgagcagagaacttctttatccttcgaaggaagcctgtggaggggtatgatatcagctttctgatcaccaacttccacacagagcagatgtacaaacacaagttggtggactttgtgatccacttcatggaggagattgacaaggagatcagtgagatgaagctgtcagtcaatgcccgtgcccgcattgtggctgaagagttccttaagaatttttaaaccatctggctggatctcgtggccttccccctcagactacccatgtctccacgaaggcgtcctggagtcactccccgagcagcgcggcggcggcagggagttgggttggggtgggcatttgatgcgggaggtgggtggtgtgcttgctagctgggcaagaaagcagcagtggacctgccccaaggccacacgtgcctggtcaggctggcttctgatgttcagtcccctgggccgggacagattttttttaacgtcttgaaacttaaactctgtgcttgtaggatactgtaacctttttgtctttttttttttttttttttttaaacctccacctccagtggctgtgactggtcccagtgattatacgttattggttgctgtgggtctgggcgggcctggagccagaaggcgacttattttttctctcctatgccaccccaggtggggagggagggaggtttcagactccagtttctcccttgcccttttattcccaagcctccttggccccagtataagtgttgggaactctctgccagcttcctgagttctgcctaaagatggccccccagcactggttggggacaagggccaaattggtgaccaccagtcatgcctaggacctggggcccaaaagccgggcaacctctggctacaggggccattgggtgccctcccagttgagaggggccgctgtttcgccttgtccgtcagtgccagtgcctgtgccagaggtggcgaggtgagtcctccagagcttcctggccgggccctcctcctgcctgttctggctcctctgctcccacgctagctgtcccttttctgattctggtggatcctccctcccctaattaaagtctctttttgcccctttggggctgcat

SEQ ID NO: 358525 - DNA, 1331 bp, Homo sapiens
aggcatcgcggggctggccacttccgtacttccgctttccggcccagccagcgcccgcgatggagtagcaaagagctcctgttacaacctgtgaccatcagcaggaatgagaaggaaaaggttctgattgagggctccatcaactctgtccgggtcagcattgctgtgaaacaggctgatgagatcgagaagattttgtgccacaagttcatgcgcttcatgatgatgcgagcagagaacttctttatccttcgaaggaagcctgtggaggggtatgatatcagctttctgatcaccaacttccacacagagcagatgtacaaacacaagttggtggactttgtgatccacttcatggaggagattgacaaggagatcagtgagatgaagctgtcagtcaatgcccgtgcccgcattgtggctgaagagttccttaagaatttttaaaccatctggctggatctcgtggccttccccctcagactacccatgtctccacgaaggcgtcctggagtcactccccgagcagcgcggcggcggcagggagttgggttggggtgggcatttgatgcgggaggtgggtggtgtgcttgctagctgggcaagaaagcagcagtggacctgccccaaggccacacgtgcctggtcaggctggcttctgatgttcagtcccctgggccgggacagattttttttaacgtcttgaaacttaaactctgtgcttgtaggatactgtaacctttttgtctttttttttttttttttttttaaacctccacctccagtggctgtgactggtcccagtgattatacgttattggttgctgtgggtctgggcgggcctggagccagaaggcgacttattttttctctcctatgccaccccaggtggggagggagggaggtttcagactccagtttctcccttgcccttttattcccaagcctccttggccccagtataagtgttgggaactctctgccagcttcctgagttctgcctaaagatggccccccagcactggttggggacaagggccaaattggtgaccaccagtcatgcctaggacctggggcccaaaagccgggcaacctctggctacaggggccattgggtgccctcccagttgagaggggccgctgtttcgccttgtccgtcagtgccagtgcctgtgccagaggtggcgaggtgagtcctccagagcttcctggccgggccctcctcctgcctgttctggctcctctgctcccacgctagctgtcccttttctgattctggtggatcctccctcccctaattaaagtctctttttgcccctttggggctgcat

SEQ ID NO: 358526 - DNA, 941 bp, Homo sapiens
ggcgagtgcaagcttgatgcgtgtggtcgaacttaggaggatccccctcactagactgcgcccgcgatgactgccactctccgcccctacctgagtgccgtgcgggccacattgcaggctgccctctgcctggagaacttctcctcccaggttgtggaacgacacaacaagccggaagtggaagtcaggagtagcaaagagctcctgttacaacctgtgaccatcagcaggaatgagaaggaaaaggttctgattgagggctccatcaactctgtccgggtcagcattgctgtgaaacaggctgatgagatcgagaagattttgtgccacaagttcatgcgcttcatgatgatgcgagcagagaacttctttatccttcgaaggaagcctgtggaggggtatgatatcagctttctgatcaccaacttccacacagagcagatgtacaaacacaagttggtggactttgtgatccacttcatggaggagattgacaaggagatcagtgagatgaagctgtcagtcaatgcccgtgcccgcattgtggctgaagagttccttaagaatttttaaaccatctggctggatctcgtggccttccccctcagactacccatgtctccacgaaggcgtcctggagtcactccccgagcagcgcggcggcggcagggagttgggttggggtgggcatttgatgcgggaggtgggtggtgtgcttgctagctgggcaagaaagcagcagtggacctgccccaaggccacacgtgcctggtcaggctggcttctgatgttcagtcccctgggccgggacagattttttttaacgtcttgaaacttaaactctgtgcttgtaggatactgtaacctttttgtctttttttttttttttaaacctcccctaattaaagtctctttatccctttggggctgcaaaaaaaaaa

SEQ ID NO: 358527 - DNA, 693 bp, Homo sapiens
ggcgagtgcaagcttgatgcgtgtggtcgaacttaggaggatccccctcactagactgcgcccgcgatgactgccactctccgcccctacctgagtgccgtgcgggccacattgcaggctgccctctgcctggagaacttctcctcccaggttgtggaacgacacaacaagccggaagtggaagtcaggagtagcaaagagctcctgttacaacctgtgaccatcagcaggaatgagaaggaaaaggttctgattgagggctccatcaactctgtccgggtcagcattgctgtgaaacaggctgatgagatcgagaagattttgtgccacaagttcatgcgcttcatgatgatgcgagcagagaacttctttatccttcgaaggaagcctgtggaggggtatgatatcagctttctgatcaccaacttccacacagagcagatgtacaaacacaagttggtggactttgtgatccacttcatggaggagattgacaaggagatcagtgagatgaagctgtcagtcaatgcccgtgcccgcattgtggctgaagagttccttaagaatgtttcccggtcctctggcgaggatcctccaaggcgtctcacatgaaccggctcagaaacgccaaaatctacgtggagagagctgtcaagcagaagaagatctttacaatccaaggctgctacccgg

SEQ ID NO: 358528 - DNA, 1435 bp, Homo sapiens
  misc_feature (14)..(14): n is a, c, g, or t
  misc_feature (22)..(22): n is a, c, g, or t
gctggtaccggtcngagtcgtnggatggccagccagcgcccgcgatgactgccactctccgcccctacctgagtgccgtgcgggccacattgcaggctgccctctgcctggagaacttctcctcccaggttgtggaacgacacaacaagccggaagtggaagtcaggagtagcaaagagctcctgttacaacctgtgaccatcagcaggaatgagaaggaaaaggttctgattgagggctccatcaactctgtccgggtcagcattgctgtgaaacaggctgatgagatcgagaagattttgtgccacaagttcatgcgcttcatgatgatgcgagcagagaacttctttatccttcgaaggaagcctgtggaggggtatgatatcagctttctgatcaccaacttccacacagagcagatgtacaaacacaagttggtggactttgtgatccacttcatggaggagattgacaaggagatcagtgagatgaagctgtcagtcaatgcccgtgcccgcattgtggctgaagagttccttaagaatttttaaaccatctggctggatctcgtggccttccccctcagactacccatgtctccacgaaggcgtcctggagtcactccccgagcagcgcggcggcggcagggagttgggttggggtgggcatttgatgcgggaggtgggtggtgtgcttgctagctgggcaagaaagcagcagtggacctgccccaaggccacacgtgcctggtcaggctggcttctgatgttcagtcccctgggccgggacagattttttttaacgtcttgaaacttaaactctgtgcttgtaggatactgtaacctttttgtctttttttttttttttttttttaaacctccacctccagtggctgtgactggtcccagtgattatacgttattggttgctgtgggtctgggcgggcctggagccagaaggcgacttattttttctctcctatgccaccccaggtggggagggagggaggtttcagactccagtttctcccttgcccttttattcccaagcctccttggccccagtataagtgttgggaactctctgccagcttcctgagttctgcctaaagatggccccccagcactggttggggacaagggccaaattggtgaccaccagtcatgcctaggacctggggcccaaaagccgggcaacctctggctacaggggccattgggtgccctcccagttgagaggggccgctgtttcgccttgtccgtcagtgccagtgcctgtgccagaggtggcgaggtgagtcctccagagcttcctggccgggccctcctcctgcctgttctggctcctctgctcccacgctagctgtcccttttctgattctggtggatcctccctcccctaattaaagtctctttttgcccctttggggctgcat

SEQ ID NO: 358529 - DNA, 1457 bp, Homo sapiens
ggcgagtgcaagcttgatgcgtgtggtcgaacttaggaggatccccctcactagactgcgcccgcgatgactgccactctccgcccctacctgagtgccgtgcgggccacattgcaggctgccctctgcctggagaacttctcctcccaggttgtggaacgacacaacaagccggaagtggaagtcaggagtagcaaagagctcctgttacaacctgtgaccatcagcaggaatgagaaggaaaaggttctgattgagggctccatcaactctgtccgggtcagcattgctgtgaaacaggctgatgagatcgagaagattttgtgccacaagttcatgcgcttcatgatgatgcgagcagagaacttctttatccttcgaaggaagcctgtggaggggtatgatatcagctttctgatcaccaacttccacacagagcagatgtacaaacacaagttggtggactttgtgatccacttcatggaggagattgacaaggagatcagtgagatgaagctgtcagtcaatgcccgtgcccgcattgtggctgaagagttccttaagaatttttaaaccatctggctggatctcgtggccttccccctcagactacccatgtctccacgaaggcgtcctggagtcactccccgagcagcgcggcggcggcagggagttgggttggggtgggcatttgatgcgggaggtgggtggtgtgcttgctagctgggcaagaaagcagcagtggacctgccccaaggccacacgtgcctggtcaggctggcttctgatgttcagtcccctgggccgggacagattttttttaacgtcttgaaacttaaactctgtgcttgtaggatactgtaacctttttgtctttttttttttttttttttttaaacctccacctccagtggctgtgactggtcccagtgattatacgttattggttgctgtgggtctgggcgggcctggagccagaaggcgacttattttttctctcctatgccaccccaggtggggagggagggaggtttcagactccagtttctcccttgcccttttattcccaagcctccttggccccagtataagtgttgggaactctctgccagcttcctgagttctgcctaaagatggccccccagcactggttggggacaagggccaaattggtgaccaccagtcatgcctaggacctggggcccaaaagccgggcaacctctggctacaggggccattgggtgccctcccagttgagaggggccgctgtttcgccttgtccgtcagtgccagtgcctgtgccagaggtggcgaggtgagtcctccagagcttcctggccgggccctcctcctgcctgttctggctcctctgctcccacgctagctgtcccttttctgattctggtggatcctccctcccctaattaaagtctctttttgcccctttggggctgcat

SEQ ID NO: 358530 - DNA, 1440 bp, Homo sapiens
taaaggcaggctgttacggcccggattttaggatcagccagcgcccgcgatgactgccactctccgcccctacctgagtgccgtgcgggccacattgcaggctgccctctgcctggagaacttctcctcccaggttgtggaacgacacaacaagccggaagtggaagtcaggagtagcaaagagctcctgttacaacctgtgaccatcagcaggaatgagaaggaaaaggttctgattgagggctccatcaactctgtccgggtcagcattgctgtgaaacaggctgatgagatcgagaagattttgtgccacaagttcatgcgcttcatgatgatgcgagcagagaacttctttatccttcgaaggaagcctgtggaggggtatgatatcagctttctgatcaccaacttccacacagagcagatgtacaaacacaagttggtggactttgtgatccacttcatggaggagattgacaaggagatcagtgagatgaagctgtcagtcaatgcccgtgcccgcattgtggctgaagagttccttaagaatttttaaaccatctggctggatctcgtggccttccccctcagactacccatgtctccacgaaggcgtcctggagtcactccccgagcagcgcggcggcggcagggagttgggttggggtgggcatttgatgcgggaggtgggtggtgtgcttgctagctgggcaagaaagcagcagtggacctgccccaaggccacacgtgcctggtcaggctggcttctgatgttcagtcccctgggccgggacagattttttttaacgtcttgaaacttaaactctgtgcttgtaggatactgtaacctttttgtctttttttttttttttttttttaaacctccacctccagtggctgtgactggtcccagtgattatacgttattggttgctgtgggtctgggcgggcctggagccagaaggcgacttattttttctctcctatgccaccccaggtggggagggagggaggtttcagactccagtttctcccttgcccttttattcccaagcctccttggccccagtataagtgttgggaactctctgccagcttcctgagttctgcctaaagatggccccccagcactggttggggacaagggccaaattggtgaccaccagtcatgcctaggacctggggcccaaaagccgggcaacctctggctacaggggccattgggtgccctcccagttgagaggggccgctgtttcgccttgtccgtcagtgccagtgcctgtgccagaggtggcgaggtgagtcctccagagcttcctggccgggccctcctcctgcctgttctggctcctctgctcccacgctagctgtcccttttctgattctggtggatcctccctcccctaattaaagtctctttttgcccctttggggctgcat

SEQ ID NO: 358531 - DNA, 1442 bp, Homo sapiens
ccacgcgtcgcggacgcgtgggtcgacccacgcgtgcgggcagcgcccgcgatgactgccactctccgcccctacctgagtgccgtgcgggccacattgcaggctgccctctgcctggagaacttctcctcccaggttgtggaacgacacaacaagccggaagtggaagtcaggagtagcaaagagctcctgttacaacctgtgaccatcagcaggaatgagaaggaaaaggttctgattgagggctccatcaactctgtccgggtcagcattgctgtgaaacaggctgatgagatcgagaagattttgtgccacaagttcatgcgcttcatgatgatgcgagcagagaacttctttatccttcgaaggaagcctgtggaggggtatgatatcagctttctgatcaccaacttccacacagagcagatgtacaaacacaagttggtggactttgtgatccacttcatggaggagattgacaaggagatcagtgagatgaagctgtcagtcaatgcccgtgcccgcattgtggctgaagagttccttaagaatttttaaaccatctggctggatctcgtggccttccccctcagactacccatgtctccacgaaggcgtcctggagtcactccccgagcagcgcggcggcggcagggagttgggttggggtgggcatttgatgcgggaggtgggtggtgtgcttgctagctgggcaagaaagcagcagtggacctgccccaaggccacacgtgcctggtcaggctggcttctgatgttcagtcccctgggccgggacagattttttttaacgtcttgaaacttaaactctgtgcttgtaggatactgtaacctttttgtctttttttttttttttttttttaaacctccacctccagtggctgtgactggtcccagtgattatacgttattggttgctgtgggtctgggcgggcctggagccagaaggcgacttattttttctctcctatgccaccccaggtggggagggagggaggtttcagactccagtttctcccttgcccttttattcccaagcctccttggccccagtataagtgttgggaactctctgccagcttcctgagttctgcctaaagatggccccccagcactggttggggacaagggccaaattggtgaccaccagtcatgcctaggacctggggcccaaaagccgggcaacctctggctacaggggccattgggtgccctcccagttgagaggggccgctgtttcgccttgtccgtcagtgccagtgcctgtgccagaggtggcgaggtgagtcctccagagcttcctggccgggccctcctcctgcctgttctggctcctctgctcccacgctagctgtcccttttctgattctggtggatcctccctcccctaattaaagtctctttttgcccctttggggctgcat

SEQ ID NO: 358532 - DNA, 1037 bp, Homo sapiens
ggcgagtgcaagcttgatgcgtgtggtcgaacttaggaggatccccctcactagactgcgcccgcgatgactgccactctccgcccctacctgagtgccgtgcgggccacattgcaggctgccctctgcctggagaacttctcctcccaggttgtggaacgacacaacaagccggaagtggaagtcaggagtagcaaagagctcctgttacaacctgtgaccatcagcaggaatgagaaggaaaaggttctgattgagggctccatcaactctgtccgggtcagcattgctgtgaaacaggctgatgagatcgagaagattttgtgccacaagttcatgcgcttcatgatgatgcgagcagagaacttctttatccttcgaaggaagcctgtggaggggtatgatatcagctttctgatcaccaacttccacacagagcagatgtacaaacacaagttggtggactttgtgatccacttcatggaggagattgacaaggagatcagtgagatgaagctgtcagtcaatgcccgtgcccgcattgtggctgaagagttccttaagaatttttaaaccatctggctggatctcgtggccttccccctcagactacccatgtctccacgaaggcgtcctggagtcactccccgagcagcgcggcggcggcagggagttgggttggggtgggcatttgatgcgggaggtgggtggtgtgcttgctagctgggcaagaaagcagcagtggacctgccccaaggccacacgtgcctggtcaggctggcttctgatgttcagtcccctgggccgggacagattttttttaacgtcttgaaacttaaactctgtgcttgtaggatactgtaacctttttgtctttttttttttttttttttttaaacctccacctccagtggctgtgactggtcccagtgattatacgttattggttgctgtgggtctgggcgggcctggagccagaaggcgacttattttttctcccctaattaaagtctctttttgcccctttggggctgcat

SEQ ID NO: 358533 - DNA, 1086 bp, Homo sapiens
cccctccctactgtcttcttcccaggggtatgatatcagctttctgatcaccaacttccacacagagcagatgtacaaacacaagttggtggactttgtgatccacttcatggaggagattgacaaggagatcagtgagatgaagctgtcagtcaatgcccgtgcccgcattgtggctgaagagttccttaagaatttttaaaccatctggctggatctcgtggccttccccctcagactacccatgtctccacgaaggcgtcctggagtcactccccgagcagcgcggcggcggcagggagttgggttggggtgggcatttgatgcgggaggtgggtggtgtgcttgctagctgggcaagaaagcagcagtggacctgccccaaggccacacgtgcctggtcaggctggcttctgatgttcagtcccctgggccgggacagattttttttaacgtcttgaaacttaaactctgtgcttgtaggatactgtaacctttttgtctttttttttttttttttttttaaacctccacctccagtggctgtgactggtcccagtgattatacgttattggttgctgtgggtctgggcgggcctggagccagaaggcgacttattttttctctcctatgccaccccaggtggggagggagggaggtttcagactccagtttctcccttgcccttttattcccaagcctccttggccccagtataagtgttgggaactctctgccagcttcctgagttctgcctaaagatggccccccagcactggttggggacaagggccaaattggtgaccaccagtcatgcctaggacctggggcccaaaagccgggcaacctctggctacaggggccattgggtgccctcccagttgagaggggccgctgtttcgccttgtccgtcagtgccagtgcctgtgccagaggtggcgaggtgagtcctccagagcttcctggccgggccctcctcctgcctgttctggctcctctgctcccacgctagctgtcccttttctgattctggtggatcctccctcccctaattaaagtctctttttgcccctttggggctgcat

SEQ ID NO: 358534 - DNA, 595 bp, Homo sapiens
ggcgagtgcaagcttgatgcgtgtggtcgaacttaggaggatccccctcactagactgcgcccgcgatgactgccactctccgcccctacctgagtgccgtgcgggccacattgcaggctgccctctgcctggagaacttctcctcccaggttgtggaacgacacaacaagccggaagtggaagtcaggagtagcaaagagctcctgttacaacctgtgaccatcagcaggaatgagaaggaaaaggttctgattgagggctccatcaactctgtccgggtcagcattgctgtgaaacaggctgatgagatcgagaagattttgtgccacaagttcatgcgcttcatgatgatgcgagcagagaacttctttatccttcgaaggaagcctgtggaggtgagaccctgtgacccatgagtttgcgatacccaggaccctgttacagaatggcctgggattgtttctagaaccagctactccagctgtttggcacccactgcctgaattgagagttggccttcatcttggagtgggagcaaagaggtatcacttgagcttagaggatcagctggagcgcagagatcactgaactgtt

SEQ ID NO: 358535 - DNA, 3584 bp, Homo sapiens
taaaaaagcatgccttcattccaaatccccagattccggctctcaggaatgtttcagggtaaaacttggggcaaagcaaggccgttatgatgggggtggatctaagaagccagcagcagggaggcgtggggtctgtgctctagcgttaaagggagggttctagactaacgagggcgggtcggcccgactaagtgacttaaactcccacctactcctggaataaggagtcaaagcccggataggcgcagtattctaccttgtaaatactgttatttgtatatactgtaaatgatgacatcggtgggcactaaccgagcccggggaaactgggaacaacctcaaaaccaaaaccagacacagcacaagcagcggccacaggccactgcagaacaaattagacttgcacagatgatttcggaccataatgatgctgactttgaggagaaggtgaaacaattgattgatattacaggcaagaaccaggatgaatgtgtgattgctttgcatgactgcaatggagatgtcaacagagctatcaatgttcttctggaaggaaacccagacacgcattcctgggagatggtcgggaagaagaagggagtctcaggccagaaggatggtggccagacggaatccaatgaggaaggcaaagaaaatcgagaccgggacagagactatagtcggcgacgtggtgggccaccaagacgggggagaggtgccagccgtggacgagagtttcgaggtcaggaaaatggattggatggcaccaagagtggagggccttctggaagaggaacagaaagaggcagaaggggccgtggccgaggcagaggtggctctggtaggcgaggaggaaggttttctgctcaaggaatgggaacctttaacccagctgattatgcagagccagccaatactgatgataactatggcaatagcagcggcaatacgtggaacaacactggccactttgaaccagatgatgggacgagtgcatggaggactgcaacagaggagtgggggactgaagattggaatgaagatctttctgagaccaagatcttcactgcctctaatgtgtcttcagtgcctctgcctgcggagaatgtgacaatcactgctggtcagagaattgaccttgctgttctgctggggaagacaccatctacaatggagaatgattcatctaatctggatccgtctcaggctccttctctggcccagcctctggtgttcagtaattcgaagcagactgccatatcacagcctgcttcagggaacacattttctcatcacagtatggtgagcatgttagggaaaggatttggtgatgtcggtgaagctaaaggcggcagtactacaggctcccagttcttggagcaattcaagactgcccaagccctggctcagttggcagctcagcattctcagtctggaagcaccaccacctcctcttgggacatgggctcgacgacacaatccccatcactggtgcagtatgatttgaagaacccaagtgattcagcagtgcacagcccctttacaaagcgccaggcttttaccccatcttcaaccatgatggaggtgttccttcaggagaagtcacctgcagtggctacctccacagctgcacctccacctccgtcttctcctctgccaagcaaatccacatcggctccacagatgtcgcctggatcttcagacaaccagtcctctagccctcagccggctcagcagaaactgaaacagcagaagaaaaaagcctccttgacttctaagattcctgctctggctgtggagatgcctggctcagcagatatctcagggctaaacctgcagtttggggcattgcagtttgggtcagagcctgtcctttctgattatgagtccacccccaccacgagcgcctcttcaagccaggctccaagtagcctgtataccagcacggccagtgaatcatcctctacaatttcatctaaccagagtcaggagtctggttatcagagcggcccaattcagtcgacaacctatacctcccaaaataatgctcagggccctctttatgaacagagatccacacagactcggcggtaccccagctccatctcttcatcaccccaaaaggacctgactcaggcaaagaatggcttcagttctgtgcaggccacgcagttacagaccacacaatctgttgaaggtgctacaggctctgcagtgaaatctgattcaccttccacttctagcatcccccctctcaatgaaacggtatctgcagcttccttactgacgacaaccaatcagcattcatcctccttgggtggcttgagccacagtgaggagattccaaatactaccaccacacaacacagcagcacgttatctacgcagcagaataccctttcatcatcaacatcttctgggcgcacttcgacatccactcttttgcacacaagtgtggagagtgaggcgaatctccattcttcctccagcactttttccaccacatccagcacagtctctgcacctcccccagtggtcagtgtctcctccagtctcaatagtggcagtagcctgggcctcagcctaggcagcaactccactgtcacagcctcgactcgaagctcagttgctacgacttcaggaaaagctcctcccaacctccctcctggggtcccgccgttgttgcctaatccgtatattatggctccagggctgttacatgcctacccgccacaagtatatggttatgatgacttgcagatgcttcagacaagatttccattggattactacagcatcccatttcccacacccactactccgctgactgggagggatggtagcctggccagcaacccttattctggtgacctcacaaagttcggccgtggggatgcctcctccccagccccggccacaaccttggcccaaccccaacagaaccagacgcagactcaccataccacgcagcagacattcctgaacccggcgctgcctcctggctacagttacaccagcctgccatactatacaggggtcccgggcctccccagcaccttccagtatgggcctgctgtgttccctgtggctcctacctcttccaagcagcatggtgtgaatgtcagtgtgaatgcatcggccacccctttccaacagccgagtggatatgggtctcatggatacaacactggaagaaaatatccacccccttacaagcatttctggacggctgagagctaatttggcccaaggctgggggctgtgttttgtgtgtgtgtataaatttgcactgaagtcttgtttcagaaaccagaccactgaggagagcctgctgagctgaggccatggcctgcgtggcttggggaaatgagttggtggataccttctgggcttttgaacttgcccctcccccatttccctctcccccatgtgtctgaccctgtcttacccatttcaagttcaagcggtgcagcaccttcgaagcatcaatgcacacacctgctgttgcttttgatttctggaaggcatgtagtttcaacttgtaacaaaaatatttgtagtcttcaataaactgtggtatttct

SEQ ID NO: 358536 - DNA, 570 bp, Homo sapiens
acctcatctcaggaataagggccaggtagctagctgagctaatcctcctgtctgtttcctcctcccccaggtgtttcagtcacctccagtaacacgggcgtgccagatatctcgggttctgtgtactccaaaacccaggtaggtgcctggctctggataaaagtggaaaagagatagacatagaggaggtggagttgcaatggtagaaataacagtggacaagaagaaccctaggagaggtggcaggaaacccatcctactttttctaaatgaaaggtcttctctagacttcacttcctctaagaagttaaaatttagccctctgagaaaaaaaacgagaaacgtaataggaaggtaaagcgtggcaaattgtttaacgtgtcatgtaatttactgtgcaactctcctggccccttttcctacctactccccaacctttttcataacttttcaagagaataagtatgagagtgacaggaaactagttcattccattctttgagtaaatctataacagtgggagtgggaaaggagagacctagtaacctaatgaagcatttgagtgatcca

SEQ ID NO: 358537 - DNA, 462 bp, Homo sapiens
  misc_feature (8)..(8): n is a, c, g, or t
aacttganccagatatgggacgagtgcatggaggactgcaacagaggagtgggggactgaagattggaatgaagatgtaggtattcccaggtcattcctcactaatgccttctatccctaagtgttgtttagggatagaaaatgggtatgtttctacccctcaaaattcacccttaagattctgacccaaaacttttacatccaaaatagtgttctgagccagaacatttcacatatgttatatgaaggagactgggcatgaacaggactctgtggaaccacactatggaaagggcaagtgcacttgtgtaagtccaatatctgattgtcggatttatcccaggaagagattggtggttgggtagggcaccagaagtggagttaggcaggtagtgcattgagtaacagctgctggtggtacatgactacttggtgcatttaagtatttgctataaggtcctg

SEQ ID NO: 358538 - DNA, 403 bp, Homo sapiens
cccaaattccccccccccccccctttttttttgggggaaaaaaaaaaaaaaaaaaaaatggttttttttttttcccaaaggccaaaaaaaaaaataaaggggttgtgggaaaaaaaaaaccccgcccccccccccaggattttttttggtgttttttaaaaaaacccccccttttttttgttttaaaaaaaaaaaaaaaaaaaaaaaagggggcccccccctttttttttttttttttttttttttttttttttttttttttttttttttttttttttttggttttttttttgttttttttttttttttgtactgtgtcctcaaatttaatggattaatgtgtcttgtatatataaaaagaaaacctctaccttcagcctctgcctattcttgctccgtctag

SEQ ID NO: 358539 - DNA, 3456 bp, Homo sapiens
tatatcacgtgacaggggcggcgcggcccggggtgtcagtgtggaggagactgaggtaaagttgggagcgcagcggcgttggcggcggcggcggcggcagcggcagcgcggcggggccggtattctaccttgtaaatactgttatttgtatatactgtaaatgatgacatcggtgggcactaaccgagcccggggaaactgggaacaacctcaaaaccaaaaccagacacagcacaagcagcggccacaggccactgcagaacaaattagacttgcacagatgatttcggaccataatgatgctgactttgaggagaaggtgaaacaattgattgatattacaggcaagaaccaggatgaatgtgtgattgctttgcatgactgcaatggagatgtcaacagagctatcaatgttcttctggaaggaaacccagacacgcattcctgggagatggtcgggaagaagaagggagtctcaggccagaaggatggtggccagacggaatccaatgaggaaggcaaagaaaatcgagaccgggacagagactatagtcggcgacgtggtgggccaccaagacgggggagaggtgccagccgtggacgagagtttcgaggtcaggaaaatggattggatggcaccaagagtggagggccttctggaagaggaacagaaagaggcagaaggggccgtggccgaggcagaggtggctctggtaggcgaggaggaaggttttctgctcaaggaatgggaacctttaacccagctgattatgcagagccagccaatactgatgataactatggcaatagcagcggcaatacgtggaacaacactggccactttgaaccagatgatgggacgagtgcatggaggactgcaacagaggagtgggggactgaagattggaatgaagatctttctgagaccaagatcttcactgcctctaatgtgtcttcagtgcctctgcctgcggagaatgtgacaatcactgctggtcagagaattgaccttgctgttctgctggggaagacaccatctacaatggagaatgattcatctaatctggatccgtctcaggctccttctctggcccagcctctggtgttcagtaattcgaagcagactgccatatcacagcctgcttcagggaacacattttctcatcacagtatggtgagcatgttagggaaaggatttggtgatgtcggtgaagctaaaggcggcagtactacaggctcccagttcttggagcaattcaagactgcccaagccctggctcagttggcagctcagcattctcagtctggaagcaccaccacctcctcttgggacatgggctcgacgacacaatccccatcactggtgcagtatgatttgaagaacccaagtgattcagcagtgcacagcccctttacaaagcgccaggcttttaccccatcttcaaccatgatggaggtgttccttcaggagaagtcacctgcagtggctacctccacagctgcacctccacctccgtcttctcctctgccaagcaaatccacatcggctccacagatgtcgcctggatcttcagacaaccagtcctctagccctcagccggctcagcagaaactgaaacagcagaagaaaaaagcctccttgacttctaagattcctgctctggctgtggagatgcctggctcagcagatatctcagggctaaacctgcagtttggggcattgcagtttgggtcagagcctgtcctttctgattatgagtccacccccaccacgagcgcctcttcaagccaggctccaagtagcctgtataccagcacggccagtgaatcatcctctacaatttcatctaaccagagtcaggagtctggttatcagagcggcccaattcagtcgacaacctatacctcccaaaataatgctcagggccctctttatgaacagagatccacacagactcggcggtaccccagctccatctcttcatcaccccaaaaggacctgactcaggcaaagaatggcttcagttctgtgcaggccacgcagttacagaccacacaatctgttgaaggtgctacaggctctgcagtgaaatctgattcaccttccacttctagcatcccccctctcaatgaaacggtatctgcagcttccttactgacgacaaccaatcagcattcatcctccttgggtggcttgagccacagtgaggagattccaaatactaccaccacacaacacagcagcacgttatctacgcagcagaataccctttcatcatcaacatcttctgggcgcacttcgacatccactcttttgcacacaagtgtggagagtgaggcgaatctccattcttcctccagcactttttccaccacatccagcacagtctctgcacctcccccagtggtcagtgtctcctccagtctcaatagtggcagtagcctgggcctcagcctaggcagcaactccactgtcacagcctcgactcgaagctcagttgctacgacttcaggaaaagctcctcccaacctccctcctggggtcccgccgttgttgcctaatccgtatattatggctccagggctgttacatgcctacccgccacaagtatatggttatgatgacttgcagatgcttcagacaagatttccattggattactacagcatcccatttcccacacccactactccgctgactgggagggatggtagcctggccagcaacccttattctggtgacctcacaaagttcggccgtggggatgcctcctccccagccccggccacaaccttggcccaaccccaacagaaccagacgcagactcaccataccacgcagcagacattcctgaacccggcgctgcctcctggctacagttacaccagcctgccatactatacaggggtcccgggcctccccagcaccttccagtatgggcctgctgtgttccctgtggctcctacctcttccaagcagcatggtgtgaatgtcagtgtgaatgcatcggccacccctttccaacagccgagtggatatgggtctcatggatacaacactggaagaaaatatccacccccttacaagcatttctggacggctgagagctaatttggcccaaggctgggggctgtgttttgtgtgtgtgtataaatttgcactgaagtcttgtttcagaaaccagaccactgaggagagcctgctgagctgaggccatggcctgcgtggcttggggaaatgagttggtggataccttctgggcttttgaacttgcccctcccccatttccctctcccccatgtgtctgaccctgtcttacccatttcaagttcaagcggtgcagcaccttcgaagcatcaatgcacacacctgctgttgcttttgatttctggaaggcatgtagtttcaacttgtaacaaaaatatttgtagtcttcaataaactgtggtatttct

SEQ ID NO: 358540 - DNA, 3455 bp, Homo sapiens
cgccgtgaaggaggcggggtggactcgcggagccggaaagaggtgtctcgtggcgaggcggcacgcgcacgcttgcgtgcgcgccccttttagcgtcacgcgctgagggacgcaggaagtattctaccttgtaaatactgttatttgtatatactgtaaatgatgacatcggtgggcactaaccgagcccggggaaactgggaacaacctcaaaaccaaaaccagacacagcacaagcagcggccacaggccactgcagaacaaattagacttgcacagatgatttcggaccataatgatgctgactttgaggagaaggtgaaacaattgattgatattacaggcaagaaccaggatgaatgtgtgattgctttgcatgactgcaatggagatgtcaacagagctatcaatgttcttctggaaggaaacccagacacgcattcctgggagatggtcgggaagaagaagggagtctcaggccagaaggatggtggccagacggaatccaatgaggaaggcaaagaaaatcgagaccgggacagagactatagtcggcgacgtggtgggccaccaagacgggggagaggtgccagccgtggacgagagtttcgaggtcaggaaaatggattggatggcaccaagagtggagggccttctggaagaggaacagaaagaggcagaaggggccgtggccgaggcagaggtggctctggtaggcgaggaggaaggttttctgctcaaggaatgggaacctttaacccagctgattatgcagagccagccaatactgatgataactatggcaatagcagcggcaatacgtggaacaacactggccactttgaaccagatgatgggacgagtgcatggaggactgcaacagaggagtgggggactgaagattggaatgaagatctttctgagaccaagatcttcactgcctctaatgtgtcttcagtgcctctgcctgcggagaatgtgacaatcactgctggtcagagaattgaccttgctgttctgctggggaagacaccatctacaatggagaatgattcatctaatctggatccgtctcaggctccttctctggcccagcctctggtgttcagtaattcgaagcagactgccatatcacagcctgcttcagggaacacattttctcatcacagtatggtgagcatgttagggaaaggatttggtgatgtcggtgaagctaaaggcggcagtactacaggctcccagttcttggagcaattcaagactgcccaagccctggctcagttggcagctcagcattctcagtctggaagcaccaccacctcctcttgggacatgggctcgacgacacaatccccatcactggtgcagtatgatttgaagaacccaagtgattcagcagtgcacagcccctttacaaagcgccaggcttttaccccatcttcaaccatgatggaggtgttccttcaggagaagtcacctgcagtggctacctccacagctgcacctccacctccgtcttctcctctgccaagcaaatccacatcggctccacagatgtcgcctggatcttcagacaaccagtcctctagccctcagccggctcagcagaaactgaaacagcagaagaaaaaagcctccttgacttctaagattcctgctctggctgtggagatgcctggctcagcagatatctcagggctaaacctgcagtttggggcattgcagtttgggtcagagcctgtcctttctgattatgagtccacccccaccacgagcgcctcttcaagccaggctccaagtagcctgtataccagcacggccagtgaatcatcctctacaatttcatctaaccagagtcaggagtctggttatcagagcggcccaattcagtcgacaacctatacctcccaaaataatgctcagggccctctttatgaacagagatccacacagactcggcggtaccccagctccatctcttcatcaccccaaaaggacctgactcaggcaaagaatggcttcagttctgtgcaggccacgcagttacagaccacacaatctgttgaaggtgctacaggctctgcagtgaaatctgattcaccttccacttctagcatcccccctctcaatgaaacggtatctgcagcttccttactgacgacaaccaatcagcattcatcctccttgggtggcttgagccacagtgaggagattccaaatactaccaccacacaacacagcagcacgttatctacgcagcagaataccctttcatcatcaacatcttctgggcgcacttcgacatccactcttttgcacacaagtgtggagagtgaggcgaatctccattcttcctccagcactttttccaccacatccagcacagtctctgcacctcccccagtggtcagtgtctcctccagtctcaatagtggcagtagcctgggcctcagcctaggcagcaactccactgtcacagcctcgactcgaagctcagttgctacgacttcaggaaaagctcctcccaacctccctcctggggtcccgccgttgttgcctaatccgtatattatggctccagggctgttacatgcctacccgccacaagtatatggttatgatgacttgcagatgcttcagacaagatttccattggattactacagcatcccatttcccacacccactactccgctgactgggagggatggtagcctggccagcaacccttattctggtgacctcacaaagttcggccgtggggatgcctcctccccagccccggccacaaccttggcccaaccccaacagaaccagacgcagactcaccataccacgcagcagacattcctgaacccggcgctgcctcctggctacagttacaccagcctgccatactatacaggggtcccgggcctccccagcaccttccagtatgggcctgctgtgttccctgtggctcctacctcttccaagcagcatggtgtgaatgtcagtgtgaatgcatcggccacccctttccaacagccgagtggatatgggtctcatggatacaacactggaagaaaatatccacccccttacaagcatttctggacggctgagagctaatttggcccaaggctgggggctgtgttttgtgtgtgtgtataaatttgcactgaagtcttgtttcagaaaccagaccactgaggagagcctgctgagctgaggccatggcctgcgtggcttggggaaatgagttggtggataccttctgggcttttgaacttgcccctcccccatttccctctcccccatgtgtctgaccctgtcttacccatttcaagttcaagcggtgcagcaccttcgaagcatcaatgcacacacctgctgttgcttttgatttctggaaggcatgtagtttcaacttgtaacaaaaatatttgtagtcttcaataaactgtggtatttct

SEQ ID NO: 358541 - DNA, 4009 bp, Homo sapiens
tatatcacgtgacaggggcggcgcggcccggggtgtcagtgtggaggagactgaggtaaagttgggagcgcagcggcgttggcggcggcggcggcggcagcggcagcgcggcggggccggtattctaccttgtaaatactgttatttgtatatactgtaaatgatgacatcggtgggcactaaccgagcccggggaaactgggaacaacctcaaaaccaaaaccagacacagcacaagcagcggccacaggccactgcagaacaaattagacttgcacagatgatttcggaccataatgatgctgactttgaggagaaggtgaaacaattgattgatattacaggcaagaaccaggatgaatgtgtgattgctttgcatgactgcaatggagatgtcaacagagctatcaatgttcttctggaaggaaacccagacacgcattcctgggagatggtcgggaagaagaagggagtctcaggccagaaggatggtggccagacggaatccaatgaggaaggcaaagaaaatcgagaccgggacagagactatagtcggcgacgtggtgggccaccaagacgggggagaggtgccagccgtggacgagagtttcgaggtcaggaaaatggattggatggcaccaagagtggagggccttctggaagaggaacagaaagaggcagaaggggccgtggccgaggcagaggtggctctggtaggcgaggaggaaggttttctgctcaaggaatgggaacctttaacccagctgattatgcagagccagccaatactgatgataactatggcaatagcagcggcaatacgtggaacaacactggccactttgaaccagatgatgggacgagtgcatggaggactgcaacagaggagtgggggactgaagattggaatgaagatctttctgagaccaagatcttcactgcctctaatgtgtcttcagtgcctctgcctgcggagaatgtgacaatcactgctggtcagagaattgaccttgctgttctgctggggaagacaccatctacaatggagaatgattcatctaatctggatccgtctcaggctccttctctggcccagcctctggtgttcagtaattcgaagcagactgccatatcacagcctgcttcagggaacacattttctcatcacagtatggtgagcatgttagggaaaggatttggtgatgtcggtgaagctaaaggcggcagtactacaggctcccagttcttggagcaattcaagactgcccaagccctggctcagttggcagctcagcattctcagtctggaagcaccaccacctcctcttgggacatgggctcgacgacacaatccccatcactggtgcagtatgatttgaagaacccaagtgattcagcagtgcacagcccctttacaaagcgccaggcttttaccccatcttcaaccatgatggaggtgttccttcaggagaagtcacctgcagtggctacctccacagctgcacctccacctccgtcttctcctctgccaagcaaatccacatcggctccacagatgtcgcctggatcttcagacaaccagtcctctagccctcagccggctcagcagaaactgaaacagcagaagaaaaaagcctccttgacttctaagattcctgctctggctgtggagatgcctggctcagcagatatctcagggctaaacctgcagtttggggcattgcagtttgggtcagagcctgtcctttctgattatgagtccacccccaccacgagcgcctcttcaagccaggctccaagtagcctgtataccagcacggccagtgaatcatcctctacaatttcatctaaccagagtcaggagtctggttatcagagcggcccaattcagtcgacaacctatacctcccaaaataatgctcagggccctctttatgaacagagatccacacagactcggcggtaccccagctccatctcttcatcaccccaaaaggacctgactcaggcaaagaatggcttcagttctgtgcaggccacgcagttacagaccacacaatctgttgaaggtgctacaggctctgcagtgaaatctgattcaccttccacttctagcatcccccctctcaatgaaacggtatctgcagcttccttactgacgacaaccaatcagcattcatcctccttgggtggcttgagccacagtgaggagattccaaatactaccaccacacaacacagcagcacgttatctacgcagcagaataccctttcatcatcaacatcttctgggcgcacttcgacatccactcttttgcacacaagtgtggagagtgaggcgaatctccattcttcctccagcactttttccaccacatccagcacagtctctgcacctcccccagtggtcagtgtctcctccagtctcaatagtggcagtagcctgggcctcagcctaggcagcaactccactgtcacagcctcgactcgaagctcagttgctacgacttcaggaaaagctcctcccaacctccctcctggggtcccgccgttgttgcctaatccgtatattatggctccagggctgttacatgcctacccgccacaagtatatggttatgatgacttgcagatgcttcagacaagatttccattggattactacagcatcccatttcccacacccactactccgctgactgggagggatggtagcctggccagcaacccttattctggtgacctcacaaagttcggccgtggggatgcctcctccccagccccggccacaaccttggcccaaccccaacagaaccagacgcagactcaccataccacgcagcagacattcctgaacccggcgctgcctcctggctacagttacaccagcctgccatactatacaggggtcccgggcctccccagcaccttccagtatgggcctgctgtgttccctgtggctcctacctcttccaagcagcatggtgtgaatgtcagtgtgaatgcatcggccacccctttccaacagccgagtggatatgggtctcatggatacaacactggtgtttcagtcacctccagtaacacgggcgtgccagatatctcgggttctgtgtactccaaaacccagcagtcctttgagaaacaaggttttcattccggtactcctgctgcttccttcaacttgccttcagccctaggaagtgggggccccatcaatccggccacagctgctgcctacccacctgccccctttatgcacattctgaccccccatcagcagccgcattctcagatccttcaccatcacctgcagcaggatggccagacgggcagcgggcaacgtagccagaccagctccatcccgcagaagccccagaccaacaagtctgcctacaacagctacagctggggggccaactgaggccctgaccctcttctcccggtcccatcttctgagagggcttctcagcctggaaactatggaaacagcatcaaagagaaaggaatgtggggggtttccgctgccccccacccccagcggcccaccccatgcctcagcttcatgtctgtcccattcctataccatccccaccctgttgtatgtattataggatttgtattttctccttttttttcccccttccattccttctcccctcttgcattcaagattatgaaactttgctatgggccctgcacttcctttgcttcctcctgttcaccctggtggtgtacggatgaggcggggaggtgggacccccaaacatatatcagcccaacagccctaagtctccttctttattattaggaaaacaacaacaacaacaaacaaaaaaatggcgtcatgaatatgaacagcattgtcagatgaattagttgaagtggttttttttttgttttttttttttttttgtactgtgtcctcaaatttaatggattaatgtgtcttgtatatataaaaagaaaacctctaccttcagcctctgcctattcttgctccgtctag

SEQ ID NO: 358542 - DNA, 3528 bp, Homo sapiens
tatatcacgtgacaggggcggcgcggcccggggtgtcagtgtggaggagactgaggtaaagttgggagcgcagcggcgttggcggcggcggcggcggcagcggcagcgcggcggggccggtattctaccttgtaaatactgttatttgtatatactgtaaatgatgacatcggtgggcactaaccgagcccggggaaactgggaacaacctcaaaaccaaaaccagacacagcacaagcagcggccacaggccactgcagaacaaattagacttgcacagatgatttcggaccataatgatgctgactttgaggagaaggtgaaacaattgattgatattacaggcaagaaccaggatgaatgtgtgattgctttgcatgactgcaatggagatgtcaacagagctatcaatgttcttctggaaggaaacccagacacgcattcctgggagatggtcgggaagaagaagggagtctcaggccagaaggatggtggccagacggaatccaatgaggaaggcaaagaaaatcgagaccgggacagagactatagtcggcgacgtggtgggccaccaagacgggggagaggtgccagccgtggacgagagtttcgaggtcaggaaaatggattggatggcaccaagagtggagggccttctggaagaggaacagaaagaggcagaaggggccgtggccgaggcagaggtggctctggtaggcgaggaggaaggttttctgctcaaggaatgggaacctttaacccagctgattatgcagagccagccaatactgatgataactatggcaatagcagcggcaatacgtggaacaacactggccactttgaaccagatgatgggacgagtgcatggaggactgcaacagaggagtgggggactgaagattggaatgaagatctttctgagaccaagatcttcactgcctctaatgtgtcttcagtgcctctgcctgcggagaatgtgacaatcactgctggtcagagaattgaccttgctgttctgctggggaagacaccatctacaatggagaatgattcatctaatctggatccgtctcaggctccttctctggcccagcctctggtgttcagtaattcgaagcagactgccatatcacagcctgcttcagggaacacattttctcatcacagtatggtgagcatgttagggaaaggatttggtgatgtcggtgaagctaaaggcggcagtactacaggctcccagttcttggagcaattcatagggacatggcgcaagtccctgtgcatcaatgtgggtcagcctctagcattcttctagtcatggacagcatcctacacaatcgcatcctcgttgtggtacatggtgctctgtacgagaacgaatcacccaatcacgtggttgcatcgtatgattgtggataggaatcgcaagagtagattcgaggcgaggtaagtccaccagcaccactttacaaaaagcagcacaagagcatttatacccgctatcttcgaacgcattgctgtgacggtgttccttcaggagaagtcacctgcagtggctacctccacagctgcacctccacctccgtcttctcctctgccaagcaaatccacatcggctccacagatgtcgcctggatcttcagacaaccagtcctctagccctcagccggctcagcagaaactgaaacagcagaagaaaaaagcctccttgacttctaagattcctgctctggctgtggagatgcctggctcagcagatatctcagggctaaacctgcagtttggggcattgcagtttgggtcagagcctgtcctttctgattatgagtccacccccaccacgagcgcctcttcaagccaggctccaagtagcctgtataccagcacggccagtgaatcatcctctacaatttcatctaaccagagtcaggagtctggttatcagagcggcccaattcagtcgacaacctatacctcccaaaataatgctcagggccctctttatgaacagagatccacacagactcggcggtaccccagctccatctcttcatcaccccaaaaggacctgactcaggcaaagaatggcttcagttctgtgcaggccacgcagttacagaccacacaatctgttgaaggtgctacaggctctgcagtgaaatctgattcaccttccacttctagcatcccccctctcaatgaaacggtatctgcagcttccttactgacgacaaccaatcagcattcatcctccttgggtggcttgagccacagtgaggagattccaaatactaccaccacacaacacagcagcacgttatctacgcagcagaataccctttcatcatcaacatcttctgggcgcacttcgacatccactcttttgcacacaagtgtggagagtgaggcgaatctccattcttcctccagcactttttccaccacatccagcacagtctctgcacctcccccagtggtcagtgtctcctccagtctcaatagtggcagtagcctgggcctcagcctaggcagcaactccactgtcacagcctcgactcgaagctcagttgctacgacttcaggaaaagctcctcccaacctccctcctggggtcccgccgttgttgcctaatccgtatattatggctccagggctgttacatgcctacccgccacaagtatatggttatgatgacttgcagatgcttcagacaagatttccattggattactacagcatcccatttcccacacccactactccgctgactgggagggatggtagcctggccagcaacccttattctggtgacctcacaaagttcggccgtggggatgcctcctccccagccccggccacaaccttggcccaaccccaacagaaccagacgcagactcaccataccacgcagcagacattcctgaacccggcgctgcctcctggctacagttacaccagcctgccatactatacaggggtcccgggcctccccagcaccttccagtatgggcctgctgtgttccctgtggctcctacctcttccaagcagcatggtgtgaatgtcagtgtgaatgcatcggccacccctttccaacagccgagtggatatgggtctcatggatacaacactggaagaaaatatccacccccttacaagcatttctggacggctgagagctaatttggcccaaggctgggggctgtgttttgtgtgtgtgtataaatttgcactgaagtcttgtttcagaaaccagaccactgaggagagcctgctgagctgaggccatggcctgcgtggcttggggaaatgagttggtggataccttctgggcttttgaacttgcccctcccccatttccctctcccccatgtgtctgaccctgtcttacccatttcaagttcaagcggtgcagcaccttcgaagcatcaatgcacacacctgctgttgcttttgatttctggaaggcatgtagtttcaacttgtaacaaaaatatttgtagtcttcaataaactgtggtatttct

SEQ ID NO: 358543 - DNA, 3962 bp, Homo sapiens
  misc_feature (3961)..(3962): n is a, c, g, or t
tatatcacgtgacaggggcggcgcggcccggggtgtcagtgtggaggagactgaggtaaagttgggagcgcagcggcgttggcggcggcggcggcggcagcggcagcgcggcggggccggtattctaccttgtaaatactgttatttgtatatactgtaaatgatgacatcggtgggcactaaccgagcccggggaaactgggaacaacctcaaaaccaaaaccagacacagcacaagcagcggccacaggccactgcagaacaaattagacttgcacagatgatttcggaccataatgatgctgactttgaggagaaggtgaaacaattgattgatattacaggcaagaaccaggatgaatgtgtgattgctttgcatgactgcaatggagatgtcaacagagctatcaatgttcttctggaaggaaacccagacacgcattcctgggagatggtcgggaagaagaagggagtctcaggccagaaggatggtggccagacggaatccaatgaggaaggcaaagaaaatcgagaccgggacagagactatagtcggcgacgtggtgggccaccaagacgggggagaggtgccagccgtggacgagagtttcgaggtcaggaaaatggattggatggcaccaagagtggagggccttctggaagaggaacagaaagaggcagaaggggccgtggccgaggcagaggtggctctggtaggcgaggaggaaggttttctgctcaaggaatgggaacctttaacccagctgattatgcagagccagccaatactgatgataactatggcaatagcagcggcaatacgtggaacaacactggccactttgaaccagatgatgggacgagtgcatggaggactgcaacagaggagtgggggactgaagattggaatgaagatctttctgagaccaagatcttcactgcctctaatgtgtcttcagtgcctctgcctgcggagaatgtgacaatcactgctggtcagagaattgaccttgctgttctgctggggaagacaccatctacaatggagaatgattcatctaatctggatccgtctcaggctccttctctggcccagcctctggtgttcagtaattcgaagcagactgccatatcacagcctgcttcagggaacacattttctcatcacagtatggtgagcatgttagggaaaggatttggtgatgtcggtgaagctaaaggcggcagtactacaggctcccagttcttggagcaattcaagactgcccaagccctggctcagttggcagctcagcattctcagtctggaagcaccaccacctcctcttgggacatgggctcgacgacacaatccccatcactggtgcagtatgatttgaagaacccaagtgattcagcagtgcacagcccctttacaaagcgccaggcttttaccccatcttcaaccatgatggaggtgttccttcaggagaagtcacctgcagtggctacctccacagctgcacctccacctccgtcttctcctctgccaagcaaatccacatcggctccacagatgtcgcctggatcttcagacaaccagtcctctagccctcagccggctcagcagaaactgaaacagcagaagaaaaaagcctccttgacttctaagattcctgctctggctgtggagatgcctggctcagcagatatctcagggctaaacctgcagtttggggcattgcagtttgggtcagagcctgtcctttctgattatgagtccacccccaccacgagcgcctcttcaagccaggctccaagtagcctgtataccagcacggccagtgaatcatcctctacaatttcatctaaccagagtcaggagtctggttatcagagcggcccaattcagtcgacaacctatacctcccaaaataatgctcagggccctctttatgaacagagatccacacagactcggcggtaccccagctccatctcttcatcaccccaaaaggacctgactcaggcaaagaatggcttcagttctgtgcaggccacgcagttacagaccacacaatctgttgaaggtgctacaggctctgcagtgaaatctgattcaccttccacttctagcatcccccctctcaatgaaacggtatctgcagcttccttactgacgacaaccaatcagcattcatcctccttgggtggcttgagccacagtgaggagattccaaatactaccaccacacaacacagcagcacgttatctacgcagcagaataccctttcatcatcaacatcttctgggcgcacttcgacatccactcttttgcacacaagtgtggagagtgaggcgaatctccattcttcctccagcactttttccaccacatccagcacagtctctgcacctcccccagtggtcagtgtctcctccagtctcaatagtggcagtagcctgggcctcagcctaggcagcaactccactgtcacagcctcgactcgaagctcagttgctacgacttcaggaaaagctcctcccaacctccctcctggggtcccgccgttgttgcctaatccgtatattatggctccagggctgttacatgcctacccgccacaagtatatggttatgatgacttgcagatgcttcagacaagatttccattggattactacagcatcccatttcccacacccactactccgctgactgggagggatggtagcctggccagcaacccttattctggtgacctcacaaagttcggccgtggggatgcctcctccccagccccggccacaaccttggcccaaccccaacagaaccagacgcagactcaccataccacgcagcagacattcctgaacccggcgctgcctcctggctacagttacaccagcctgccatactatacaggggtcccgggcctccccagcaccttccagtatgggcctgctgtgttccctgtggctcctacctcttccaagcagcatggtgtgaatgtcagtgtgaatgcatcggccacccctttccaacagccgagtggatatgggtctcatggatacaacactggtgtttcagtcacctccagtaacacgggcgtgccagatatctcgggttctgtgtactccaaaacccagcagtcctttgagaaacaaggttttcattccggtactcctgctgcttccttcaacttgccttcagccctaggaagtgggggccccatcaatccggccacagctgctgcctacccacctgccccctttatgcacattctgaccccccatcagcagccgcattctcagatccttcaccatcacctgcagcaggatggccaggacatcctcaatttcgtcgatgaccagcttggtgaataagtattactgtaccaactgggcctcctctagcaggcccctgaaggcagtggaataaaatgaaatcttcgccctttaagaactcctgaccttaatgtggtagtagtatcttgtccttgaggggatttccttcccctcacccctaagactttcacaacctggtgactggaaagaaccaccacaaatcttcatttcctccagaaactgctacatctacagccgatttcaggcagtaaagggagagggatagaggagattgggtggaaaatggagaggatcaagaaggagctgagaccatttcaaagaaaaaaaatgctttatagagttttaagtatgacttagatgggtccaggcaaataaactaaaaagaagtgaaggcaacatgtatcgtctggcagaactaaatcttggagtggggtgagggatgaaagactacatattgggtacagtgtacactgctcgggtgatgggtgcgctaaagtcgcagaaatcactaaagaactcatccatgtaaccaaacaccacctgtaccccaaaaacgaaataaaaaaacaaaaccttggggcccattccccctaggaatggactactgtaaann

SEQ ID NO: 358544 - DNA, 4643 bp, Homo sapiens
  misc_feature (4642)..(4643): n is a, c, g, or t
tatatcacgtgacaggggcggcgcggcccggggtgtcagtgtggaggagactgaggtaaagttgggagcgcagcggcgttggcggcggcggcggcggcagcggcagcgcggcggggccggtattctaccttgtaaatactgttatttgtatatactgtaaatgatgacatcggtgggcactaaccgagcccggggaaactgggaacaacctcaaaaccaaaaccagacacagcacaagcagcggccacaggccactgcagaacaaattagacttgcacagatgatttcggaccataatgatgctgactttgaggagaaggtgaaacaattgattgatattacaggcaagaaccaggatgaatgtgtgattgctttgcatgactgcaatggagatgtcaacagagctatcaatgttcttctggaaggaaacccagacacgcattcctgggagatggtcgggaagaagaagggagtctcaggccagaaggatggtggccagacggaatccaatgaggaaggcaaagaaaatcgagaccgggacagagactatagtcggcgacgtggtgggccaccaagacgggggagaggtgccagccgtggacgagagtttcgaggtcaggaaaatggattggatggcaccaagagtggagggccttctggaagaggaacagaaagaggcagaaggggccgtggccgaggcagaggtggctctggtaggcgaggaggaaggttttctgctcaaggaatgggaacctttaacccagctgattatgcagagccagccaatactgatgataactatggcaatagcagcggcaatacgtggaacaacactggccactttgaaccagatgatgggacgagtgcatggaggactgcaacagaggagtgggggactgaagattggaatgaagatctttctgagaccaagatcttcactgcctctaatgtgtcttcagtgcctctgcctgcggagaatgtgacaatcactgctggtcagagaattgaccttgctgttctgctggggaagacaccatctacaatggagaatgattcatctaatctggatccgtctcaggctccttctctggcccagcctctggtgttcagtaattcgaagcagactgccatatcacagcctgcttcagggaacacattttctcatcacagtatggtgagcatgttagggaaaggatttggtgatgtcggtgaagctaaaggcggcagtactacaggctcccagttcttggagcaattcaagactgcccaagccctggctcagttggcagctcagcattctcagtctggaagcaccaccacctcctcttgggacatgggctcgacgacacaatccccatcactggtgcagtatgatttgaagaacccaagtgattcagcagtgcacagcccctttacaaagcgccaggcttttaccccatcttcaaccatgatggaggtgttccttcaggagaagtcacctgcagtggctacctccacagctgcacctccacctccgtcttctcctctgccaagcaaatccacatcggctccacagatgtcgcctggatcttcagacaaccagtcctctagccctcagccggctcagcagaaactgaaacagcagaagaaaaaagcctccttgacttctaagattcctgctctggctgtggagatgcctggctcagcagatatctcagggctaaacctgcagtttggggcattgcagtttgggtcagagcctgtcctttctgattatgagtccacccccaccacgagcgcctcttcaagccaggctccaagtagcctgtataccagcacggccagtgaatcatcctctacaatttcatctaaccagagtcaggagtctggttatcagagcggcccaattcagtcgacaacctatacctcccaaaataatgctcagggccctctttatgaacagagatccacacagactcggcggtaccccagctccatctcttcatcaccccaaaaggacctgactcaggcaaagaatggcttcagttctgtgcaggccacgcagttacagaccacacaatctgttgaaggtgctacaggctctgcagtgaaatctgattcaccttccacttctagcatcccccctctcaatgaaacggtatctgcagcttccttactgacgacaaccaatcagcattcatcctccttgggtggcttgagccacagtgaggagattccaaatactaccaccacacaacacagcagcacgttatctacgcagcagaataccctttcatcatcaacatcttctgggcgcacttcgacatccactcttttgcacacaagtgtggagagtgaggcgaatctccattcttcctccagcactttttccaccacatccagcacagtctctgcacctcccccagtggtcagtgtctcctccagtctcaatagtggcagtagcctgggcctcagcctaggcagcaactccactgtcacagcctcgactcgaagctcagttgctacgacttcaggaaaagctcctcccaacctccctcctggggtcccgccgttgttgcctaatccgtatattatggctccagggctgttacatgcctacccgccacaagtatatggttatgatgacttgcagatgcttcagacaagatttccattggattactacagcatcccatttcccacacccactactccgctgactgggagggatggtagcctggccagcaacccttattctggtgacctcacaaagttcggccgtggggatgcctcctccccagccccggccacaaccttggcccaaccccaacagaaccagacgcagactcaccataccacgcagcagacattcctgaacccggcgctgcctcctggctacagttacaccagcctgccatactatacaggggtcccgggcctccccagcaccttccagtatgggcctgctgtgttccctgtggctcctacctcttccaagcagcatggtgtgaatgtcagtgtgaatgcatcggccacccctttccaacagccgagtggatatgggtctcatggatacaacactggtgtttcagtcacctccagtaacacgggcgtgccagatatctcgggttctgtgtactccaaaacccagcagtcctttgagaaacaaggttttcattccggtactcctgctgcttccttcaacttgccttcagccctaggaagtgggggccccatcaatccggccacagctgctgcctacccacctgccccctttatgcacattctgaccccccatcagcagccgcattctcagatccttcaccatcacctgcagcaggatggccagacgggcagcgggcaacgtagccagaccagctccatcccgcagaagccccagaccaacaagtctgcctacaacagctacagctggggggccaactgaggccctgaccctcttctcccggtcccatcttctgagagggcttctcagcctggaaactatggaaacagcatcaaagagaaaggaatgtggggggtttccgctgccccccacccccagcggcccaccccatgcctcagcttcatgtctgtcccattcctataccatccccaccctgttgtatgtattataggatttgtattttctccttttttttcccccttccattccttctcccctcttgcattcaagattatgaaactttgctatgggccctgcacttcctttgcttcctcctgttcaccctggtggtgtacggatgaggcggggaggtgggacccccaaacatatatcagcccaacagccctaagtctccttctttattattaggaaaacaacaacaacaacaaacaaaaaaatggcgtcatgaatatgaacagcattgtcagatgaattagttgaagtggttttttttttgttttttttttttttttgtactgtgtcctcaaatttaatggattaatgtgtcttgtatatataaaaagaaaacctctaccttcagcctctgcctattcttgctccgtctaggacatcctcaatttcgtcgatgaccagcttggtgaataagtattactgtaccaactgggcctcctctagcaggcccctgaaggcagtggaataaaatgaaatcttcgccctttaagaactcctgaccttaatgtggtagtagtatcttgtccttgaggggatttccttcccctcacccctaagactttcacaacctggtgactggaaagaaccaccacaaatcttcatttcctccagaaactgctacatctacagccgatttcaggcagtaaagggagagggatagaggagattgggtggaaaatggagaggatcaagaaggagctgagaccatttcaaagaaaaaaaatgctttatagagttttaagtatgacttagatgggtccaggcaaataaactaaaaagaagtgaaggcaacatgtatcgtctggcagaactaaatcttggagtggggtgagggatgaaagactacatattgggtacagtgtacactgctcgggtgatgggtgcgctaaagtcgcagaaatcactaaagaactcatccatgtaaccaaacaccacctgtaccccaaaaacgaaataaaaaaacaaaaccttggggcccattccccctaggaatggactactgtaaann

SEQ ID NO: 358545 - DNA, 1970 bp, Homo sapiens
tagccttggaagtgtgccgctgtttcaaagtcttctcctctgccaagcaaatccacatcggctccacagatgtcgcctggatcttcagacaaccagtcctctagccctcagccggctcagcagaaactgaaacagcagaagaaaaaagcctccttgacttctaagattcctgctctggctgtggagatgcctggctcagcagatatctcagggctaaacctgcagtttggggcattgcagtttgggtcagagcctgtcctttctgattatgagtccacccccaccacgagcgcctcttcaagccaggctccaagtagcctgtataccagcacggccagtgaatcatcctctacaatttcatctaaccagagtcaggagtctggttatcagagcggcccaattcagtcgacaacctatacctcccaaaataatgctcagggccctctttatgaacagagatccacacagactcggcggtaccccagctccatctcttcatcaccccaaaaggacctgactcaggcaaagaatggcttcagttctgtgcaggccacgcagttacagaccacacaatctgttgaaggtgctacaggctctgcagtgaaatctgattcaccttccacttctagcatcccccctctcaatgaaacggtatctgcagcttccttactgacgacaaccaatcagcattcatcctccttgggtggcttgagccacagtgaggagattccaaatactaccaccacacaacacagcagcacgttatctacgcagcagaataccctttcatcatcaacatcttctgggcgcacttcgacatccactcttttgcacacaagtgtggagagtgaggcgaatctccattcttcctccagcactttttccaccacatccagcacagtctctgcacctcccccagtggtcagtgtctcctccagtctcaatagtggcagtagcctgggcctcagcctaggcagcaactccactgtcacagcctcgactcgaagctcagttgctacgacttcaggaaaagctcctcccaacctccctcctggggtcccgccgttgttgcctaatccgtatattatggctccagggctgttacatgcctacccgccacaagtatatggttatgatgacttgcagatgcttcagacaagatttccattggattactacagcatcccatttcccacacccactactccgctgactgggagggatggtagcctggccagcaacccttattctggtgacctcacaaagttcggccgtggggatgcctcctccccagccccggccacaaccttggcccaaccccaacagaaccagacgcagactcaccataccacgcagcagacattcctgaacccggcgctgcctcctggctacagttacaccagcctgccatactatacaggggtcccgggcctccccagcaccttccagtatgggcctgctgtgttccctgtggctcctacctcttccaagcagcatggtgtgaatgtcagtgtgaatgcatcggccacccctttccaacagccgagtggatatgggtctcatggatacaacactggaagaaaatatccacccccttacaagcatttctggacggctgagagctaatttggcccaaggctgggggctgtgttttgtgtgtgtgtataaatttgcactgaagtcttgtttcagaaaccagaccactgaggagagcctgctgagctgaggccatggcctgcgtggcttggggaaatgagttggtggataccttctgggcttttgaacttgcccctcccccatttccctctcccccatgtgtctgaccctgtcttacccatttcaagttcaagcggtgcagcaccttcgaagcatcaatgcacacacctgctgttgcttttgatttctggaaggcatgtagtttcaacttgtaacaaaaatatttgtagtcttcaataaactgtggtatttct

SEQ ID NO: 358546 - DNA, 4013 bp, Homo sapiens
  misc_feature (4012)..(4013): n is a, c, g, or t
tatatcacgtgacaggggcggcgcggcccggggtgtcagtgtggaggagactgaggtaaagttgggagcgcagcggcgttggcggcggcggcggcggcagcggcagcgcggcggggccggtattctaccttgtaaatactgttatttgtatatactgtaaatgatgacatcggtgggcactaaccgagcccggggaaactgggaacaacctcaaaaccaaaaccagacacagcacaagcagcggccacaggccactgcagaacaaattagacttgcacagatgatttcggaccataatgatgctgactttgaggagaaggtgaaacaattgattgatattacaggcaagaaccaggatgaatgtgtgattgctttgcatgactgcaatggagatgtcaacagagctatcaatgttcttctggaaggaaacccagacacgcattcctgggagatggtcgggaagaagaagggagtctcaggccagaaggatggtggccagacggaatccaatgaggaaggcaaagaaaatcgagaccgggacagagactatagtcggcgacgtggtgggccaccaagacgggggagaggtgccagccgtggacgagagtttcgaggtcaggaaaatggattggatggcaccaagagtggagggccttctggaagaggaacagaaagaggcagaaggggccgtggccgaggcagaggtggctctggtaggcgaggaggaaggttttctgctcaaggaatgggaacctttaacccagctgattatgcagagccagccaatactgatgataactatggcaatagcagcggcaatacgtggaacaacactggccactttgaaccagatgatgggacgagtgcatggaggactgcaacagaggagtgggggactgaagattggaatgaagatctttctgagaccaagatcttcactgcctctaatgtgtcttcagtgcctctgcctgcggagaatgtgacaatcactgctggtcagagaattgaccttgctgttctgctggggaagacaccatctacaatggagaatgattcatctaatctggatccgtctcaggctccttctctggcccagcctctggtgttcagtaattcgaagcagactgccatatcacagcctgcttcagggaacacattttctcatcacagtatggtgagcatgttagggaaaggatttggtgatgtcggtgaagctaaaggcggcagtactacaggctcccagttcttggagcaattcaagactgcccaagccctggctcagttggcagctcagcattctcagtctggaagcaccaccacctcctcttgggacatgggctcgacgacacaatccccatcactggtgcagtatgatttgaagaacccaagtgattcagcagtgcacagcccctttacaaagcgccaggcttttaccccatcttcaaccatgatggaggtgttccttcaggagaagtcacctgcagtggctacctccacagctgcacctccacctccgtcttctcctctgccaagcaaatccacatcggctccacagatgtcgcctggatcttcagacaaccagtcctctagccctcagccggctcagcagaaactgaaacagcagaagaaaaaagcctccttgacttctaagattcctgctctggctgtggagatgcctggctcagcagatatctcagggctaaacctgcagtttggggcattgcagtttgggtcagagcctgtcctttctgattatgagtccacccccaccacgagcgcctcttcaagccaggctccaagtagcctgtataccagcacggccagtgaatcatcctctacaatttcatctaaccagagtcaggagtctggttatcagagcggcccaattcagtcgacaacctatacctcccaaaataatgctcagggccctctttatgaacagagatccacacagactcggcggtaccccagctccatctcttcatcaccccaaaaggacctgactcaggcaaagaatggcttcagttctgtgcaggccacgcagttacagaccacacaatctgttgaaggtgctacaggctctgcagtgaaatctgattcaccttccacttctagcatcccccctctcaatgaaacggtatctgcagcttccttactgacgacaaccaatcagcattcatcctccttgggtggcttgagccacagtgaggagattccaaatactaccaccacacaacacagcagcacgttatctacgcagcagaataccctttcatcatcaacatcttctgggcgcacttcgacatccactcttttgcacacaagtgtggagagtgaggcgaatctccattcttcctccagcactttttccaccacatccagcacagtctctgcacctcccccagtggtcagtgtctcctccagtctcaatagtggcagtagcctgggcctcagcctaggcagcaactccactgtcacagcctcgactcgaagctcagttgctacgacttcaggaaaagctcctcccaacctccctcctggggtcccgccgttgttgcctaatccgtatattatggctccagggctgttacatgcctacccgccacaagtatatggttatgatgacttgcagatgcttcagacaagatttccattggattactacagcatcccatttcccacacccactactccgctgactgggagggatggtagcctggccagcaacccttattctggtgacctcacaaagttcggccgtggggatgcctcctccccagccccggccacaaccttggcccaaccccaacagaaccagacgcagactcaccataccacgcagcagacattcctgaacccggcgctgcctcctggctacagttacaccagcctgccatactatacaggggtcccgggcctccccagcaccttccagtatgggcctgctgtgttccctgtggctcctacctcttccaagcagcatggtgtgaatgtcagtgtgaatgcatcggccacccctttccaacagccgagtggatatgggtctcatggatacaacactggtgtttcagtcacctccagtaacacgggcgtgccagatatctcgggttctgtgtactccaaaacccagcagtcctttgagaaacaaggttttcattccggtactcctgctgcttccttcaacttgccttcagccctaggaagtgggggccccatcaatccggccacagctgctgcctacccacctgccccctttatgcacattctgaccccccatcagcagccgcattctcagatccttcaccatcacctgcagcaggatggccagctaccatatttgcagatgattctctgttgccagcgccagcaggaggagcaggacatcctcaatttcgtcgatgaccagcttggtgaataagtattactgtaccaactgggcctcctctagcaggcccctgaaggcagtggaataaaatgaaatcttcgccctttaagaactcctgaccttaatgtggtagtagtatcttgtccttgaggggatttccttcccctcacccctaagactttcacaacctggtgactggaaagaaccaccacaaatcttcatttcctccagaaactgctacatctacagccgatttcaggcagtaaagggagagggatagaggagattgggtggaaaatggagaggatcaagaaggagctgagaccatttcaaagaaaaaaaatgctttatagagttttaagtatgacttagatgggtccaggcaaataaactaaaaagaagtgaaggcaacatgtatcgtctggcagaactaaatcttggagtggggtgagggatgaaagactacatattgggtacagtgtacactgctcgggtgatgggtgcgctaaagtcgcagaaatcactaaagaactcatccatgtaaccaaacaccacctgtaccccaaaaacgaaataaaaaaacaaaaccttggggcccattccccctaggaatggactactgtaaann

SEQ ID NO: 358547 - DNA, 3442 bp, Homo sapiens
tatatcacgtgacaggggcggcgcggcccggggtgtcagtgtggaggagactgaggtaaagttgggagcgcagcggcgttggcggcggcggcggcggcagcggcagcgcggcggggccggtattctaccttgtaaatactgttatttgtatatactgtaaatgatgacatcggtgggcactaaccgagcccggggaaactgggaacaacctcaaaaccaaaaccagacacagcacaagcagcggccacaggccactgcagaacaaattagacttgcacagatgatttcggaccataatgatgctgactttgaggagaaggtgaaacaattgattgatattacaggcaagaaccaggatgaatgtgtgattgctttgcatgactgcaatggagatgtcaacagagctatcaatgttcttctggaaggaaacccagacacgcattcctgggagatggtcgggaagaagaagggagtctcaggccagaaggatggtggccagacggaatccaatgaggaaggcaaagaaaatcgagaccgggacagagactatagtcggcgacgtggtgggccaccaagacgggggagaggtgccagccgtggacgagagtttcgaggtcaggaaaatggattggatggcaccaagagtggagggccttctggaagaggaacagaaagaggcagaaggggccgtggccgaggcagaggtggctctggtaggcgaggaggaaggttttctgctcaaggaatgggaacctttaacccagctgattatgcagagccagccaatactgatgataactatggcaatagcagcggcaatacgtggaacaacactggccactttgaaccagatgatgggacgagtgcatggaggactgcaacagaggagtgggggactgaagattggaatgaagatctttctgagaccaagatcttcactgcctctaatgtgtcttcagtgcctctgcctgcggagaatgtgacaatcactgctggtcagagaattgaccttgctgttctgctggggaagacaccatctacaatggagaatgattcatctaatctggatccgtctcaggctccttctctggcccagcctctggtgttcagtaattcgaagcagactgccatatcacagcctgcttcagggaacacattttctcatcacagtatggtgagcatgttagggaaaggatttggtgatgtcggtgaagctaaaggcggcagtactacaggctcccagttcttggagcaattcaagactgcccaagccctggctcagttggcagctcagcattctcagtctggaagcaccaccacctcctcttgggacatgggctcgacgacacaatccccatcactggtgcagtatgatttgaagaacccaagtgattcagcagtgcacagcccctttacaaagcgccaggcttttaccccatcttcaaccatgatggaggtgttccttcaggagaagtcacctgcagtggctacctccacagctgcacctccacctccgtcttctcctctgccaagcaaatccacatcggctccacagatgtcgcctggatcttcagacaaccagtcctctagccctcagccggctcagcagaaactgaaacagcagaagaaaaaagcctccttgacttctaagattcctgctctggctgtggagatgcctggctcagcagatatctcagggctaaacctgcagtttggggcattgcagtttgggtcagagcctgtcctttctgattatgagtccacccccaccacgagcgcctcttcaagccaggctccaagtagcctgtataccagcacggccagtgaatcatcctctacaatttcatctaaccagagtcaggagtctggttatcagagcggcccaattcagtcgacaacctatacctcccaaaataatgctcagggccctctttatgaacagagatccacacagactcggcggtaccccagctccatctcttcatcaccccaaaaggacctgactcaggcaaagaatggcttcagttctgtgcaggccacgcagttacagaccacacaatctgttgaaggtgctacaggctctgcagtgaaatctgattcaccttccacttctagcatcccccctctcaatgaaacggtatctgcagcttccttactgacgacaaccaatcagcattcatcctccttgggtggcttgagccacagtgaggagattccaaatactaccaccacacaacacagcagcacgttatctacgcagcagaataccctttcatcatcaacatcttctgggcgcacttcgacatccactcttttgcacacaagtgtggagagtgaggcgaatctccattcttcctccagcactttttccaccacatccagcacagtctctgcacctcccccagtggtcagtgtctcctccagtctcaatagtggcagtagcctgggcctcagcctaggcagcaactccactgtcacagcctcgactcgaagctcagttgctacgacttcaggaaaagctcctcccaacctccctcctggggtcccgccgttgttgcctaatccgtatattatggctccagggctgttacatgcctacccgccacaagtatatggttatgatgacttgcagatgcttcagacaagatttccattggattactacagcatcccatttcccacacccactactccgctgactgggagggatggtagcctggccagcaacccttattctggtgacctcacaaagttcggccgtggggatgcctcctccccagccccggccacaaccttggcccaaccccaacagaaccagacgcagactcaccataccacgcagcagacattcctgaacccggcgctgcctcctggctacagttacaccagcctgccatactatacaggggtcccgggcctccccagcaccttccagtatgggcctgctgtgttccctgtggctcctacctcttccaagcagcatggtgtgaatgtcagtgtgaatgcatcggccacccctttccaacagccgagtggatatgggtctcatggatacaacactggtgtttcagtcacctccagtaacacgggcgtgccagatatctcgggttctgtgtactccaaaacccagcagtcctttgagaaacaaggttttcattccggtactcctgctgcttccttcaacttgccttcagccctaggaagtgggggccccatcaatccggccacagctgctgcctacccacctgccccctttatgcacattctgaccccccatcagcagccgcattctcagatccttcaccatcacctgcagcaggatggccaggacatcctcaatttcgtcgatgaccagcttggtgaataagtattactgtaccaactgggcctcctctagcaggcccctgaaggcagtggaataaaatgaaatcttcgcccttta

SEQ ID NO: 358548 - DNA, 3562 bp, Homo sapiens
tatatcacgtgacaggggcggcgcggcccggggtgtcagtgtggaggagactgaggtaaagttgggagcgcagcggcgttggcggcggcggcggcggcagcggcagcgcggcggggccggtattctaccttgtaaatactgttatttgtatatactgtaaatgatgacatcggtgggcactaaccgagcccggggaaactgggaacaacctcaaaaccaaaaccagacacagcacaagcagcggccacaggccactgcagaacaaattagacttgcacagatgatttcggaccataatgatgctgactttgaggagaaggtgaaacaattgattgatattacaggcaagaaccaggatgaatgtgtgattgctttgcatgactgcaatggagatgtcaacagagctatcaatgttcttctggaaggaaacccagacacgcattcctgggagatggtcgggaagaagaagggagtctcaggccagaaggatggtggccagacggaatccaatgaggaaggcaaagaaaatcgagaccgggacagagactatagtcggcgacgtggtgggccaccaagacgggggagaggtgccagccgtggacgagagtttcgaggtcaggaaaatggattggatggcaccaagagtggagggccttctggaagaggaacagaaagaggcagaaggggccgtggccgaggcagaggtggctctggtaggcgaggaggaaggttttctgctcaaggaatgggaacctttaacccagctgattatgcagagccagccaatactgatgataactatggcaatagcagcggcaatacgtggaacaacactggccactttgaaccagatgatgggacgagtgcatggaggactgcaacagaggagtgggggactgaagattggaatgaagatctttctgagaccaagatcttcactgcctctaatgtgtcttcagtgcctctgcctgcggagaatgtgacaatcactgctggtcagagaattgaccttgctgttctgctggggaagacaccatctacaatggagaatgattcatctaatctggatccgtctcaggctccttctctggcccagcctctggtgttcagtaattcgaagcagactgccatatcacagcctgcttcagggaacacattttctcatcacagtatggtgagcatgttagggaaaggatttggtgatgtcggtgaagctaaaggcggcagtactacaggctcccagttcttggagcaattcaagactgcccaagccctggctcagttggcagctcagcattctcagtctggaagcaccaccacctcctcttgggacatgggctcgacgacacaatccccatcactggtgcagtatgatttgaagaacccaagtgattcagcagtgcacagcccctttacaaagcgccaggcttttaccccatcttcaaccatgatggaggtgttccttcaggagaagtcacctgcagtggctacctccacagctgcacctccacctccgtcttctcctctgccaagcaaatccacatcggctccacagatgtcgcctggatcttcagacaaccagtcctctagccctcagccggctcagcagaaactgaaacagcagaagaaaaaagcctccttgacttctaagattcctgctctggctgtggagatgcctggctcagcagatatctcagggctaaacctgcagtttggggcattgcagtttgggtcagagcctgtcctttctgattatgagtccacccccaccacgagcgcctcttcaagccaggctccaagtagcctgtataccagcacggccagtgaatcatcctctacaatttcatctaaccagagtcaggagtctggttatcagagcggcccaattcagtcgacaacctatacctcccaaaataatgctcagggccctctttatgaacagagatccacacagactcggcggtaccccagctccatctcttcatcaccccaaaaggacctgactcaggcaaagaatggcttcagttctgtgcaggccacgcagttacagaccacacaatctgttgaaggtgctacaggctctgcagtgaaatctgattcaccttccacttctagcatcccccctctcaatgaaacggtatctgcagcttccttactgacgacaaccaatcagcattcatcctccttgggtggcttgagccacagtgaggagattccaaatactaccaccacacaacacagcagcacgttatctacgcagcagaataccctttcatcatcaacatcttctgggcgcacttcgacatccactcttttgcacacaagtgtggagagtgaggcgaatctccattcttcctccagcactttttccaccacatccagcacagtctctgcacctcccccagtggtcagtgtctcctccagtctcaatagtggcagtagcctgggcctcagcctaggcagcaactccactgtcacagcctcgactcgaagctcagttgctacgacttcaggaaaagctcctcccaacctccctcctggggtcccgccgttgttgcctaatccgtatattatggctccagggctgttacatgcctacccgccacaagtatatggttatgatgacttgcagatgcttcagacaagatttccattggattactacagcatcccatttcccacacccactactccgctgactgggagggatggtagcctggccagcaacccttattctggtgacctcacaaagttcggccgtggggatgcctcctccccagccccggccacaaccttggcccaaccccaacagaaccagacgcagactcaccataccacgcagcagacattcctgaacccggcgctgcctcctggctacagttacaccagcctgccatactatacaggggtcccgggcctccccagcaccttccagtatgggcctgctgtgttccctgtggctcctacctcttccaagcagcatggtgtgaatgtcagtgtgaatgcatcggccacccctttccaacagccgagtggatatgggtctcatggatacaacactggtgtttcagtcacctccagtaacacgggcgtgccagatatctcgggttctgtgtactccaaaacccaggtaggtgcctggctctggataaaagtggaaaagagatagacatagaggaggtggagttgcaatggtagaaataacagtggacaagaagaaccctaggagaggtggcaggaaacccatcctactttttctaaatgaaaggtcttctctagacttcacttcctctaagaagttaaaatttagccctctgagaaaaaaaacgagaaacgtaataggaaggtaaagcgtggcaaattgtttaacgtgtcatgtaatttactgtgcaactctcctggccccttttcctacctactccccaacctttttcataacttttcaagagaataagtatgagagtgacaggaaactagttcattccattctttgagtaaatctataacagtgggagtgggaaaggagagacctagtaacctaatgaagcatttgagtgatcca

SEQ ID NO: 358549 - DNA, 3183 bp, Homo sapiens
tatatcacgtgacaggggcggcgcggcccggggtgtcagtgtggaggagactgaggtaaagttgggagcgcagcggcgttggcggcggcggcggcggcagcggcagcgcggcggggccggtattctaccttgtaaatactgttatttgtatatactgtaaatgatgacatcggtgggcactaaccgagcccggggaaactgggaacaacctcaaaaccaaaaccagacacagcacaagcagcggccacaggccactgcagaacaaattagacttgcacagatgatttcggaccataatgatgctgactttgaggagaaggtgaaacaattgattgatattacaggcaagaaccaggatgaatgtgtgattgctttgcatgactgcaatggagatgtcaacagagctatcaatgttcttctggaaggaaacccagacacgcattcctgggagatggtcgggaagaagaagggagtctcaggccagaaggatggtggccagacggaatccaatgaggaaggcaaagaaaatcgagaccgggacagagactatagtcggcgacgtggtgggccaccaagacgggggagaggtgccagccgtggacgagagtttcgaggtcaggaaaatggattggatggcaccaagagtggagggccttctggaagaggaacagaaagaggcagaaggggccgtggccgaggcagaggtggctctggtaggcgaggaggaaggttttctgctcaaggaatgggaacctttaacccagctgattatgcagagccagccaatactgatgataactatggcaatagcagcggcaatacgtggaacaacactggccactttgaaccagatgatgggacgagtgcatggaggactgcaacagaggagtgggggactgaagattggaatgaagatctttctgagaccaagatcttcactgcctctaatgtgtcttcagtgcctctgcctgcggagaatgtgacaatcactgctggtcagagaattgaccttgctgttctgctggggaagacaccatctacaatggagaatgattcatctaatctggatccgtctcaggctccttctctggcccagcctctggtgttcagtaattcgaagcagactgccatatcacagcctgcttcagggaacacattttctcatcacagtatggtgagcatgttagggaaaggatttggtgatgtcggtgaagctaaaggcggcagtactacaggctcccagttcttggagcaattcaagactgcccaagccctggctcagttggcagctcagcattctcagtctggaagcaccaccacctcctcttgggacatgggctcgacgacacaatccccatcactggtgcagtatgatttgaagaacccaagtgattcagcagtgcacagcccctttacaaagcgccaggcttttaccccatcttcaaccatgatggaggtgttccttcaggagaagtcacctgcagtggctacctccacagctgcacctccacctccgtcttctcctctgccaagcaaatccacatcggctccacagatgtcgcctggatcttcagacaaccagtcctctagccctcagccggctcagcagaaactgaaacagcagaagaaaaaagcctccttgacttctaagattcctgctctggctgtggagatgcctggctcagcagatatctcagggctaaacctgcagtttggggcattgcagtttgggtcagagcctgtcctttctgattatgagtccacccccaccacgagcgcctcttcaagccaggctccaagtagcctgtataccagcacggccagtgaatcatcctctacaatttcatctaaccagagtcaggagtctggttatcagagcggcccaattcagtcgacaacctatacctcccaaaataatgctcagggccctctttatgaacagagatccacacagactcggcggtaccccagctccatctcttcatcaccccaaaaggacctgactcaggcaaagaatggcttcagttctgtgcaggccacgcagttacagaccacacaatctgttgaaggtgctacaggctctgcagtgaaatctgattcaccttccacttctagcatcccccctctcaatgaaacggtatctgcagcttccttactgacgacaaccaatcagcattcatcctccttgggtggcttgagccacagtgaggagattccaaatactaccaccacacaacacagcagcacgttatctacgcagcagaataccctttcatcatcaacatcttctgggcgcacttcgacatccactcttttgcacacaagtgtggagagtgaggcgaatctccattcttcctccagcactttttccaccacatccagcacagtctctgcacctcccccagtggtcagtgtctcctccagtctcaatagtggcagtagcctgggcctcagcctaggcagcaactccactgtcacagcctcgactcgaagctcagttgctacgacttcaggaaaagctcctcccaacctccctcctggggtcccgccgttgttgcctaatccgtatattatggctccagggctgttacatgcctacccgccacaagtatatggttatgatgacttgcagatgcttcagacaagatttccattggattactacagcatcccatttcccacacccactactccgctgactgggagggatggtagcctggccagcaacccttattctggtgacctcacaaagttcggccgtggggatgcctcctccccagccccggccacaaccttggcccaaccccaacagaaccagacgcagactcaccataccacgcagcagacattcctgaacccggcgctgcctcctggctacagttacaccagcctgccatactatacaggggtcccgggcctccccagcaccttccagtatgggcctgctgtgttccctgtggctcctacctcttccaagcagcatggtgtgaatgtcagtgtgaatgcatcggccacccctctcccccatgtgtctgaccctgtcttacccatttcaagttcaagcggtgcagcaccttcgaagcatcaatgcacacacctgctgttgcttttgatttctggaaggcatgtagtttcaacttgtaacaaaaatatttgtagtcttcaataaactgtggtatttct

SEQ ID NO: 358550 - DNA, 1242 bp, Homo sapiens
cggtcacatgctccacacacaacacagcagcacgttatctacgcagcagaataccctttcatcatcaacatcttctgggcgcacttcgacatccactcttttgcacacaagtgtggagagtgaggcgaatctccattcttcctccagcactttttccaccacatccagcacagtctctgcacctcccccagtggtcagtgtctcctccagtctcaatagtggcagtagcctgggcctcagcctaggcagcaactccactgtcacagcctcgactcgaagctcagttgctacgacttcaggaaaagctcctcccaacctccctcctggggtcccgccgttgttgcctaatccgtatattatggctccagggctgttacatgcctacccgccacaagtatatggttatgatgacttgcagatgcttcagacaagatttccattggattactacagcatcccatttcccacacccactactccgctgactgggagggatggtagcctggccagcaacccttattctggtgacctcacaaagttcggccgtggggatgcctcctccccagccccggccacaaccttggcccaaccccaacagaaccagacgcagactcaccataccacgcagcagacattcctgaacccggcgctgcctcctggctacagttacaccagcctgccatactatacaggggtcccgggcctccccagcaccttccagtatgggcctgctgtgttccctgtggctcctacctcttccaagcagcatggtgtgaatgtcagtgtgaatgcatcggccacccctttccaacagccgagtggatatgggtctcatggatacaacactggaagaaaatatccacccccttacaagcatttctggacggctgagagctaatttggcccaaggctgggggctgtgttttgtgtgtgtgtataaatttgcactgaagtcttgtttcagaaaccagaccactgaggagagcctgctgagctgaggccatggcctgcgtggcttggggaaatgagttggtggataccttctgggcttttgaacttgcccctcccccatttccctctcccccatgtgtctgaccctgtcttacccatttcaagttcaagcggtgcagcaccttcgaagcatcaatgcacacacctgctgttgcttttgatttctggaaggcatgtagtttcaacttgtaacaaaaatatttgtagtcttcaataaactgtggtatttct

SEQ ID NO: 358551 - DNA, 3641 bp, Homo sapiens
  misc_feature (3640)..(3641): n is a, c, g, or t
tatatcacgtgacaggggcggcgcggcccggggtgtcagtgtggaggagactgaggtaaagttgggagcgcagcggcgttggcggcggcggcggcggcagcggcagcgcggcggggccggtattctaccttgtaaatactgttatttgtatatactgtaaatgatgacatcggtgggcactaaccgagcccggggaaactgggaacaacctcaaaaccaaaaccagacacagcacaagcagcggccacaggccactgcagaacaaattagacttgcacagatgatttcggaccataatgatgctgactttgaggagaaggtgaaacaattgattgatattacaggcaagaaccaggatgaatgtgtgattgctttgcatgactgcaatggagatgtcaacagagctatcaatgttcttctggaaggaaacccagacacgcattcctgggagatggtcgggaagaagaagggagtctcaggccagaaggatggtggccagacggaatccaatgaggaaggcaaagaaaatcgagaccgggacagagactatagtcggcgacgtggtgggccaccaagacgggggagaggtgccagccgtggacgagagtttcgaggtcaggaaaatggattggatggcaccaagagtggagggccttctggaagaggaacagaaagaggcagaaggggccgtggccgaggcagaggtggctctggtaggcgaggaggaaggttttctgctcaaggaatgggaacctttaacccagctgattatgcagagccagccaatactgatgataactatggcaatagcagcggcaatacgtggaacaacactggccactttgaaccagatgatgggacgagtgcatggaggactgcaacagaggagtgggggactgaagattggaatgaagatctttctgagaccaagatcttcactgcctctaatgtgtcttcagtgcctctgcctgcggagaatgtgacaatcactgctggtcagagaattgaccttgctgttctgctggggaagacaccatctacaatggagaatgattcatctaatctggatccgtctcaggctccttctctggcccagcctctggtgttcagtaattcgaagcagactgccatatcacagcctgcttcagggaacacattttctcatcacagtatggtgagcatgttagggaaaggatttggtgatgtcggtgaagctaaaggcggcagtactacaggctcccagttcttggagcaattcaagactgcccaagccctggctcagttggcagctcagcattctcagtctggaagcaccaccacctcctcttgggacatgggctcgacgacacaatccccatcactggtgcagtatgatttgaagaacccaagtgattcagcagtgcacagcccctttacaaagcgccaggcttttaccccatcttcaaccatgatggaggtgttccttcaggagaagtcacctgcagtggctacctccacagctgcacctccacctccgtcttctcctctgccaagcaaatccacatcggctccacagatgtcgcctggatcttcagacaaccagtcctctagccctcagccggctcagcagaaactgaaacagcagaagaaaaaagcctccttgacttctaagattcctgctctggctgtggagatgcctggctcagcagatatctcagggctaaacctgcagtttggggcattgcagtttgggtcagagcctgtcctttctgattatgagtccacccccaccacgagcgcctcttcaagccaggctccaagtagcctgtataccagcacggccagtgaatcatcctctacaatttcatctaaccagagtcaggagtctggttatcagagcggcccaattcagtcgacaacctatacctcccaaaataatgctcagggccctctttatgaacagagatccacacagactcggcggtaccccagctccatctcttcatcaccccaaaaggacctgactcaggcaaagaatggcttcagttctgtgcaggccacgcagttacagaccacacaatctgttgaaggtgctacaggctctgcagtgaaatctgattcaccttccacttctagcatcccccctctcaatgaaacggtatctgcagcttccttactgacgacaaccaatcagcattcatcctccttgggtggcttgagccacagtgaggagattccaaatactaccaccacacaacacagcagcacgttatctacgcagcagaataccctttcatcatcaacatcttctgggcgcacttcgacatccactcttttgcacacaagtgtggagagtgaggcgaatctccattcttcctccagcactttttccaccacatccagcacagtctctgcacctcccccagtggtcagtgtctcctccagtctcaatagtggcagtagcctgggcctcagcctaggcagcaactccactgtcacagcctcgactcgaagctcagttgctacgacttcaggaaaagctcctcccaacctccctcctggggtcccgccgttgttgcctaatccgtatattatggctccagggctgttacatgcctacccgccacaagtatatggttatgatgacttgcagatgcttcagacaagatttccattgcagcatggtgtgaatgtcagtgtgaatgcatcggccacccctttccaacagccgagtggatatgggtctcatggatacaacactggtgtttcagtcacctccagtaacacgggcgtgccagatatctcgggttctgtgtactccaaaacccagcagtcctttgagaaacaaggttttcattccggtactcctgctgcttccttcaacttgccttcagccctaggaagtgggggccccatcaatccggccacagctgctgcctacccacctgccccctttatgcacattctgaccccccatcagcagccgcattctcagatccttcaccatcacctgcagcaggatggccaggacatcctcaatttcgtcgatgaccagcttggtgaataagtattactgtaccaactgggcctcctctagcaggcccctgaaggcagtggaataaaatgaaatcttcgccctttaagaactcctgaccttaatgtggtagtagtatcttgtccttgaggggatttccttcccctcacccctaagactttcacaacctggtgactggaaagaaccaccacaaatcttcatttcctccagaaactgctacatctacagccgatttcaggcagtaaagggagagggatagaggagattgggtggaaaatggagaggatcaagaaggagctgagaccatttcaaagaaaaaaaatgctttatagagttttaagtatgacttagatgggtccaggcaaataaactaaaaagaagtgaaggcaacatgtatcgtctggcagaactaaatcttggagtggggtgagggatgaaagactacatattgggtacagtgtacactgctcgggtgatgggtgcgctaaagtcgcagaaatcactaaagaactcatccatgtaaccaaacaccacctgtaccccaaaaacgaaataaaaaaacaaaaccttggggcccattccccctaggaatggactactgtaaann

SEQ ID NO: 358552 - DNA, 2790 bp, Homo sapiens
tatatcacgtgacaggggcggcgcggcccggggtgtcagtgtggaggagactgaggtaaagttgggagcgcagcggcgttggcggcggcggcggcggcagcggcagcgcggcggggccggtattctaccttgtaaatactgttatttgtatatactgtaaatgatgacatcggtgggcactaaccgagcccggggaaactgggaacaacctcaaaaccaaaaccagacacagcacaagcagcggccacaggccactgcagaacaaattagacttgcacagatgatttcggaccataatgatgctgactttgaggagaaggtgaaacaattgattgatattacaggcaagaaccaggatgaatgtgtgattgctttgcatgactgcaatggagatgtcaacagagctatcaatgttcttctggaaggaaacccagacacgcattcctgggagatggtcgggaagaagaagggagtctcaggccagaaggatggtggccagacggaatccaatgaggaaggcaaagaaaatcgagaccgggacagagactatagtcggcgacgtggtgggccaccaagacgggggagaggtgccagccgtggacgagagtttcgaggtcaggaaaatggattggatggcaccaagagtggagggccttctggaagaggaacagaaagaggcagaaggggccgtggccgaggcagaggtggctctggtaggcgaggaggaaggttttctgctcaaggaatgggaacctttaacccagctgattatgcagagccagccaatactgatgataactatggcaatagcagcggcaatacgtggaacaacactggccactttgaaccagatgatgggacgagtgcatggaggactgcaacagaggagtgggggactgaagattggaatgaagatctttctgagaccaagatcttcactgcctctaatgtgtcttcagtgcctctgcctgcggagaatgtgacaatcactgctggtcagagaattgaccttgctgttctgctggggaagacaccatctacaatggagaatgattcatctaatctggatccgtctcaggctccttctctggcccagcctctggtgttcagtaattcgaagcagactgccatatcacagcctgcttcagggaacacattttctcatcacagtatggtgagcatgttagggaaaggatttggtgatgtcggtgaagctaaaggcggcagtactacaggctcccagttcttggagcaattcaagactgcccaagccctggctcagttggcagctcagcattctcagtctggaagcaccaccacctcctcttgggacatgggctcgacgacacaatccccatcactggtgcagtatgatttgaagaacccaagtgattcagcagtgcacagcccctttacaaagcgccaggcttttaccccatcttcaaccatgatggaggtgttccttcaggagaagtcacctgcagtggctacctccacagctgcacctccacctccgtcttctcctctgccaagcaaatccacatcggctccacagatgtcgcctggatcttcagacaaccagtcctctagccctcagccggctcagcagaaactgaaacagcagaagaaaaaagcctccttgacttctaagattcctgctctggctgtggagatgcctggctcagcagatatctcagggctaaacctgcagtttggggcattgcagtttgggtcagagcctgtcctttctgattatgagtccacccccaccacgagcgcctcttcaagccaggctccaagtagcctgtataccagcacggccagtgaatcatcctctacaatttcatctaaccagagtcaggagtctggttatcagagcggcccaattcagtcgacaacctatacctcccaaaataatgctcagggccctctttatgaacagagatccacacagactcggcggtaccccagctccatctcttcatcaccccaaaaggacctgactcaggcaaagaatggcttcagttctgtgcaggccacgcagttacagaccacacaatctgttgaaggtgctacaggctctgcagtgaaatctgattcaccttccacttctagcatcccccctctcaatgaaacggtatctgcagcttccttactgacgacaaccaatcagcattcatcctccttgggtggcttgagccacagtgaggagattccaaatactaccaccacacaacacagcagcacgttatctacgcagcagaataccctttcatcatcaacatcttctgggcgcacttcgacatccactcttttgcacacaagtgtggagagtgaggcgaatctccattcttcctccagcactttttccaccacatccagcacagtctctgcacctcccccagtggtcagtgtctcctccagtctcaatagtggcagtagcctgggcctcagcctaggcagcaactccactgtcacagcctcgactcgaagctcagttgctacgacttcaggaaaagctcctcccaacctccctcctggggtcccgccgttgttgcctaatccgtatattatggctccagggctgttacatgcctacccgccacaagtatatggttatgatgacttgcagatgcttcagacaagatttccattggattactacagcatcccatttcccacacccactactccgctgactgggagggatggtagcctggccagcaacccttattctggtgacctcacaaagttcggggctggggaggaggcatccccacggccggtcga

SEQ ID NO: 358553 - DNA, 2717 bp, Homo sapiens
tatatcacgtgacaggggcggcgcggcccggggtgtcagtgtggaggagactgaggtaaagttgggagcgcagcggcgttggcggcggcggcggcggcagcggcagcgcggcggggccggtattctaccttgtaaatactgttatttgtatatactgtaaatgatgacatcggtgggcactaaccgagcccggggaaactgggaacaacctcaaaaccaaaaccagacacagcacaagcagcggccacaggccactgcagaacaaattagacttgcacagatgatttcggaccataatgatgctgactttgaggagaaggtgaaacaattgattgatattacaggcaagaaccaggatgaatgtgtgattgctttgcatgactgcaatggagatgtcaacagagctatcaatgttcttctggaaggaaacccagacacgcattcctgggagatggtcgggaagaagaagggagtctcaggccagaaggatggtggccagacggaatccaatgaggaaggcaaagaaaatcgagaccgggacagagactatagtcggcgacgtggtgggccaccaagacgggggagaggtgccagccgtggacgagagtttcgaggtcaggaaaatggattggatggcaccaagagtggagggccttctggaagaggaacagaaagaggcagaaggggccgtggccgaggcagaggtggctctggtaggcgaggaggaaggttttctgctcaaggaatgggaacctttaacccagctgattatgcagagccagccaatactgatgataactatggcaatagcagcggcaatacgtggaacaacactggccactttgaaccagatgatgggacgagtgcatggaggactgcaacagaggagtgggggactgaagattggaatgaagatctttctgagaccaagatcttcactgcctctaatgtgtcttcagtgcctctgcctgcggagaatgtgacaatcactgctggtcagagaattgaccttgctgttctgctggggaagacaccatctacaatggagaatgattcatctaatctggatccgtctcaggctccttctctggcccagcctctggtgttcagtaattcgaagcagactgccatatcacagcctgcttcagggaacacattttctcatcacagtatggtgagcatgttagggaaaggatttggtgatgtcggtgaagctaaaggcggcagtactacaggctcccagttcttggagcaattcaagactgcccaagccctggctcagttggcagctcagcattctcagtctggaagcaccaccacctcctcttgggacatgggctcgacgacacaatccccatcactggtgcagtatgatttgaagaacccaagtgattcagcagtgcacagcccctttacaaagcgccaggcttttaccccatcttcaaccatgatggaggtgttccttcaggagaagtcacctgcagtggctacctccacagctgcacctccacctccgtcttctcctctgccaagcaaatccacatcggctccacagatgtcgcctggatcttcagacaaccagtcctctagccctcagccggctcagcagaaactgaaacagcagaagaaaaaagcctccttgacttctaagattcctgctctggctgtggagatgcctggctcagcagatatctcagggctaaacctgcagtttggggcattgcagtttgggtcagagcctgtcctttctgattatgagtccacccccaccacgagcgcctcttcaagccaggctccaagtagcctgtataccagcacggccagtgaatcatcctctacaatttcatctaaccagagtcaggagtctggttatcagagcggcccaattcagtcgacaacctatacctcccaaaataatgctcagggccctctttatgaacagagatccacacagactcggcggtaccccagctccatctcttcatcaccccaaaaggacctgactcaggcaaagaatggcttcagttctgtgcaggccacgcagttacagaccacacaatctgttgaaggtgctacaggctctgcagtgaaatctgattcaccttccacttctagcatcccccctctcaatgaaacggtatctgcagcttccttactgacgacaaccaatcagcattcatcctccttgggtggcttgagccacagtgaggagattccaaatactaccaccacacaacacagcagcacgttatctacgcagcagaataccctttcatcatcaacatcttctgggcgcacttcgacatccactcttttgcacacaagtgtggagagtgaggcgaatctccattcttcctccagcactttttccaccacatccagcacagtctctgcacctcccccagtggtcagtgtctcctccagtctcaatagtggcagtagcctgggcctcagcctaggcagcaactccactgtcacagcctcgactcgaagctcagttgctacgacttcaggaaaagctcctcccaacctccctcctggggtcccgccgttgttgcctaatccgtatattatggctccagggctgttacatgcctacccgccacaagtatatggttatgatgacttgcagatgcttcagacaagatttccattgattgctacagcatcccatttcccacaccctctgacaacggggcatcctctagggtcgtccc

SEQ ID NO: 358554 - DNA, 2930 bp, Homo sapiens
tatatcacgtgacaggggcggcgcggcccggggtgtcagtgtggaggagactgaggtaaagttgggagcgcagcggcgttggcggcggcggcggcggcagcggcagcgcggcggggccggtattctaccttgtaaatactgttatttgtatatactgtaaatgatgacatcggtgggcactaaccgagcccggggaaactgggaacaacctcaaaaccaaaaccagacacagcacaagcagcggccacaggccactgcagaacaaattagacttgcacagatgatttcggaccataatgatgctgactttgaggagaaggtgaaacaattgattgatattacaggcaagaaccaggatgaatgtgtgattgctttgcatgactgcaatggagatgtcaacagagctatcaatgttcttctggaaggaaacccagacacgcattcctgggagatggtcgggaagaagaagggagtctcaggccagaaggatggtggccagacggaatccaatgaggaaggcaaagaaaatcgagaccgggacagagactatagtcggcgacgtggtgggccaccaagacgggggagaggtgccagccgtggacgagagtttcgaggtcaggaaaatggattggatggcaccaagagtggagggccttctggaagaggaacagaaagaggcagaaggggccgtggccgaggcagaggtggctctggtaggcgaggaggaaggttttctgctcaaggaatgggaacctttaacccagctgattatgcagagccagccaatactgatgataactatggcaatagcagcggcaatacgtggaacaacactggccactttgaaccagatgatgggacgagtgcatggaggactgcaacagaggagtgggggactgaagattggaatgaagatctttctgagaccaagatcttcactgcctctaatgtgtcttcagtgcctctgcctgcggagaatgtgacaatcactgctggtcagagaattgaccttgctgttctgctggggaagacaccatctacaatggagaatgattcatctaatctggatccgtctcaggctccttctctggcccagcctctggtgttcagtaattcgaagcagactgccatatcacagcctgcttcagggaacacattttctcatcacagtatggtgagcatgttagggaaaggatttggtgatgtcggtgaagctaaaggcggcagtactacaggctcccagttcttggagcaattcaagactgcccaagccctggctcagttggcagctcagcattctcagtctggaagcaccaccacctcctcttgggacatgggctcgacgacacaatccccatcactggtgcagtatgatttgaagaacccaagtgattcagcagtgcacagcccctttacaaagcgccaggcttttaccccatcttcaaccatgatggaggtgttccttcaggagaagtcacctgcagtggctacctccacagctgcacctccacctccgtcttctcctctgccaagcaaatccacatcggctccacagatgtcgcctggatcttcagacaaccagtcctctagccctcagccggctcagcagaaactgaaacagcagaagaaaaaagcctccttgacttctaagattcctgctctggctgtggagatgcctggctcagcagatatctcagggctaaacctgcagtttggggcattgcagtttgggtcagagcctgtcctttctgattatgagtccacccccaccacgagcgcctcttcaagccaggctccaagtagcctgtataccagcacggccagtgaatcatcctctacaatttcatctaaccagagtcaggagtctggttatcagagcggcccaattcagtcgacaacctatacctcccaaaataatgctcagggccctctttatgaacagagatccacacagactcggcggtaccccagctccatctcttcatcaccccaaaaggacctgactcaggcaaagaatggcttcagttctgtgcaggccacgcagttacagaccacacaatctgttgaaggtgctacaggctctgcagtgaaatctgattcaccttccacttctagcatcccccctctcaatgaaacggtatctgcagcttccttactgacgacaaccaatcagcattcatcctccttgggtggcttgagccacagtgaggagattccaaatactaccaccacacaacacagcagcacgttatctacgcagcagaataccctttcatcatcaacatcttctgggcgcacttcgacatccactcttttgcacacaagtgtggagagtgaggcgaatctccattcttcctccagcactttttccaccacatccagcacagtctctgcacctcccccagtggtcagtgtctcctccagtctcaatagtggcagtagcctgggcctcagcctaggcagcaactccactgtcacagcctcgactcgaagctcagttgctacgacttcagcctcctgagtagctgggattacaggtgcccaccaccgcgcctgctaatttttgtattttttagtagagacggggtttcaccatcttggctaggctggtctcgaactcctgacatcatgatctgcccaccttggcctcccaaagtgctagattacaggcgtgagccactgttcctggccttcagtcttatctgtaagttcctgtctgcaccctgtgctcttgtctgtacatctactctcctatgaataggaaagtaaagttttctacatctgtgccttcgctgatgttgtttccttgtcttggaatggcctttcccccactaccttccctttctttttatcagacctccccctctttctttcttttttaaagccacaggttgaaacttgaaacctgatcatttcagttttgcttcctt

SEQ ID NO: 358555 - DNA, 1200 bp, Homo sapiens
tatttttaagccagattttgaagagtataagagacagagacttgtagaatagagagtaaaactggttgttcgtgtatgttttgtgtctactctattggtatcaagaagccagcctactagaatcagtagtatttagctcaaggaaagcttcaagacctttcatgaatcatttaatctctgtgtactttactgctttttccttaaataaaattgaaggaaataatccgtgtcctgttctaacccagaatgaggatgaatgttctgttgaattagcttgtctcttggctccttgttttgctaacatcatgaccagttcctgttattgctatatgtctgtatctttcagccacaagtatatggttatgatgacttgcagatgcttcagacaagatttccattggattactacagcatcccatttcccacacccactactccgctgactgggagggatggtagcctggccagcaacccttattctggtgacctcacaaagttcggccgtggggatgcctcctccccagccccggccacaaccttggcccaaccccaacagaaccagacgcagactcaccataccacgcagcagacattcctgaacccggcgctgcctcctggctacagttacaccagcctgccatactatacaggggtcccgggcctccccagcaccttccagtatgggcctgctgtgttccctgtggctcctacctcttccaagcagcatggtgtgaatgtcagtgtgaatgcatcggccacccctttccaacagccgagtggatatgggtctcatggatacaacactggaagaaaatatccacccccttacaagcatttctggacggctgagagctaatttggcccaaggctgggggctgtgttttgtgtgtgtgtataaatttgcactgaagtcttgtttcagaaaccagaccactgaggagagcctgctgagctgaggccatggcctgcgtggcttggggaaatgagttggtggataccttctgggcttttgaacttgcccctcccccatttccctctcccccatgtgtctgaccctgtcttacccatttcaagttcaagcggtgcagcaccttcgaagcatcaatgcacacacctgctgttgcttttgatttctggaaggcatgtagtttcaacttgtaacaaaaatatttgtagtcttcaataaactgtggtatttct

SEQ ID NO: 358556 - DNA, 1764 bp, Homo sapiens
ccactgctcccccttttgaagcacacaagtgtggagagtgaggcgaatctccattcttcctccagcactttttccaccacatccagcacagtctctgcacctcccccagtggtcagtgtctcctccagtctcaatagtggcagtagcctgggcctcagcctaggcagcaactccactgtcacagcctcgactcgaagctcagttgctacgacttcaggaaaagctcctcccaacctccctcctggggtcccgccgttgttgcctaatccgtatattatggctccagggctgttacatgcctacccgccacaagtatatggttatgatgacttgcagatgcttcagacaagatttccattggattactacagcatcccatttcccacacccactactccgctgactgggagggatggtagcctggccagcaacccttattctggtgacctcacaaagttcggccgtggggatgcctcctccccagccccggccacaaccttggcccaaccccaacagaaccagacgcagactcaccataccacgcagcagacattcctgaacccggcgctgcctcctggctacagttacaccagcctgccatactatacaggggtcccgggcctccccagcaccttccagtatgggcctgctgtgttccctgtggctcctacctcttccaagcagcatggtgtgaatgtcagtgtgaatgcatcggccacccctttccaacagccgagtggatatgggtctcatggatacaacactggtgtttcagtcacctccagtaacacgggcgtgccagatatctcgggttctgtgtactccaaaacccagcagtcctttgagaaacaaggttttcattccggtactcctgctgcttccttcaacttgccttcagccctaggaagtgggggccccatcaatccggccacagctgctgcctacccacctgccccctttatgcacattctgaccccccatcagcagccgcattctcagatccttcaccatcacctgcagcaggatggccagctaccatatttgcagatgattctctgttgccagcgccagcaggaggagcagacgggcagcgggcaacgtagccagaccagctccatcccgcagaagccccagaccaacaagtctgcctacaacagctacagctggggggccaactgaggccctgaccctcttctcccggtcccatcttctgagagggcttctcagcctggaaactatggaaacagcatcaaagagaaaggaatgtggggggtttccgctgccccccacccccagcggcccaccccatgcctcagcttcatgtctgtcccattcctataccatccccaccctgttgtatgtattataggatttgtattttctccttttttttcccccttccattccttctcccctcttgcattcaagattatgaaactttgctatgggccctgcacttcctttgcttcctcctgttcaccctggtggtgtacggatgaggcggggaggtgggacccccaaacatatatcagcccaacagccctaagtctccttctttattattaggaaaacaacaacaacaacaaacaaaaaaatggcgtcatgaatatgaacagcattgtcagatgaattagttgaagtggttttttttttgttttttttttttttttgtactgtgtcctcaaatttaatggattaatgtgtcttgtatatataaaaagaaaacctctaccttcagcctctgcctattcttgctccgtctag

SEQ ID NO: 358557 - DNA, 1890 bp, Homo sapiens
tatatcacgtgacaggggcggcgcggcccggggtgtcagtgtggaggagactgaggtaaagttgggagcgcagcggcgttggcggcggcggcggcggcagcggcagcgcggcggggccggtattctaccttgtaaatactgttatttgtatatactgtaaatgatgacatcggtgggcactaaccgagcccggggaaactgggaacaacctcaaaaccaaaaccagacacagcacaagcagcggccacaggccactgcagaacaaattagacttgcacagatgatttcggaccataatgatgctgactttgaggagaaggtgaaacaattgattgatattacaggcaagaaccaggatgaatgtgtgattgctttgcatgactgcaatggagatgtcaacagagctatcaatgttcttctggaaggaaacccagacacgcattcctgggagatggtcgggaagaagaagggagtctcaggccagaaggatggtggccagacggaatccaatgaggaaggcaaagaaaatcgagaccgggacagagactatagtcggcgacgtggtgggccaccaagacgggggagaggtgccagccgtggacgagagtttcgaggtcaggaaaatggattggatggcaccaagagtggagggccttctggaagaggaacagaaagaggcagaaggggccgtggccgaggcagaggtggctctggtaggcgaggaggaaggttttctgctcaaggaatgggaacctttaacccagctgattatgcagagccagccaatactgatgataactatggcaatagcagcggcaatacgtggaacaacactggccactttgaaccagatgatgggacgagtgcatggaggactgcaacagaggagtgggggactgaagattggaatgaagatctttctgagaccaagatcttcactgcctctaatgtgtcttcagtgcctctgcctgcggagaatgtgacaatcactgctggtcagagaattgaccttgctgttctgctggggaagacaccatctacaatggagaatgattcatctaatctggatccgtctcaggctccttctctggcccagcctctggtgttcagtaattcgaagcagactgccatatcacagcctgcttcagggaacacattttctcatcacagtatggtgagcatgttagggaaaggatttggtgatgtcggtgaagctaaaggcggcagtactacaggctcccagttcttggagcaattcaagactgcccaagccctggctcagttggcagctcagcattctcagtctggaagcaccaccacctcctcttgggacatgggctcgacgacacaatccccatcactggtgcagtatgatttgaagaacccaagtgattcagcagtgcacagcccctttacaaagcgccaggcttttaccccatcttcaaccatgatggaggtgttccttcaggagaagtcacctgcagtggctacctccacagctgcacctccacctccgtcttctcctctgccaagcaaatccacatcggctccacagatgtcgcctggatcttcagacaaccagtcctctagccctcagccggctcagcagaaactgaaacagcagaagaaaaaagcctccttgacttctaagattcctgctctggctgtggagatgcctggctcagcagatatctcagggctaaacctgcagtttggggcattgcagtttgggtcagagcctgtcctttctgattatgagtccacccccaccacgagcgcctcttcaagccaggctccaagtagcctgtataccagcacggccagtgcatcatccttcatacaactttccactcctcaccagcagtcaggccaactggtccaccggtacga

SEQ ID NO: 358558 - DNA, 552 bp, Homo sapiens
taaaagaatgaattgaaaaatatttttgggaagagaaaaagagagcttgagtgtggctcctacctcttccaagcagcatggtgtgaatgtcagtgtgaatgcatcggccacccctttccaacagccgagtggatatgggtctcatggatacaacactggaagaaaatatccacccccttacaagcatttctggacggctgagagctaatttggcccaaggctgggggctgtgttttgtgtgtgtgtataaatttgcactgaagtcttgtttcagaaaccagaccactgaggagagcctgctgagctgaggccatggcctgcgtggcttggggaaatgagttggtggataccttctgggcttttgaacttgcccctcccccatttccctctcccccatgtgtctgaccctgtcttacccatttcaagttcaagcggtgcagcaccttcgaagcatcaatgcacacacctgctgttgcttttgatttctggaaggcatgtagtttcaacttgtaacaaaaatatttgtagtcttcaataaactgtggtatttct

SEQ ID NO: 358559 - DNA, 2522 bp, Homo sapiens
  misc_feature (2521)..(2522): n is a, c, g, or t
tcttgagatggagtctccctctgtctcccaggctggagtgcagtggcacagtcttgactcactgcaacctccacctcccaggttcaagtgattctcctgcctcagactcccaagtagctggattacaggcgcccgccaccatgcccggctaatttttgtatttttagtagagacggggtttcaccatattggccagactggtcttaaactcctgaccttgtgtgatccacccatcttggcctcccaaagtgctgggattacagatgtgagccaccatgcccagcctatttggtctttacaacaggtttgtagcatccctgttttatatctgaggaaactgaggctaagagattgagtagtatgcccaggttcacacagttcttaaataagagcagagctgagactgagacctgaatatgtgacttcaagtgtactgtgccttctgtgacaccatgctgctttctgagggtcagggagcttgagctcaggaaaaatcccaagactagtttgctgatcccttttactctgtctcctcctggcctcctggatagcagtcctttgagaaacaaggttttcattccggtactcctgctgcttccttcaacttgccttcagccctaggaagtgggggccccatcaatccggccacagctgctgcctacccacctgccccctttatgcacattctgaccccccatcagcagccgcattctcagatccttcaccatcacctgcagcaggatggccaggtaatagcccttccccttctctcctttcccttcctcttccttcctatcccttaaaactgccttccctttccttttcttacccttcctcaccaccaccttcacccaatccctccccagcgccagtcatgggcacacagcacatacagacacaagcgcacataacacgagcggccggcaaaggaaatctcagagaagggccgggttgaaaccttttttgcccaattcctttggtgcccttctcctcctgtgccacagttgtcctcatcccatcagacctgggtcacaccttccctctttcctctcccagccttccctcttccctgacattttagctttcccttctaatggtggagttctattgtcaaagtttgtccctttattttccatatatcctggttctgcctcagctaccatatttgcagatgattctctgttgccagcgccagcaggaggagcagacgggcagcgggcaacgtagccagaccagctccatcccgcagaagccccagaccaacaagtctgcctacaacagctacagctggggggccaactgaggccctgaccctcttctcccggtcccatcttctgagagggcttctcagcctggaaactatggaaacagcatcaaagagaaaggaatgtggggggtttccgctgccccccacccccagcggcccaccccatgcctcagcttcatgtctgtcccattcctataccatccccaccctgttgtatgtattataggatttgtattttctccttttttttcccccttccattccttctcccctcttgcattcaagattatgaaactttgctatgggccctgcacttcctttgcttcctcctgttcaccctggtggtgtacggatgaggcggggaggtgggacccccaaacatatatcagcccaacagccctaagtctccttctttattattaggaaaacaacaacaacaacaaacaaaaaaatggcgtcatgaatatgaacagcattgtcagatgaattagttgaagtggttttttttttgttttttttttttttttgtactgtgtcctcaaatttaatggattaatgtgtcttgtatatataaaaagaaaacctctaccttcagcctctgcctattcttgctccgtctaggacatcctcaatttcgtcgatgaccagcttggtgaataagtattactgtaccaactgggcctcctctagcaggcccctgaaggcagtggaataaaatgaaatcttcgccctttaagaactcctgaccttaatgtggtagtagtatcttgtccttgaggggatttccttcccctcacccctaagactttcacaacctggtgactggaaagaaccaccacaaatcttcatttcctccagaaactgctacatctacagccgatttcaggcagtaaagggagagggatagaggagattgggtggaaaatggagaggatcaagaaggagctgagaccatttcaaagaaaaaaaatgctttatagagttttaagtatgacttagatgggtccaggcaaataaactaaaaagaagtgaaggcaacatgtatcgtctggcagaactaaatcttggagtggggtgagggatgaaagactacatattgggtacagtgtacactgctcgggtgatgggtgcgctaaagtcgcagaaatcactaaagaactcatccatgtaaccaaacaccacctgtaccccaaaaacgaaataaaaaaacaaaaccttggggcccattccccctaggaatggactactgtaaann

SEQ ID NO: 358560 - DNA, 1659 bp, Homo sapiens
  misc_feature (45)..(45): n is a, c, g, or t
  misc_feature (58)..(58): n is a, c, g, or t
  misc_feature (75)..(75): n is a, c, g, or t
  misc_feature (77)..(77): n is a, c, g, or t
  misc_feature (1658)..(1659): n is a, c, g, or t
atcgtaaccgttcgtacgagaatcgctgtcctctccttgctcganatccattgtgctntaaagatggatacaacncnggtgtttcagtcacctccagtaacacgggcgtgccagatatctcgggttctgtgtactccaaaacccagcagtcctttgagaaacaaggttttcattccggtactcctgctgcttccttcaacttgccttcagccctaggaagtgggggccccatcaatccggccacagctgctgcctacccacctgccccctttatgcacattctgaccccccatcagcagccgcattctcagatccttcaccatcacctgcagcaggatggccagacgggcagcgggcaacgtagccagaccagctccatcccgcagaagccccagaccaacaagtctgcctacaacagctacagctggggggccaactgaggccctgaccctcttctcccggtcccatcttctgagagggcttctcagcctggaaactatggaaacagcatcaaagagaaaggaatgtggggggtttccgctgccccccacccccagcggcccaccccatgcctcagcttcatgtctgtcccattcctataccatccccaccctgttgtatgtattataggatttgtattttctccttttttttcccccttccattccttctcccctcttgcattcaagattatgaaactttgctatgggccctgcacttcctttgcttcctcctgttcaccctggtggtgtacggatgaggcggggaggtgggacccccaaacatatatcagcccaacagccctaagtctccttctttattattaggaaaacaacaacaacaacaaacaaaaaaatggcgtcatgaatatgaacagcattgtcagatgaattagttgaagtggttttttttttgttttttttttttttttgtactgtgtcctcaaatttaatggattaatgtgtcttgtatatataaaaagaaaacctctaccttcagcctctgcctattcttgctccgtctaggacatcctcaatttcgtcgatgaccagcttggtgaataagtattactgtaccaactgggcctcctctagcaggcccctgaaggcagtggaataaaatgaaatcttcgccctttaagaactcctgaccttaatgtggtagtagtatcttgtccttgaggggatttccttcccctcacccctaagactttcacaacctggtgactggaaagaaccaccacaaatcttcatttcctccagaaactgctacatctacagccgatttcaggcagtaaagggagagggatagaggagattgggtggaaaatggagaggatcaagaaggagctgagaccatttcaaagaaaaaaaatgctttatagagttttaagtatgacttagatgggtccaggcaaataaactaaaaagaagtgaaggcaacatgtatcgtctggcagaactaaatcttggagtggggtgagggatgaaagactacatattgggtacagtgtacactgctcgggtgatgggtgcgctaaagtcgcagaaatcactaaagaactcatccatgtaaccaaacaccacctgtaccccaaaaacgaaataaaaaaacaaaaccttggggcccattccccctaggaatggactactgtaaann

SEQ ID NO: 358561 - DNA, 2109 bp, Homo sapiens
  misc_feature (2108)..(2109): n is a, c, g, or t
acctcatctcaggaataagggccaggtagctagctgagctaatcctcctgtctgtttcctcctcccccaggtgtttcagtcacctccagtaacacgggcgtgccagatatctcgggttctgtgtactccaaaacccagcagtcctttgagaaacaaggttttcattccggtactcctgctgcttccttcaacttgccttcagccctaggaagtgggggccccatcaatccggccacagctgctgcctacccacctgccccctttatgcacattctgaccccccatcagcagccgcattctcagatccttcaccatcacctgcagcaggatggccaggtaatagcccttccccttctctcctttcccttcctcttccttcctatcccttaaaactgccttccctttccttttcttacccttcctcaccaccaccttcacccaatccctccccagcgccagtcatgggcacacagcacatacagacacaagcgcacataacacgagcggccggcaaaggaaatctcagagaagggccgggttgaaaccttttttgcccaattcctttggtgcccttctcctcctgtgccacagttgtcctcatcccatcagacctgggtcacaccttccctctttcctctcccagccttccctcttccctgacattttagctttcccttctaatggtggagttctattgtcaaagtttgtccctttattttccatatatcctggttctgcctcagctaccatatttgcagatgattctctgttgccagcgccagcaggaggagcagacgggcagcgggcaacgtagccagaccagctccatcccgcagaagccccagaccaacaagtctgcctacaacagctacagctggggggccaactgaggccctgaccctcttctcccggtcccatcttctgagagggcttctcagcctggaaactatggaaacagcatcaaagagaaaggaatgtggggggtttccgctgccccccacccccagcggcccaccccatgcctcagcttcatgtctgtcccattcctataccatccccaccctgttgtatgtattataggatttgtattttctccttttttttcccccttccattccttctcccctcttgcattcaagattatgaaactttgctatgggccctgcacttcctttgcttcctcctgttcaccctggtggtgtacggatgaggcggggaggtgggacccccaaacatatatcagcccaacagccctaagtctccttctttattattaggaaaacaacaacaacaacaaacaaaaaaatggcgtcatgaatatgaacagcattgtcagatgaattagttgaagtggttttttttttgttttttttttttttttgtactgtgtcctcaaatttaatggattaatgtgtcttgtatatataaaaagaaaacctctaccttcagcctctgcctattcttgctccgtctaggacatcctcaatttcgtcgatgaccagcttggtgaataagtattactgtaccaactgggcctcctctagcaggcccctgaaggcagtggaataaaatgaaatcttcgccctttaagaactcctgaccttaatgtggtagtagtatcttgtccttgaggggatttccttcccctcacccctaagactttcacaacctggtgactggaaagaaccaccacaaatcttcatttcctccagaaactgctacatctacagccgatttcaggcagtaaagggagagggatagaggagattgggtggaaaatggagaggatcaagaaggagctgagaccatttcaaagaaaaaaaatgctttatagagttttaagtatgacttagatgggtccaggcaaataaactaaaaagaagtgaaggcaacatgtatcgtctggcagaactaaatcttggagtggggtgagggatgaaagactacatattgggtacagtgtacactgctcgggtgatgggtgcgctaaagtcgcagaaatcactaaagaactcatccatgtaaccaaacaccacctgtaccccaaaaacgaaataaaaaaacaaaaccttggggcccattccccctaggaatggactactgtaaann

SEQ ID NO: 358562 - DNA, 775 bp, Homo sapiens
gggtcatgagttaaattaaacaaatcctgagaagccccattgagatttaatacatagactccttgtggccacccctgtcattgagcaaggttcaccctaaatcttggtggggaggattataagccttttgacttggagtggtggcccctttctgaggacattaggttgaagtcttagttggaccaggttcacgaattttaagaggtaggtgatggataatataagagaattggcatacctgattctagaaatcccaccttcttgcctcccttcagaattcagaaacgtattatatcagcccttgagaacccccagttcccaaccccacaaagggcttttgtcattccattcatttatttttatgtatttgattccttttaggaagaaaatatccacccccttacaagcatttctggacggctgagagctaatttggcccaaggctgggggctgtgttttgtgtgtgtgtataaatttgcactgaagtcttgtttcagaaaccagaccactgaggagagcctgctgagctgaggccatggcctgcgtggcttggggaaatgagttggtggataccttctgggcttttgaacttgcccctcccccatttccctctcccccatgtgtctgaccctgtcttacccatttcaagttcaagcggtgcagcaccttcgaagcatcaatgcacacacctgctgttgcttttgatttctggaaggcatgtagtttcaacttgtaacaaaaatatttgtagtcttcaataaactgtggtatttct

SEQ ID NO: 358563 - DNA, 1273 bp, Homo sapiens
  misc_feature (1272)..(1273): n is a, c, g, or t
ctccttctttattattaggaaaacaacaacagctacagctggggggccaactgaggccctgaccctcttctcccggtcccatcttctgagagggcttctcagcctggaaactatggaaacagcatcaaagagaaaggaatgtggggggtttccgctgccccccacccccagcggcccaccccatgcctcagcttcatgtctgtcccattcctataccatccccaccctgttgtatgtattataggatttgtattttctccttttttttcccccttccattccttctcccctcttgcattcaagattatgaaactttgctatgggccctgcacttcctttgcttcctcctgttcaccctggtggtgtacggatgaggcggggaggtgggacccccaaacatatatcagcccaacagccctaagtctccttctttattattaggaaaacaacaacaacaacaaacaaaaaaatggcgtcatgaatatgaacagcattgtcagatgaattagttgaagtggttttttttttgttttttttttttttttgtactgtgtcctcaaatttaatggattaatgtgtcttgtatatataaaaagaaaacctctaccttcagcctctgcctattcttgctccgtctaggacatcctcaatttcgtcgatgaccagcttggtgaataagtattactgtaccaactgggcctcctctagcaggcccctgaaggcagtggaataaaatgaaatcttcgccctttaagaactcctgaccttaatgtggtagtagtatcttgtccttgaggggatttccttcccctcacccctaagactttcacaacctggtgactggaaagaaccaccacaaatcttcatttcctccagaaactgctacatctacagccgatttcaggcagtaaagggagagggatagaggagattgggtggaaaatggagaggatcaagaaggagctgagaccatttcaaagaaaaaaaatgctttatagagttttaagtatgacttagatgggtccaggcaaataaactaaaaagaagtgaaggcaacatgtatcgtctggcagaactaaatcttggagtggggtgagggatgaaagactacatattgggtacagtgtacactgctcgggtgatgggtgcgctaaagtcgcagaaatcactaaagaactcatccatgtaaccaaacaccacctgtaccccaaaaacgaaataaaaaaacaaaaccttggggcccattccccctaggaatggactactgtaaann

SEQ ID NO: 358564 - DNA, 1302 bp, Homo sapiens
tatatcacgtgacaggggcggcgcggcccggggtgtcagtgtggaggagactgaggtaaagttgggagcgcagcggcgttggcggcggcggcggcggcagcggcagcgcggcggggccggtattctaccttgtaaatactgttatttgtatatactgtaaatgatgacatcggtgggcactaaccgagcccggggaaactgggaacaacctcaaaaccaaaaccagacacagcacaagcagcggccacaggccactgcagaacaaattagacttgcacagatgatttcggaccataatgatgctgactttgaggagaaggtgaaacaattgattgatattacaggcaagaaccaggatgaatgtgtgattgctttgcatgactgcaatggagatgtcaacagagctatcaatgttcttctggaaggaaacccagacacgcattcctgggagatggtcgggaagaagaagggagtctcaggccagaaggatggtggccagacggaatccaatgaggaaggcaaagaaaatcgagaccgggacagagactatagtcggcgacgtggtgggccaccaagacgggggagaggtgccagccgtggacgagagtttcgaggtcaggaaaatggattggatggcaccaagagtggagggccttctggaagaggaacagaaagaggcagaaggggccgtggccgaggcagaggtggctctggtaggcgaggaggaaggttttctgctcaaggaatgggaacctttaacccagctgattatgcagagccagccaatactgatgataactatggcaatagcagcggcaatacgtggaacaacactggccactttgaaccagatgatgggacgagtgcatggaggactgcaacagaggagtgggggactgaagattggaatgaagatgtaggtattcccaggtcattcctcactaatgccttctatccctaagtgttgtttagggatagaaaatgggtatgtttctacccctcaaaattcacccttaagattctgacccaaaacttttacatccaaaatagtgttctgagccagaacatttcacatatgttatatgaaggagactgggcatgaacaggactctgtggaaccacactatggaaagggcaagtgcacttgtgtaagtccaatatctgattgtcggatttatcccaggaagagattggtggttgggtagggcaccagaagtggagttaggcaggtagtgcattgagtaacagctgctggtggtacatgactacttggtgcatttaagtatttgctataaggtcctg

SEQ ID NO: 358565 - DNA, 683 bp, Homo sapiens
taaaaaagcatgccttcattccaaatccccagattccggctctcaggaatgtttcagggtaaaacttggggcaaagcaaggccgttatgatgggggtggatctaagaagccagcagcagggaggcgtggggtctgtgctctagcgttaaagggagggttctagactaacgagggcgggtcggcccgactaagtgacttaaactcccacctactcctggaataaggagtcaaagcccggataggcgcagtattctaccttgtaaatactgttatttgtatatactgtaaatgatgacatcggtgggcactaaccgagcccggggaaactgggaacaacctcaaaaccaaaaccagacacagcacaagcagcggccacaggccactgcagaacaaattagacttgcacagatgatttcggaccataatgatgctgacctgaggccatggcctgcgtggcttggggaaatgagttggtggataccttctgggcttttgaacttgcccctcccccatttccctctcccccatgtgtctgaccctgtcttacccatttcaagttcaagcggtgcagcaccttcgaagcatcaatgcacacacctgctgttgcttttgatttctggaaggcatgtagtttcaacttgtaacaaaaatatttgtagtcttcaataaactgtggtatttct

SEQ ID NO: 358566 - DNA, 432 bp, Homo sapiens
acctttaacccagctgattatgcagagccagccaatactgatgataactatggcaatagcagcggcaatacgtggaacaacactggccactttgaaccagatgatgggacgagtgagtgaccatttatcattcatttcttgtctctgggaatctaaggaaatagttttttctgattatacttacattaaaacgtggaagaatagtgtttggttatggagatagggtgagaaagggctggcagttgtattactgtgtgtactgtttatgtaacgtgcatatgggcacattacacatgttatttcgcttaatgctgcttgatattgtatgaaataatcattatttatcatcactttccagatgacaaaactaaggccgaaagagaggttataaatttgctagtatttgaactcagcattgtttgaccctgaaag

SEQ ID NO: 358567 - DNA, 433 bp, Homo sapiens
tctggataagtgtctttatgagtagctgaacaaggttactggctgtaggtttctctcatctctttgttgatctacaggtgagcatgttagggaaaggatttggtgatgtcggtgaagctaaaggcggcagtactacaggctcccagttcttggagcaattcaagactgcccaagccctggctcagttggcagctcagcattctcagtctggaagcaccaccacctcctcttgggacatgggctcgacgacacaatccccatcactggtgcagtatggtgagaagatggaaagtgacttgaatctttaaagcattggagcattactgtcaagaggctagcagggggagggggtggagaatgtgtcctgaagtgaagaaaaggggcagctagttggttaccttcccacatgtatttcccctaatcaaataagctg

SEQ ID NO: 358568 - DNA, 282 bp, Homo sapiens
tctccattaaggcacattaccattccctgagaaacatgttcccatccttccagctcattttctcttcgttgtttttttaattcccaataccatattacataccatttatatatttgtatatatcctgttgactgtgctctggccatctgtggtttggtttttttgttgttgttgttgttttaatttttatttttatttcagttcgaggtcaggaaaatggattggatggcaccaagagtggagggccttctggaagaggaacagaaagaggcagaaggggcc

SEQ ID NO: 358569 - DNA, 406 bp, Homo sapiens
ccttcactctcccactcaaacaaaacagacacagcacaagcagggcacaggccactgcagaacaaattagacttgcacagatgatttcggaccataatgatgctgactttgaggagaaggtgaaacaattgattgatattacaggcaagaaccaggatgaatgtgtgattgctttgcatgactgcaatggagatgtcaacagagctatcaatgttcttctggaaggaaacccagacacgcattcctgggagatggtcgggaagaagaagggagtctcaggccagaaggatggtggccagacggaatccattttcctgacctcgaaactctcgtccacgactggcacctctcccccgtcttggtggcccaccacgtcgccgactatagtctctgtcccggtctcgat

SEQ ID NO: 358570 - DNA, 3405 bp, Homo sapiens
atgcggctagagcctgagaggggagagcgagaaagagcgcgagcgagcgaggcctgggccttgcctgagtattctaccttgtaaatactgttatttgtatatactgtaaatgatgacatcggtgggcactaaccgagcccggggaaactgggaacaacctcaaaaccaaaaccagacacagcacaagcagcggccacaggccactgcagaacaaattagacttgcacagatgatttcggaccataatgatgctgactttgaggagaaggtgaaacaattgattgatattacaggcaagaaccaggatgaatgtgtgattgctttgcatgactgcaatggagatgtcaacagagctatcaatgttcttctggaaggaaacccagacacgcattcctgggagatggtcgggaagaagaagggagtctcaggccagaaggatggtggccagacggaatccaatgaggaaggcaaagaaaatcgagaccgggacagagactatagtcggcgacgtggtgggccaccaagacgggggagaggtgccagccgtggacgagagtttcgaggtcaggaaaatggattggatggcaccaagagtggagggccttctggaagaggaacagaaagaggcagaaggggccgtggccgaggcagaggtggctctggtaggcgaggaggaaggttttctgctcaaggaatgggaacctttaacccagctgattatgcagagccagccaatactgatgataactatggcaatagcagcggcaatacgtggaacaacactggccactttgaaccagatgatgggacgagtgcatggaggactgcaacagaggagtgggggactgaagattggaatgaagatctttctgagaccaagatcttcactgcctctaatgtgtcttcagtgcctctgcctgcggagaatgtgacaatcactgctggtcagagaattgaccttgctgttctgctggggaagacaccatctacaatggagaatgattcatctaatctggatccgtctcaggctccttctctggcccagcctctggtgttcagtaattcgaagcagactgccatatcacagcctgcttcagggaacacattttctcatcacagtatggtgagcatgttagggaaaggatttggtgatgtcggtgaagctaaaggcggcagtactacaggctcccagttcttggagcaattcaagactgcccaagccctggctcagttggcagctcagcattctcagtctggaagcaccaccacctcctcttgggacatgggctcgacgacacaatccccatcactggtgcagtatgatttgaagaacccaagtgattcagcagtgcacagcccctttacaaagcgccaggcttttaccccatcttcaaccatgatggaggtgttccttcaggagaagtcacctgcagtggctacctccacagctgcacctccacctccgtcttctcctctgccaagcaaatccacatcggctccacagatgtcgcctggatcttcagacaaccagtcctctagccctcagccggctcagcagaaactgaaacagcagaagaaaaaagcctccttgacttctaagattcctgctctggctgtggagatgcctggctcagcagatatctcagggctaaacctgcagtttggggcattgcagtttgggtcagagcctgtcctttctgattatgagtccacccccaccacgagcgcctcttcaagccaggctccaagtagcctgtataccagcacggccagtgaatcatcctctacaatttcatctaaccagagtcaggagtctggttatcagagcggcccaattcagtcgacaacctatacctcccaaaataatgctcagggccctctttatgaacagagatccacacagactcggcggtaccccagctccatctcttcatcaccccaaaaggacctgactcaggcaaagaatggcttcagttctgtgcaggccacgcagttacagaccacacaatctgttgaaggtgctacaggctctgcagtgaaatctgattcaccttccacttctagcatcccccctctcaatgaaacggtatctgcagcttccttactgacgacaaccaatcagcattcatcctccttgggtggcttgagccacagtgaggagattccaaatactaccaccacacaacacagcagcacgttatctacgcagcagaataccctttcatcatcaacatcttctgggcgcacttcgacatccactcttttgcacacaagtgtggagagtgaggcgaatctccattcttcctccagcactttttccaccacatccagcacagtctctgcacctcccccagtggtcagtgtctcctccagtctcaatagtggcagtagcctgggcctcagcctaggcagcaactccactgtcacagcctcgactcgaagctcagttgctacgacttcaggaaaagctcctcccaacctccctcctggggtcccgccgttgttgcctaatccgtatattatggctccagggctgttacatgcctacccgccacaagtatatggttatgatgacttgcagatgcttcagacaagatttccattggattactacagcatcccatttcccacacccactactccgctgactgggagggatggtagcctggccagcaacccttattctggtgacctcacaaagttcggccgtggggatgcctcctccccagccccggccacaaccttggcccaaccccaacagaaccagacgcagactcaccataccacgcagcagacattcctgaacccggcgctgcctcctggctacagttacaccagcctgccatactatacaggggtcccgggcctccccagcaccttccagtatgggcctgctgtgttccctgtggctcctacctcttccaagcagcatggtgtgaatgtcagtgtgaatgcatcggccacccctttccaacagccgagtggatatgggtctcatggatacaacactggaagaaaatatccacccccttacaagcatttctggacggctgagagctaatttggcccaaggctgggggctgtgttttgtgtgtgtgtataaatttgcactgaagtcttgtttcagaaaccagaccactgaggagagcctgctgagctgaggccatggcctgcgtggcttggggaaatgagttggtggataccttctgggcttttgaacttgcccctcccccatttccctctcccccatgtgtctgaccctgtcttacccatttcaagttcaagcggtgcagcaccttcgaagcatcaatgcacacacctgctgttgcttttgatttctggaaggcatgtagtttcaacttgtaacaaaaatatttgtagtcttcaataaactgtggtatttct

SEQ ID NO: 358571 - DNA, 3391 bp, Homo sapiens
tatatcacgtgacaggggcggcgcggcccggggtgtcagtgtggaggagactgagtattctaccttgtaaatactgttatttgtatatactgtaaatgatgacatcggtgggcactaaccgagcccggggaaactgggaacaacctcaaaaccaaaaccagacacagcacaagcagcggccacaggccactgcagaacaaattagacttgcacagatgatttcggaccataatgatgctgactttgaggagaaggtgaaacaattgattgatattacaggcaagaaccaggatgaatgtgtgattgctttgcatgactgcaatggagatgtcaacagagctatcaatgttcttctggaaggaaacccagacacgcattcctgggagatggtcgggaagaagaagggagtctcaggccagaaggatggtggccagacggaatccaatgaggaaggcaaagaaaatcgagaccgggacagagactatagtcggcgacgtggtgggccaccaagacgggggagaggtgccagccgtggacgagagtttcgaggtcaggaaaatggattggatggcaccaagagtggagggccttctggaagaggaacagaaagaggcagaaggggccgtggccgaggcagaggtggctctggtaggcgaggaggaaggttttctgctcaaggaatgggaacctttaacccagctgattatgcagagccagccaatactgatgataactatggcaatagcagcggcaatacgtggaacaacactggccactttgaaccagatgatgggacgagtgcatggaggactgcaacagaggagtgggggactgaagattggaatgaagatctttctgagaccaagatcttcactgcctctaatgtgtcttcagtgcctctgcctgcggagaatgtgacaatcactgctggtcagagaattgaccttgctgttctgctggggaagacaccatctacaatggagaatgattcatctaatctggatccgtctcaggctccttctctggcccagcctctggtgttcagtaattcgaagcagactgccatatcacagcctgcttcagggaacacattttctcatcacagtatggtgagcatgttagggaaaggatttggtgatgtcggtgaagctaaaggcggcagtactacaggctcccagttcttggagcaattcaagactgcccaagccctggctcagttggcagctcagcattctcagtctggaagcaccaccacctcctcttgggacatgggctcgacgacacaatccccatcactggtgcagtatgatttgaagaacccaagtgattcagcagtgcacagcccctttacaaagcgccaggcttttaccccatcttcaaccatgatggaggtgttccttcaggagaagtcacctgcagtggctacctccacagctgcacctccacctccgtcttctcctctgccaagcaaatccacatcggctccacagatgtcgcctggatcttcagacaaccagtcctctagccctcagccggctcagcagaaactgaaacagcagaagaaaaaagcctccttgacttctaagattcctgctctggctgtggagatgcctggctcagcagatatctcagggctaaacctgcagtttggggcattgcagtttgggtcagagcctgtcctttctgattatgagtccacccccaccacgagcgcctcttcaagccaggctccaagtagcctgtataccagcacggccagtgaatcatcctctacaatttcatctaaccagagtcaggagtctggttatcagagcggcccaattcagtcgacaacctatacctcccaaaataatgctcagggccctctttatgaacagagatccacacagactcggcggtaccccagctccatctcttcatcaccccaaaaggacctgactcaggcaaagaatggcttcagttctgtgcaggccacgcagttacagaccacacaatctgttgaaggtgctacaggctctgcagtgaaatctgattcaccttccacttctagcatcccccctctcaatgaaacggtatctgcagcttccttactgacgacaaccaatcagcattcatcctccttgggtggcttgagccacagtgaggagattccaaatactaccaccacacaacacagcagcacgttatctacgcagcagaataccctttcatcatcaacatcttctgggcgcacttcgacatccactcttttgcacacaagtgtggagagtgaggcgaatctccattcttcctccagcactttttccaccacatccagcacagtctctgcacctcccccagtggtcagtgtctcctccagtctcaatagtggcagtagcctgggcctcagcctaggcagcaactccactgtcacagcctcgactcgaagctcagttgctacgacttcaggaaaagctcctcccaacctccctcctggggtcccgccgttgttgcctaatccgtatattatggctccagggctgttacatgcctacccgccacaagtatatggttatgatgacttgcagatgcttcagacaagatttccattggattactacagcatcccatttcccacacccactactccgctgactgggagggatggtagcctggccagcaacccttattctggtgacctcacaaagttcggccgtggggatgcctcctccccagccccggccacaaccttggcccaaccccaacagaaccagacgcagactcaccataccacgcagcagacattcctgaacccggcgctgcctcctggctacagttacaccagcctgccatactatacaggggtcccgggcctccccagcaccttccagtatgggcctgctgtgttccctgtggctcctacctcttccaagcagcatggtgtgaatgtcagtgtgaatgcatcggccacccctttccaacagccgagtggatatgggtctcatggatacaacactggaagaaaatatccacccccttacaagcatttctggacggctgagagctaatttggcccaaggctgggggctgtgttttgtgtgtgtgtataaatttgcactgaagtcttgtttcagaaaccagaccactgaggagagcctgctgagctgaggccatggcctgcgtggcttggggaaatgagttggtggataccttctgggcttttgaacttgcccctcccccatttccctctcccccatgtgtctgaccctgtcttacccatttcaagttcaagcggtgcagcaccttcgaagcatcaatgcacacacctgctgttgcttttgatttctggaaggcatgtagtttcaacttgtaacaaaaatatttgtagtcttcaataaactgtggtatttct

SEQ ID NO: 358572 - DNA, 4060 bp, Homo sapiens
tatatcacgtgacaggggcggcgcggcccggggtgtcagtgtggaggagactgaggtaaagttgggagcgcagcggcgttggcggcggcggcggcggcagcggcagcgcggcggggccggtattctaccttgtaaatactgttatttgtatatactgtaaatgatgacatcggtgggcactaaccgagcccggggaaactgggaacaacctcaaaaccaaaaccagacacagcacaagcagcggccacaggccactgcagaacaaattagacttgcacagatgatttcggaccataatgatgctgactttgaggagaaggtgaaacaattgattgatattacaggcaagaaccaggatgaatgtgtgattgctttgcatgactgcaatggagatgtcaacagagctatcaatgttcttctggaaggaaacccagacacgcattcctgggagatggtcgggaagaagaagggagtctcaggccagaaggatggtggccagacggaatccaatgaggaaggcaaagaaaatcgagaccgggacagagactatagtcggcgacgtggtgggccaccaagacgggggagaggtgccagccgtggacgagagtttcgaggtcaggaaaatggattggatggcaccaagagtggagggccttctggaagaggaacagaaagaggcagaaggggccgtggccgaggcagaggtggctctggtaggcgaggaggaaggttttctgctcaaggaatgggaacctttaacccagctgattatgcagagccagccaatactgatgataactatggcaatagcagcggcaatacgtggaacaacactggccactttgaaccagatgatgggacgagtgcatggaggactgcaacagaggagtgggggactgaagattggaatgaagatctttctgagaccaagatcttcactgcctctaatgtgtcttcagtgcctctgcctgcggagaatgtgacaatcactgctggtcagagaattgaccttgctgttctgctggggaagacaccatctacaatggagaatgattcatctaatctggatccgtctcaggctccttctctggcccagcctctggtgttcagtaattcgaagcagactgccatatcacagcctgcttcagggaacacattttctcatcacagtatggtgagcatgttagggaaaggatttggtgatgtcggtgaagctaaaggcggcagtactacaggctcccagttcttggagcaattcaagactgcccaagccctggctcagttggcagctcagcattctcagtctggaagcaccaccacctcctcttgggacatgggctcgacgacacaatccccatcactggtgcagtatgatttgaagaacccaagtgattcagcagtgcacagcccctttacaaagcgccaggcttttaccccatcttcaaccatgatggaggtgttccttcaggagaagtcacctgcagtggctacctccacagctgcacctccacctccgtcttctcctctgccaagcaaatccacatcggctccacagatgtcgcctggatcttcagacaaccagtcctctagccctcagccggctcagcagaaactgaaacagcagaagaaaaaagcctccttgacttctaagattcctgctctggctgtggagatgcctggctcagcagatatctcagggctaaacctgcagtttggggcattgcagtttgggtcagagcctgtcctttctgattatgagtccacccccaccacgagcgcctcttcaagccaggctccaagtagcctgtataccagcacggccagtgaatcatcctctacaatttcatctaaccagagtcaggagtctggttatcagagcggcccaattcagtcgacaacctatacctcccaaaataatgctcagggccctctttatgaacagagatccacacagactcggcggtaccccagctccatctcttcatcaccccaaaaggacctgactcaggcaaagaatggcttcagttctgtgcaggccacgcagttacagaccacacaatctgttgaaggtgctacaggctctgcagtgaaatctgattcaccttccacttctagcatcccccctctcaatgaaacggtatctgcagcttccttactgacgacaaccaatcagcattcatcctccttgggtggcttgagccacagtgaggagattccaaatactaccaccacacaacacagcagcacgttatctacgcagcagaataccctttcatcatcaacatcttctgggcgcacttcgacatccactcttttgcacacaagtgtggagagtgaggcgaatctccattcttcctccagcactttttccaccacatccagcacagtctctgcacctcccccagtggtcagtgtctcctccagtctcaatagtggcagtagcctgggcctcagcctaggcagcaactccactgtcacagcctcgactcgaagctcagttgctacgacttcaggaaaagctcctcccaacctccctcctggggtcccgccgttgttgcctaatccgtatattatggctccagggctgttacatgcctacccgccacaagtatatggttatgatgacttgcagatgcttcagacaagatttccattggattactacagcatcccatttcccacacccactactccgctgactgggagggatggtagcctggccagcaacccttattctggtgacctcacaaagttcggccgtggggatgcctcctccccagccccggccacaaccttggcccaaccccaacagaaccagacgcagactcaccataccacgcagcagacattcctgaacccggcgctgcctcctggctacagttacaccagcctgccatactatacaggggtcccgggcctccccagcaccttccagtatgggcctgctgtgttccctgtggctcctacctcttccaagcagcatggtgtgaatgtcagtgtgaatgcatcggccacccctttccaacagccgagtggatatgggtctcatggatacaacactggtgtttcagtcacctccagtaacacgggcgtgccagatatctcgggttctgtgtactccaaaacccagcagtcctttgagaaacaaggttttcattccggtactcctgctgcttccttcaacttgccttcagccctaggaagtgggggccccatcaatccggccacagctgctgcctacccacctgccccctttatgcacattctgaccccccatcagcagccgcattctcagatccttcaccatcacctgcagcaggatggccagctaccatatttgcagatgattctctgttgccagcgccagcaggaggagcagacgggcagcgggcaacgtagccagaccagctccatcccgcagaagccccagaccaacaagtctgcctacaacagctacagctggggggccaactgaggccctgaccctcttctcccggtcccatcttctgagagggcttctcagcctggaaactatggaaacagcatcaaagagaaaggaatgtggggggtttccgctgccccccacccccagcggcccaccccatgcctcagcttcatgtctgtcccattcctataccatccccaccctgttgtatgtattataggatttgtattttctccttttttttcccccttccattccttctcccctcttgcattcaagattatgaaactttgctatgggccctgcacttcctttgcttcctcctgttcaccctggtggtgtacggatgaggcggggaggtgggacccccaaacatatatcagcccaacagccctaagtctccttctttattattaggaaaacaacaacaacaacaaacaaaaaaatggcgtcatgaatatgaacagcattgtcagatgaattagttgaagtggttttttttttgttttttttttttttttgtactgtgtcctcaaatttaatggattaatgtgtcttgtatatataaaaagaaaacctctaccttcagcctctgcctattcttgctccgtctag

SEQ ID NO: 358573 - DNA, 3588 bp, Homo sapiens
tatatcacgtgacaggggcggcgcggcccggggtgtcagtgtggaggagactgaggtaaagttgggagcgcagcggcgttggcggcggcggcggcggcagcggcagcgcggcggggccggtattctaccttgtaaatactgttatttgtatatactgtaaatgatgacatcggtgggcactaaccgagcccggggaaactgggaacaacctcaaaaccaaaaccagacacagcacaagcagcggccacaggccactgcagaacaaattagacttgcacagatgatttcggaccataatgatgctgactttgaggagaaggtgaaacaattgattgatattacaggcaagaaccaggatgaatgtgtgattgctttgcatgactgcaatggagatgtcaacagagctatcaatgttcttctggaaggaaacccagacacgcattcctgggagatggtcgggaagaagaagggagtctcaggccagaaggatggtggccagacggaatccaatgaggaaggcaaagaaaatcgagaccgggacagagactatagtcggcgacgtggtgggccaccaagacgggggagaggtgccagccgtggacgagagtttcgaggtcaggaaaatggattggatggcaccaagagtggagggccttctggaagaggaacagaaagaggcagaaggggccgtggccgaggcagaggtggctctggtaggcgaggaggaaggttttctgctcaaggaatgggaacctttaacccagctgattatgcagagccagccaatactgatgataactatggcaatagcagcggcaatacgtggaacaacactggccactttgaaccagatgatgggacgagtgcatggaggactgcaacagaggagtgggggactgaagattggaatgaagatctttctgagaccaagatcttcactgcctctaatgtgtcttcagtgcctctgcctgcggagaatgtgacaatcactgctggtcagagaattgaccttgctgttctgctggggaagacaccatctacaatggagaatgattcatctaatctggatccgtctcaggctccttctctggcccagcctctggtgttcagtaattcgaagcagactgccatatcacagcctgcttcagggaacacattttctcatcacagtatggtgagcatgttagggaaaggatttggtgatgtcggtgaagctaaaggcggcagtactacaggctcccagttcttggagcaattcaagactgcccaagccctggctcagttggcagctcagcattctcagtctggaagcaccaccacctcctcttgggacatgggctcgacgacacaatccccatcactggtgcagtatgatttgaagaacccaagtgattcagcagtgcacagcccctttacaaagcgccaggcttttaccccatcttcaaccatgatggaggtgttccttcaggagaagtcacctgcagtggctacctccacagctgcacctccacctccgtcttctcctctgccaagcaaatccacatcggctccacagatgtcgcctggatcttcagacaaccagtcctctagccctcagccggctcagcagaaactgaaacagcagaagaaaaaagcctccttgacttctaagattcctgctctggctgtggagatgcctggctcagcagatatctcagggctaaacctgcagtttggggcattgcagtttgggtcagagcctgtcctttctgattatgagtccacccccaccacgagcgcctcttcaagccaggctccaagtagcctgtataccagcacggccagtgaatcatcctctacaatttcatctaaccagagtcaggagtctggttatcagagcggcccaattcagtcgacaacctatacctcccaaaataatgctcagggccctctttatgaacagagatccacacagactcggcggtaccccagctccatctcttcatcaccccaaaaggacctgactcaggcaaagaatggcttcagttctgtgcaggccacgcagttacagaccacacaatctgttgaaggtgctacaggctctgcagtgaaatctgattcaccttccacttctagcatcccccctctcaatgaaacggtatctgcagcttccttactgacgacaaccaatcagcattcatcctccttgggtggcttgagccacagtgaggagattccaaatactaccaccacacaacacagcagcacgttatctacgcagcagaataccctttcatcatcaacatcttctgggcgcacttcgacatccactcttttgcacacaagtgtggagagtgaggcgaatctccattcttcctccagcactttttccaccacatccagcacagtctctgcacctcccccagtggtcagtgtctcctccagtctcaatagtggcagtagcctgggcctcagcctaggcagcaactccactgtcacagcctcgactcgaagctcagttgctacgacttcaggaaaagctcctcccaacctccctcctggggtcccgccgttgttgcctaatccgtatattatggctccagggctgttacatgcctacccggtaagtgggactaaaggatcttcttcaaaagaatgaggatgaatgttctgttgaattagcttgtctcttggctccttgttttgctaacatcatgaccagttcctgttattgctatatgtctgtatctttcagccacaagtatatggttatgatgacttgcagatgcttcagacaagatttccattggattactacagcatcccatttcccacacccactactccgctgactgggagggatggtagcctggccagcaacccttattctggtgacctcacaaagttcggccgtggggatgcctcctccccagccccggccacaaccttggcccaaccccaacagaaccagacgcagactcaccataccacgcagcagacattcctgaacccggcgctgcctcctggctacagttacaccagcctgccatactatacaggggtcccgggcctccccagcaccttccagtatgggcctgctgtgttccctgtggctcctacctcttccaagcagcatggtgtgaatgtcagtgtgaatgcatcggccacccctttccaacagccgagtggatatgggtctcatggatacaacactggaagaaaatatccacccccttacaagcatttctggacggctgagagctaatttggcccaaggctgggggctgtgttttgtgtgtgtgtataaatttgcactgaagtcttgtttcagaaaccagaccactgaggagagcctgctgagctgaggccatggcctgcgtggcttggggaaatgagttggtggataccttctgggcttttgaacttgcccctcccccatttccctctcccccatgtgtctgaccctgtcttacccatttcaagttcaagcggtgcagcaccttcgaagcatcaatgcacacacctgctgttgcttttgatttctggaaggcatgtagtttcaacttgtaacaaaaatatttgtagtcttcaataaactgtggtatttct

SEQ ID NO: 358574 - DNA, 5101 bp, Homo sapiens
  misc_feature (5100)..(5101): n is a, c, g, or t
tatatcacgtgacaggggcggcgcggcccggggtgtcagtgtggaggagactgaggtaaagttgggagcgcagcggcgttggcggcggcggcggcggcagcggcagcgcggcggggccggtattctaccttgtaaatactgttatttgtatatactgtaaatgatgacatcggtgggcactaaccgagcccggggaaactgggaacaacctcaaaaccaaaaccagacacagcacaagcagcggccacaggccactgcagaacaaattagacttgcacagatgatttcggaccataatgatgctgactttgaggagaaggtgaaacaattgattgatattacaggcaagaaccaggatgaatgtgtgattgctttgcatgactgcaatggagatgtcaacagagctatcaatgttcttctggaaggaaacccagacacgcattcctgggagatggtcgggaagaagaagggagtctcaggccagaaggatggtggccagacggaatccaatgaggaaggcaaagaaaatcgagaccgggacagagactatagtcggcgacgtggtgggccaccaagacgggggagaggtgccagccgtggacgagagtttcgaggtcaggaaaatggattggatggcaccaagagtggagggccttctggaagaggaacagaaagaggcagaaggggccgtggccgaggcagaggtggctctggtaggcgaggaggaaggttttctgctcaaggaatgggaacctttaacccagctgattatgcagagccagccaatactgatgataactatggcaatagcagcggcaatacgtggaacaacactggccactttgaaccagatgatgggacgagtgcatggaggactgcaacagaggagtgggggactgaagattggaatgaagatctttctgagaccaagatcttcactgcctctaatgtgtcttcagtgcctctgcctgcggagaatgtgacaatcactgctggtcagagaattgaccttgctgttctgctggggaagacaccatctacaatggagaatgattcatctaatctggatccgtctcaggctccttctctggcccagcctctggtgttcagtaattcgaagcagactgccatatcacagcctgcttcagggaacacattttctcatcacagtatggtgagcatgttagggaaaggatttggtgatgtcggtgaagctaaaggcggcagtactacaggctcccagttcttggagcaattcaagactgcccaagccctggctcagttggcagctcagcattctcagtctggaagcaccaccacctcctcttgggacatgggctcgacgacacaatccccatcactggtgcagtatgatttgaagaacccaagtgattcagcagtgcacagcccctttacaaagcgccaggcttttaccccatcttcaaccatgatggaggtgttccttcaggagaagtcacctgcagtggctacctccacagctgcacctccacctccgtcttctcctctgccaagcaaatccacatcggctccacagatgtcgcctggatcttcagacaaccagtcctctagccctcagccggctcagcagaaactgaaacagcagaagaaaaaagcctccttgacttctaagattcctgctctggctgtggagatgcctggctcagcagatatctcagggctaaacctgcagtttggggcattgcagtttgggtcagagcctgtcctttctgattatgagtccacccccaccacgagcgcctcttcaagccaggctccaagtagcctgtataccagcacggccagtgaatcatcctctacaatttcatctaaccagagtcaggagtctggttatcagagcggcccaattcagtcgacaacctatacctcccaaaataatgctcagggccctctttatgaacagagatccacacagactcggcggtaccccagctccatctcttcatcaccccaaaaggacctgactcaggcaaagaatggcttcagttctgtgcaggccacgcagttacagaccacacaatctgttgaaggtgctacaggctctgcagtgaaatctgattcaccttccacttctagcatcccccctctcaatgaaacggtatctgcagcttccttactgacgacaaccaatcagcattcatcctccttgggtggcttgagccacagtgaggagattccaaatactaccaccacacaacacagcagcacgttatctacgcagcagaataccctttcatcatcaacatcttctgggcgcacttcgacatccactcttttgcacacaagtgtggagagtgaggcgaatctccattcttcctccagcactttttccaccacatccagcacagtctctgcacctcccccagtggtcagtgtctcctccagtctcaatagtggcagtagcctgggcctcagcctaggcagcaactccactgtcacagcctcgactcgaagctcagttgctacgacttcaggaaaagctcctcccaacctccctcctggggtcccgccgttgttgcctaatccgtatattatggctccagggctgttacatgcctacccgccacaagtatatggttatgatgacttgcagatgcttcagacaagatttccattggattactacagcatcccatttcccacacccactactccgctgactgggagggatggtagcctggccagcaacccttattctggtgacctcacaaagttcggccgtggggatgcctcctccccagccccggccacaaccttggcccaaccccaacagaaccagacgcagactcaccataccacgcagcagacattcctgaacccggcgctgcctcctggctacagttacaccagcctgccatactatacaggggtcccgggcctccccagcaccttccagtatgggcctgctgtgttccctgtggctcctacctcttccaagcagcatggtgtgaatgtcagtgtgaatgcatcggccacccctttccaacagccgagtggatatgggtctcatggatacaacactggtgtttcagtcacctccagtaacacgggcgtgccagatatctcgggttctgtgtactccaaaacccagcagtcctttgagaaacaaggttttcattccggtactcctgctgcttccttcaacttgccttcagccctaggaagtgggggccccatcaatccggccacagctgctgcctacccacctgccccctttatgcacattctgaccccccatcagcagccgcattctcagatccttcaccatcacctgcagcaggatggccaggtaatagcccttccccttctctcctttcccttcctcttccttcctatcccttaaaactgccttccctttccttttcttacccttcctcaccaccaccttcacccaatccctccccagcgccagtcatgggcacacagcacatacagacacaagcgcacataacacgagcggccggcaaaggaaatctcagagaagggccgggttgaaaccttttttgcccaattcctttggtgcccttctcctcctgtgccacagttgtcctcatcccatcagacctgggtcacaccttccctctttcctctcccagccttccctcttccctgacattttagctttcccttctaatggtggagttctattgtcaaagtttgtccctttattttccatatatcctggttctgcctcagctaccatatttgcagatgattctctgttgccagcgccagcaggaggagcagacgggcagcgggcaacgtagccagaccagctccatcccgcagaagccccagaccaacaagtctgcctacaacagctacagctggggggccaactgaggccctgaccctcttctcccggtcccatcttctgagagggcttctcagcctggaaactatggaaacagcatcaaagagaaaggaatgtggggggtttccgctgccccccacccccagcggcccaccccatgcctcagcttcatgtctgtcccattcctataccatccccaccctgttgtatgtattataggatttgtattttctccttttttttcccccttccattccttctcccctcttgcattcaagattatgaaactttgctatgggccctgcacttcctttgcttcctcctgttcaccctggtggtgtacggatgaggcggggaggtgggacccccaaacatatatcagcccaacagccctaagtctccttctttattattaggaaaacaacaacaacaacaaacaaaaaaatggcgtcatgaatatgaacagcattgtcagatgaattagttgaagtggttttttttttgttttttttttttttttgtactgtgtcctcaaatttaatggattaatgtgtcttgtatatataaaaagaaaacctctaccttcagcctctgcctattcttgctccgtctaggacatcctcaatttcgtcgatgaccagcttggtgaataagtattactgtaccaactgggcctcctctagcaggcccctgaaggcagtggaataaaatgaaatcttcgccctttaagaactcctgaccttaatgtggtagtagtatcttgtccttgaggggatttccttcccctcacccctaagactttcacaacctggtgactggaaagaaccaccacaaatcttcatttcctccagaaactgctacatctacagccgatttcaggcagtaaagggagagggatagaggagattgggtggaaaatggagaggatcaagaaggagctgagaccatttcaaagaaaaaaaatgctttatagagttttaagtatgacttagatgggtccaggcaaataaactaaaaagaagtgaaggcaacatgtatcgtctggcagaactaaatcttggagtggggtgagggatgaaagactacatattgggtacagtgtacactgctcgggtgatgggtgcgctaaagtcgcagaaatcactaaagaactcatccatgtaaccaaacaccacctgtaccccaaaaacgaaataaaaaaacaaaaccttggggcccattccccctaggaatggactactgtaaann

SEQ ID NO: 358575 - DNA, 4123 bp, Homo sapiens
tatatcacgtgacaggggcggcgcggcccggggtgtcagtgtggaggagactgaggtaaagttgggagcgcagcggcgttggcggcggcggcggcggcagcggcagcgcggcggggccggtattctaccttgtaaatactgttatttgtatatactgtaaatgatgacatcggtgggcactaaccgagcccggggaaactgggaacaacctcaaaaccaaaaccagacacagcacaagcagcggccacaggccactgcagaacaaattagacttgcacagatgatttcggaccataatgatgctgactttgaggagaaggtgaaacaattgattgatattacaggcaagaaccaggatgaatgtgtgattgctttgcatgactgcaatggagatgtcaacagagctatcaatgttcttctggaaggaaacccagacacgcattcctgggagatggtcgggaagaagaagggagtctcaggccagaaggatggtggccagacggaatccaatgaggaaggcaaagaaaatcgagaccgggacagagactatagtcggcgacgtggtgggccaccaagacgggggagaggtgccagccgtggacgagagtttcgaggtcaggaaaatggattggatggcaccaagagtggagggccttctggaagaggaacagaaagaggcagaaggggccgtggccgaggcagaggtggctctggtaggcgaggaggaaggttttctgctcaaggaatgggaacctttaacccagctgattatgcagagccagccaatactgatgataactatggcaatagcagcggcaatacgtggaacaacactggccactttgaaccagatgatgggacgagtgcatggaggactgcaacagaggagtgggggactgaagattggaatgaagatctttctgagaccaagatcttcactgcctctaatgtgtcttcagtgcctctgcctgcggagaatgtgacaatcactgctggtcagagaattgaccttgctgttctgctggggaagacaccatctacaatggagaatgattcatctaatctggatccgtctcaggctccttctctggcccagcctctggtgttcagtaattcgaagcagactgccatatcacagcctgcttcagggaacacattttctcatcacagtatggtgagcatgttagggaaaggatttggtgatgtcggtgaagctaaaggcggcagtactacaggctcccagttcttggagcaattcaagactgcccaagccctggctcagttggcagctcagcattctcagtctggaagcaccaccacctcctcttgggacatgggctcgacgacacaatccccatcactggtgcagtatgatttgaagaacccaagtgattcagcagtgcacagcccctttacaaagcgccaggcttttaccccatcttcaaccatgatggaggtgttccttcaggagaagtcacctgcagtggctacctccacagctgcacctccacctccgtcttctcctctgccaagcaaatccacatcggctccacagatgtcgcctggatcttcagacaaccagtcctctagccctcagccggctcagcagaaactgaaacagcagaagaaaaaagcctccttgacttctaagattcctgctctggctgtggagatgcctggctcagcagatatctcagggctaaacctgcagtttggggcattgcagtttgggtcagagcctgtcctttctgattatgagtccacccccaccacgagcgcctcttcaagccaggctccaagtagcctgtataccagcacggccagtgaatcatcctctacaatttcatctaaccagagtcaggagtctggttatcagagcggcccaattcagtcgacaacctatacctcccaaaataatgctcagggccctctttatgaacagagatccacacagactcggcggtaccccagctccatctcttcatcaccccaaaaggacctgactcaggcaaagaatggcttcagttctgtgcaggccacgcagttacagaccacacaatctgttgaaggtgctacaggctctgcagtgaaatctgattcaccttccacttctagcatcccccctctcaatgaaacggtatctgcagcttccttactgacgacaaccaatcagcattcatcctccttgggtggcttgagccacagtgaggagattccaaatactaccaccacacaacacagcagcacgttatctacgcagcagaataccctttcatcatcaacatcttctgggcgcacttcgacatccactcttttgcacacaagtgtggagagtgaggcgaatctccattcttcctccagcactttttccaccacatccagcacagtctctgcacctcccccagtggtcagtgtctcctccagtctcaatagtggcagtagcctgggcctcagcctaggcagcaactccactgtcacagcctcgactcgaagctcagttgctacgacttcaggaaaagctcctcccaacctccctcctggggtcccgccgttgttgcctaatccgtatattatggctccagggctgttacatgcctacccgccacaagtatatggttatgatgacttgcagatgcttcagacaagatttccattggattactacagcatcccatttcccacacccactactccgctgactgggagggatggtagcctggccagcaacccttattctggtgacctcacaaagttcggccgtggggatgcctcctccccagccccggccacaaccttggcccaaccccaacagaaccagacgcagactcaccataccacgcagcagacattcctgaacccggcgctgcctcctggctacagttacaccagcctgccatactatacaggggtcccgggcctccccagcaccttccagtatgggcctgctgtgttccctgtggctcctacctcttccaagcagcatggtgtgaatgtcagtgtgaatgcatcggccacccctttccaacagccgagtggatatgggtctcatggatacaacactggtgtttcagtcacctccagtaacacgggcgtgccagatatctcgggttctgtgtactccaaaacccagcagtcctttgagaaacaaggttttcattccggtactcctgctgcttccttcaacttgccttcagccctaggaagtgggggccccatcaatccggccacagctgctgcctacccacctgccccctttatgcacattctgaccccccatcagcagccgcattctcagatccttcaccatcacctgcagcaggatggccagacgggcagcgggcaacgtagccagaccagctccatcccgcagaagccccagaccaacaagtctgcctacaacagctacagctggggggccaactgaggccctgaccctcttctcccggtcccatcttctgagagggcttctcagcctggaaactatggaaacagcatcaaagagaaaggaatgtggggggtttccgctgccccccacccccagcggcccaccccatgcctcagcttcatgtctgtcccattcctataccatccccaccctgttgtatgtattataggatttgtattttctccttttttttcccccttccattccttctcccctcttgcattcaagattatgaaactttgctatgggccctgcacttcctttgcttcctcctgttcaccctggtggtgtacggatgaggcggggaggtgggacccccaaacatatatcagcccaacagccctaagtctccttctttattattaggaaaacaacaacaacaacaaacaaaaaaatggcgtcatgaatatgaacagcattgtcagatgaattagttgaagtggttttttttttgttttttttttttttttgtactgtgtcctcaaatttaatggattaatgtgtcttgtatatataaaaagaaaacctctaccttcagcctctgcctattcttgctccgtctaggacatcctcaatttcgtcgatgaccagcttggtgaataagtattactgtaccaactgggcctcctctagcaggcccctgaaggcagtggaataaaatgaaatcttcgcccttta

SEQ ID NO: 358576 - DNA, 3336 bp, Homo sapiens
tatatcacgtgacaggggcggcgcggcccggggtgtcagtgtggaggagactgaggtaaagttgggagcgcagcggcgttggcggcggcggcggcggcagcggcagcgcggcggggccggtattctaccttgtaaatactgttatttgtatatactgtaaatgatgacatcggtgggcactaaccgagcccggggaaactgggaacaacctcaaaaccaaaaccagacacagcacaagcagcggccacaggccactgcagaacaaattagacttgcacagatgatttcggaccataatgatgctgactttgaggagaaggtgaaacaattgattgatattacaggcaagaaccaggatgaatgtgtgattgctttgcatgactgcaatggagatgtcaacagagctatcaatgttcttctggaaggaaacccagacacgcattcctgggagatggtcgggaagaagaagggagtctcaggccagaaggatggtggccagacggaatccaatgaggaaggcaaagaaaatcgagaccgggacagagactatagtcggcgacgtggtgggccaccaagacgggggagaggtgccagccgtggacgagagtttcgaggtcaggaaaatggattggatggcaccaagagtggagggccttctggaagaggaacagaaagaggcagaaggggccgtggccgaggcagaggtggctctggtaggcgaggaggaaggttttctgctcaaggaatgggaacctttaacccagctgattatgcagagccagccaatactgatgataactatggcaatagcagcggcaatacgtggaacaacactggccactttgaaccagatgatgggacgagtgcatggaggactgcaacagaggagtgggggactgaagattggaatgaagatctttctgagaccaagatcttcactgcctctaatgtgtcttcagtgcctctgcctgcggagaatgtgacaatcactgctggtcagagaattgaccttgctgttctgctggggaagacaccatctacaatggagaatgattcatctaatctggatccgtctcaggctccttctctggcccagcctctggtgttcagtaattcgaagcagactgccatatcacagcctgcttcagggaacacattttctcatcacagtatggtgagcatgttagggaaaggatttggtgatgtcggtgaagctaaaggcggcagtactacaggctcccagttcttggagcaattcaagactgcccaagccctggctcagttggcagctcagcattctcagtctggaagcaccaccacctcctcttgggacatgggctcgacgacacaatccccatcactggtgcagtatgatttgaagaacccaagtgattcagcagtgcacagcccctttacaaagcgccaggcttttaccccatcttcaaccatgatggaggtgttccttcaggagaagtcacctgcagtggctacctccacagctgcacctccacctccgtcttctcctctgccaagcaaatccacatcggctccacagatgtcgcctggatcttcagacaaccagtcctctagccctcagccggctcagcagaaactgaaacagcagaagaaaaaagcctccttgacttctaagattcctgctctggctgtggagatgcctggctcagcagatatctcagggctaaacctgcagtttggggcattgcagtttgggtcagagcctgtcctttctgattatgagtccacccccaccacgagcgcctcttcaagccaggctccaagtagcctgtataccagcacggccagtgaatcatcctctacaatttcatctaaccagagtcaggagtctggttatcagagcggcccaattcagtcgacaacctatacctcccaaaataatgctcagggccctctttatgaacagagatccacacagactcggcggtaccccagctccatctcttcatcaccccaaaaggacctgactcaggcaaagaatggcttcagttctgtgcaggccacgcagttacagaccacacaatctgttgaaggtgctacaggctctgcagtgaaatctgattcaccttccacttctagcatcccccctctcaatgaaacggtatctgcagcttccttactgacgacaaccaatcagcattcatcctccttgggtggcttgagccacagtgaggagattccaaatactaccaccacacaacacagcagcacgttatctacgcagcagaataccctttcatcatcaacatcttctgggcgcacttcgacatccactcttttgcacacaagtgtggagagtgaggcgaatctccattcttcctccagcactttttccaccacatccagcacagtctctgcacctcccccagtggtcagtgtctcctccagtctcaatagtggcagtagcctgggcctcagcctaggcagcaactccactgtcacagcctcgactcgaagctcagttgctacgacttcaggaaaagctcctcccaacctccctcctggggtcccgccgttgttgcctaatccgtatattatggctccagggctgttacatgcctacccgccacaagtatatggttatgatgacttgcagatgcttcagacaagatttccattggattactacagcatcccatttcccacacccactactccgctgactgggagggatggtagcctggccagcaacccttattctggtgacctcacaaagttcggccgtggggatgcctcctccccagccccggccacaaccttggcccaaccccaacagaaccagacgcagactcaccataccacgcagcagacattcctgaacccggcgctgcctcctggctacagttacaccagcctgccatactatacaggggtcccgggcctccccagcaccttccagtatgggcctgctgtgttccctgtggctcctacctcttccaagcagcatggtgtgaatgtcagtgtgaatgcatcggccacccctttccaacagccgagtggatatgggtctcatggatacaacactggtaagctgaccttgtctctggctcggtgttatctgtggggtgttattggataaatttcagggaggaagacttggtgcttgagaaaatgggattggtgagggtgtgccgctgccccaggtatgattgttaatgcttggctgacttgggtatctgtgggagcagcaccaacagaggagcttgatactaggacatgtgtccactatttgtgacgggaatgcccaagagtatgtgttggtttttagaatatgttggttggccaaaagtgtgggtggaa

SEQ ID NO: 358577 - DNA, 1448 bp, Homo sapiens
agaggatcccgccttccgaccacgaagttcgtagaacctgactacatctcgtggtaggtgctatgaagacatctgcgggtgaaatctgattcaccttccacttctagcatcccccctctcaatgaaacggtatctgcagcttccttactgacgacaaccaatcagcattcatcctccttgggtggcttgagccacagtgaggagattccaaatactaccaccacacaacacagcagcacgttatctacgcagcagaataccctttcatcatcaacatcttctgggcgcacttcgacatccactcttttgcacacaagtgtggagagtgaggcgaatctccattcttcctccagcactttttccaccacatccagcacagtctctgcacctcccccagtggtcagtgtctcctccagtctcaatagtggcagtagcctgggcctcagcctaggcagcaactccactgtcacagcctcgactcgaagctcagttgctacgacttcaggaaaagctcctcccaacctccctcctggggtcccgccgttgttgcctaatccgtatattatggctccagggctgttacatgcctacccgccacaagtatatggttatgatgacttgcagatgcttcagacaagatttccattggattactacagcatcccatttcccacacccactactccgctgactgggagggatggtagcctggccagcaacccttattctggtgacctcacaaagttcggccgtggggatgcctcctccccagccccggccacaaccttggcccaaccccaacagaaccagacgcagactcaccataccacgcagcagacattcctgaacccggcgctgcctcctggctacagttacaccagcctgccatactatacaggggtcccgggcctccccagcaccttccagtatgggcctgctgtgttccctgtggctcctacctcttccaagcagcatggtgtgaatgtcagtgtgaatgcatcggccacccctttccaacagccgagtggatatgggtctcatggatacaacactggaagaaaatatccacccccttacaagcatttctggacggctgagagctaatttggcccaaggctgggggctgtgttttgtgtgtgtgtataaatttgcactgaagtcttgtttcagaaaccagaccactgaggagagcctgctgagctgaggccatggcctgcgtggcttggggaaatgagttggtggataccttctgggcttttgaacttgcccctcccccatttccctctcccccatgtgtctgaccctgtcttacccatttcaagttcaagcggtgcagcaccttcgaagcatcaatgcacacacctgctgttgcttttgatttctggaaggcatgtagtttcaacttgtaacaaaaatatttgtagtcttcaataaactgtggtatttct

SEQ ID NO: 358578 - DNA, 3037 bp, Homo sapiens
tatatcacgtgacaggggcggcgcggcccggggtgtcagtgtggaggagactgaggtaaagttgggagcgcagcggcgttggcggcggcggcggcggcagcggcagcgcggcggggccggtattctaccttgtaaatactgttatttgtatatactgtaaatgatgacatcggtgggcactaaccgagcccggggaaactgggaacaacctcaaaaccaaaaccagacacagcacaagcagcggccacaggccactgcagaacaaattagacttgcacagatgatttcggaccataatgatgctgactttgaggagaaggtgaaacaattgattgatattacaggcaagaaccaggatgaatgtgtgattgctttgcatgactgcaatggagatgtcaacagagctatcaatgttcttctggaaggaaacccagacacgcattcctgggagatggtcgggaagaagaagggagtctcaggccagaaggatggtggccagacggaatccaatgaggaaggcaaagaaaatcgagaccgggacagagactatagtcggcgacgtggtgggccaccaagacgggggagaggtgccagccgtggacgagagtttcgaggtcaggaaaatggattggatggcaccaagagtggagggccttctggaagaggaacagaaagaggcagaaggggccgtggccgaggcagaggtggctctggtaggcgaggaggaaggttttctgctcaaggaatgggaacctttaacccagctgattatgcagagccagccaatactgatgataactatggcaatagcagcggcaatacgtggaacaacactggccactttgaaccagatgatgggacgagtgcatggaggactgcaacagaggagtgggggactgaagattggaatgaagatctttctgagaccaagatcttcactgcctctaatgtgtcttcagtgcctctgcctgcggagaatgtgacaatcactgctggtcagagaattgaccttgctgttctgctggggaagacaccatctacaatggagaatgattcatctaatctggatccgtctcaggctccttctctggcccagcctctggtgttcagtaattcgaagcagactgccatatcacagcctgcttcagggaacacattttctcatcacagtatggtgagcatgttagggaaaggatttggtgatgtcggtgaagctaaaggcggcagtactacaggctcccagttcttggagcaattcaagactgcccaagccctggctcagttggcagctcagcattctcagtctggaagcaccaccacctcctcttgggacatgggctcgacgacacaatccccatcactggtgcagtatgatttgaagaacccaagtgattcagcagtgcacagcccctttacaaagcgccaggcttttaccccatcttcaaccatgatggaggtgttccttcaggagaagtcacctgcagtggctacctccacagctgcacctccacctccgtcttctcctctgccaagcaaatccacatcggctccacagatgtcgcctggatcttcagacaaccagtcctctagccctcagccggctcagcagaaactgaaacagcagaagaaaaaagcctccttgacttctaagattcctgctctggctgtggagatgcctggctcagcagatatctcagggctaaacctgcagtttggggcattgcagtttgggtcagagcctgtcctttctgattatgagtccacccccaccacgagcgcctcttcaagccaggctccaagtagcctgtataccagcacggccagtgaatcatcctctacaatttcatctaaccagagtcaggagtctggttatcagagcggcccaattcagtcgacaacctatacctcccaaaataatgctcagggccctctttatgaacagagatccacacagactcggcggtaccccagctccatctcttcatcaccccaaaaggacctgactcaggcaaagaatggcttcagttctgtgcaggccacgcagttacagaccacacaatctgttgaaggtgctacaggctctgcagtgaaatctgattcaccttccacttctagcatcccccctctcaatgaaacggtatctgcagcttccttactgacgacaaccaatcagcattcatcctccttgggtggcttgagccacagtgaggagattccaaatactaccaccacacaacacagcagcacgttatctacgcagcagaataccctttcatcatcaacatcttctgggcgcacttcgacatccactcttttgcacacaagtgtggagagtgaggcgaatctccattcttcctccagcactttttccaccacatccagcacagtctctgcacctcccccagtggtcagtgtctcctccagtctcaatagtggcagtagcctgggcctcagcctaggcagcaactccactgtcacagcctcgactcgaagctcagttgctacgacttcaggaaaagctcctcccaacctccctcctggggtcccgccgttgttgcctaatccgtatattatggctccagggctgttacatgcctacccgccacaagtatatggttatgatgacttgcagatgcttcagacaagatttccattggattactacagcatcccatttcccacacccactactccgctgactgggagggatggtagcctggccagcaacccttattctggtgacctcacaaagttcggccgtggggatgcctcctccccagccccggccacaaccttggcccaaccccaacagaaccagacgcagactcaccataccacgcagcagacattcctgaacccggcgctgcctcctggctacagttacaccagcctgccatactatacaggggtcccgggcctccccagcaccttcgaagcatcaatgcacacacctgctgttgcttttgatttctggaaggcatgtagtttcaacttgtaacaaaaatatttgtagtcttcaataaactgtggtatttct

SEQ ID NO: 358579 - DNA, 1200 bp, Homo sapiens
agtggtgagaaggtgtacaggacatcacatcttctgggcgcacttcgacatccactctttgcacacaagtgtggagagtgaggcgaatctccattcttcctccagcactttttccaccacatccagcacagtctctgcacctcccccagtggtcagtgtctcctccagtctcaatagtggcagtagcctgggcctcagcctaggcagcaactccactgtcacagcctcgactcgaagctcagttgctacgacttcaggaaaagctcctcccaacctccctcctggggtcccgccgttgttgcctaatccgtatattatggctccagggctgttacatgcctacccgccacaagtatatggttatgatgacttgcagatgcttcagacaagatttccattggattactacagcatcccatttcccacacccactactccgctgactgggagggatggtagcctggccagcaacccttattctggtgacctcacaaagttcggccgtggggatgcctcctccccagccccggccacaaccttggcccaaccccaacagaaccagacgcagactcaccataccacgcagcagacattcctgaacccggcgctgcctcctggctacagttacaccagcctgccatactatacaggggtcccgggcctccccagcaccttccagtatgggcctgctgtgttccctgtggctcctacctcttccaagcagcatggtgtgaatgtcagtgtgaatgcatcggccacccctttccaacagccgagtggatatgggtctcatggatacaacactggaagaaaatatccacccccttacaagcatttctggacggctgagagctaatttggcccaaggctgggggctgtgttttgtgtgtgtgtataaatttgcactgaagtcttgtttcagaaaccagaccactgaggagagcctgctgagctgaggccatggcctgcgtggcttggggaaatgagttggtggataccttctgggcttttgaacttgcccctcccccatttccctctcccccatgtgtctgaccctgtcttacccatttcaagttcaagcggtgcagcaccttcgaagcatcaatgcacacacctgctgttgcttttgatttctggaaggcatgtagtttcaacttgtaacaaaaatatttgtagtcttcaataaactgtggtatttct

SEQ ID NO: 358580 - DNA, 2960 bp, Homo sapiens
tatatcacgtgacaggggcggcgcggcccggggtgtcagtgtggaggagactgaggtaaagttgggagcgcagcggcgttggcggcggcggcggcggcagcggcagcgcggcggggccggtattctaccttgtaaatactgttatttgtatatactgtaaatgatgacatcggtgggcactaaccgagcccggggaaactgggaacaacctcaaaaccaaaaccagacacagcacaagcagcggccacaggccactgcagaacaaattagacttgcacagatgatttcggaccataatgatgctgactttgaggagaaggtgaaacaattgattgatattacaggcaagaaccaggatgaatgtgtgattgctttgcatgactgcaatggagatgtcaacagagctatcaatgttcttctggaaggaaacccagacacgcattcctgggagatggtcgggaagaagaagggagtctcaggccagaaggatggtggccagacggaatccaatgaggaaggcaaagaaaatcgagaccgggacagagactatagtcggcgacgtggtgggccaccaagacgggggagaggtgccagccgtggacgagagtttcgaggtcaggaaaatggattggatggcaccaagagtggagggccttctggaagaggaacagaaagaggcagaaggggccgtggccgaggcagaggtggctctggtaggcgaggaggaaggttttctgctcaaggaatgggaacctttaacccagctgattatgcagagccagccaatactgatgataactatggcaatagcagcggcaatacgtggaacaacactggccactttgaaccagatgatgggacgagtgcatggaggactgcaacagaggagtgggggactgaagattggaatgaagatctttctgagaccaagatcttcactgcctctaatgtgtcttcagtgcctctgcctgcggagaatgtgacaatcactgctggtcagagaattgaccttgctgttctgctggggaagacaccatctacaatggagaatgattcatctaatctggatccgtctcaggctccttctctggcccagcctctggtgttcagtaattcgaagcagactgccatatcacagcctgcttcagggaacacattttctcatcacagtatggtgagcatgttagggaaaggatttggtgatgtcggtgaagctaaaggcggcagtactacaggctcccagttcttggagcaattcaagactgcccaagccctggctcagttggcagctcagcattctcagtctggaagcaccaccacctcctcttgggacatgggctcgacgacacaatccccatcactggtgcagtatgatttgaagaacccaagtgattcagcagtgcacagcccctttacaaagcgccaggcttttaccccatcttcaaccatgatggaggtgttccttcaggagaagtcacctgcagtggctacctccacagctgcacctccacctccgtcttctcctctgccaagcaaatccacatcggctccacagatgtcgcctggatcttcagacaaccagtcctctagccctcagccggctcagcagaaactgaaacagcagaagaaaaaagcctccttgacttctaagattcctgctctggctgtggagatgcctggctcagcagatatctcagggctaaacctgcagtttggggcattgcagtttgggtcagagcctgtcctttctgattatgagtccacccccaccacgagcgcctcttcaagccaggctccaagtagcctgtataccagcacggccagtgaatcatcctctacaatttcatctaaccagagtcaggagtctggttatcagagcggcccaattcagtcgacaacctatacctcccaaaataatgctcagggccctctttatgaacagagatccacacagactcggcggtaccccagctccatctcttcatcaccccaaaaggacctgactcaggcaaagaatggcttcagttctgtgcaggccacgcagttacagaccacacaatctgttgaaggtgctacaggctctgcagtgaaatctgattcaccttccacttctagcatcccccctctcaatgaaacggtatctgcagcttccttactgacgacaaccaatcagcattcatcctccttgggtggcttgagccacagtgaggagattccaaatactaccaccacacaacacagcagcacgttatctacgcagcagaataccctttcatcatcaacatcttctgggcgcacttcgacatccactcttttgcacacaagtgtggagagtgaggcgaatctccattcttcctccagcactttttccaccacatccagcacagtctctgcacctcccccagtggtcagtgtctcctccagtctcaatagtggcagtagcctgggcctcagcctaggcagcaactccactgtcacagcctcgactcgaagctcagttgctacgacttcaggaaaagctcctcccaacctccctcctggggtcccgccgttgttgcctaatccgtatattatggctccagggctgttacatgcctacccggtaagtgggactaaaggatcttcttcaaaaggtgaggatgttgtggctactctttttatagctctggcttcagatggacccctgtgaataccaaaacttgcacatactcaagccctgcagttggctctgtggaatccatgtatatgagttttgcattctgtaaatgtggccgtatttttgatctgtgtgtctggttggaaaaaattcatatataaacagcgtgcagttcaaacctgtgttaagggtcaactgtaattaaaatataaaataaatgagggattgccacatgtaatcaaactggtttttaatctttgcagttttggaaaaaatactaaactgaggccaacccatctattgt

SEQ ID NO: 358581 - DNA, 2407 bp, Homo sapiens
tatatcacgtgacaggggcggcgcggcccggggtgtcagtgtggaggagactgaggtaaagttgggagcgcagcggcgttggcggcggcggcggcggcagcggcagcgcggcggggccggtattctaccttgtaaatactgttatttgtatatactgtaaatgatgacatcggtgggcactaaccgagcccggggaaactgggaacaacctcaaaaccaaaaccagacacagcacaagcagcggccacaggccactgcagaacaaattagacttgcacagatgatttcggaccataatgatgctgactttgaggagaaggtgaaacaattgattgatattacaggcaagaaccaggatgaatgtgtgattgctttgcatgactgcaatggagatgtcaacagagctatcaatgttcttctggaaggaaacccagacacgcattcctgggagatggtcgggaagaagaagggagtctcaggccagaaggatggtggccagacggaatccaatgaggaaggcaaagaaaatcgagaccgggacagagactatagtcggcgacgtggtgggccaccaagacgggggagaggtgccagccgtggacgagagtttcgaggtcaggaaaatggattggatggcaccaagagtggagggccttctggaagaggaacagaaagaggcagaaggggccgtggccgaggcagaggtggctctggtaggcgaggaggaaggttttctgctcaaggaatgggaacctttaacccagctgattatgcagagccagccaatactgatgataactatggcaatagcagcggcaatacgtggaacaacactggccactttgaaccagatgatgggacgagtgcatggaggactgcaacagaggagtgggggactgaagattggaatgaagatctttctgagaccaagatcttcactgcctctaatgtgtcttcagtgcctctgcctgcggagaatgtgacaatcactgctggtcagagaattgaccttgctgttctgctggggaagacaccatctacaatggagaatgattcatctaatctggatccgtctcaggctccttctctggcccagcctctggtgttcagtaattcgaagcagactgccatatcacagcctgcttcagggaacacattttctcatcacagtatggtgagcatgttagggaaaggatttggtgatgtcggtgaagctaaaggcggcagtactacaggctcccagttcttggagcaattcaagactgcccaagccctggctcagttggcagctcagcattctcagtctggaagcaccaccacctcctcttgggacatgggctcgacgacacaatccccatcactggtgcagtatgatttgaagaacccaagtgattcagcagtgcacagcccctttacaaagcgccaggcttttaccccatcttcaaccatgatggaggtgttccttcaggagaagtcacctgcagtggctacctccacagctgcacctccacctccgtcttctcctctgccaagcaaatccacatcggctccacagatgtcgcctggatcttcagacaaccagtcctctagccctcagccggctcagcagaaactgaaacagcagaagaaaaaagcctccttgacttctaagattcctgctctggctgtggagatgcctggctcagcagatatctcagggctaaacctgcagtttggggcattgcagtttgggtcagagcctgtcctttctgattatgagtccacccccaccacgagcgcctcttcaagccaggctccaagtagcctgtataccagcacggccagtgaatcatcctctacaatttcatctaaccagagtcaggagtctggttatcagagcggcccaattcagtcgacaacctatacctcccaaaataatgctcagggccctctttatgaacagagatccacacagactcggcggtaccccagctccatctcttcatcaccccaaaaggacctgactcaggcaaagaatggcttcagttctgtgcaggccacgcagttacagaccacacaatctgttgaaggtgctacaggctctgcagtgaaatctgattcaccttccacttctagcatcccccctctcaatgaaacggtatctgcagcttccttactgacgacaaccaatcagcattcatcctccttgggtggcttgagccacagtgaggagattccaaatactaccaccacacaacacagcagcacgttatctacgcagcagaataccctttcatcatcaacatcttctgggcgcacttcgacatccactcttttgcacaacactgttggagatgtcagagcgtatctccattctccctcctgcacctttccacccacatccgtatctgaccccgggatcctctgc

SEQ ID NO: 358582 - DNA, 2700 bp, Homo sapiens
tatatcacgtgacaggggcggcgcggcccggggtgtcagtgtggaggagactgaggtaaagttgggagcgcagcggcgttggcggcggcggcggcggcagcggcagcgcggcggggccggtattctaccttgtaaatactgttatttgtatatactgtaaatgatgacatcggtgggcactaaccgagcccggggaaactgggaacaacctcaaaaccaaaaccagacacagcacaagcagcggccacaggccactgcagaacaaattagacttgcacagatgatttcggaccataatgatgctgactttgaggagaaggtgaaacaattgattgatattacaggcaagaaccaggatgaatgtgtgattgctttgcatgactgcaatggagatgtcaacagagctatcaatgttcttctggaaggaaacccagacacgcattcctgggagatggtcgggaagaagaagggagtctcaggccagaaggatggtggccagacggaatccaatgaggaaggcaaagaaaatcgagaccgggacagagactatagtcggcgacgtggtgggccaccaagacgggggagaggtgccagccgtggacgagagtttcgaggtcaggaaaatggattggatggcaccaagagtggagggccttctggaagaggaacagaaagaggcagaaggggccgtggccgaggcagaggtggctctggtaggcgaggaggaaggttttctgctcaaggaatgggaacctttaacccagctgattatgcagagccagccaatactgatgataactatggcaatagcagcggcaatacgtggaacaacactggccactttgaaccagatgatgggacgagtgcatggaggactgcaacagaggagtgggggactgaagattggaatgaagatctttctgagaccaagatcttcactgcctctaatgtgtcttcagtgcctctgcctgcggagaatgtgacaatcactgctggtcagagaattgaccttgctgttctgctggggaagacaccatctacaatggagaatgattcatctaatctggatccgtctcaggctccttctctggcccagcctctggtgttcagtaattcgaagcagactgccatatcacagcctgcttcagggaacacattttctcatcacagtatggtgagcatgttagggaaaggatttggtgatgtcggtgaagctaaaggcggcagtactacaggctcccagttcttggagcaattcaagactgcccaagccctggctcagttggcagctcagcattctcagtctggaagcaccaccacctcctcttgggacatgggctcgacgacacaatccccatcactggtgcagtatgatttgaagaacccaagtgattcagcagtgcacagcccctttacaaagcgccaggcttttaccccatcttcaaccatgatggaggtgttccttcaggagaagtcacctgcagtggctacctccacagctgcacctccacctccgtcttctcctctgccaagcaaatccacatcggctccacagatgtcgcctggatcttcagacaaccagtcctctagccctcagccggctcagcagaaactgaaacagcagaagaaaaaagcctccttgacttctaagattcctgctctggctgtggagatgcctggctcagcagatatctcagggctaaacctgcagtttggggcattgcagtttgggtcagagcctgtcctttctgattatgagtccacccccaccacgagcgcctcttcaagccaggctccaagtagcctgtataccagcacggccagtgaatcatcctctacaatttcatctaaccagagtcaggagtctggttatcagagcggcccaattcagtcgacaacctatacctcccaaaataatgctcagggccctctttatgaacagagatccacacagactcggcggtaccccagctccatctcttcatcaccccaaaaggacctgactcaggcaaaggtagtggcttcatgaacccttgggaattggttaggagaatagtgggcaaaaattccttaaatattagtgttttacttttcagcaagtggtgctaagaaactttggaagtagtgattgagaatttgaaaaaggcacacatctgtggctagtgaattaaaagttcttatcagcaaacccggagactgaagagccaggaaaccattctctttgtactaaaaattcattgcctctagtagaatcagtctcaagtgcctgtcctgtcttctgggaagatgtgattgccagatttctgggtgcgtgtcagtagacctcaccttgctaagtcctggcatggtgagggagacagcatgtgccagaggtgatgtggagtgagtgtcagatgcagccagcggaataggtggtgtggctgaactgttgtacttacccttccccaaaaatcactggatgtggactttgggcctttcctctatctgttttaggtttggggtgtcttcaacaatttgtagggtttccttcttttgcttttggtcacacagtgttggtatatctcagttttgttgtttaatttttgttcctattttggttttttggatagtctacattgtattaatattaatccttttggttaatttacagagtttctcctaaagatttgttgaccaaaataaagctgcatcagtgctaac

SEQ ID NO: 358583 - DNA, 1743 bp, Homo sapiens
tatatcacgtgacaggggcggcgcggcccggggtgtcagtgtggaggagactgaggtaaagttgggagcgcagcggcgttggcggcggcggcggcggcagcggcagcgcggcggggccggtattctaccttgtaaatactgttatttgtatatactgtaaatgatgacatcggtgggcactaaccgagcccggggaaactgggaacaacctcaaaaccaaaaccagacacagcacaagcagcggccacaggccactgcagaacaaattagacttgcacagatgatttcggaccataatgatgctgactttgaggagaaggtgaaacaattgattgatattacaggcaagaaccaggatgaatgtgtgattgctttgcatgactgcaatggagatgtcaacagagctatcaatgttcttctggaaggaaacccagacacgcattcctgggagatggtcgggaagaagaagggagtctcaggccagaaggatggtggccagacggaatccaatgaggaaggcaaagaaaatcgagaccgggacagagactatagtcggcgacgtggtgggccaccaagacgggggagaggtgccagccgtggacgagagtttcgaggtcaggaaaatggattggatggcaccaagagtggagggccttctggaagaggaacagaaagaggcagaaggggccgtggccgaggcagaggtggctctggtaggcgaggaggaaggttttctgctcaaggaatgggaacctttaacccagctgattatgcagagccagccaatactgatgataactatggcaatagcagcggcaatacgtggaacaacactggccactttgaaccagatgatgggacgagtgcatggaggactgcaacagaggagtgggggactgaagattggaatgaagatctttctgagaccaagatcttcactgcctctaatgtgtcttcagtgcctctgcctgcggagaatgtgacaatcactgctggtcagagaattgaccttgctgttctgctggggaagacaccatctacaatggagaatgattcatctaatctggatccgtctcaggctccttctctggcccagcctctggtgttcagtaattcgaagcagactgccatatcacagcctgcttcagggaacacattttctcatcacagtatggtgagcatgttagggaaaggatttggtgatgtcggtgaagctaaaggcggcagtactacaggctcccagttcttggagcaattcaagactgcccaagccctggctcagttggcagctcagcattctcagtctggaagcaccaccacctcctcttgggacatgggctcgacgacacaatccccatcactggtgcagtatggtgagaagatggaaagtgacttgaatctttaaagcattggagcattactgtcaagaggctagcagggggagggggtggagaatgtgtcctgaagtgaagaaaaggggcagctagttggttaccttcccacatgtatttcccctaatcaaataagctgaattcaagaagttggggaataataaaatttgaggctatgtatttctcatcacatttagaggctgggcatggtagcttacacctgtaatcctagcactttgggaggttgaagtgggaggacagcctgagccttaggagttcaagaacagcctgagcaacatatcaagactccatttctaaaaaaattgttttcaattagctgagtgcggtggtg

SEQ ID NO: 358584 - DNA, 1668 bp, Homo sapiens
  misc_feature (56)..(56): n is a, c, g, or t
  misc_feature (67)..(67): n is a, c, g, or t
  misc_feature (103)..(103): n is a, c, g, or t
  misc_feature (1667)..(1668): n is a, c, g, or t
aaagcccagtggttttgttttatggaaacaaaactgttttttagtcccctccagtnaaacgggcgtnccaggtttttcgggttttgtgtactcccaaaccccngcagtcctttgagaaacaaggttttcattccggtactcctgctgcttccttcaacttgccttcagccctaggaagtgggggccccatcaatccggccacagctgctgcctacccacctgccccctttatgcacattctgaccccccatcagcagccgcattctcagatccttcaccatcacctgcagcaggatggccagctaccatatttgcagatgattctctgttgccagcgccagcaggaggagcagacgggcagcgggcaacgtagccagaccagctccatcccgcagaagccccagaccaacaagtctgcctacaacagctacagctggggggccaactgaggccctgaccctcttctcccggtcccatcttctgagagggcttctcagcctggaaactatggaaacagcatcaaagagaaaggaatgtggggggtttccgctgccccccacccccagcggcccaccccatgcctcagcttcatgtctgtcccattcctataccatccccaccctgttgtatgtattataggatttgtattttctccttttttttcccccttccattccttctcccctcttgcattcaagattatgaaactttgctatgggccctgcacttcctttgcttcctcctgttcaccctggtggtgtacggatgaggcggggaggtgggacccccaaacatatatcagcccaacagccctaagtctccttctttattattaggaaaacaacaacaacaacaaacaaaaaaatggcgtcatgaatatgaacagcattgtcagatgaattagttgaagtggttttttttttgttttttttttttttttgtactgtgtcctcaaatttaatggattaatgtgtcttgtatatataaaaagaaaacctctaccttcagcctctgcctattcttgctccgtctaggacatcctcaatttcgtcgatgaccagcttggtgaataagtattactgtaccaactgggcctcctctagcaggcccctgaaggcagtggaataaaatgaaatcttcgccctttaagaactcctgaccttaatgtggtagtagtatcttgtccttgaggggatttccttcccctcacccctaagactttcacaacctggtgactggaaagaaccaccacaaatcttcatttcctccagaaactgctacatctacagccgatttcaggcagtaaagggagagggatagaggagattgggtggaaaatggagaggatcaagaaggagctgagaccatttcaaagaaaaaaaatgctttatagagttttaagtatgacttagatgggtccaggcaaataaactaaaaagaagtgaaggcaacatgtatcgtctggcagaactaaatcttggagtggggtgagggatgaaagactacatattgggtacagtgtacactgctcgggtgatgggtgcgctaaagtcgcagaaatcactaaagaactcatccatgtaaccaaacaccacctgtaccccaaaaacgaaataaaaaaacaaaaccttggggcccattccccctaggaatggactactgtaaann

SEQ ID NO: 358585 - DNA, 3484 bp, Homo sapiens
ctcagggcagagggaggaaggacagcagaccagacagtcacagcagccttgacaaaacgttcctggaactcaagctcttctccacagaggaggacagagcagacagcagagaccatggagtctccctcggcccctccccacagatggtgcatcccctggcagaggctcctgctcacagcctcacttctaaccttctggaacccgcccaccactgccaagctcactattgaatccacgccgttcaatgtcgcagaggggaaggaggtgcttctacttgtccacaatctgccccagcatctttttggctacagctggtacaaaggtgaaagagtggatggcaaccgtcaaattataggatatgtaataggaactcaacaagctaccccagggcccgcatacagtggtcgagagataatataccccaatgcatccctgctgatccagaacatcatccagaatgacacaggattctacaccctacacgtcataaagtcagatcttgtgaatgaagaagcaactggccagttccgggtatacccggagctgcccaagccctccatctccagcaacaactccaaacccgtggaggacaaggatgctgtggccttcacctgtgaacctgagactcaggacgcaacctacctgtggtgggtaaacaatcagagcctcccggtcagtcccaggctgcagctgtccaatggcaacaggaccctcactctattcaatgtcacaagaaatgacacagcaagctacaaatgtgaaacccagaacccagtgagtgccaggcgcagtgattcagtcatcctgaatgtcctctatggcccggatgcccccaccatttcccctctaaacacatcttacagatcaggggaaaatctgaacctctcctgccacgcagcctctaacccacctgcacagtactcttggtttgtcaatgggactttccagcaatccacccaagagctctttatccccaacatcactgtgaataatagtggatcctatacgtgccaagcccataactcagacactggcctcaataggaccacagtcacgacgatcacagtctatgcagagccacccaaacccttcatcaccagcaacaactccaaccccgtggaggatgaggatgctgtagccttaacctgtgaacctgagattcagaacacaacctacctgtggtgggtaaataatcagagcctcccggtcagtcccaggctgcagctgtccaatgacaacaggaccctcactctactcagtgtcacaaggaatgatgtaggaccctatgagtgtggaatccagaacgaattaagtgttgaccacagcgacccagtcatcctgaatgtcctctatggcccagacgaccccaccatttccccctcatacacctattaccgtccaggggtgaacctcagcctctcctgccatgcagcctctaacccacctgcacagtattcttggctgattgatgggaacatccagcaacacacacaagagctctttatctccaacatcactgagaagaacagcggactctatacctgccaggccaataactcagccagtggccacagcaggactacagtcaagacaatcacagtctctgcggagctgcccaagccctccatctccagcaacaactccaaacccgtggaggacaaggatgctgtggccttcacctgtgaacctgaggctcagaacacaacctacctgtggtgggtaaatggtcagagcctcccagtcagtcccaggctgcagctgtccaatggcaacaggaccctcactctattcaatgtcacaagaaatgacgcaagagcctatgtatgtggaatccagaactcagtgagtgcaaaccgcagtgacccagtcaccctggatgtcctctatgggccggacacccccatcatttcccccccagactcgtcttacctttcgggagcgaacctcaacctctcctgccactcggcctctaacccatccccgcagtattcttggcgtatcaatgggataccgcagcaacacacacaagttctctttatcgccaaaatcacgccaaataataacgggacctatgcctgttttgtctctaacttggctactggccgcaataattccatagtcaagagcatcacagtctctgcatctggaacttctcctggtctctcagctggggccactgtcggcatcatgattggagtgctggttggggttgctctgatatagcagccctggtgtagtttcttcatttcaggaagactgacagttgttttgcttcttccttaaagcatttgcaacagctacagtctaaaattgcttctttaccaaggatatttacagaaaagactctgaccagagatcgagaccatcctagccaacatcgtgaaaccccatctctactaaaaatacaaaaatgagctgggcttggtggcgcgcacctgtagtcccagttactcgggaggctgaggcaggagaatcgcttgaacccgggaggtggagattgcagtgagcccagatcgcaccactgcactccagtctggcaacagagcaagactccatctcaaaaagaaaagaaaagaagactctgacctgtactcttgaatacaagtttctgataccactgcactgtctgagaatttccaaaactttaatgaactaactgacagcttcatgaaactgtccaccaagatcaagcagagaaaataattaatttcatgggactaaatgaactaatgaggataatattttcataattttttatttgaaattttgctgattctttaaatgtcttgtttcccagatttcaggaaactttttttcttttaagctatccacagcttacagcaatttgataaaatatacttttgtgaacaaaaattgagacatttacattttctccctatgtggtcgctccagacttgggaaactattcatgaatatttatattgtatggtaatatagttattgcacaagttcaataaaaatctgctctttgtataacagaatacatttgaaaacattggttatattaccaagactttgactagaatgtcgtatttgaggatataaacccataggtaataaacccacaggtactacaaacaaagtctgaagtcagccttggtttggcttcctagtgtcaattaaacttctaaaagtttaatctgagattccttataaaaacttccagcaaagcaactttaaaaaagtctgtgtgggccgggcgcggtggctcacgcctgtaatcccagcactttgatccgccgaggcgggcggatcacgaggtcaggagatccagaccatcctggctaacacagtgaaaccccgtctctactaaaaatacaaaaaaagttagccgggcgtggtggtgggggcctgtagtcccagctactcaggaggctgaggcaggagaacggcatgaacccgggaggcagggcttgcagtgagccaagatcatgccgctgcactccagcctgggagacaaagt

SEQ ID NO: 358586 - DNA, 1218 bp, Homo sapiens
cttgcccgggaaaacgagcatgatacgattgagctcgtacccgtcttgcacttttccaaggatatttacagaaaagactctgaccagagatcgagaccatcctagccaacatcgtgaaaccccatctctactaaaaatacaaaaatgagctgggcttggtggcgcgcacctgtagtcccagttactcgggaggctgaggcaggagaatcgcttgaacccgggaggtggagattgcagtgagcccagatcgcaccactgcactccagtctggcaacagagcaagactccatctcaaaaagaaaagaaaagaagactctgacctgtactcttgaatacaagtttctgataccactgcactgtctgagaatttccaaaactttaatgaactaactgacagcttcatgaaactgtccaccaagatcaagcagagaaaataattaatttcatgggactaaatgaactaatgaggataatattttcataattttttatttgaaattttgctgattctttaaatgtcttgtttcccagatttcaggaaactttttttcttttaagctatccacagcttacagcaatttgataaaatatacttttgtgaacaaaaattgagacatttacattttctccctatgtggtcgctccagacttgggaaactattcatgaatatttatattgtatggtaatatagttattgcacaagttcaataaaaatctgctctttgtataacagaatacatttgaaaacattggttatattaccaagactttgactagaatgtcgtatttgaggatataaacccataggtaataaacccacaggtactacaaacaaagtctgaagtcagccttggtttggcttcctagtgtcaattaaacttctaaaagtttaatctgagattccttataaaaacttccagcaaagcaactttaaaaaagtctgtgtgggccgggcgcggtggctcacgcctgtaatcccagcactttgatccgccgaggcgggcggatcacgaggtcaggagatccagaccatcctggctaacacagtgaaaccccgtctctactaaaaatacaaaaaaagttagccgggcgtggtggtgggggcctgtagtcccagctactcaggaggctgaggcaggagaacggcatgaacccgggaggcagggcttgcagtgagccaagatcatgccgctgcactccagcctgggagacaaagt

SEQ ID NO: 358587 - DNA, 1124 bp, Homo sapiens
ttggactttttttttttttttttttttttttgagacggagtctcgctctttcgcccaggctggactgcagtggtgtgatctcggctcactgcaagctccgcctcctaggagaatcgcttgaacccgggaggtggagattgcagtgagcccagatcgcaccactgcactccagtctggcaacagagcaagactccatctcaaaaagaaaagaaaagaagactctgacctgtactcttgaatacaagtttctgataccactgcactgtctgagaatttccaaaactttaatgaactaactgacagcttcatgaaactgtccaccaagatcaagcagagaaaataattaatttcatgggactaaatgaactaatgaggataatattttcataattttttatttgaaattttgctgattctttaaatgtcttgtttcccagatttcaggaaactttttttcttttaagctatccacagcttacagcaatttgataaaatatacttttgtgaacaaaaattgagacatttacattttctccctatgtggtcgctccagacttgggaaactattcatgaatatttatattgtatggtaatatagttattgcacaagttcaataaaaatctgctctttgtataacagaatacatttgaaaacattggttatattaccaagactttgactagaatgtcgtatttgaggatataaacccataggtaataaacccacaggtactacaaacaaagtctgaagtcagccttggtttggcttcctagtgtcaattaaacttctaaaagtttaatctgagattccttataaaaacttccagcaaagcaactttaaaaaagtctgtgtgggccgggcgcggtggctcacgcctgtaatcccagcactttgatccgccgaggcgggcggatcacgaggtcaggagatccagaccatcctggctaacacagtgaaaccccgtctctactaaaaatacaaaaaaagttagccgggcgtggtggtgggggcctgtagtcccagctactcaggaggctgaggcaggagaacggcatgaacccgggaggcagggcttgcagtgagccaagatcatgccgctgcactccagcctgggagacaaagt

SEQ ID NO: 358588 - DNA, 1547 bp, Homo sapiens
aaaaaagttaagtgcaaagaatcaagcctggtatgttagttttcatcactgagattcagccaagatggaattagagtgcaagataatttaccggggggaccaccatgaggaaaagtggagtagaagtgggaggagcctgagagagccctcagaccacgatgcagatctgattcctgagaaggagaaagaggagagagttttagatagtgatgcagttctcagagtttccacaaggctggtggggcgtcctcaagcccctcacccatgagagagaagcagagtcccccagaactgggcttttcattcccctggtgggagcccatgagaagcgagttctctgtgcaacggacttagtaaatacagaatgcactagcctgggccttctgccaatcaagtccctgccacagagacccaacagacttatttatgcctaccacaactgagacactgagaaaaagatgcaaccatgaaaagatagaaagttctaatgacacgcaaaaatagcaatcagactttctcaaatttcaaagccttcagaaatagctgagtgcagacaggccagggtggaattgacagaagactgatcaccaactagcaacacagtgagagagaaaaaattgcaactttcccacaaaactaatgcattccttgaagcaacaagtagagactgcttcatgctgagagctggaacctggggcaccccactgtaaaataacatcacattcattccttctcttttctttccatgacggacgattcaatacattgtcaaagcctcttggtccttttttaacatctcacacttgtgtcattctctccattcccataaacctcaacaactgctcaaagtcctgcttgaccccttgttgccagtctttgaaatctttcttgcatatgactgcctcattaccttcctaaaatctagttcactcgcctactcaagaagacacaggggcctactgtggtgtattagataagttcacatttcttctctttactaatcttttttacttcctttaccaccactcccttatataattccatcatcctaatagatctgtttccctacacatccctgcctctccaccccacatgtacacagaattcttagttccggtgttacacctaaaaacatgtcaaacagggtgacctccttccactgtctgcactgtggagttacccacacccttaatcacaagcaacttctgacctcatgaagaacaaagactgtagcattaacctgtgagtcttaagctcaggacacaactgtgcctgtgactgagaaccttttcctgataaccaattcatatgttcataacagatacagaaatgaagaaggcaaggtccttaattctataacaggagacaaaacctgaaaaataatcataatgccaaaatagaaaggagtgaacatcacaagaaattagagaaatctgacggaaaatatagctacacattggaatcactcagaaacattttataaaatggatacttaagtcccaccgataaattccgatttactgatctataggagtggtgaggcattc

SEQ ID NO: 358589 - DNA, 856 bp, Homo sapiens
aactcctgatctgcccgcctcggcctcccaaagtgctgggattacaggcgtgagccaccgcacccggccgatttggactttttaacacaggattgggacaggattcagagggacactgtggcccttctacaatcaggagcttcccctttcctctgatgacatcacctgtggctttgttctctttgttccagatgggccggacacccccatcatttcccccccagactcgtcttacctttcgggagcgaacctcaacctctcctgccactcggcctctaacccatccccgcagtattcttggcgtatcaatgggataccgcagcaacacacacaagttctctttatcgccaaaatcacgccaaataataacgggacctatgcctgttttgtctctaacttggctactggccgcaataattccatagtcaagagcatcacagtctctggtaagtggctccctggagcatcagcatcatattctggggtggagtctatctggttctcaccaaagagccaagaagacattttctttcccagtctgtgttccatgggcacaaggaaatcccaaattctatcctgagccccctcactccatctcggccaactctctcctccccggcttctctgatatctcacggctgacctcgggtccagcctggaatgtggggaggggcctcccttagccccagaaggcccccaatagtgaaagggacttcatagtccagaagaaagaagggtccttaaggtcgagttgctcctctctatcaccaatatgtccctttctgtcacctctttgtgttttttcacctactctgtgagctacaaggaacaaggaggctttgaaaccagcccacac

SEQ ID NO: 358590 - DNA, 955 bp, Homo sapiens
  misc_feature (922)..(922): n is a, c, g, or t
gacaaagaacatacatatggttctgctgttaaatccgggcagctcctgcctgtcacctgaagttctagatcattccctggactccactctatctttaggggtctctggctcaagtcagtcatcatcaaacacctgggaaaaactgccccaccttgtgcctccactgcctaacgactgagctgacctccaggcttgcctctggtgtcccctgtgttatttctactgaaacatccagtcccaggccaggctgcacaatatgtacagggtttaaggacaatgggaagacccatcactatccatttctaggatgtccttgcaaagggaaaccacagaaaaaatatacctagggaaacaaagtaggactgaaggtggaagggacccagcacttgaatgttccaggtgaggaccctacagtgggccaagtagtcaactggtcagggagggaccaggagaggcaccaggagctgtgacctcccccccagtcctgtgtctgttcacagcccaatgctgctgcttaattcacacttgagaaagtctgtgcttcccccacagtgagcaggcagcctcgcagtctctgagatctcagatcatcgtgcatctgtcttgtgacacatgcacccaccgtgggtttttaagggctcaggtgggctgagaggtggaaggtgccaactctgattgaaagatgcctgtgaggaatcaaaggtgccacacagggcaatcttctctctgttatctgcacagccggagctgcccaagccctccatctccagcaacaactccaaacccgtggaggacaaggatgctgtggccttcacctgtgaacctgagactcaggacgcaacctacctgtggtgggtaaacaatcagagcctcccggtcagtcccaggctgcagctgtccaatggcaacaggaccctcactntggggaaggggggacctctagactacgcaggcc

SEQ ID NO: 358591 - DNA, 842 bp, Homo sapiens
  misc_feature (10)..(10): n is a, c, g, or t
  misc_feature (163)..(163): n is a, c, g, or t
  misc_feature (165)..(165): n is a, c, g, or t
caagtttttntttaaactgttacccgaagagcagatgtatactgaacttgtgcactaactatatgaccatacgataccaatattcaagaatagtttccctagtctggggcgtccacatagggcgacaatgtaaaagtctctatttttgttcacaaaagtatantntatcaaattgctgaaggctttggatagcttacagcaatttgataaaatatacttttgtgaacaaaaattgagacatttacattttctccctatgtggtcgctccagacttgggaaactattcatgaatatttatattgtatggtaatatagttattgcacaagttcaataaaaatctgctctttgtataacagaatacatttgaaaacattggttatattaccaagactttgactagaatgtcgtatttgaggatataaacccataggtaataaacccacaggtactacaaacaaagtctgaagtcagccttggtttggcttcctagtgtcaattaaacttctaaaagtttaatctgagattccttataaaaacttccagcaaagcaactttaaaaaagtctgtgtgggccgggcgcggtggctcacgcctgtaatcccagcactttgatccgccgaggcgggcggatcacgaggtcaggagatccagaccatcctggctaacacagtgaaaccccgtctctactaaaaatacaaaaaaagttagccgggcgtggtggtgggggcctgtagtcccagctactcaggaggctgaggcaggagaacggcatgaacccgggaggcagggcttgcagtgagccaagatcatgccgctgcactccagcctgggagacaaagt

SEQ ID NO: 358592 - DNA, 596 bp, Homo sapiens
taattttttccacacagaaattgggagaattttggaaaggtggccggggttgggggttgcttctaaaataaccagcccttggtgtagtttttttcatttcagaaagactgacagttgttttgcttcttccttaaagcatttgcaacagctacagtctaaaattgcttctttaccaaggatatttacagaaaagactctgaccagagatcgagaccatcctagccaacatcgtgactcgtgccacctgttttgctagaaacaagacgacctacaataaaaagtaccagtactattccaataaacactgcagagggagcacccctcgttgctgagtcccctcttccctggaaaccttccacccagtgctgaatttccctctctcataccctccctccctaccctaaccaatttccttggccatgcagaaagcatccctcacccatcctagaggccaggcaggagcccttctatacccacccagaatgagacatccagcagatttccagccttctactgctctcctccacctcaactccgtgcttaaccaaagaagctgtactccggggggtctcttctgaataaagcaattagcaaat

SEQ ID NO: 358593 - DNA, 297 bp, Homo sapiens
gctgttctatgaggatccctagtatgtgagacgccttgtaaggtcccaggctgcagctgtccaatgacaacaggaccctcactctactcagtgtcacaaggaatgatgtaggaccctatgagtgtggaatccagaacgaattaagtgttgaccacagcgacccagtcatcctgaatgtcctcttccagggactcaggcccaaatccctaagcctgtccctgtgccagggtggatgcagcggaagctccctgggaggccctgccagtgggccccaggcccgcagaggcttttgggagg

SEQ ID NO: 358594 - DNA, 3884 bp, Homo sapiens
ctcagggcagagggaggaaggacagcagaccagacagtcacagcagccttgacaaaacgttcctggaactcaagctcttctccacagaggaggacagagcagacagcagagaccatggagtctccctcggcccctccccacagatggtgcatcccctggcagaggctcctgctcacagcctcacttctaaccttctggaacccgcccaccactgccaagctcactattgaatccacgccgttcaatgtcgcagaggggaaggaggtgcttctacttgtccacaatctgccccagcatctttttggctacagctggtacaaaggtgaaagagtggatggcaaccgtcaaattataggatatgtaataggaactcaacaagctaccccagggcccgcatacagtggtcgagagataatataccccaatgcatccctgctgatccagaacatcatccagaatgacacaggattctacaccctacacgtcataaagtcagatcttgtgaatgaagaagcaactggccagttccgggtatacccggagctgcccaagccctccatctccagcaacaactccaaacccgtggaggacaaggatgctgtggccttcacctgtgaacctgagactcaggacgcaacctacctgtggtgggtaaacaatcagagcctcccggtcagtcccaggctgcagctgtccaatggcaacaggaccctcactctattcaatgtcacaagaaatgacacagcaagctacaaatgtgaaacccagaacccagtgagtgccaggcgcagtgattcagtcatcctgaatgtcctctgtgagtatatctgctcctctctggcccaggctgccagcccaaatccacagggccagaggcaggatttctcagtccctctcaggttcaagtacacagaccctcaaccctggacatccagactgtctgtgactttctgccccagaaaaacctgggcagaccaagtcttgaccaagaataggaggggaggggctgcttctgtcctgggaggctcagggtccacaccctatgatgggagaaacaggtgaatatctcagactcaggctcagtagatacaagaggggtttggctgagactttaggattgtgattcagcttagagggacactgtggtccttccatagaccaggaacttccacttccctctgacaatatcacctgtggctttattttgtttgctccagatggcccggatgcccccaccatttcccctctaaacacatcttacagatcaggggaaaatctgaacctctcctgccacgcagcctctaacccacctgcacagtactcttggtttgtcaatgggactttccagcaatccacccaagagctctttatccccaacatcactgtgaataatagtggatcctatacgtgccaagcccataactcagacactggcctcaataggaccacagtcacgacgatcacagtctatgcagagccacccaaacccttcatcaccagcaacaactccaaccccgtggaggatgaggatgctgtagccttaacctgtgaacctgagattcagaacacaacctacctgtggtgggtaaataatcagagcctcccggtcagtcccaggctgcagctgtccaatgacaacaggaccctcactctactcagtgtcacaaggaatgatgtaggaccctatgagtgtggaatccagaacgaattaagtgttgaccacagcgacccagtcatcctgaatgtcctctatggcccagacgaccccaccatttccccctcatacacctattaccgtccaggggtgaacctcagcctctcctgccatgcagcctctaacccacctgcacagtattcttggctgattgatgggaacatccagcaacacacacaagagctctttatctccaacatcactgagaagaacagcggactctatacctgccaggccaataactcagccagtggccacagcaggactacagtcaagacaatcacagtctctgcggagctgcccaagccctccatctccagcaacaactccaaacccgtggaggacaaggatgctgtggccttcacctgtgaacctgaggctcagaacacaacctacctgtggtgggtaaatggtcagagcctcccagtcagtcccaggctgcagctgtccaatggcaacaggaccctcactctattcaatgtcacaagaaatgacgcaagagcctatgtatgtggaatccagaactcagtgagtgcaaaccgcagtgacccagtcaccctggatgtcctctatgggccggacacccccatcatttcccccccagactcgtcttacctttcgggagcgaacctcaacctctcctgccactcggcctctaacccatccccgcagtattcttggcgtatcaatgggataccgcagcaacacacacaagttctctttatcgccaaaatcacgccaaataataacgggacctatgcctgttttgtctctaacttggctactggccgcaataattccatagtcaagagcatcacagtctctgcatctggaacttctcctggtctctcagctggggccactgtcggcatcatgattggagtgctggttggggttgctctgatatagcagccctggtgtagtttcttcatttcaggaagactgacagttgttttgcttcttccttaaagcatttgcaacagctacagtctaaaattgcttctttaccaaggatatttacagaaaagactctgaccagagatcgagaccatcctagccaacatcgtgaaaccccatctctactaaaaatacaaaaatgagctgggcttggtggcgcgcacctgtagtcccagttactcgggaggctgaggcaggagaatcgcttgaacccgggaggtggagattgcagtgagcccagatcgcaccactgcactccagtctggcaacagagcaagactccatctcaaaaagaaaagaaaagaagactctgacctgtactcttgaatacaagtttctgataccactgcactgtctgagaatttccaaaactttaatgaactaactgacagcttcatgaaactgtccaccaagatcaagcagagaaaataattaatttcatgggactaaatgaactaatgaggataatattttcataattttttatttgaaattttgctgattctttaaatgtcttgtttcccagatttcaggaaactttttttcttttaagctatccacagcttacagcaatttgataaaatatacttttgtgaacaaaaattgagacatttacattttctccctatgtggtcgctccagacttgggaaactattcatgaatatttatattgtatggtaatatagttattgcacaagttcaataaaaatctgctctttgtataacagaatacatttgaaaacattggttatattaccaagactttgactagaatgtcgtatttgaggatataaacccataggtaataaacccacaggtactacaaacaaagtctgaagtcagccttggtttggcttcctagtgtcaattaaacttctaaaagtttaatctgagattccttataaaaacttccagcaaagcaactttaaaaaagtctgtgtgggccgggcgcggtggctcacgcctgtaatcccagcactttgatccgccgaggcgggcggatcacgaggtcaggagatccagaccatcctggctaacacagtgaaaccccgtctctactaaaaatacaaaaaaagttagccgggcgtggtggtgggggcctgtagtcccagctactcaggaggctgaggcaggagaacggcatgaacccgggaggcagggcttgcagtgagccaagatcatgccgctgcactccagcctgggagacaaagt

SEQ ID NO: 358595 - DNA, 3688 bp, Homo sapiens
gacaaagaacatacatatggttctgctgttaaatccgggcagctcctgcctgtcacctgaagttctagatcattccctggactccactctatctttaggggtctctggctcaagtcagtcatcatcaaacacctgggaaaaactgccccaccttgtgcctccactgcctaacgactgagctgacctccaggcttgcctctggtgtcccctgtgttatttctactgaaacatccagtcccaggccaggctgcacaatatgtacagggtttaaggacaatgggaagacccatcactatccatttctaggatgtccttgcaaagggaaaccacagaaaaaatatacctagggaaacaaagtaggactgaaggtggaagggacccagcacttgaatgttccaggtgaggaccctacagtgggccaagtagtcaactggtcagggagggaccaggagaggcaccaggagctgtgacctcccccccagtcctgtgtctgttcacagcccaatgctgctgcttaattcacacttgagaaagtctgtgcttcccccacagtgagcaggcagcctcgcagtctctgagatctcagatcatcgtgcatctgtcttgtgacacatgcacccaccgtgggtttttaagggctcaggtgggctgagaggtggaaggtgccaactctgattgaaagatgcctgtgaggaatcaaaggtgccacacagggcaatcttctctctgttatctgcacagccggagctgcccaagccctccatctccagcaacaactccaaacccgtggaggacaaggatgctgtggccttcacctgtgaacctgagactcaggacgcaacctacctgtggtgggtaaacaatcagagcctcccggtcagtcccaggctgcagctgtccaatggcaacaggaccctcactctattcaatgtcacaagaaatgacacagcaagctacaaatgtgaaacccagaacccagtgagtgccaggcgcagtgattcagtcatcctgaatgtcctctatggcccggatgcccccaccatttcccctctaaacacatcttacagatcaggggaaaatctgaacctctcctgccacgcagcctctaacccacctgcacagtactcttggtttgtcaatgggactttccagcaatccacccaagagctctttatccccaacatcactgtgaataatagtggatcctatacgtgccaagcccataactcagacactggcctcaataggaccacagtcacgacgatcacagtctatgcagagccacccaaacccttcatcaccagcaacaactccaaccccgtggaggatgaggatgctgtagccttaacctgtgaacctgagattcagaacacaacctacctgtggtgggtaaataatcagagcctcccggtcagtcccaggctgcagctgtccaatgacaacaggaccctcactctactcagtgtcacaaggaatgatgtaggaccctatgagtgtggaatccagaacgaattaagtgttgaccacagcgacccagtcatcctgaatgtcctctatggcccagacgaccccaccatttccccctcatacacctattaccgtccaggggtgaacctcagcctctcctgccatgcagcctctaacccacctgcacagtattcttggctgattgatgggaacatccagcaacacacacaagagctctttatctccaacatcactgagaagaacagcggactctatacctgccaggccaataactcagccagtggccacagcaggactacagtcaagacaatcacagtctctgcggagctgcccaagccctccatctccagcaacaactccaaacccgtggaggacaaggatgctgtggccttcacctgtgaacctgaggctcagaacacaacctacctgtggtgggtaaatggtcagagcctcccagtcagtcccaggctgcagctgtccaatggcaacaggaccctcactctattcaatgtcacaagaaatgacgcaagagcctatgtatgtggaatccagaactcagtgagtgcaaaccgcagtgacccagtcaccctggatgtcctctatgggccggacacccccatcatttcccccccagactcgtcttacctttcgggagcgaacctcaacctctcctgccactcggcctctaacccatccccgcagtattcttggcgtatcaatgggataccgcagcaacacacacaagttctctttatcgccaaaatcacgccaaataataacgggacctatgcctgttttgtctctaacttggctactggccgcaataattccatagtcaagagcatcacagtctctgcatctggaacttctcctggtctctcagctggggccactgtcggcatcatgattggagtgctggttggggttgctctgatatagcagccctggtgtagtttcttcatttcaggaagactgacagttgttttgcttcttccttaaagcatttgcaacagctacagtctaaaattgcttctttaccaaggatatttacagaaaagactctgaccagagatcgagaccatcctagccaacatcgtgaaaccccatctctactaaaaatacaaaaatgagctgggcttggtggcgcgcacctgtagtcccagttactcgggaggctgaggcaggagaatcgcttgaacccgggaggtggagattgcagtgagcccagatcgcaccactgcactccagtctggcaacagagcaagactccatctcaaaaagaaaagaaaagaagactctgacctgtactcttgaatacaagtttctgataccactgcactgtctgagaatttccaaaactttaatgaactaactgacagcttcatgaaactgtccaccaagatcaagcagagaaaataattaatttcatgggactaaatgaactaatgaggataatattttcataattttttatttgaaattttgctgattctttaaatgtcttgtttcccagatttcaggaaactttttttcttttaagctatccacagcttacagcaatttgataaaatatacttttgtgaacaaaaattgagacatttacattttctccctatgtggtcgctccagacttgggaaactattcatgaatatttatattgtatggtaatatagttattgcacaagttcaataaaaatctgctctttgtataacagaatacatttgaaaacattggttatattaccaagactttgactagaatgtcgtatttgaggatataaacccataggtaataaacccacaggtactacaaacaaagtctgaagtcagccttggtttggcttcctagtgtcaattaaacttctaaaagtttaatctgagattccttataaaaacttccagcaaagcaactttaaaaaagtctgtgtgggccgggcgcggtggctcacgcctgtaatcccagcactttgatccgccgaggcgggcggatcacgaggtcaggagatccagaccatcctggctaacacagtgaaaccccgtctctactaaaaatacaaaaaaagttagccgggcgtggtggtgggggcctgtagtcccagctactcaggaggctgaggcaggagaacggcatgaacccgggaggcagggcttgcagtgagccaagatcatgccgctgcactccagcctgggagacaaagt

SEQ ID NO: 358596 - DNA, 3301 bp, Homo sapiens
tctagaggatcccgcatgtcgggcatgattgcgatagttcatgtataaatcgcgccgttcaatgtcgcagaggggaaggaggtgcttctacttgtccacaatctgccccagcatctttttggctacagctggtacaaaggtgaaagagtggatggcaaccgtcaaattataggatatgtaataggaactcaacaagctaccccagggcccgcatacagtggtcgagagataatataccccaatgcatccctgctgatccagaacatcatccagaatgacacaggattctacaccctacacgtcataaagtcagatcttgtgaatgaagaagcaactggccagttccgggtatacccggagctgcccaagccctccatctccagcaacaactccaaacccgtggaggacaaggatgctgtggccttcacctgtgaacctgagactcaggacgcaacctacctgtggtgggtaaacaatcagagcctcccggtcagtcccaggctgcagctgtccaatggcaacaggaccctcactctattcaatgtcacaagaaatgacacagcaagctacaaatgtgaaacccagaacccagtgagtgccaggcgcagtgattcagtcatcctgaatgtcctctatggcccggatgcccccaccatttcccctctaaacacatcttacagatcaggggaaaatctgaacctctcctgccacgcagcctctaacccacctgcacagtactcttggtttgtcaatgggactttccagcaatccacccaagagctctttatccccaacatcactgtgaataatagtggatcctatacgtgccaagcccataactcagacactggcctcaataggaccacagtcacgacgatcacagtctatgcagagccacccaaacccttcatcaccagcaacaactccaaccccgtggaggatgaggatgctgtagccttaacctgtgaacctgagattcagaacacaacctacctgtggtgggtaaataatcagagcctcccggtcagtcccaggctgcagctgtccaatgacaacaggaccctcactctactcagtgtcacaaggaatgatgtaggaccctatgagtgtggaatccagaacgaattaagtgttgaccacagcgacccagtcatcctgaatgtcctctatggcccagacgaccccaccatttccccctcatacacctattaccgtccaggggtgaacctcagcctctcctgccatgcagcctctaacccacctgcacagtattcttggctgattgatgggaacatccagcaacacacacaagagctctttatctccaacatcactgagaagaacagcggactctatacctgccaggccaataactcagccagtggccacagcaggactacagtcaagacaatcacagtctctgcggagctgcccaagccctccatctccagcaacaactccaaacccgtggaggacaaggatgctgtggccttcacctgtgaacctgaggctcagaacacaacctacctgtggtgggtaaatggtcagagcctcccagtcagtcccaggctgcagctgtccaatggcaacaggaccctcactctattcaatgtcacaagaaatgacgcaagagcctatgtatgtggaatccagaactcagtgagtgcaaaccgcagtgacccagtcaccctggatgtcctctatgggccggacacccccatcatttcccccccagactcgtcttacctttcgggagcgaacctcaacctctcctgccactcggcctctaacccatccccgcagtattcttggcgtatcaatgggataccgcagcaacacacacaagttctctttatcgccaaaatcacgccaaataataacgggacctatgcctgttttgtctctaacttggctactggccgcaataattccatagtcaagagcatcacagtctctgcatctggaacttctcctggtctctcagctggggccactgtcggcatcatgattggagtgctggttggggttgctctgatatagcagccctggtgtagtttcttcatttcaggaagactgacagttgttttgcttcttccttaaagcatttgcaacagctacagtctaaaattgcttctttaccaaggatatttacagaaaagactctgaccagagatcgagaccatcctagccaacatcgtgaaaccccatctctactaaaaatacaaaaatgagctgggcttggtggcgcgcacctgtagtcccagttactcgggaggctgaggcaggagaatcgcttgaacccgggaggtggagattgcagtgagcccagatcgcaccactgcactccagtctggcaacagagcaagactccatctcaaaaagaaaagaaaagaagactctgacctgtactcttgaatacaagtttctgataccactgcactgtctgagaatttccaaaactttaatgaactaactgacagcttcatgaaactgtccaccaagatcaagcagagaaaataattaatttcatgggactaaatgaactaatgaggataatattttcataattttttatttgaaattttgctgattctttaaatgtcttgtttcccagatttcaggaaactttttttcttttaagctatccacagcttacagcaatttgataaaatatacttttgtgaacaaaaattgagacatttacattttctccctatgtggtcgctccagacttgggaaactattcatgaatatttatattgtatggtaatatagttattgcacaagttcaataaaaatctgctctttgtataacagaatacatttgaaaacattggttatattaccaagactttgactagaatgtcgtatttgaggatataaacccataggtaataaacccacaggtactacaaacaaagtctgaagtcagccttggtttggcttcctagtgtcaattaaacttctaaaagtttaatctgagattccttataaaaacttccagcaaagcaactttaaaaaagtctgtgtgggccgggcgcggtggctcacgcctgtaatcccagcactttgatccgccgaggcgggcggatcacgaggtcaggagatccagaccatcctggctaacacagtgaaaccccgtctctactaaaaatacaaaaaaagttagccgggcgtggtggtgggggcctgtagtcccagctactcaggaggctgaggcaggagaacggcatgaacccgggaggcagggcttgcagtgagccaagatcatgccgctgcactccagcctgggagacaaagt

SEQ ID NO: 358597 - DNA, 3284 bp, Homo sapiens
tttaaagtttgcagatgagcttatgggggcaaatcttaaaaagtccccagcagatggcatccggctcgagggcccatcacttttgaataaatgcttgttccagagcccatgaatgccagcagccacccctcctttcctgggttaaagtttttcagacgctgcatcttctaaattgagcctccatcatcgtgcatctgtcttgtgacacatgcacccaccgtgggtttttaagggctcaggtgggctgagaggtggaaggtgccaactctgattgaaagatgcctgtgaggaatcaaaggtgccacacagggcaatcttctctctgttatctgcacagccggagctgcccaagccctccatctccagcaacaactccaaacccgtggaggacaaggatgctgtggccttcacctgtgaacctgagactcaggacgcaacctacctgtggtgggtaaacaatcagagcctcccggtcagtcccaggctgcagctgtccaatggcaacaggaccctcactctattcaatgtcacaagaaatgacacagcaagctacaaatgtgaaacccagaacccagtgagtgccaggcgcagtgattcagtcatcctgaatgtcctctatggcccggatgcccccaccatttcccctctaaacacatcttacagatcaggggaaaatctgaacctctcctgccacgcagcctctaacccacctgcacagtactcttggtttgtcaatgggactttccagcaatccacccaagagctctttatccccaacatcactgtgaataatagtggatcctatacgtgccaagcccataactcagacactggcctcaataggaccacagtcacgacgatcacagtctatgcagagccacccaaacccttcatcaccagcaacaactccaaccccgtggaggatgaggatgctgtagccttaacctgtgaacctgagattcagaacacaacctacctgtggtgggtaaataatcagagcctcccggtcagtcccaggctgcagctgtccaatgacaacaggaccctcactctactcagtgtcacaaggaatgatgtaggaccctatgagtgtggaatccagaacgaattaagtgttgaccacagcgacccagtcatcctgaatgtcctctatggcccagacgaccccaccatttccccctcatacacctattaccgtccaggggtgaacctcagcctctcctgccatgcagcctctaacccacctgcacagtattcttggctgattgatgggaacatccagcaacacacacaagagctctttatctccaacatcactgagaagaacagcggactctatacctgccaggccaataactcagccagtggccacagcaggactacagtcaagacaatcacagtctctgcggagctgcccaagccctccatctccagcaacaactccaaacccgtggaggacaaggatgctgtggccttcacctgtgaacctgaggctcagaacacaacctacctgtggtgggtaaatggtcagagcctcccagtcagtcccaggctgcagctgtccaatggcaacaggaccctcactctattcaatgtcacaagaaatgacgcaagagcctatgtatgtggaatccagaactcagtgagtgcaaaccgcagtgacccagtcaccctggatgtcctctatgggccggacacccccatcatttcccccccagactcgtcttacctttcgggagcgaacctcaacctctcctgccactcggcctctaacccatccccgcagtattcttggcgtatcaatgggataccgcagcaacacacacaagttctctttatcgccaaaatcacgccaaataataacgggacctatgcctgttttgtctctaacttggctactggccgcaataattccatagtcaagagcatcacagtctctgcatctggaacttctcctggtctctcagctggggccactgtcggcatcatgattggagtgctggttggggttgctctgatatagcagccctggtgtagtttcttcatttcaggaagactgacagttgttttgcttcttccttaaagcatttgcaacagctacagtctaaaattgcttctttaccaaggatatttacagaaaagactctgaccagagatcgagaccatcctagccaacatcgtgaaaccccatctctactaaaaatacaaaaatgagctgggcttggtggcgcgcacctgtagtcccagttactcgggaggctgaggcaggagaatcgcttgaacccgggaggtggagattgcagtgagcccagatcgcaccactgcactccagtctggcaacagagcaagactccatctcaaaaagaaaagaaaagaagactctgacctgtactcttgaatacaagtttctgataccactgcactgtctgagaatttccaaaactttaatgaactaactgacagcttcatgaaactgtccaccaagatcaagcagagaaaataattaatttcatgggactaaatgaactaatgaggataatattttcataattttttatttgaaattttgctgattctttaaatgtcttgtttcccagatttcaggaaactttttttcttttaagctatccacagcttacagcaatttgataaaatatacttttgtgaacaaaaattgagacatttacattttctccctatgtggtcgctccagacttgggaaactattcatgaatatttatattgtatggtaatatagttattgcacaagttcaataaaaatctgctctttgtataacagaatacatttgaaaacattggttatattaccaagactttgactagaatgtcgtatttgaggatataaacccataggtaataaacccacaggtactacaaacaaagtctgaagtcagccttggtttggcttcctagtgtcaattaaacttctaaaagtttaatctgagattccttataaaaacttccagcaaagcaactttaaaaaagtctgtgtgggccgggcgcggtggctcacgcctgtaatcccagcactttgatccgccgaggcgggcggatcacgaggtcaggagatccagaccatcctggctaacacagtgaaaccccgtctctactaaaaatacaaaaaaagttagccgggcgtggtggtgggggcctgtagtcccagctactcaggaggctgaggcaggagaacggcatgaacccgggaggcagggcttgcagtgagccaagatcatgccgctgcactccagcctgggagacaaagt

SEQ ID NO: 358598 - DNA, 2789 bp, Homo sapiens
caggcgtcgctatcacaaacgtcgctgagtggtgaaagaccgtagcgatgtattgtggaatccataacctgaatgatctgttgaccacgatgacccagtcatcctgaatgtccgctatggcccagacgagcccatccattaccacctctcatatcgcctgattagcgtccaggggatgaacctcaccctctcctgccacgcagcctctaacccacctgcacagtactcttggtttgtcaatgggactttccagcaatccacccaagagctctttatccccaacatcactgtgaataatagtggatcctatacgtgccaagcccataactcagacactggcctcaataggaccacagtcacgacgatcacagtctatgcagagccacccaaacccttcatcaccagcaacaactccaaccccgtggaggatgaggatgctgtagccttaacctgtgaacctgagattcagaacacaacctacctgtggtgggtaaataatcagagcctcccggtcagtcccaggctgcagctgtccaatgacaacaggaccctcactctactcagtgtcacaaggaatgatgtaggaccctatgagtgtggaatccagaacgaattaagtgttgaccacagcgacccagtcatcctgaatgtcctctatggcccagacgaccccaccatttccccctcatacacctattaccgtccaggggtgaacctcagcctctcctgccatgcagcctctaacccacctgcacagtattcttggctgattgatgggaacatccagcaacacacacaagagctctttatctccaacatcactgagaagaacagcggactctatacctgccaggccaataactcagccagtggccacagcaggactacagtcaagacaatcacagtctctgcggagctgcccaagccctccatctccagcaacaactccaaacccgtggaggacaaggatgctgtggccttcacctgtgaacctgaggctcagaacacaacctacctgtggtgggtaaatggtcagagcctcccagtcagtcccaggctgcagctgtccaatggcaacaggaccctcactctattcaatgtcacaagaaatgacgcaagagcctatgtatgtggaatccagaactcagtgagtgcaaaccgcagtgacccagtcaccctggatgtcctctatgggccggacacccccatcatttcccccccagactcgtcttacctttcgggagcgaacctcaacctctcctgccactcggcctctaacccatccccgcagtattcttggcgtatcaatgggataccgcagcaacacacacaagttctctttatcgccaaaatcacgccaaataataacgggacctatgcctgttttgtctctaacttggctactggccgcaataattccatagtcaagagcatcacagtctctgcatctggaacttctcctggtctctcagctggggccactgtcggcatcatgattggagtgctggttggggttgctctgatatagcagccctggtgtagtttcttcatttcaggaagactgacagttgttttgcttcttccttaaagcatttgcaacagctacagtctaaaattgcttctttaccaaggatatttacagaaaagactctgaccagagatcgagaccatcctagccaacatcgtgaaaccccatctctactaaaaatacaaaaatgagctgggcttggtggcgcgcacctgtagtcccagttactcgggaggctgaggcaggagaatcgcttgaacccgggaggtggagattgcagtgagcccagatcgcaccactgcactccagtctggcaacagagcaagactccatctcaaaaagaaaagaaaagaagactctgacctgtactcttgaatacaagtttctgataccactgcactgtctgagaatttccaaaactttaatgaactaactgacagcttcatgaaactgtccaccaagatcaagcagagaaaataattaatttcatgggactaaatgaactaatgaggataatattttcataattttttatttgaaattttgctgattctttaaatgtcttgtttcccagatttcaggaaactttttttcttttaagctatccacagcttacagcaatttgataaaatatacttttgtgaacaaaaattgagacatttacattttctccctatgtggtcgctccagacttgggaaactattcatgaatatttatattgtatggtaatatagttattgcacaagttcaataaaaatctgctctttgtataacagaatacatttgaaaacattggttatattaccaagactttgactagaatgtcgtatttgaggatataaacccataggtaataaacccacaggtactacaaacaaagtctgaagtcagccttggtttggcttcctagtgtcaattaaacttctaaaagtttaatctgagattccttataaaaacttccagcaaagcaactttaaaaaagtctgtgtgggccgggcgcggtggctcacgcctgtaatcccagcactttgatccgccgaggcgggcggatcacgaggtcaggagatccagaccatcctggctaacacagtgaaaccccgtctctactaaaaatacaaaaaaagttagccgggcgtggtggtgggggcctgtagtcccagctactcaggaggctgaggcaggagaacggcatgaacccgggaggcagggcttgcagtgagccaagatcatgccgctgcactccagcctgggagacaaagt

SEQ ID NO: 358599 - DNA, 3286 bp, Homo sapiens
ctcagggcagagggaggaaggacagcagaccagacagtcacagcagccttgacaaaacgttcctggaactcaagctcttctccacagaggaggacagagcagacagcagagaccatggagtctccctcggcccctccccacagatggtgcatcccctggcagaggctcctgctcacagcctcacttctaaccttctggaacccgcccaccactgccaagctcactattgaatccacgccgttcaatgtcgcagaggggaaggaggtgcttctacttgtccacaatctgccccagcatctttttggctacagctggtacaaaggtgaaagagtggatggcaaccgtcaaattataggatatgtaataggaactcaacaagctaccccagggcccgcatacagtggtcgagagataatataccccaatgcatccctgctgatccagaacatcatccagaatgacacaggattctacaccctacacgtcataaagtcagatcttgtgaatgaagaagcaactggccagttccgggtatacccggagctgcccaagccctccatctccagcaacaactccaaacccgtggaggacaaggatgctgtggccttcacctgtgaacctgagactcaggacgcaacctacctgtggtgggtaaacaatcagagcctcccggtcagtcccaggctgcagctgtccaatggcaacaggaccctcactctattcaatgtcacaagaaatgacacagcaagctacaaatgtgaaacccagaacccagtgagtgccaggcgcagtgattcagtcatcctgaatgtcctctatggcccggatgcccccaccatttcccctctaaacacatcttacagatcaggggaaaatctgaacctctcctgccacgcagcctctaacccacctgcacagtactcttggtttgtcaatgggactttccagcaatccacccaagagctctttatccccaacatcactgtgaataatagtggatcctatacgtgccaagcccataactcagacactggcctcaataggaccacagtcacgacgatcacagtctatgcagagccacccaaacccttcatcaccagcaacaactccaaccccgtggaggatgaggatgctgtagccttaacctgtgaacctgagattcagaacacaacctacctgtggtgggtaaataatcagagcctcccggtcagtcccaggctgcagctgtccaatgacaacaggaccctcactctactcagtgtcacaaggaatgatgtaggaccctatgagtgtggaatccagaacgaattaagtgttgaccacagcgacccagtcatcctgaatgtcctctatggcccagacgaccccaccatttccccctcatacacctattaccgtccaggggtgaacctcagcctctcctgccatgcagcctctaacccacctgcacagtattcttggctgattgatgggaacatccagcaacacacacaagagctctttatctccaacatcactgagaagaacagcggactctatacctgccaggccaataactcagccagtggccacagcaggactacagtcaagacaatcacagtctctgcggagctgcccaagccctccatctccagcaacaactccaaacccgtggaggacaaggatgctgtggccttcacctgtgaacctgaggctcagaacacaacctacctgtggtgggtaaatggtcagagcctcccagtcagtcccaggctgcagctgtccaatggcaacaggaccctcactctattcaatgtcacaagaaatgacgcaagagcctatgtatgtggaatccagaactcagtgagtgcaaaccgcagtgacccagtcaccctggatgtcctctatgggccggacacccccatcatttcccccccagactcgtcttacctttcgggagcgaacctcaacctctcctgccactcggcctctaacccatccccgcagtattcttggcgtatcaatgggataccgcagcaacacacacaagttctctttatcgccaaaatcacgccaaataataacgggacctatgcctgttttgtctctaacttggctactggccgcaataattccatagtcaagagcatcacagtctctgcatctggaacttctcctggtctctcagctggggccactgtcggcatcatgattggagtgctggttggggttgctctgatatagcagccctggtgtagtttcttcatttcaggaagactggtaggtataatggcctttcctcttgttctgtttcctgcagtgctgactgccatgcttgggagagggaagggatttcttcacctgtatctgggactggatctcttcctcctacccccaagctcctgcttctcagcactaattcctgcaggtctcttcttccctggtcttcatgctccctgtacgccactgtctcttagatataattatccccaccctctgctcatttgtttcccagattcaatacattgtcaaagcctcttggtccttttttaacatctcacacttgtgtcattctctccattcccataaacctcaacaactgctcaaagtcctgcttgaccccttgttgccagtctttgaaatctttcttgcatatgactgcctcattaccttcctaaaatctagttcactcgcctactcaagaagacacaggggcctactgtggtgtattagataagttcacatttcttctctttactaatcttttttacttcctttaccaccactcccttatataattccatcatcctaatagatctgtttccctacacatccctgcctctccaccccacatgtacacagaattcttagttccggtgttacacctaaaaacatgtcaaacagggtgacctccttccactgtctgcactgtggagttacccacacccttaatcacaagcaacttctgacctcatgaagaacaaagactgtagcattaacctgtgagtcttaagctcaggacacaactgtgcctgtgactgagaaccttttcctgataaccaattcatatgttcataacagatacagaaatgaagaaggcaaggtccttaattctataacaggagacaaaacctgaaaaataatcataatgccaaaatagaaaggagtgaacatcacaagaaattagagaaatctgacggaaaatatagctacacattggaatcactcagaaacattttataaaatggatacttaagtcccaccgataaattccgatttactgatctataggagtggtgaggcattc

SEQ ID NO: 358600 - DNA, 3154 bp, Homo sapiens
gacaaagaacatacatatggttctgctgttaaatccgggcagctcctgcctgtcacctgaagttctagatcattccctggactccactctatctttaggggtctctggctcaagtcagtcatcatcaaacacctgggaaaaactgccccaccttgtgcctccactgcctaacgactgagctgacctccaggcttgcctctggtgtcccctgtgttatttctactgaaacatccagtcccaggccaggctgcacaatatgtacagggtttaaggacaatgggaagacccatcactatccatttctaggatgtccttgcaaagggaaaccacagaaaaaatatacctagggaaacaaagtaggactgaaggtggaagggacccagcacttgaatgttccaggtgaggaccctacagtgggccaagtagtcaactggtcagggagggaccaggagaggcaccaggagctgtgacctcccccccagtcctgtgtctgttcacagcccaatgctgctgcttaattcacacttgagaaagtctgtgcttcccccacagtgagcaggcagcctcgcagtctctgagatctcagatcatcgtgcatctgtcttgtgacacatgcacccaccgtgggtttttaagggctcaggtgggctgagaggtggaaggtgccaactctgattgaaagatgcctgtgaggaatcaaaggtgccacacagggcaatcttctctctgttatctgcacagccagagccacccaaacccttcatcaccagcaacaactccaaccccgtggaggatgaggatgctgtagccttaacctgtgaacctgagattcagaacacaacctacctgtggtgggtaaataatcagagcctcccggtcagtcccaggctgcagctgtccaatgacaacaggaccctcactctactcagtgtcacaaggaatgatgtaggaccctatgagtgtggaatccagaacgaattaagtgttgaccacagcgacccagtcatcctgaatgtcctctatggcccagacgaccccaccatttccccctcatacacctattaccgtccaggggtgaacctcagcctctcctgccatgcagcctctaacccacctgcacagtattcttggctgattgatgggaacatccagcaacacacacaagagctctttatctccaacatcactgagaagaacagcggactctatacctgccaggccaataactcagccagtggccacagcaggactacagtcaagacaatcacagtctctgcggagctgcccaagccctccatctccagcaacaactccaaacccgtggaggacaaggatgctgtggccttcacctgtgaacctgaggctcagaacacaacctacctgtggtgggtaaatggtcagagcctcccagtcagtcccaggctgcagctgtccaatggcaacaggaccctcactctattcaatgtcacaagaaatgacgcaagagcctatgtatgtggaatccagaactcagtgagtgcaaaccgcagtgacccagtcaccctggatgtcctctatgggccggacacccccatcatttcccccccagactcgtcttacctttcgggagcgaacctcaacctctcctgccactcggcctctaacccatccccgcagtattcttggcgtatcaatgggataccgcagcaacacacacaagttctctttatcgccaaaatcacgccaaataataacgggacctatgcctgttttgtctctaacttggctactggccgcaataattccatagtcaagagcatcacagtctctgcatctggaacttctcctggtctctcagctggggccactgtcggcatcatgattggagtgctggttggggttgctctgatatagcagccctggtgtagtttcttcatttcaggaagactgacagttgttttgcttcttccttaaagcatttgcaacagctacagtctaaaattgcttctttaccaaggatatttacagaaaagactctgaccagagatcgagaccatcctagccaacatcgtgaaaccccatctctactaaaaatacaaaaatgagctgggcttggtggcgcgcacctgtagtcccagttactcgggaggctgaggcaggagaatcgcttgaacccgggaggtggagattgcagtgagcccagatcgcaccactgcactccagtctggcaacagagcaagactccatctcaaaaagaaaagaaaagaagactctgacctgtactcttgaatacaagtttctgataccactgcactgtctgagaatttccaaaactttaatgaactaactgacagcttcatgaaactgtccaccaagatcaagcagagaaaataattaatttcatgggactaaatgaactaatgaggataatattttcataattttttatttgaaattttgctgattctttaaatgtcttgtttcccagatttcaggaaactttttttcttttaagctatccacagcttacagcaatttgataaaatatacttttgtgaacaaaaattgagacatttacattttctccctatgtggtcgctccagacttgggaaactattcatgaatatttatattgtatggtaatatagttattgcacaagttcaataaaaatctgctctttgtataacagaatacatttgaaaacattggttatattaccaagactttgactagaatgtcgtatttgaggatataaacccataggtaataaacccacaggtactacaaacaaagtctgaagtcagccttggtttggcttcctagtgtcaattaaacttctaaaagtttaatctgagattccttataaaaacttccagcaaagcaactttaaaaaagtctgtgtgggccgggcgcggtggctcacgcctgtaatcccagcactttgatccgccgaggcgggcggatcacgaggtcaggagatccagaccatcctggctaacacagtgaaaccccgtctctactaaaaatacaaaaaaagttagccgggcgtggtggtgggggcctgtagtcccagctactcaggaggctgaggcaggagaacggcatgaacccgggaggcagggcttgcagtgagccaagatcatgccgctgcactccagcctgggagacaaagt

SEQ ID NO: 358601 - DNA, 3459 bp, Homo sapiens
ctcagggcagagggaggaaggacagcagaccagacagtcacagcagccttgacaaaacgttcctggaactcaagctcttctccacagaggaggacagagcagacagcagagaccatggagtctccctcggcccctccccacagatggtgcatcccctggcagaggctcctgctcacagcctcacttctaaccttctggaacccgcccaccactgccaagctcactattgaatccacgccgttcaatgtcgcagaggggaaggaggtgcttctacttgtccacaatctgccccagcatctttttggctacagctggtacaaaggtgaaagagtggatggcaaccgtcaaattataggatatgtaataggaactcaacaagctaccccagggcccgcatacagtggtcgagagataatataccccaatgcatccctgctgatccagaacatcatccagaatgacacaggattctacaccctacacgtcataaagtcagatcttgtgaatgaagaagcaactggccagttccgggtatacccggagctgcccaagccctccatctccagcaacaactccaaacccgtggaggacaaggatgctgtggccttcacctgtgaacctgagactcaggacgcaacctacctgtggtgggtaaacaatcagagcctcccggtcagtcccaggctgcagctgtccaatggcaacaggaccctcactctattcaatgtcacaagaaatgacacagcaagctacaaatgtgaaacccagaacccagtgagtgccaggcgcagtgattcagtcatcctgaatgtcctctatggcccggatgcccccaccatttcccctctaaacacatcttacagatcaggggaaaatctgaacctctcctgccacgcagcctctaacccacctgcacagtactcttggtttgtcaatgggactttccagcaatccacccaagagctctttatccccaacatcactgtgaataatagtggatcctatacgtgccaagcccataactcagacactggcctcaataggaccacagtcacgacgatcacagtctatgcagagccacccaaacccttcatcaccagcaacaactccaaccccgtggaggatgaggatgctgtagccttaacctgtgaacctgagattcagaacacaacctacctgtggtgggtaaataatcagagcctcccggtcagtcccaggctgcagctgtccaatgacaacaggaccctcactctactcagtgtcacaaggaatgatgtaggaccctatgagtgtggaatccagaacgaattaagtgttgaccacagcatggcccagacgaccccaccatttccccctcatacacctattaccgtccaggggtgaacctcagcctctcctgccatgcagcctctaacccacctgcacagtattcttggctgattgatgggaacatccagcaacacacacaagagctctttatctccaacatcactgagaagaacagcggactctatacctgccaggccaataactcagccagtggccacagcaggactacagtcaagacaatcacagtctctgcggagctgcccaagccctccatctccagcaacaactccaaacccgtggaggacaaggatgctgtggccttcacctgtgaacctgaggctcagaacacaacctacctgtggtgggtaaatggtcagagcctcccagtcagtcccaggctgcagctgtccaatggcaacaggaccctcactctattcaatgtcacaagaaatgacgcaagagcctatgtatgtggaatccagaactcagtgagtgcaaaccgcagtgacccagtcaccctggatgtcctctatgggccggacacccccatcatttcccccccagactcgtcttacctttcgggagcgaacctcaacctctcctgccactcggcctctaacccatccccgcagtattcttggcgtatcaatgggataccgcagcaacacacacaagttctctttatcgccaaaatcacgccaaataataacgggacctatgcctgttttgtctctaacttggctactggccgcaataattccatagtcaagagcatcacagtctctgcatctggaacttctcctggtctctcagctggggccactgtcggcatcatgattggagtgctggttggggttgctctgatatagcagccctggtgtagtttcttcatttcaggaagactgacagttgttttgcttcttccttaaagcatttgcaacagctacagtctaaaattgcttctttaccaaggatatttacagaaaagactctgaccagagatcgagaccatcctagccaacatcgtgaaaccccatctctactaaaaatacaaaaatgagctgggcttggtggcgcgcacctgtagtcccagttactcgggaggctgaggcaggagaatcgcttgaacccgggaggtggagattgcagtgagcccagatcgcaccactgcactccagtctggcaacagagcaagactccatctcaaaaagaaaagaaaagaagactctgacctgtactcttgaatacaagtttctgataccactgcactgtctgagaatttccaaaactttaatgaactaactgacagcttcatgaaactgtccaccaagatcaagcagagaaaataattaatttcatgggactaaatgaactaatgaggataatattttcataattttttatttgaaattttgctgattctttaaatgtcttgtttcccagatttcaggaaactttttttcttttaagctatccacagcttacagcaatttgataaaatatacttttgtgaacaaaaattgagacatttacattttctccctatgtggtcgctccagacttgggaaactattcatgaatatttatattgtatggtaatatagttattgcacaagttcaataaaaatctgctctttgtataacagaatacatttgaaaacattggttatattaccaagactttgactagaatgtcgtatttgaggatataaacccataggtaataaacccacaggtactacaaacaaagtctgaagtcagccttggtttggcttcctagtgtcaattaaacttctaaaagtttaatctgagattccttataaaaacttccagcaaagcaactttaaaaaagtctgtgtgggccgggcgcggtggctcacgcctgtaatcccagcactttgatccgccgaggcgggcggatcacgaggtcaggagatccagaccatcctggctaacacagtgaaaccccgtctctactaaaaatacaaaaaaagttagccgggcgtggtggtgggggcctgtagtcccagctactcaggaggctgaggcaggagaacggcatgaacccgggaggcagggcttgcagtgagccaagatcatgccgctgcactccagcctgggagacaaagt

SEQ ID NO: 358602 - DNA, 2950 bp, Homo sapiens
ctcagggcagagggaggaaggacagcagaccagacagtcacagcagccttgacaaaacgttcctggaactcaagctcttctccacagaggaggacagagcagacagcagagaccatggagtctccctcggcccctccccacagatggtgcatcccctggcagaggctcctgctcacagcctcacttctaaccttctggaacccgcccaccactgccaagctcactattgaatccacgccgttcaatgtcgcagaggggaaggaggtgcttctacttgtccacaatctgccccagcatctttttggctacagctggtacaaaggtgaaagagtggatggcaaccgtcaaattataggatatgtaataggaactcaacaagctaccccagggcccgcatacagtggtcgagagataatataccccaatgcatccctgctgatccagaacatcatccagaatgacacaggattctacaccctacacgtcataaagtcagatcttgtgaatgaagaagcaactggccagttccgggtatacccagagccacccaaacccttcatcaccagcaacaactccaaccccgtggaggatgaggatgctgtagccttaacctgtgaacctgagattcagaacacaacctacctgtggtgggtaaataatcagagcctcccggtcagtcccaggctgcagctgtccaatgacaacaggaccctcactctactcagtgtcacaaggaatgatgtaggaccctatgagtgtggaatccagaacgaattaagtgttgaccacagcgacccagtcatcctgaatgtcctctatggcccagacgaccccaccatttccccctcatacacctattaccgtccaggggtgaacctcagcctctcctgccatgcagcctctaacccacctgcacagtattcttggctgattgatgggaacatccagcaacacacacaagagctctttatctccaacatcactgagaagaacagcggactctatacctgccaggccaataactcagccagtggccacagcaggactacagtcaagacaatcacagtctctgcggagctgcccaagccctccatctccagcaacaactccaaacccgtggaggacaaggatgctgtggccttcacctgtgaacctgaggctcagaacacaacctacctgtggtgggtaaatggtcagagcctcccagtcagtcccaggctgcagctgtccaatggcaacaggaccctcactctattcaatgtcacaagaaatgacgcaagagcctatgtatgtggaatccagaactcagtgagtgcaaaccgcagtgacccagtcaccctggatgtcctctatgggccggacacccccatcatttcccccccagactcgtcttacctttcgggagcgaacctcaacctctcctgccactcggcctctaacccatccccgcagtattcttggcgtatcaatgggataccgcagcaacacacacaagttctctttatcgccaaaatcacgccaaataataacgggacctatgcctgttttgtctctaacttggctactggccgcaataattccatagtcaagagcatcacagtctctgcatctggaacttctcctggtctctcagctggggccactgtcggcatcatgattggagtgctggttggggttgctctgatatagcagccctggtgtagtttcttcatttcaggaagactgacagttgttttgcttcttccttaaagcatttgcaacagctacagtctaaaattgcttctttaccaaggatatttacagaaaagactctgaccagagatcgagaccatcctagccaacatcgtgaaaccccatctctactaaaaatacaaaaatgagctgggcttggtggcgcgcacctgtagtcccagttactcgggaggctgaggcaggagaatcgcttgaacccgggaggtggagattgcagtgagcccagatcgcaccactgcactccagtctggcaacagagcaagactccatctcaaaaagaaaagaaaagaagactctgacctgtactcttgaatacaagtttctgataccactgcactgtctgagaatttccaaaactttaatgaactaactgacagcttcatgaaactgtccaccaagatcaagcagagaaaataattaatttcatgggactaaatgaactaatgaggataatattttcataattttttatttgaaattttgctgattctttaaatgtcttgtttcccagatttcaggaaactttttttcttttaagctatccacagcttacagcaatttgataaaatatacttttgtgaacaaaaattgagacatttacattttctccctatgtggtcgctccagacttgggaaactattcatgaatatttatattgtatggtaatatagttattgcacaagttcaataaaaatctgctctttgtataacagaatacatttgaaaacattggttatattaccaagactttgactagaatgtcgtatttgaggatataaacccataggtaataaacccacaggtactacaaacaaagtctgaagtcagccttggtttggcttcctagtgtcaattaaacttctaaaagtttaatctgagattccttataaaaacttccagcaaagcaactttaaaaaagtctgtgtgggccgggcgcggtggctcacgcctgtaatcccagcactttgatccgccgaggcgggcggatcacgaggtcaggagatccagaccatcctggctaacacagtgaaaccccgtctctactaaaaatacaaaaaaagttagccgggcgtggtggtgggggcctgtagtcccagctactcaggaggctgaggcaggagaacggcatgaacccgggaggcagggcttgcagtgagccaagatcatgccgctgcactccagcctgggagacaaagt

SEQ ID NO: 358603 - DNA, 2619 bp, Homo sapiens
gaatgataggtgcagtgagattcactcaattgagctgatcgattttataaacgtcgtcgaccttgagtcagaactctggcgtctgatcagagacaggccacccaatcacagcaggtgcttggaggggagtggaatctcagtagagttgatgactcaccaagtgcaaatgggaaaaagcaacacagtcacatttccatgtatacccggcagagccacccaaacccttcatcaccagcaacaactccaaccccgtggaggatgaggatgctgtagccttaacctgtgaacctgagattcagaacacaacctacctgtggtgggtaaataatcagagcctcccggtcagtcccaggctgcagctgtccaatgacaacaggaccctcactctactcagtgtcacaaggaatgatgtaggaccctatgagtgtggaatccagaacgaattaagtgttgaccacagcgacccagtcatcctgaatgtcctctatggcccagacgaccccaccatttccccctcatacacctattaccgtccaggggtgaacctcagcctctcctgccatgcagcctctaacccacctgcacagtattcttggctgattgatgggaacatccagcaacacacacaagagctctttatctccaacatcactgagaagaacagcggactctatacctgccaggccaataactcagccagtggccacagcaggactacagtcaagacaatcacagtctctgcggagctgcccaagccctccatctccagcaacaactccaaacccgtggaggacaaggatgctgtggccttcacctgtgaacctgaggctcagaacacaacctacctgtggtgggtaaatggtcagagcctcccagtcagtcccaggctgcagctgtccaatggcaacaggaccctcactctattcaatgtcacaagaaatgacgcaagagcctatgtatgtggaatccagaactcagtgagtgcaaaccgcagtgacccagtcaccctggatgtcctctatgggccggacacccccatcatttcccccccagactcgtcttacctttcgggagcgaacctcaacctctcctgccactcggcctctaacccatccccgcagtattcttggcgtatcaatgggataccgcagcaacacacacaagttctctttatcgccaaaatcacgccaaataataacgggacctatgcctgttttgtctctaacttggctactggccgcaataattccatagtcaagagcatcacagtctctgcatctggaacttctcctggtctctcagctggggccactgtcggcatcatgattggagtgctggttggggttgctctgatatagcagccctggtgtagtttcttcatttcaggaagactgacagttgttttgcttcttccttaaagcatttgcaacagctacagtctaaaattgcttctttaccaaggatatttacagaaaagactctgaccagagatcgagaccatcctagccaacatcgtgaaaccccatctctactaaaaatacaaaaatgagctgggcttggtggcgcgcacctgtagtcccagttactcgggaggctgaggcaggagaatcgcttgaacccgggaggtggagattgcagtgagcccagatcgcaccactgcactccagtctggcaacagagcaagactccatctcaaaaagaaaagaaaagaagactctgacctgtactcttgaatacaagtttctgataccactgcactgtctgagaatttccaaaactttaatgaactaactgacagcttcatgaaactgtccaccaagatcaagcagagaaaataattaatttcatgggactaaatgaactaatgaggataatattttcataattttttatttgaaattttgctgattctttaaatgtcttgtttcccagatttcaggaaactttttttcttttaagctatccacagcttacagcaatttgataaaatatacttttgtgaacaaaaattgagacatttacattttctccctatgtggtcgctccagacttgggaaactattcatgaatatttatattgtatggtaatatagttattgcacaagttcaataaaaatctgctctttgtataacagaatacatttgaaaacattggttatattaccaagactttgactagaatgtcgtatttgaggatataaacccataggtaataaacccacaggtactacaaacaaagtctgaagtcagccttggtttggcttcctagtgtcaattaaacttctaaaagtttaatctgagattccttataaaaacttccagcaaagcaactttaaaaaagtctgtgtgggccgggcgcggtggctcacgcctgtaatcccagcactttgatccgccgaggcgggcggatcacgaggtcaggagatccagaccatcctggctaacacagtgaaaccccgtctctactaaaaatacaaaaaaagttagccgggcgtggtggtgggggcctgtagtcccagctactcaggaggctgaggcaggagaacggcatgaacccgggaggcagggcttgcagtgagccaagatcatgccgctgcactccagcctgggagacaaagt

SEQ ID NO: 358604 - DNA, 2550 bp, Homo sapiens
ctcagggcagagggaggaaggacagcagaccagacagtcacagcagccttgacaaaacgttcctggaactcaagctcttctccacagaggaggacagagcagacagcagagaccatggagtctccctcggcccctccccacagatggtgcatcccctggcagaggctcctgctcacagcctcacttctaaccttctggaacccgcccaccactgccaagctcactattgaatccacgccgttcaatgtcgcagaggggaaggaggtgcttctacttgtccacaatctgccccagcatctttttggctacagctggtacaaaggtgaaagagtggatggcaaccgtcaaattataggatatgtaataggaactcaacaagctaccccagggcccgcatacagtggtcgagagataatataccccaatgcatccctgctgatccagaacatcatccagaatgacacaggattctacaccctacacgtcataaagtcagatcttgtgaatgaagaagcaactggccagttccgggtatacccggagctgcccaagccctccatctccagcaacaactccaaacccgtggaggacaaggatgctgtggccttcacctgtgaacctgagactcaggacgcaacctacctgtggtgggtaaacaatcagagcctcccggtcagtcccaggctgcagctgtccaatggcaacaggaccctcactctattcaatgtcacaagaaatgacacagcaagctacaaatgtgaaacccagaacccagtgagtgccaggcgcagtgattcagtcatcctgaatgtcctctatggcccggatgcccccaccatttcccctctaaacacatcttacagatcaggggaaaatctgaacctctcctgccacgcagcctctaacccacctgcacagtactcttggtttgtcaatgggactttccagcaatccacccaagagctctttatccccaacatcactgtgaataatagtggatcctatacgtgccaagcccataactcagacactggcctcaataggaccacagtcacgacgatcacagtctatgcagagccacccaaacccttcatcaccagcaacaactccaaccccgtggaggatgaggatgctgtagccttaacctgtgaacctgagattcagaacacaacctacctgtggtgggtaaataatcagagcctcccggtcagtcccaggctgcagctgtccaatgacaacaggaccctcactctactcagtgtcacaaggaatgatgtaggaccctatgagtgtggaatccagaacgaattaagtgttgaccacagcgacccagtcatcctgaatgtcctctatggcccagacgaccccaccatttccccctcatacacctattaccgtccaggggtgaacctcagcctctcctgccatgcagcctctaacccacctgcacagtattcttggctgattgatgggaacatccagcaacacacacaagagctctttatctccaacatcactgagaagaacagcggactctatacctgccaggccaataactcagccagtggccacagcaggactacagtcaagacaatcacagtctctgcggagctgcccaagccctccatctccagcaacaactccaaacccgtggaggacaaggatgctgtggccttcacctgtgaacctgaggctcagaacacaacctacctgtggtgggtaaatggtcagagcctcccagtcagtcccaggctgcagctgtccaatggcaacaggaccctcactctattcaatgtcacaagaaatgacgcaagagcctatgtatgtggaatccagaactcagtgagtgcaaaccgcagtgacccagtcaccctggatgtcctctatgggccggacacccccatcatttcccccccagactcgtcttacctttcgggagcgaacctcaacctctcctgccactcggcctctaacccatccccgcagtattcttggcgtatcaatgggataccgcagcaacacacacaagttctctttatcgccaaaatcacgccaaataataacgggacctatgcctgttttgtctctaacttggctactggccgcaataattccatagtcaagagcatcacagtctctggtaagtggctccctggagcatcagcatcatattctggggtggagtctatctggttctcaccaaagagccaagaagacattttctttcccagtctgtgttccatgggcacaaggaaatcccaaattctatcctgagccccctcactccatctcggccaactctctcctccccggcttctctgatatctcacggctgacctcgggtccagcctggaatgtggggaggggcctcccttagccccagaaggcccccaatagtgaaagggacttcatagtccagaagaaagaagggtccttaaggtcgagttgctcctctctatcaccaatatgtccctttctgtcacctctttgtgttttttcacctactctgtgagctacaaggaacaaggaggctttgaaaccagcccacac

SEQ ID NO: 358605 - DNA, 2394 bp, Homo sapiens
tccagtcggacctgctgctttctcccgtggaggatgaggatgctgtagccttaacctgtgaacctgagattcagaacacaacctacctgtggtgggtaaataatcagagcctcccggtcagtcccaggctgcagctgtccaatgacaacaggaccctcactctactcagtgtcacaaggaatgatgtaggaccctatgagtgtggaatccagaacgaattaagtgttgaccacagcgacccagtcatcctgaatgtcctctatggcccagacgaccccaccatttccccctcatacacctattaccgtccaggggtgaacctcagcctctcctgccatgcagcctctaacccacctgcacagtattcttggctgattgatgggaacatccagcaacacacacaagagctctttatctccaacatcactgagaagaacagcggactctatacctgccaggccaataactcagccagtggccacagcaggactacagtcaagacaatcacagtctctgcggagctgcccaagccctccatctccagcaacaactccaaacccgtggaggacaaggatgctgtggccttcacctgtgaacctgaggctcagaacacaacctacctgtggtgggtaaatggtcagagcctcccagtcagtcccaggctgcagctgtccaatggcaacaggaccctcactctattcaatgtcacaagaaatgacgcaagagcctatgtatgtggaatccagaactcagtgagtgcaaaccgcagtgacccagtcaccctggatgtcctctatgggccggacacccccatcatttcccccccagactcgtcttacctttcgggagcgaacctcaacctctcctgccactcggcctctaacccatccccgcagtattcttggcgtatcaatgggataccgcagcaacacacacaagttctctttatcgccaaaatcacgccaaataataacgggacctatgcctgttttgtctctaacttggctactggccgcaataattccatagtcaagagcatcacagtctctgcatctggaacttctcctggtctctcagctggggccactgtcggcatcatgattggagtgctggttggggttgctctgatatagcagccctggtgtagtttcttcatttcaggaagactgacagttgttttgcttcttccttaaagcatttgcaacagctacagtctaaaattgcttctttaccaaggatatttacagaaaagactctgaccagagatcgagaccatcctagccaacatcgtgaaaccccatctctactaaaaatacaaaaatgagctgggcttggtggcgcgcacctgtagtcccagttactcgggaggctgaggcaggagaatcgcttgaacccgggaggtggagattgcagtgagcccagatcgcaccactgcactccagtctggcaacagagcaagactccatctcaaaaagaaaagaaaagaagactctgacctgtactcttgaatacaagtttctgataccactgcactgtctgagaatttccaaaactttaatgaactaactgacagcttcatgaaactgtccaccaagatcaagcagagaaaataattaatttcatgggactaaatgaactaatgaggataatattttcataattttttatttgaaattttgctgattctttaaatgtcttgtttcccagatttcaggaaactttttttcttttaagctatccacagcttacagcaatttgataaaatatacttttgtgaacaaaaattgagacatttacattttctccctatgtggtcgctccagacttgggaaactattcatgaatatttatattgtatggtaatatagttattgcacaagttcaataaaaatctgctctttgtataacagaatacatttgaaaacattggttatattaccaagactttgactagaatgtcgtatttgaggatataaacccataggtaataaacccacaggtactacaaacaaagtctgaagtcagccttggtttggcttcctagtgtcaattaaacttctaaaagtttaatctgagattccttataaaaacttccagcaaagcaactttaaaaaagtctgtgtgggccgggcgcggtggctcacgcctgtaatcccagcactttgatccgccgaggcgggcggatcacgaggtcaggagatccagaccatcctggctaacacagtgaaaccccgtctctactaaaaatacaaaaaaagttagccgggcgtggtggtgggggcctgtagtcccagctactcaggaggctgaggcaggagaacggcatgaacccgggaggcagggcttgcagtgagccaagatcatgccgctgcactccagcctgggagacaaagt

SEQ ID NO: 358606 - DNA, 2113 bp, Homo sapiens
  misc_feature (2046)..(2046): n is a, c, g, or t
  misc_feature (2068)..(2068): n is a, c, g, or t
  misc_feature (2078)..(2078): n is a, c, g, or t
ctcagggcagagggaggaaggacagcagaccagacagtcacagcagccttgacaaaacgttcctggaactcaagctcttctccacagaggaggacagagcagacagcagagaccatggagtctccctcggcccctccccacagatggtgcatcccctggcagaggctcctgctcacagcctcacttctaaccttctggaacccgcccaccactgccaagctcactattgaatccacgccgttcaatgtcgcagaggggaaggaggtgcttctacttgtccacaatctgccccagcatctttttggctacagctggtacaaaggtgaaagagtggatggcaaccgtcaaattataggatatgtaataggaactcaacaagctaccccagggcccgcatacagtggtcgagagataatataccccaatgcatccctgctgatccagaacatcatccagaatgacacaggattctacaccctacacgtcataaagtcagatcttgtgaatgaagaagcaactggccagttccgggtatacccggagctgcccaagccctccatctccagcaacaactccaaacccgtggaggacaaggatgctgtggccttcacctgtgaacctgagactcaggacgcaacctacctgtggtgggtaaacaatcagagcctcccggtcagtcccaggctgcagctgtccaatggcaacaggaccctcactctattcaatgtcacaagaaatgacacagcaagctacaaatgtgaaacccagaacccagtgagtgccaggcgcagtgattcagtcatcctgaatgtcctctatggcccggatgcccccaccatttcccctctaaacacatcttacagatcaggggaaaatctgaacctctcctgccacgcagcctctaacccacctgcacagtactcttggtttgtcaatgggactttccagcaatccacccaagagctctttatccccaacatcactgtgaataatagtggatcctatacgtgccaagcccataactcagacactggcctcaataggaccacagtcacgacgatcacagtctatgcagagccacccaaacccttcatcaccagcaacaactccaaccccgtggaggatgaggatgctgtagccttaacctgtgaacctgagattcagaacacaacctacctgtggtgggtaaataatcagagcctcccggtcagtcccaggctgcagctgtccaatgacaacaggaccctcactctactcagtgtcacaaggaatgatgtaggaccctatgagtgtggaatccagaacgaattaagtgttgaccacagcgacccagtcatcctgaatgtcctctatggcccagacgaccccaccatttccccctcatacacctattaccgtccaggggtgaacctcagcctctcctgccatgcagcctctaacccacctgcacagtattcttggctgattgatgggaacatccagcaacacacacaagagctctttatctccaacatcactgagaagaacagcggactctatacctgccaggccaataactcagccagtggccacagcaggactacagtcaagacaatcacagtctctgcggagctgcccaagccctccatctccagcaacaactccaaacccgtggaggacaaggatgctgtggccttcacctgtgaacctgaggctcagaacacaacctacctgtggtgggtaaatggtcagagcctcccagtcagtcccaggctgcagctgtccaatggcaacaggaccctcactctattcaatgtcacaagaaatgacgcaagagcctatgtatgtggaatccagaactcagtgagtgcaaaccgcagtgacccagtcaccctggatgtcctctatgggccggacacccccatcatttcccccccagactcgtcttacctgatgggagcaagactgatcttctcccatcagcattttgtaaatcaatgtgaaatttgcaaacaagctaagatacattttcttgaaaattgtcctaatttttgattgtatagtttngtcttctgtgattctatctgtncaggcatatnagcataaatttttcatatcgatcacaacatatcac

SEQ ID NO: 358607 - DNA, 1948 bp, Homo sapiens
ctcagggcagagggaggaaggacagcagaccagacagtcacagcagccttgacaaaacgttcctggaactcaagctcttctccacagaggaggacagagcagacagcagagaccatggagtctccctcggcccctccccacagatggtgcatcccctggcagaggctcctgctcacagcctcacttctaaccttctggaacccgcccaccactgccaagctcactattgaatccacgccgttcaatgtcgcagaggggaaggaggtgcttctacttgtccacaatctgccccagcatctttttggctacagctggtacaaaggtgaaagagtggatggcaaccgtcaaattataggatatgtaataggaactcaacaagctaccccagggcccgcatacagtggtcgagagataatataccccaatgcatccctgctgatccagaacatcatccagaatgacacaggattctacaccctacacgtcataaagtcagatcttgtgaatgaagaagcaactggccagttccgggtatacccggagctgcccaagccctccatctccagcaacaactccaaacccgtggaggacaaggatgctgtggccttcacctgtgaacctgagactcaggacgcaacctacctgtggtgggtaaacaatcagagcctcccggtcagtcccaggctgcagctgtccaatggcaacaggaccctcactctattcaatgtcacaagaaatgacacagcaagctacaaatgtgaaacccagaacccagtgagtgccaggcgcagtgattcagtcatcctgaatgtcctctatggcccggatgcccccaccatttcccctctaaacacatcttacagatcaggggaaaatctgaacctctcctgccacgcagcctctaacccacctgcacagtactcttggtttgtcaatgggactttccagcaatccacccaagagctctttatccccaacatcactgtgaataatagtggatcctatacgtgccaagcccataactcagacactggcctcaataggaccacagtcacgacgatcacagtctatgcagagccacccaaacccttcatcaccagcaacaactccaaccccgtggaggatgaggatgctgtagccttaacctgtgaacctgagattcagaacacaacctacctgtggtgggtaaataatcagagcctcccggtcagtcccaggctgcagctgtccaatgacaacaggaccctcactctactcagtgtcacaaggaatgatgtaggaccctatgagtgtggaatccagaacgaattaagtgttgaccacagcgacccagtcatcctgaatgtcctctatggcccagacgaccccaccatttccccctcatacacctattaccgtccaggggtgaacctcagcctctcctgccatgcagcctctaacccacctgcacagtattcttggctgattgatgggaacatccagcaacacacacaagagctctttatctccaacatcactgagaagaacagcggactctatacctgccaggccaataactcagccagtggccacagcaggactacagtcaagacaatcacagtctctgcggagctgcccaagccctccatctccagcaacaactccaaacccgtggaggacaaggatgctgtggccttcacctgtgaacctgaggctcagaacacaacctacctgtggtgggtaaatggtcagagcctcccagtcagtcccaggctgcagctgtccaatggcaacaggaccctcactctattcaatgtcacaagaaatgacgcaagagcctatgtatgtggaatccagaactcagtgagtgcaaaccgcagtgacccagtcaccctggatgtcctctatgggccggacacccccatcagtgtcccccccagaaatatcagggaggatcctctgaacacac

SEQ ID NO: 358608 - DNA, 1863 bp, Homo sapiens
ctcagggcagagggaggaaggacagcagaccagacagtcacagcagccttgacaaaacgttcctggaactcaagctcttctccacagaggaggacagagcagacagcagagaccatggagtctccctcggcccctccccacagatggtgcatcccctggcagaggctcctgctcacagcctcacttctaaccttctggaacccgcccaccactgccaagctcactattgaatccacgccgttcaatgtcgcagaggggaaggaggtgcttctacttgtccacaatctgccccagcatctttttggctacagctggtacaaaggtgaaagagtggatggcaaccgtcaaattataggatatgtaataggaactcaacaagctaccccagggcccgcatacagtggtcgagagataatataccccaatgcatccctgctgatccagaacatcatccagaatgacacaggattctacaccctacacgtcataaagtcagatcttgtgaatgaagaagcaactggccagttccgggtatacccggagctgcccaagccctccatctccagcaacaactccaaacccgtggaggacaaggatgctgtggccttcacctgtgaacctgagactcaggacgcaacctacctgtggtgggtaaacaatcagagcctcccggtcagtcccaggctgcagctgtccaatggcaacaggaccctcactctattcaatgtcacaagaaatgacacagcaagctacaaatgtgaaacccagaacccagtgagtgccaggcgcagtgattcagtcatcctgaatgtcctctatggcccggatgcccccaccatttcccctctaaacacatcttacagatcaggggaaaatctgaacctctcctgccacgcagcctctaacccacctgcacagtactcttggtttgtcaatgggactttccagcaatccacccaagagctctttatccccaacatcactgtgaataatagtggatcctatacgtgccaagcccataactcagacactggcctcaataggaccacagtcacgacgatcacagtctatgcagagccacccaaacccttcatcaccagcaacaactccaaccccgtggaggatgaggatgctgtagccttaacctgtgaacctgagattcagaacacaacctacctgtggtgggtaaataatcagagcctcccggtcagtcccaggctgcagctgtccaatgacaacaggaccctcactctactcagtgtcacaaggaatgatgtaggaccctatgagtgtggaatccagaacgaattaagtgttgaccacagcgacccagtcatcctgaatgtcctctatggcccagacgaccccaccatttccccctcatacacctattaccgtccaggggtgaacctcagcctctcctgccatgcagcctctaacccacctgcacagtattcttggctgattgatgggaacatccagcaacacacacaagagctctttatctccaacatcactgagaagaacagcggactctatacctgccaggccaataactcagccagtggccacagcaggactacagtcaagacaatcacagtctctgcggagctgcccaagccctccatctccagcaacaactccaaccccgtggaggacaaggatgctgtggccttcacctgtgaacctgaggttcagaacacaacctacctgtggtgggtaaatggtcagagcctcccggtcagtcccaggctgcagctgtccaatggcaacatgaccctcactctactcagcgtcaaaaggaacgatgcaggatcctatgaatgtgaaatacagaacccagcgagtgccaaccgcagtgac

SEQ ID NO: 358609 - DNA, 1645 bp, Homo sapiens
ctcagggcagagggaggaaggacagcagaccagacagtcacagcagccttgacaaaacgttcctggaactcaagctcttctccacagaggaggacagagcagacagcagagaccatggagtctccctcggcccctccccacagatggtgcatcccctggcagaggctcctgctcacagcctcacttctaaccttctggaacccgcccaccactgccaagctcactattgaatccacgccgttcaatgtcgcagaggggaaggaggtgcttctacttgtccacaatctgccccagcatctttttggctacagctggtacaaaggtgaaagagtggatggcaaccgtcaaattataggatatgtaataggaactcaacaagctaccccagggcccgcatacagtggtcgagagataatataccccaatgcatccctgctgatccagaacatcatccagaatgacacaggattctacaccctacacgtcataaagtcagatcttgtgaatgaagaagcaactggccagttccgggtatacccggagctgcccaagccctccatctccagcaacaactccaaacccgtggaggacaaggatgctgtggccttcacctgtgaacctgagactcaggacgcaacctacctgtggtgggtaaacaatcagagcctcccggtcagtcccaggctgcagctgtccaatggcaacaggaccctcactctattcaatgtcacaagaaatgacacagcaagctacaaatgtgaaacccagaacccagtgagtgccaggcgcagtgattcagtcatcctgaatgtcctctatggcccggatgcccccaccatttcccctctaaacacatcttacagatcaggggaaaatctgaacctctcctgccacgcagcctctaacccacctgcacagtactcttggtttgtcaatgggactttccagcaatccacccaagagctctttatccccaacatcactgtgaataatagtggatcctatacgtgccaagcccataactcagacactggcctcaataggaccacagtcacgacgatcacagtctatgcagagccacccaaacccttcatcaccagcaacaactccaaccccgtggaggatgaggatgctgtagccttaacctgtgaacctgagattcagaacacaacctacctgtggtgggtaaataatcagagcctcccggtcagtcccaggctgcagctgtccaatgacaacaggaccctcactctactcagtgtcacaaggaatgatgtaggaccctatgagtgtggaatccagaacgaattaagtgttgaccacagcgacccagtcatcctgaatgtcctctatggcccagacgaccccaccatttccccctcatacacctattaccgtccaggggtgaacctcagcctctcctgccatgcagcctctaacccacctgcacagtattcttggctgattgatgggaacatccagcaacacacacaagagctctttatctccaacatcactgagaagaacagcggactctatacctgccaggccaataccgcccagggggttttccagtctaagagagagtagcaagtagatccagacgcagccacaaaccgatatatccagctgaatacagcaagtg

SEQ ID NO: 358610 - DNA, 1747 bp, Homo sapiens
tggtgattagaggatcccccgctgtccaatggcaacaggaccctcactctattcaatgtcacaagaaatgacgcaagagcctatgtatgtggaatccagaactcagtgagtgcaaaccgcagtgacccagtcaccctggatgtcctctatgggccggacacccccatcatttcccccccagactcgtcttacctttcgggagcgaacctcaacctctcctgccactcggcctctaacccatccccgcagtattcttggcgtatcaatgggataccgcagcaacacacacaagttctctttatcgccaaaatcacgccaaataataacgggacctatgcctgttttgtctctaacttggctactggccgcaataattccatagtcaagagcatcacagtctctgcatctggaacttctcctggtctctcagctggggccactgtcggcatcatgattggagtgctggttggggttgctctgatatagcagccctggtgtagtttcttcatttcaggaagactgacagttgttttgcttcttccttaaagcatttgcaacagctacagtctaaaattgcttctttaccaaggatatttacagaaaagactctgaccagagatcgagaccatcctagccaacatcgtgaaaccccatctctactaaaaatacaaaaatgagctgggcttggtggcgcgcacctgtagtcccagttactcgggaggctgaggcaggagaatcgcttgaacccgggaggtggagattgcagtgagcccagatcgcaccactgcactccagtctggcaacagagcaagactccatctcaaaaagaaaagaaaagaagactctgacctgtactcttgaatacaagtttctgataccactgcactgtctgagaatttccaaaactttaatgaactaactgacagcttcatgaaactgtccaccaagatcaagcagagaaaataattaatttcatgggactaaatgaactaatgaggataatattttcataattttttatttgaaattttgctgattctttaaatgtcttgtttcccagatttcaggaaactttttttcttttaagctatccacagcttacagcaatttgataaaatatacttttgtgaacaaaaattgagacatttacattttctccctatgtggtcgctccagacttgggaaactattcatgaatatttatattgtatggtaatatagttattgcacaagttcaataaaaatctgctctttgtataacagaatacatttgaaaacattggttatattaccaagactttgactagaatgtcgtatttgaggatataaacccataggtaataaacccacaggtactacaaacaaagtctgaagtcagccttggtttggcttcctagtgtcaattaaacttctaaaagtttaatctgagattccttataaaaacttccagcaaagcaactttaaaaaagtctgtgtgggccgggcgcggtggctcacgcctgtaatcccagcactttgatccgccgaggcgggcggatcacgaggtcaggagatccagaccatcctggctaacacagtgaaaccccgtctctactaaaaatacaaaaaaagttagccgggcgtggtggtgggggcctgtagtcccagctactcaggaggctgaggcaggagaacggcatgaacccgggaggcagggcttgcagtgagccaagatcatgccgctgcactccagcctgggagacaaagt

SEQ ID NO: 358611 - DNA, 1790 bp, Homo sapiens
aactcctgatctgcccgcctcggcctcccaaagtgctgggattacaggcgtgagccaccgcacccggccgatttggactttttaacacaggattgggacaggattcagagggacactgtggcccttctacaatcaggagcttcccctttcctctgatgacatcacctgtggctttgttctctttgttccagatgggccggacacccccatcatttcccccccagactcgtcttacctttcgggagcgaacctcaacctctcctgccactcggcctctaacccatccccgcagtattcttggcgtatcaatgggataccgcagcaacacacacaagttctctttatcgccaaaatcacgccaaataataacgggacctatgcctgttttgtctctaacttggctactggccgcaataattccatagtcaagagcatcacagtctctgcatctggaacttctcctggtctctcagctggggccactgtcggcatcatgattggagtgctggttggggttgctctgatatagcagccctggtgtagtttcttcatttcaggaagactgacagttgttttgcttcttccttaaagcatttgcaacagctacagtctaaaattgcttctttaccaaggatatttacagaaaagactctgaccagagatcgagaccatcctagccaacatcgtgaaaccccatctctactaaaaatacaaaaatgagctgggcttggtggcgcgcacctgtagtcccagttactcgggaggctgaggcaggagaatcgcttgaacccgggaggtggagattgcagtgagcccagatcgcaccactgcactccagtctggcaacagagcaagactccatctcaaaaagaaaagaaaagaagactctgacctgtactcttgaatacaagtttctgataccactgcactgtctgagaatttccaaaactttaatgaactaactgacagcttcatgaaactgtccaccaagatcaagcagagaaaataattaatttcatgggactaaatgaactaatgaggataatattttcataattttttatttgaaattttgctgattctttaaatgtcttgtttcccagatttcaggaaactttttttcttttaagctatccacagcttacagcaatttgataaaatatacttttgtgaacaaaaattgagacatttacattttctccctatgtggtcgctccagacttgggaaactattcatgaatatttatattgtatggtaatatagttattgcacaagttcaataaaaatctgctctttgtataacagaatacatttgaaaacattggttatattaccaagactttgactagaatgtcgtatttgaggatataaacccataggtaataaacccacaggtactacaaacaaagtctgaagtcagccttggtttggcttcctagtgtcaattaaacttctaaaagtttaatctgagattccttataaaaacttccagcaaagcaactttaaaaaagtctgtgtgggccgggcgcggtggctcacgcctgtaatcccagcactttgatccgccgaggcgggcggatcacgaggtcaggagatccagaccatcctggctaacacagtgaaaccccgtctctactaaaaatacaaaaaaagttagccgggcgtggtggtgggggcctgtagtcccagctactcaggaggctgaggcaggagaacggcatgaacccgggaggcagggcttgcagtgagccaagatcatgccgctgcactccagcctgggagacaaagt

SEQ ID NO: 358612 - DNA, 1448 bp, Homo sapiens
ctcagggcagagggaggaaggacagcagaccagacagtcacagcagccttgacaaaacgttcctggaactcaagctcttctccacagaggaggacagagcagacagcagagaccatggagtctccctcggcccctccccacagatggtgcatcccctggcagaggctcctgctcacagcctcacttctaaccttctggaacccgcccaccactgccaagctcactattgaatccacgccgttcaatgtcgcagaggggaaggaggtgcttctacttgtccacaatctgccccagcatctttttggctacagctggtacaaaggtgaaagagtggatggcaaccgtcaaattataggatatgtaataggaactcaacaagctaccccagggcccgcatacagtggtcgagagataatataccccaatgcatccctgctgatccagaacatcatccagaatgacacaggattctacaccctacacgtcataaagtcagatcttgtgaatgaagaagcaactggccagttccgggtatacccggagctgcccaagccctccatctccagcaacaactccaaacccgtggaggacaaggatgctgtggccttcacctgtgaacctgagactcaggacgcaacctacctgtggtgggtaaacaatcagagcctcccggtcagtcccaggctgcagctgtccaatggcaacaggaccctcactctattcaatgtcacaagaaatgacacagcaagctacaaatgtgaaacccagaacccagtgagtgccaggcgcagtgattcagtcatcctgaatgtcctctatggcccggatgcccccaccatttcccctctaaacacatcttacagatcaggggaaaatctgaacctctcctgccacgcagcctctaacccacctgcacagtactcttggtttgtcaatgggactttccagcaatccacccaagagctctttatccccaacatcactgtgaataatagtggatcctatacgtgccaagcccataactcagacactggcctcaataggaccacagtcacgacgatcacagtctatgcagagccacccaaacccttcatcaccagcaacaactccaaccccgtggaggatgaggatgctgtagccttaacctgtgaacctgagattcagaacacaacctacctgtggtgggtaaataatcagagcctcccggtcagtcccaggctgcagctgtccaatgacaacaggaccctcactctactcagtgtcacaaggaatgatgtaggaccctatgagtgtggaatccagaacgaattaagtgttgaccacagcgacccagtcatcctgaatgtcctctatggcccagacgaccccaccatttccccctcatacacctattaccgtccaggggtgaacctcagcctcccgagtaactgggattacacacacgtgcc

SEQ ID NO: 358613 - DNA, 2099 bp, Homo sapiens
aaaaaagttaagtgcaaagaatcaagcctggtatgttagttttcatcactgagattcagccaagatggaattagagtgcaagataatttaccggggggaccaccatgaggaaaagtggagtagaagtgggaggagcctgagagagccctcagaccacgatgcagatctgattcctgagaaggagaaagaggagagagttttagatagtgatgcagttctcagagtttccacaaggctggtggggcgtcctcaagcccctcacccatgagagagaagcagagtcccccagaactgggcttttcattcccctggtgggagcccatgagaagcgagttctctgtgcaacggacttagtaaatacagaatgcactagcctgggccttctgccaatcaagtccctgccacagagacccaacagacttatttatgcctaccacaactgagacactgagaaaaagatgcaaccatgaaaagatagaaagttctaatgacacgcaaaaatagcaatcagactttctcaaatttcaaagccttcagaaatagctgagtgcagacaggccagggtggaattgacagaagactgatcaccaactagcaacacagtgagagagaaaaaattgcaactttcccacaaaactaatgcattccttgaagcaacaagtagagactgcttcatgctgagagctggaacctggggcaccccactgtaaaataacatcacattcattccttctcttttctttccatgacggacgcatctggaacttctcctggtctctcagctggggccactgtcggcatcatgattggagtgctggttggggttgctctgatatagcagccctggtgtagtttcttcatttcaggaagactgacagttgttttgcttcttccttaaagcatttgcaacagctacagtctaaaattgcttctttaccaaggatatttacagaaaagactctgaccagagatcgagaccatcctagccaacatcgtgaaaccccatctctactaaaaatacaaaaatgagctgggcttggtggcgcgcacctgtagtcccagttactcgggaggctgaggcaggagaatcgcttgaacccgggaggtggagattgcagtgagcccagatcgcaccactgcactccagtctggcaacagagcaagactccatctcaaaaagaaaagaaaagaagactctgacctgtactcttgaatacaagtttctgataccactgcactgtctgagaatttccaaaactttaatgaactaactgacagcttcatgaaactgtccaccaagatcaagcagagaaaataattaatttcatgggactaaatgaactaatgaggataatattttcataattttttatttgaaattttgctgattctttaaatgtcttgtttcccagatttcaggaaactttttttcttttaagctatccacagcttacagcaatttgataaaatatacttttgtgaacaaaaattgagacatttacattttctccctatgtggtcgctccagacttgggaaactattcatgaatatttatattgtatggtaatatagttattgcacaagttcaataaaaatctgctctttgtataacagaatacatttgaaaacattggttatattaccaagactttgactagaatgtcgtatttgaggatataaacccataggtaataaacccacaggtactacaaacaaagtctgaagtcagccttggtttggcttcctagtgtcaattaaacttctaaaagtttaatctgagattccttataaaaacttccagcaaagcaactttaaaaaagtctgtgtgggccgggcgcggtggctcacgcctgtaatcccagcactttgatccgccgaggcgggcggatcacgaggtcaggagatccagaccatcctggctaacacagtgaaaccccgtctctactaaaaatacaaaaaaagttagccgggcgtggtggtgggggcctgtagtcccagctactcaggaggctgaggcaggagaacggcatgaacccgggaggcagggcttgcagtgagccaagatcatgccgctgcactccagcctgggagacaaagt

SEQ ID NO: 358614 - DNA, 1407 bp, Homo sapiens
ggcccgaggggcacaggagaggtagcaaaggcccaggcttttctttggttttcttcaaacataggtgaaaaaaacactgccattcacaagtcaaggaacccagggccagctggaagtgtggagcacacatgctgtggagcacacatgctgtggagattgcagtgtgtctgaggtttgtgtagtagtggaagattttaggtatgtaaagcatttgcaacagctacagtctaaaattgcttctttaccaaggatatttacagaaaagactctgaccagagatcgagaccatcctagccaacatcgtgaaaccccatctctactaaaaatacaaaaatgagctgggcttggtggcgcgcacctgtagtcccagttactcgggaggctgaggcaggagaatcgcttgaacccgggaggtggagattgcagtgagcccagatcgcaccactgcactccagtctggcaacagagcaagactccatctcaaaaagaaaagaaaagaagactctgacctgtactcttgaatacaagtttctgataccactgcactgtctgagaatttccaaaactttaatgaactaactgacagcttcatgaaactgtccaccaagatcaagcagagaaaataattaatttcatgggactaaatgaactaatgaggataatattttcataattttttatttgaaattttgctgattctttaaatgtcttgtttcccagatttcaggaaactttttttcttttaagctatccacagcttacagcaatttgataaaatatacttttgtgaacaaaaattgagacatttacattttctccctatgtggtcgctccagacttgggaaactattcatgaatatttatattgtatggtaatatagttattgcacaagttcaataaaaatctgctctttgtataacagaatacatttgaaaacattggttatattaccaagactttgactagaatgtcgtatttgaggatataaacccataggtaataaacccacaggtactacaaacaaagtctgaagtcagccttggtttggcttcctagtgtcaattaaacttctaaaagtttaatctgagattccttataaaaacttccagcaaagcaactttaaaaaagtctgtgtgggccgggcgcggtggctcacgcctgtaatcccagcactttgatccgccgaggcgggcggatcacgaggtcaggagatccagaccatcctggctaacacagtgaaaccccgtctctactaaaaatacaaaaaaagttagccgggcgtggtggtgggggcctgtagtcccagctactcaggaggctgaggcaggagaacggcatgaacccgggaggcagggcttgcagtgagccaagatcatgccgctgcactccagcctgggagacaaagt

SEQ ID NO: 358615 - DNA, 1630 bp, Homo sapiens
tccgtctcaaaaaaaaaaaaaaaaaaagaattgcctgtggagtttttcaacatacgtaagcctatactttgttggccctgttcattaatgggctccaccaggaaattaggaatctagttgagaaacagaagctgaatggaaaggccaccttatttgatatgttaaattatatgggaagcactgtcaaatcattagtgatgttaaaccttctctaagttatatttatgagtatgttattgatgtattccaaaagttatataagaaattctagaaatctaattggttatcagccataatgtcatatgccacagaagtaactaaatttctatgtgagttgtgttcttattataataaattatcatcagatttttaactgtactcattttaaatctttgtcattcacagacagttgttttgcttcttccttaaagcatttgcaacagctacagtctaaaattgcttctttaccaaggatatttacagaaaagactctgaccagagatcgagaccatcctagccaacatcgtgaaaccccatctctactaaaaatacaaaaatgagctgggcttggtggcgcgcacctgtagtcccagttactcgggaggctgaggcaggagaatcgcttgaacccgggaggtggagattgcagtgagcccagatcgcaccactgcactccagtctggcaacagagcaagactccatctcaaaaagaaaagaaaagaagactctgacctgtactcttgaatacaagtttctgataccactgcactgtctgagaatttccaaaactttaatgaactaactgacagcttcatgaaactgtccaccaagatcaagcagagaaaataattaatttcatgggactaaatgaactaatgaggataatattttcataattttttatttgaaattttgctgattctttaaatgtcttgtttcccagatttcaggaaactttttttcttttaagctatccacagcttacagcaatttgataaaatatacttttgtgaacaaaaattgagacatttacattttctccctatgtggtcgctccagacttgggaaactattcatgaatatttatattgtatggtaatatagttattgcacaagttcaataaaaatctgctctttgtataacagaatacatttgaaaacattggttatattaccaagactttgactagaatgtcgtatttgaggatataaacccataggtaataaacccacaggtactacaaacaaagtctgaagtcagccttggtttggcttcctagtgtcaattaaacttctaaaagtttaatctgagattccttataaaaacttccagcaaagcaactttaaaaaagtctgtgtgggccgggcgcggtggctcacgcctgtaatcccagcactttgatccgccgaggcgggcggatcacgaggtcaggagatccagaccatcctggctaacacagtgaaaccccgtctctactaaaaatacaaaaaaagttagccgggcgtggtggtgggggcctgtagtcccagctactcaggaggctgaggcaggagaacggcatgaacccgggaggcagggcttgcagtgagccaagatcatgccgctgcactccagcctgggagacaaagt

SEQ ID NO: 358616 - DNA, 1222 bp, Homo sapiens
ctcagggcagagggaggaaggacagcagaccagacagtcacagcagccttgacaaaacgttcctggaactcaagctcttctccacagaggaggacagagcagacagcagagaccatggagtctccctcggcccctccccacagatggtgcatcccctggcagaggctcctgctcacagcctcacttctaaccttctggaacccgcccaccactgccaagctcactattgaatccacgccgttcaatgtcgcagaggggaaggaggtgcttctacttgtccacaatctgccccagcatctttttggctacagctggtacaaaggtgaaagagtggatggcaaccgtcaaattataggatatgtaataggaactcaacaagctaccccagggcccgcatacagtggtcgagagataatataccccaatgcatccctgctgatccagaacatcatccagaatgacacaggattctacaccctacacgtcataaagtcagatcttgtgaatgaagaagcaactggccagttccgggtatacccggagctgcccaagccctccatctccagcaacaactccaaacccgtggaggacaaggatgctgtggccttcacctgtgaacctgagactcaggacgcaacctacctgtggtgggtaaacaatcagagcctcccggtcagtcccaggctgcagctgtccaatggcaacaggaccctcactctattcaatgtcacaagaaatgacacagcaagctacaaatgtgaaacccagaacccagtgagtgccaggcgcagtgattcagtcatcctgaatgtcctctatggcccagatggccccaccatttccccctcaaaggccaattaccgtccaggggaaaatctgaacctctcctgccacgcagcctctaacccacctgcacagtactcttggtttatcaatgggacgttccagcaatccacacaagagctctttatccccaacatcactgtgaataatagcggatcctatatgtgccaagcccataactcagccactggcctcaataggaccacagtcacgatgatcacagtctctgattggaccagaccctgaattcttctagctcctccaatcccattttatcccatggaaccactaaaaacaaggtctgctctgctcctgaagccctatatgctggagatggacaactcaatgaaaatttaaagggaaaaccctcaggcctgag

SEQ ID NO: 358617 - DNA, 887 bp, Homo sapiens
cagctcggttcccccactagtgtcggcaataggaactcaacaagctaccccagggcccgcatacagtggtcgagagataatataccccaatgcatccctgctgatccagaacatcatccagaatgacacaggattctacaccctacacgtcataaagtcagatcttgtgaatgaagaagcaactggccagttccgggtatacccggagctgcccaagccctccatctccagcaacaactccaaacccgtggaggacaaggatgctgtggccttcacctgtgaacctgagactcaggacgcaacctacctgtggtgggtaaacaatcagagcctcccggtcagtcccaggctgcagctgtccaatggcaacaggaccctcactctattcaatgtcacaagaaatgacacagcaagctacaaatgtgaaacccagaacccagtgagtgccaggcgcagtgattcagtcatcctgaatgtcctctatggcccagatggccccaccatttccccctcaaaggccaattaccgtccaggggaaaatctgaacctctcctgccacgcagcctctaacccacctgcacagtactcttggtttatcaatgggacgttccagcaatccacacaagagctctttatccccaacatcactgtgaataatagcggatcctatatgtgccaagcccataactcagccactggcctcaataggaccacagtcacgatgatcacagtctctgattggaccagaccctgaattcttctagctcctccaatcccattttatcccatggaaccactaaaaacaaggtctgctctgctcctgaagccctatatgctggagatggacaactcaatgaaaatttaaagggaaaaccctcaggcctgag

SEQ ID NO: 358618 - DNA, 795 bp, Homo sapiens
ctcagggcagagggaggaaggacagcagaccagacagtcacagcagccttgacaaaacgttcctggaactcaagctcttctccacagaggaggacagagcagacagcagagaccatggagtctccctcggcccctccccacagatggtgcatcccctggcagaggctcctgctcacagcctcacttctaaccttctggaacccgcccaccactgccaagctcactattgaatccacgccgttcaatgtcgcagaggggaaggaggtgcttctacttgtccacaatctgccccagcatctttttggctacagctggtacaaaggtgaaagagtggatggcaaccgtcaaattataggatatgtaataggaactcaacaagctaccccagggcccgcatacagtggtcgagagataatataccccaatgcatccctgctgatccagaacatcatccagaatgacacaggattctacaccctacacgtcataaagtcagatcttgtgaatgaagaagcaactggccagttccgggtatacccggagctgcccaagccctccatctccagcaacaactccaaccccgtggaggacaaggatgctgtggccttcacctgtgaacctgaggttcagaacacaacctacctgtggtgggtaaatggtcagagcctcccggtcagtcccaggctgcagctgtccaatggcaacatgaccctcactctactcacattcataggatcctgcatcgttccttttgacgctgagcggacgcgtgggtccggacgcgtgggctagttc

SEQ ID NO: 358619 - DNA, 286 bp, Homo sapiens
atgaagagacctgctcaggacccaggaccccatttttccaccctaatgcataggtcccaatattgaccgatgctctctgctctctcctagcctcacttctaaccttctggaacccgcccaccactgccaagctcactattgaatccacgccgttcaatgtcgcagaggggaaggaggtgcttctacttgtccacaatctgccccagcatctttttggctacagctggtacaaaggtgaaagagtggatggcaaccgtcaaattataggatatgtaataggaactca

SEQ ID NO: 358620 - DNA, 3454 bp, Homo sapiens
ctcagggcagagggaggaaggacagcagaccagacagtcacagcagccttgacaaaacgttcctggaactcaagctcttctccacagaggaggacagagcagacagcagagaccatggagtctccctcggcccctccccacagatggtgcatcccctggcagaggctcctgctcacagcctcacttctaaccttctggaacccgcccaccactgccaagctcactattgaatccacgccgttcaatgtcgcagaggggaaggaggtgcttctacttgtccacaatctgccccagcatctttttggctacagctggtacaaaggtgaaagagtggatggcaaccgtcaaattataggatatgtaataggaactcaacaagctaccccagggcccgcatacagtggtcgagagataatataccccaatgcatccctgctgatccagaacatcatccagaatgacacaggattctacaccctacacgtcataaagtcagatcttgtgaatgaagaagcaactggccagttccgggtatacccggagctgcccaagccctccatctccagcaacaactccaaacccgtggaggacaaggatgctgtggccttcacctgtgaacctgagactcaggacgcaacctacctgtggtgggtaaacaatcagagcctcccggtcagtcccaggctgcagctgtccaatggcaacaggaccctcactctattcaatgtcacaagaaatgacacagcaagctacaaatgtgaaacccagaacccagtgagtgccaggcgcagtgattcagtcatcctgaatgtcctctatggcccggatgcccccaccatttcccctctaaacacatcttacagatcaggggaaaatctgaacctctcctgccacgcagcctctaacccacctgcacagtactcttggtttgtcaatgggactttccagcaatccacccaagagctctttatccccaacatcactgtgaataatagtggatcctatacgtgccaagcccataactcagacactggcctcaataggaccacagtcacgacgatcacagtctatgcagagccacccaaacccttcatcaccagcaacaactccaaccccgtggaggatgaggatgctgtagccttaacctgtgaacctgagattcagaacacaacctacctgtggtgggtaaataatcagagcctcccggtcagtcccaggctgcagctgtccaatgacaacaggaccctcactctactcagtgtcacaaggaatgatgtaggaccctatgagtgtggaatccagaacgaattaagtgttgaccacagcgacccagtcatcctgaatgtcctctatggcccagacgaccccaccatttccccctcatacacctattaccgtccaggggtgaacctcagcctctcctgccatgcagcctctaacccacctgcacagtattcttggctgattgatgggaacatccagcaacacacacaagagctctttatctccaacatcactgagaagaacagcggactctatacctgccaggccaataactcagccagtggccacagcaggactacagtcaagacaatcacagtctctgcggagctgcccaagccctccatctccagcaacaactccaaacccgtggaggacaaggatgctgtggccttcacctgtgaacctgaggctcagaacacaacctacctgtggtgggtaaatggtcagagcctcccagtcagtcccaggctgcagctgtccaatggcaacaggaccctcactctattcaatgtcacaagaaatgacgcaagagcctatgtatgtggaatccagaactcagtgagtgcaaaccgcagtgacccagtcaccctggatgtcctctatgggccggacacccccatcatttcccccccagactcgtcttacctttcgggagcgaacctcaacctctcctgccactcggcctctaacccatccccgcagtattcttggcgtatcaatgggataccgcagcaacacacacaagttctctttatcgccaaaatcacgccaaataataacgggacctatgcctgttttgtctctaacttggctactggccgcaataattccatagtcaagagcatcacagtctctgcatctggaacttctcctggtctctcagctggggccactgtcggcatcatgattggagtgctggttggggttgctctgatatagcagccctggtgtagtttcttcatttcaggaagactgacagttgttttgcttcttccttaaagcatttgcaacagctacagtctaaaattgcttctttaccaaggatatttacagaaaagactctgaccagagatcgagaccatcctagccaacatcgtgaaaccccatctctactaaaaatacaaaaatgagctgggcttggtggcgcgcacctgtagtcccagttactcgggaggctgaggcaggagaatcgcttgaacccgggaggtggagattgcagtgagcccagatcgcaccactgcactccagtctggcaacagagcaagactccatctcaaaaagaaaagaaaagaagactctgacctgtactcttgaatacaagtttctgataccactgcactgtctgagaatttccaaaactttaatgaactaactgacagcttcatgaaactgtccaccaagatcaagcagagaaaataattaatttcatgggactaaatgaactaatgaggattgctgattctttaaatgtcttgtttcccagatttcaggaaactttttttcttttaagctatccacagcttacagcaatttgataaaatatacttttgtgaacaaaaattgagacatttacattttctccctatgtggtcgctccagacttgggaaactattcatgaatatttatattgtatggtaatatagttattgcacaagttcaataaaaatctgctctttgtataacagaatacatttgaaaacattggttatattaccaagactttgactagaatgtcgtatttgaggatataaacccataggtaataaacccacaggtactacaaacaaagtctgaagtcagccttggtttggcttcctagtgtcaattaaacttctaaaagtttaatctgagattccttataaaaacttccagcaaagcaactttaaaaaagtctgtgtgggccgggcgcggtggctcacgcctgtaatcccagcactttgatccgccgaggcgggcggatcacgaggtcaggagatccagaccatcctggctaacacagtgaaaccccgtctctactaaaaatacaaaaaaagttagccgggcgtggtggtgggggcctgtagtcccagctactcaggaggctgaggcaggagaacggcatgaacccgggaggcagggcttgcagtgagccaagatcatgccgctgcactccagcctgggagacaaagt

SEQ ID NO: 358621 - DNA, 3432 bp, Homo sapiens
ctcagggcagagggaggaaggacagcagaccagacagtcacagcagccttgacaaaacgttcctggaactcaagctcttctccacagaggaggacagagcagacagcagagaccatggagtctccctcggcccctccccacagatggtgcatcccctggcagaggctcctgctcacagcctcacttctaaccttctggaacccgcccaccactgccaagctcactattgaatccacgccgttcaatgtcgcagaggggaaggaggtgcttctacttgtccacaatctgccccagcatctttttggctacagctggtacaaaggtgaaagagtggatggcaaccgtcaaattataggatatgtaataggaactcaacaagctaccccagggcccgcatacagtggtcgagagataatataccccaatgcatccctgctgatccagaacatcatccagaatgacacaggattctacaccctacacgtcataaagtcagatcttgtgaatgaagaagcaactggccagttccgggtatacccggagctgcccaagccctccatctccagcaacaactccaaacccgtggaggacaaggatgctgtggccttcacctgtgaacctgagactcaggacgcaacctacctgtggtgggtaaacaatcagagcctcccggtcagtcccaggctgcagctgtccaatggcaacaggaccctcactctattcaatgtcacaagaaatgacacagcaagctacaaatgtgaaacccagaacccagtgagtgccaggcgcagtgattcagtcatcctgaatgtcctctatggcccggatgcccccaccatttcccctctaaacacatcttacagatcaggggaaaatctgaacctctcctgccacgcagcctctaacccacctgcacagtactcttggtttgtcaatgggactttccagcaatccacccaagagctctttatccccaacatcactgtgaataatagtggatcctatacgtgccaagcccataactcagacactggcctcaataggaccacagtcacgacgatcacagtctatgcagagccacccaaacccttcatcaccagcaacaactccaaccccgtggaggatgaggatgctgtagccttaacctgtgaacctgagattcagaacacaacctacctgtggtgggtaaataatcagagcctcccggtcagtcccaggctgcagctgtccaatgacaacaggaccctcactctactcagtgtcacaaggaatgatgtaggaccctatgagtgtggaatccagaacgaattaagtgttgaccacagcgacccagtcatcctgaatgtcctctatggcccagacgaccccaccatttccccctcatacacctattaccgtccaggggtgaacctcagcctctcctgccatgcagcctctaacccacctgcacagtattcttggctgattgatgggaacatccagcaacacacacaagagctctttatctccaacatcactgagaagaacagcggactctatacctgccaggccaataactcagccagtggccacagcaggactacagtcaagacaatcacagtctctgcggagctgcccaagccctccatctccagcaacaactccaaacccgtggaggacaaggatgctgtggccttcacctgtgaacctgaggctcagaacacaacctacctgtggtgggtaaatggtcagagcctcccagtcagtcccaggctgcagctgtccaatggcaacaggaccctcactctattcaatgtcacaagaaatgacgcaagagcctatgtatgtggaatccagaactcagtgagtgcaaaccgcagtgacccagtcaccctggatgtcctctatgggccggacacccccatcatttcccccccagactcgtcttacctttcgggagcgaacctcaacctctcctgccactcggcctctaacccatccccgcagtattcttggcgtatcaatgggataccgcagcaacacacacaagttctctttatcgccaaaatcacgccaaataataacgggacctatgcctgttttgtctctaacttggctactggccgcaataattccatagtcaagagcatcacagtctctgcatctggaacttctcctggtctctcagctggggccactgtcggcatcatgattggagtgctggttggggttgctctgatatagcagccctggtgtagtttcttcatttcaggaagactgacagttgttttgcttcttccttaaagcatttgcaacagctacagtctaaaattgcttctttaccaaggatatttacagaaaagactctgaccagagatcgagaccatcctagccaacatcgtgactgtagtcccagttactcgggaggctgaggcaggagaatcgcttgaacccgggaggtggagattgcagtgagcccagatcgcaccactgcactccagtctggcaacagagcaagactccatctcaaaaagaaaagaaaagaagactctgacctgtactcttgaatacaagtttctgataccactgcactgtctgagaatttccaaaactttaatgaactaactgacagcttcatgaaactgtccaccaagatcaagcagagaaaataattaatttcatgggactaaatgaactaatgaggataatattttcataattttttatttgaaattttgctgattctttaaatgtcttgtttcccagatttcaggaaactttttttcttttaagctatccacagcttacagcaatttgataaaatatacttttgtgaacaaaaattgagacatttacattttctccctatgtggtcgctccagacttgggaaactattcatgaatatttatattgtatggtaatatagttattgcacaagttcaataaaaatctgctctttgtataacagaatacatttgaaaacattggttatattaccaagactttgactagaatgtcgtatttgaggatataaacccataggtaataaacccacaggtactacaaacaaagtctgaagtcagccttggtttggcttcctagtgtcaattaaacttctaaaagtttaatctgagattccttataaaaacttccagcaaagcaactttaaaaaagtctgtgtgggccgggcgcggtggctcacgcctgtaatcccagcactttgatccgccgaggcgggcggatcacgaggtcaggagatccagaccatcctggctaacacagtgaaaccccgtctctactaaaaatacaaaaaaagttagccgggcgtggtggtgggggcctgtagtcccagctactcaggaggctgaggcaggagaacggcatgaacccgggaggcagggcttgcagtgagccaagatcatgccgctgcactccagcctgggagacaaagt

SEQ ID NO: 358622 - DNA, 2609 bp, Homo sapiens
gcgttatgttcggagccacttatgttctgacccacctgcacagtactcttggtttgtcaatgggactttccagcaatccacccaagagctctttatccccaacatcactgtgaataatagtggatcctatacgtgccaagcccataactcagacactggcctcaataggaccacagtcacgacgatcacagtctatgcagagccacccaaacccttcatcaccagcaacaactccaaccccgtggaggatgaggatgctgtagccttaacctgtgaacctgagattcagaacacaacctacctgtggtgggtaaataatcagagcctcccggtcagtcccaggctgcagctgtccaatgacaacaggaccctcactctactcagtgtcacaaggaatgatgtaggaccctatgagtgtggaatccagaacgaattaagtgttgaccacagcgacccagtcatcctgaatgtcctctatggcccagacgaccccaccatttccccctcatacacctattaccgtccaggggtgaacctcagcctctcctgccatgcagcctctaacccacctgcacagtattcttggctgattgatgggaacatccagcaacacacacaagagctctttatctccaacatcactgagaagaacagcggactctatacctgccaggccaataactcagccagtggccacagcaggactacagtcaagacaatcacagtctctgcggagctgcccaagccctccatctccagcaacaactccaaacccgtggaggacaaggatgctgtggccttcacctgtgaacctgaggctcagaacacaacctacctgtggtgggtaaatggtcagagcctcccagtcagtcccaggctgcagctgtccaatggcaacaggaccctcactctattcaatgtcacaagaaatgacgcaagagcctatgtatgtggaatccagaactcagtgagtgcaaaccgcagtgacccagtcaccctggatgtcctctatgggccggacacccccatcatttcccccccagactcgtcttacctttcgggagcgaacctcaacctctcctgccactcggcctctaacccatccccgcagtattcttggcgtatcaatgggataccgcagcaacacacacaagttctctttatcgccaaaatcacgccaaataataacgggacctatgcctgttttgtctctaacttggctactggccgcaataattccatagtcaagagcatcacagtctctgcatctggaacttctcctggtctctcagctggggccactgtcggcatcatgattggagtgctggttggggttgctctgatatagcagccctggtgtagtttcttcatttcaggaagactgacagttgttttgcttcttccttaaagcatttgcaacagctacagtctaaaattgcttctttaccaaggatatttacagaaaagactctgaccagagatcgagaccatcctagccaacatcgtgaaaccccatctctactaaaaatacaaaaatgagctgggcttggtggcgcgcacctgtagtcccagttactcgggaggctgaggcaggagaatcgcttgaacccgggaggtggagattgcagtgagcccagatcgcaccactgcactccagtctggcaacagagcaagactccatctcaaaaagaaaagaaaagaagactctgacctgtactcttgaatacaagtttctgataccactgcactgtctgagaatttccaaaactttaatgaactaactgacagcttcatgaaactgtccaccaagatcaagcagagaaaataattaatttcatgggactaaatgaactaatgaggataatattttcataattttttatttgaaattttgctgattctttaaatgtcttgtttcccagatttcaggaaactttttttcttttaagctatccacagcttacagcaatttgataaaatatacttttgtgaacaaaaattgagacatttacattttctccctatgtggtcgctccagacttgggaaactattcatgaatatttatattgtatggtaatatagttattgcacaagttcaataaaaatctgctctttgtataacagaatacatttgaaaacattggttatattaccaagactttgactagaatgtcgtatttgaggatataaacccataggtaataaacccacaggtactacaaacaaagtctgaagtcagccttggtttggcttcctagtgtcaattaaacttctaaaagtttaatctgagattccttataaaaacttccagcaaagcaactttaaaaaagtctgtgtgggccgggcgcggtggctcacgcctgtaatcccagcactttgatccgccgaggcgggcggatcacgaggtcaggagatccagaccatcctggctaacacagtgaaaccccgtctctactaaaaatacaaaaaaagttagccgggcgtggtggtgggggcctgtagtcccagctactcaggaggctgaggcaggagaacggcatgaacccgggaggcagggcttgcagtgagccaagatcatgccgctgcactccagcctgggagacaaagt

SEQ ID NO: 358623 - DNA, 2485 bp, Homo sapiens
  misc_feature (54)..(54): n is a, c, g, or t
aagcagtgcatcgtctcatggtatagctgttccagtgggctcagagtcttagcncagatcaccatgcaagatgcagagccacccaaacccttcatcaccagcaacaactccaaccccgtggaggatgaggatgctgtagccttaacctgtgaacctgagattcagaacacaacctacctgtggtgggtaaataatcagagcctcccggtcagtcccaggctgcagctgtccaatgacaacaggaccctcactctactcagtgtcacaaggaatgatgtaggaccctatgagtgtggaatccagaacgaattaagtgttgaccacagcgacccagtcatcctgaatgtcctctatggcccagacgaccccaccatttccccctcatacacctattaccgtccaggggtgaacctcagcctctcctgccatgcagcctctaacccacctgcacagtattcttggctgattgatgggaacatccagcaacacacacaagagctctttatctccaacatcactgagaagaacagcggactctatacctgccaggccaataactcagccagtggccacagcaggactacagtcaagacaatcacagtctctgcggagctgcccaagccctccatctccagcaacaactccaaacccgtggaggacaaggatgctgtggccttcacctgtgaacctgaggctcagaacacaacctacctgtggtgggtaaatggtcagagcctcccagtcagtcccaggctgcagctgtccaatggcaacaggaccctcactctattcaatgtcacaagaaatgacgcaagagcctatgtatgtggaatccagaactcagtgagtgcaaaccgcagtgacccagtcaccctggatgtcctctatgggccggacacccccatcatttcccccccagactcgtcttacctttcgggagcgaacctcaacctctcctgccactcggcctctaacccatccccgcagtattcttggcgtatcaatgggataccgcagcaacacacacaagttctctttatcgccaaaatcacgccaaataataacgggacctatgcctgttttgtctctaacttggctactggccgcaataattccatagtcaagagcatcacagtctctgcatctggaacttctcctggtctctcagctggggccactgtcggcatcatgattggagtgctggttggggttgctctgatatagcagccctggtgtagtttcttcatttcaggaagactgacagttgttttgcttcttccttaaagcatttgcaacagctacagtctaaaattgcttctttaccaaggatatttacagaaaagactctgaccagagatcgagaccatcctagccaacatcgtgaaaccccatctctactaaaaatacaaaaatgagctgggcttggtggcgcgcacctgtagtcccagttactcgggaggctgaggcaggagaatcgcttgaacccgggaggtggagattgcagtgagcccagatcgcaccactgcactccagtctggcaacagagcaagactccatctcaaaaagaaaagaaaagaagactctgacctgtactcttgaatacaagtttctgataccactgcactgtctgagaatttccaaaactttaatgaactaactgacagcttcatgaaactgtccaccaagatcaagcagagaaaataattaatttcatgggactaaatgaactaatgaggataatattttcataattttttatttgaaattttgctgattctttaaatgtcttgtttcccagatttcaggaaactttttttcttttaagctatccacagcttacagcaatttgataaaatatacttttgtgaacaaaaattgagacatttacattttctccctatgtggtcgctccagacttgggaaactattcatgaatatttatattgtatggtaatatagttattgcacaagttcaataaaaatctgctctttgtataacagaatacatttgaaaacattggttatattaccaagactttgactagaatgtcgtatttgaggatataaacccataggtaataaacccacaggtactacaaacaaagtctgaagtcagccttggtttggcttcctagtgtcaattaaacttctaaaagtttaatctgagattccttataaaaacttccagcaaagcaactttaaaaaagtctgtgtgggccgggcgcggtggctcacgcctgtaatcccagcactttgatccgccgaggcgggcggatcacgaggtcaggagatccagaccatcctggctaacacagtgaaaccccgtctctactaaaaatacaaaaaaagttagccgggcgtggtggtgggggcctgtagtcccagctactcaggaggctgaggcaggagaacggcatgaacccgggaggcagggcttgcagtgagccaagatcatgccgctgcactccagcctgggagacaaagt

SEQ ID NO: 358624 - DNA, 2444 bp, Homo sapiens
taaactgccagtcggacctgtcacagtctatgcagagccacccaaacccttcatcaccagcaacaactccaaccccgtggaggatgaggatgctgtagccttaacctgtgaacctgagattcagaacacaacctacctgtggtgggtaaataatcagagcctcccggtcagtcccaggctgcagctgtccaatgacaacaggaccctcactctactcagtgtcacaaggaatgatgtaggaccctatgagtgtggaatccagaacgaattaagtgttgaccacagcgacccagtcatcctgaatgtcctctatggcccagacgaccccaccatttccccctcatacacctattaccgtccaggggtgaacctcagcctctcctgccatgcagcctctaacccacctgcacagtattcttggctgattgatgggaacatccagcaacacacacaagagctctttatctccaacatcactgagaagaacagcggactctatacctgccaggccaataactcagccagtggccacagcaggactacagtcaagacaatcacagtctctgcggagctgcccaagccctccatctccagcaacaactccaaacccgtggaggacaaggatgctgtggccttcacctgtgaacctgaggctcagaacacaacctacctgtggtgggtaaatggtcagagcctcccagtcagtcccaggctgcagctgtccaatggcaacaggaccctcactctattcaatgtcacaagaaatgacgcaagagcctatgtatgtggaatccagaactcagtgagtgcaaaccgcagtgacccagtcaccctggatgtcctctatgggccggacacccccatcatttcccccccagactcgtcttacctttcgggagcgaacctcaacctctcctgccactcggcctctaacccatccccgcagtattcttggcgtatcaatgggataccgcagcaacacacacaagttctctttatcgccaaaatcacgccaaataataacgggacctatgcctgttttgtctctaacttggctactggccgcaataattccatagtcaagagcatcacagtctctgcatctggaacttctcctggtctctcagctggggccactgtcggcatcatgattggagtgctggttggggttgctctgatatagcagccctggtgtagtttcttcatttcaggaagactgacagttgttttgcttcttccttaaagcatttgcaacagctacagtctaaaattgcttctttaccaaggatatttacagaaaagactctgaccagagatcgagaccatcctagccaacatcgtgaaaccccatctctactaaaaatacaaaaatgagctgggcttggtggcgcgcacctgtagtcccagttactcgggaggctgaggcaggagaatcgcttgaacccgggaggtggagattgcagtgagcccagatcgcaccactgcactccagtctggcaacagagcaagactccatctcaaaaagaaaagaaaagaagactctgacctgtactcttgaatacaagtttctgataccactgcactgtctgagaatttccaaaactttaatgaactaactgacagcttcatgaaactgtccaccaagatcaagcagagaaaataattaatttcatgggactaaatgaactaatgaggataatattttcataattttttatttgaaattttgctgattctttaaatgtcttgtttcccagatttcaggaaactttttttcttttaagctatccacagcttacagcaatttgataaaatatacttttgtgaacaaaaattgagacatttacattttctccctatgtggtcgctccagacttgggaaactattcatgaatatttatattgtatggtaatatagttattgcacaagttcaataaaaatctgctctttgtataacagaatacatttgaaaacattggttatattaccaagactttgactagaatgtcgtatttgaggatataaacccataggtaataaacccacaggtactacaaacaaagtctgaagtcagccttggtttggcttcctagtgtcaattaaacttctaaaagtttaatctgagattccttataaaaacttccagcaaagcaactttaaaaaagtctgtgtgggccgggcgcggtggctcacgcctgtaatcccagcactttgatccgccgaggcgggcggatcacgaggtcaggagatccagaccatcctggctaacacagtgaaaccccgtctctactaaaaatacaaaaaaagttagccgggcgtggtggtgggggcctgtagtcccagctactcaggaggctgaggcaggagaacggcatgaacccgggaggcagggcttgcagtgagccaagatcatgccgctgcactccagcctgggagacaaagt

SEQ ID NO: 358625 - DNA, 2508 bp, Homo sapiens
tcacagaggagtagagcggaagacaaatctcgtcgacccaggaaacctcaactggccacagcaggactacagtcaagacaatcacagtctctgcggcagagccacccaaacccttcatcaccagcaacaactccaaccccgtggaggatgaggatgctgtagccttaacctgtgaacctgagattcagaacacaacctacctgtggtgggtaaataatcagagcctcccggtcagtcccaggctgcagctgtccaatgacaacaggaccctcactctactcagtgtcacaaggaatgatgtaggaccctatgagtgtggaatccagaacgaattaagtgttgaccacagcgacccagtcatcctgaatgtcctctatggcccagacgaccccaccatttccccctcatacacctattaccgtccaggggtgaacctcagcctctcctgccatgcagcctctaacccacctgcacagtattcttggctgattgatgggaacatccagcaacacacacaagagctctttatctccaacatcactgagaagaacagcggactctatacctgccaggccaataactcagccagtggccacagcaggactacagtcaagacaatcacagtctctgcggagctgcccaagccctccatctccagcaacaactccaaacccgtggaggacaaggatgctgtggccttcacctgtgaacctgaggctcagaacacaacctacctgtggtgggtaaatggtcagagcctcccagtcagtcccaggctgcagctgtccaatggcaacaggaccctcactctattcaatgtcacaagaaatgacgcaagagcctatgtatgtggaatccagaactcagtgagtgcaaaccgcagtgacccagtcaccctggatgtcctctatgggccggacacccccatcatttcccccccagactcgtcttacctttcgggagcgaacctcaacctctcctgccactcggcctctaacccatccccgcagtattcttggcgtatcaatgggataccgcagcaacacacacaagttctctttatcgccaaaatcacgccaaataataacgggacctatgcctgttttgtctctaacttggctactggccgcaataattccatagtcaagagcatcacagtctctgcatctggaacttctcctggtctctcagctggggccactgtcggcatcatgattggagtgctggttggggttgctctgatatagcagccctggtgtagtttcttcatttcaggaagactgacagttgttttgcttcttccttaaagcatttgcaacagctacagtctaaaattgcttctttaccaaggatatttacagaaaagactctgaccagagatcgagaccatcctagccaacatcgtgaaaccccatctctactaaaaatacaaaaatgagctgggcttggtggcgcgcacctgtagtcccagttactcgggaggctgaggcaggagaatcgcttgaacccgggaggtggagattgcagtgagcccagatcgcaccactgcactccagtctggcaacagagcaagactccatctcaaaaagaaaagaaaagaagactctgacctgtactcttgaatacaagtttctgataccactgcactgtctgagaatttccaaaactttaatgaactaactgacagcttcatgaaactgtccaccaagatcaagcagagaaaataattaatttcatgggactaaatgaactaatgaggataatattttcataattttttatttgaaattttgctgattctttaaatgtcttgtttcccagatttcaggaaactttttttcttttaagctatccacagcttacagcaatttgataaaatatacttttgtgaacaaaaattgagacatttacattttctccctatgtggtcgctccagacttgggaaactattcatgaatatttatattgtatggtaatatagttattgcacaagttcaataaaaatctgctctttgtataacagaatacatttgaaaacattggttatattaccaagactttgactagaatgtcgtatttgaggatataaacccataggtaataaacccacaggtactacaaacaaagtctgaagtcagccttggtttggcttcctagtgtcaattaaacttctaaaagtttaatctgagattccttataaaaacttccagcaaagcaactttaaaaaagtctgtgtgggccgggcgcggtggctcacgcctgtaatcccagcactttgatccgccgaggcgggcggatcacgaggtcaggagatccagaccatcctggctaacacagtgaaaccccgtctctactaaaaatacaaaaaaagttagccgggcgtggtggtgggggcctgtagtcccagctactcaggaggctgaggcaggagaacggcatgaacccgggaggcagggcttgcagtgagccaagatcatgccgctgcactccagcctgggagacaaagt

SEQ ID NO: 358626 - DNA, 2950 bp, Homo sapiens
ctcagggcagagggaggaaggacagcagaccagacagtcacagcagccttgacaaaacgttcctggaactcaagctcttctccacagaggaggacagagcagacagcagagaccatggagtctccctcggcccctccccacagatggtgcatcccctggcagaggctcctgctcacagcctcacttctaaccttctggaacccgcccaccactgccaagctcactattgaatccacgccgttcaatgtcgcagaggggaaggaggtgcttctacttgtccacaatctgccccagcatctttttggctacagctggtacaaaggtgaaagagtggatggcaaccgtcaaattataggatatgtaataggaactcaacaagctaccccagggcccgcatacagtggtcgagagataatataccccaatgcatccctgctgatccagaacatcatccagaatgacacaggattctacaccctacacgtcataaagtcagatcttgtgaatgaagaagcaactggccagttccgggtatacccggagctgcccaagccctccatctccagcaacaactccaaacccgtggaggacaaggatgctgtggccttcacctgtgaacctgagattcagaacacaacctacctgtggtgggtaaataatcagagcctcccggtcagtcccaggctgcagctgtccaatgacaacaggaccctcactctactcagtgtcacaaggaatgatgtaggaccctatgagtgtggaatccagaacgaattaagtgttgaccacagcgacccagtcatcctgaatgtcctctatggcccagacgaccccaccatttccccctcatacacctattaccgtccaggggtgaacctcagcctctcctgccatgcagcctctaacccacctgcacagtattcttggctgattgatgggaacatccagcaacacacacaagagctctttatctccaacatcactgagaagaacagcggactctatacctgccaggccaataactcagccagtggccacagcaggactacagtcaagacaatcacagtctctgcggagctgcccaagccctccatctccagcaacaactccaaacccgtggaggacaaggatgctgtggccttcacctgtgaacctgaggctcagaacacaacctacctgtggtgggtaaatggtcagagcctcccagtcagtcccaggctgcagctgtccaatggcaacaggaccctcactctattcaatgtcacaagaaatgacgcaagagcctatgtatgtggaatccagaactcagtgagtgcaaaccgcagtgacccagtcaccctggatgtcctctatgggccggacacccccatcatttcccccccagactcgtcttacctttcgggagcgaacctcaacctctcctgccactcggcctctaacccatccccgcagtattcttggcgtatcaatgggataccgcagcaacacacacaagttctctttatcgccaaaatcacgccaaataataacgggacctatgcctgttttgtctctaacttggctactggccgcaataattccatagtcaagagcatcacagtctctgcatctggaacttctcctggtctctcagctggggccactgtcggcatcatgattggagtgctggttggggttgctctgatatagcagccctggtgtagtttcttcatttcaggaagactgacagttgttttgcttcttccttaaagcatttgcaacagctacagtctaaaattgcttctttaccaaggatatttacagaaaagactctgaccagagatcgagaccatcctagccaacatcgtgaaaccccatctctactaaaaatacaaaaatgagctgggcttggtggcgcgcacctgtagtcccagttactcgggaggctgaggcaggagaatcgcttgaacccgggaggtggagattgcagtgagcccagatcgcaccactgcactccagtctggcaacagagcaagactccatctcaaaaagaaaagaaaagaagactctgacctgtactcttgaatacaagtttctgataccactgcactgtctgagaatttccaaaactttaatgaactaactgacagcttcatgaaactgtccaccaagatcaagcagagaaaataattaatttcatgggactaaatgaactaatgaggataatattttcataattttttatttgaaattttgctgattctttaaatgtcttgtttcccagatttcaggaaactttttttcttttaagctatccacagcttacagcaatttgataaaatatacttttgtgaacaaaaattgagacatttacattttctccctatgtggtcgctccagacttgggaaactattcatgaatatttatattgtatggtaatatagttattgcacaagttcaataaaaatctgctctttgtataacagaatacatttgaaaacattggttatattaccaagactttgactagaatgtcgtatttgaggatataaacccataggtaataaacccacaggtactacaaacaaagtctgaagtcagccttggtttggcttcctagtgtcaattaaacttctaaaagtttaatctgagattccttataaaaacttccagcaaagcaactttaaaaaagtctgtgtgggccgggcgcggtggctcacgcctgtaatcccagcactttgatccgccgaggcgggcggatcacgaggtcaggagatccagaccatcctggctaacacagtgaaaccccgtctctactaaaaatacaaaaaaagttagccgggcgtggtggtgggggcctgtagtcccagctactcaggaggctgaggcaggagaacggcatgaacccgggaggcagggcttgcagtgagccaagatcatgccgctgcactccagcctgggagacaaagt

SEQ ID NO: 358627 - DNA, 1984 bp, Homo sapiens
ctcagggcagagggaggaaggacagcagaccagacagtcacagcagccttgacaaaacgttcctggaactcaagctcttctccacagaggaggacagagcagacagcagagaccatggagtctccctcggcccctccccacagatggtgcatcccctggcagaggctcctgctcacagcctcacttctaaccttctggaacccgcccaccactgccaagctcactattgaatccacgccgttcaatgtcgcagaggggaaggaggtgcttctacttgtccacaatctgccccagcatctttttggctacagctggtacaaaggtgaaagagtggatggcaaccgtcaaattataggatatgtaataggaactcaacaagctaccccagggcccgcatacagtggtcgagagataatataccccaatgcatccctgctgatccagaacatcatccagaatgacacaggattctacaccctacacgtcataaagtcagatcttgtgaatgaagaagcaactggccagttccgggtatacccggagctgcccaagccctccatctccagcaacaactccaaacccgtggaggacaaggatgctgtggccttcacctgtgaacctgagactcaggacgcaacctacctgtggtgggtaaacaatcagagcctcccggtcagtcccaggctgcagctgtccaatggcaacaggaccctcactctattcaatgtcacaagaaatgacacagcaagctacaaatgtgaaacccagaacccagtgagtgccaggcgcagtgattcagtcatcctgaatgtcctctatggcccggatgcccccaccatttcccctctaaacacatcttacagatcaggggaaaatctgaacctctcctgccacgcagcctctaacccacctgcacagtactcttggtttgtcaatgggactttccagcaatccacccaagagctctttatccccaacatcactgtgaataatagtggatcctatacgtgccaagcccataactcagacactggcctcaataggaccacagtcacgacgatcacagtctatgcagagccacccaaacccttcatcaccagcaacaactccaaccccgtggaggatgaggatgctgtagccttaacctgtgaacctgagattcagaacacaacctacctgtggtgggtaaataatcagagcctcccggtcagtcccaggctgcagctgtccaatgacaacaggaccctcactctactcagtgtcacaaggaatgatgtaggaccctatgagtgtggaatccagaacgaattaagtgttgaccacagcgacccagtcatcctgaatgtcctctatggcccagacgaccccaccatttccccctcatacacctattaccgtccaggggtgaacctcagcctctcctgccatgcagcctctaacccacctgcacagtattcttggctgattgatgggaacatccagcaacacacacaagagctctttatctccaacatcactgagaagaacagcggactctatacctgccaggccaataactcagccagtggccacagcaggactacagtcaagacaatcacagtctctgcggagctgcccaagccctccatctccagcaacaactccaaacccgtggaggacaaggatgctgtggccttcacctgtgaacctgaggctcagaacacaacctacctgtggtgggtaaatggtcagagcctcccagtcagtcccaggctgcagctgtccaatggcaacaggaccctcactctattcaatgtcacaagaaatgacgcaagagcctatgtatgtggaatccagaactcagtgagtgcaaaccgcagtgacccagtcaccctggatgtcctctatggcccagacgaccccaccatttcccccgtcctacacctattaccgtcaaggggtgaacctcagcctctcctgccattgggacacgcgggggatcctc

SEQ ID NO: 358628 - DNA, 2638 bp, Homo sapiens
ctcagggcagagggaggaaggacagcagaccagacagtcacagcagccttgacaaaacgttcctggaactcaagctcttctccacagaggaggacagagcagacagcagagaccatggagtctccctcggcccctccccacagatggtgcatcccctggcagaggctcctgctcacagcctcacttctaaccttctggaacccgcccaccactgccaagctcactattgaatccacgccgttcaatgtcgcagaggggaaggaggtgcttctacttgtccacaatctgccccagcatctttttggctacagctggtacaaaggtgaaagagtggatggcaaccgtcaaattataggatatgtaataggaactcaacaagctaccccagggcccgcatacagtggtcgagagataatataccccaatgcatccctgctgatccagaacatcatccagaacgaattaagtgttgaccacagcgacccagtcatcctgaatgtcctctatggcccagacgaccccaccatttccccctcatacacctattaccgtccaggggtgaacctcagcctctcctgccatgcagcctctaacccacctgcacagtattcttggctgattgatgggaacatccagcaacacacacaagagctctttatctccaacatcactgagaagaacagcggactctatacctgccaggccaataactcagccagtggccacagcaggactacagtcaagacaatcacagtctctgcggagctgcccaagccctccatctccagcaacaactccaaacccgtggaggacaaggatgctgtggccttcacctgtgaacctgaggctcagaacacaacctacctgtggtgggtaaatggtcagagcctcccagtcagtcccaggctgcagctgtccaatggcaacaggaccctcactctattcaatgtcacaagaaatgacgcaagagcctatgtatgtggaatccagaactcagtgagtgcaaaccgcagtgacccagtcaccctggatgtcctctatgggccggacacccccatcatttcccccccagactcgtcttacctttcgggagcgaacctcaacctctcctgccactcggcctctaacccatccccgcagtattcttggcgtatcaatgggataccgcagcaacacacacaagttctctttatcgccaaaatcacgccaaataataacgggacctatgcctgttttgtctctaacttggctactggccgcaataattccatagtcaagagcatcacagtctctgcatctggaacttctcctggtctctcagctggggccactgtcggcatcatgattggagtgctggttggggttgctctgatatagcagccctggtgtagtttcttcatttcaggaagactgacagttgttttgcttcttccttaaagcatttgcaacagctacagtctaaaattgcttctttaccaaggatatttacagaaaagactctgaccagagatcgagaccatcctagccaacatcgtgaaaccccatctctactaaaaatacaaaaatgagctgggcttggtggcgcgcacctgtagtcccagttactcgggaggctgaggcaggagaatcgcttgaacccgggaggtggagattgcagtgagcccagatcgcaccactgcactccagtctggcaacagagcaagactccatctcaaaaagaaaagaaaagaagactctgacctgtactcttgaatacaagtttctgataccactgcactgtctgagaatttccaaaactttaatgaactaactgacagcttcatgaaactgtccaccaagatcaagcagagaaaataattaatttcatgggactaaatgaactaatgaggataatattttcataattttttatttgaaattttgctgattctttaaatgtcttgtttcccagatttcaggaaactttttttcttttaagctatccacagcttacagcaatttgataaaatatacttttgtgaacaaaaattgagacatttacattttctccctatgtggtcgctccagacttgggaaactattcatgaatatttatattgtatggtaatatagttattgcacaagttcaataaaaatctgctctttgtataacagaatacatttgaaaacattggttatattaccaagactttgactagaatgtcgtatttgaggatataaacccataggtaataaacccacaggtactacaaacaaagtctgaagtcagccttggtttggcttcctagtgtcaattaaacttctaaaagtttaatctgagattccttataaaaacttccagcaaagcaactttaaaaaagtctgtgtgggccgggcgcggtggctcacgcctgtaatcccagcactttgatccgccgaggcgggcggatcacgaggtcaggagatccagaccatcctggctaacacagtgaaaccccgtctctactaaaaatacaaaaaaagttagccgggcgtggtggtgggggcctgtagtcccagctactcaggaggctgaggcaggagaacggcatgaacccgggaggcagggcttgcagtgagccaagatcatgccgctgcactccagcctgggagacaaagt

SEQ ID NO: 358629 - DNA, 1580 bp, Homo sapiens
ctcagggcagagggaggaaggacagcagaccagacagtcacagcagccttgacaaaacgttcctggaactcaagctcttctccacagaggaggacagagcagacagcagagaccatggagtctccctcggcccctccccacagatggtgcatcccctggcagaggctcctgctcacagcctcacttctaaccttctggaacccgcccaccactgccaagctcactattgaatccacgccgttcaatgtcgcagaggggaaggaggtgcttctacttgtccacaatctgccccagcatctttttggctacagctggtacaaaggtgaaagagtggatggcaaccgtcaaattataggatatgtaataggaactcaacaagctaccccagggcccgcatacagtggtcgagagataatataccccaatgcatccctgctgatccagaacatcatccagaatgacacaggattctacaccctacacgtcataaagtcagatcttgtgaatgaagaagcaactggccagttccgggtatacccggagctgcccaagccctccatctccagcaacaactccaaacccgtggaggacaaggatgctgtggccttcacctgtgaacctgagactcaggacgcaacctacctgtggtgggtaaacaatcagagcctcccggtcagtcccaggctgcagctgtccaatggcaacaggaccctcactctattcaatgtcacaagaaatgacacagcaagctacaaatgtgaaacccagaacccagtgagtgccaggcgcagtgattcagtcatcctgaatgtcctctatggcccggatgcccccaccatttcccctctaaacacatcttacagatcaggggaaaatctgaacctctcctgccacgcagcctctaacccacctgcacagtactcttggtttgtcaatgggactttccagcaatccacccaagagctctttatccccaacatcactgtgaataatagtggatcctatacgtgccaagcccataactcagacactggcctcaataggaccacagtcacgacgatcacagtctatgcagagccacccaaacccttcatcaccagcaacaactccaaccccgtggaggatgaggatgctgtagccttaacctgtgaacctgagattcagaacacaacctacctgtggtgggtaaataatcagagcctcccggtcagtcccaggctgcagctgtccaatgacaacaggaccctcactctactcagtgtcacaaggaatgatgtaggaccctatgagtgtggaatccagaacgaattaagtgttgaccacagcgacccagtcatcctgaatgtcctctatggcccagacgaccccaccatttccccctcatacacctattaccgtccaggggtgaacctcagcctctcctgccatgcagcctctaacccacctgcacagtattcttggctgattgatgggaacatccagcaacacacacaagagctctttatctccaacatcactgagaagaacagcggactctatacctgccaggccaatttgtccaccgggcgatcctctaatca

SEQ ID NO: 358630 - DNA, 1675 bp, Homo sapiens
tatctagaggatccttgatggagaggggtctcagtgagtgcaaaccgcagtgacccagtcaccctggatgtcctctatgggccggacacccccatcatttcccccccagactcgtcttacctttcgggagcgaacctcaacctctcctgccactcggcctctaacccatccccgcagtattcttggcgtatcaatgggataccgcagcaacacacacaagttctctttatcgccaaaatcacgccaaataataacgggacctatgcctgttttgtctctaacttggctactggccgcaataattccatagtcaagagcatcacagtctctgcatctggaacttctcctggtctctcagctggggccactgtcggcatcatgattggagtgctggttggggttgctctgatatagcagccctggtgtagtttcttcatttcaggaagactgacagttgttttgcttcttccttaaagcatttgcaacagctacagtctaaaattgcttctttaccaaggatatttacagaaaagactctgaccagagatcgagaccatcctagccaacatcgtgaaaccccatctctactaaaaatacaaaaatgagctgggcttggtggcgcgcacctgtagtcccagttactcgggaggctgaggcaggagaatcgcttgaacccgggaggtggagattgcagtgagcccagatcgcaccactgcactccagtctggcaacagagcaagactccatctcaaaaagaaaagaaaagaagactctgacctgtactcttgaatacaagtttctgataccactgcactgtctgagaatttccaaaactttaatgaactaactgacagcttcatgaaactgtccaccaagatcaagcagagaaaataattaatttcatgggactaaatgaactaatgaggataatattttcataattttttatttgaaattttgctgattctttaaatgtcttgtttcccagatttcaggaaactttttttcttttaagctatccacagcttacagcaatttgataaaatatacttttgtgaacaaaaattgagacatttacattttctccctatgtggtcgctccagacttgggaaactattcatgaatatttatattgtatggtaatatagttattgcacaagttcaataaaaatctgctctttgtataacagaatacatttgaaaacattggttatattaccaagactttgactagaatgtcgtatttgaggatataaacccataggtaataaacccacaggtactacaaacaaagtctgaagtcagccttggtttggcttcctagtgtcaattaaacttctaaaagtttaatctgagattccttataaaaacttccagcaaagcaactttaaaaaagtctgtgtgggccgggcgcggtggctcacgcctgtaatcccagcactttgatccgccgaggcgggcggatcacgaggtcaggagatccagaccatcctggctaacacagtgaaaccccgtctctactaaaaatacaaaaaaagttagccgggcgtggtggtgggggcctgtagtcccagctactcaggaggctgaggcaggagaacggcatgaacccgggaggcagggcttgcagtgagccaagatcatgccgctgcactccagcctgggagacaaagt

SEQ ID NO: 358631 - DNA, 1450 bp, Homo sapiens
ctcagggcagagggaggaaggacagcagaccagacagtcacagcagccttgacaaaacgttcctggaactcaagctcttctccacagaggaggacagagcagacagcagagaccatggagtctccctcggcccctccccacagatggtgcatcccctggcagaggctcctgctcacagcctcacttctaaccttctggaacccgcccaccactgccaagctcactattgaatccacgccgttcaatgtcgcagaggggaaggaggtgcttctacttgtccacaatctgccccagcatctttttggctacagctggtacaaaggtgaaagagtggatggcaaccgtcaaattataggatatgtaataggaactcaacaagctaccccagggcccgcatacagtggtcgagagataatataccccaatgcatccctgctgatccagaacatcatccagaatgacacaggattctacaccctacacgtcataaagtcagatcttgtgaatgaagaagcaactggccagttccgggtatacccggagctgcccaagccctccatctccagcaacaactccaaacccgtggaggacaaggatgctgtggccttcacctgtgaacctgagactcaggacgcaacctacctgtggtgggtaaacaatcagagcctcccggtcagtcccaggctgcagctgtccaatggcaacaggaccctcactctattcaatgtcacaagaaatgacacagcaagctacaaatgtgaaacccagaacccagtgagtgccaggcgcagtgattcagtcatcctgaatgtcctctatggcccggatgcccccaccatttcccctctaaacacatcttacagatcaggggaaaatctgaacctctcctgccacgcagcctctaacccacctgcacagtactcttggtttgtcaatgggactttccagcaatccacccaagagctctttatccccaacatcactgtgaataatagtggatcctatacgtgccaagcccataactcagacactggcctcaataggaccacagtcacgacgatcacagtctatgcagagccacccaaacccttcatcaccagcaacaactccaaccccgtggaggatgaggatgctgtagccttaacctgtgaacctgagattcagaacacaacctacctgtggtgggtaaataatcagagcctcccggtcagtcccaggctgcagctgtccaatgacaacaggaccctcactctactcagtgtcacaaggaatgatgtaggaccctatgagtgtggaatccagaacgaattaagtgttgaccacagcgacccagtcatcctgaatgtcctctatggcccagacgaccccaccatttcccccgtcctacacctattaccgtcaaggggtgaacctcagcctctcctgccattgggacacgcgggggatcctc

SEQ ID NO: 358632 - DNA, 852 bp, Homo sapiens
ctcagggcagagggaggaaggacagcagaccagacagtcacagcagccttgacaaaacgttcctggaactcaagctcttctccacagaggaggacagagcagacagcagagaccatggagtctccctcggcccctccccacagatggtgcatcccctggcagaggctcctgctcacagcctcacttctaaccttctggaacccgcccaccactgccaagctcactattgaatccacgccgttcaatgtcgcagaggggaaggaggtgcttctacttgtccacaatctgccccagcatctttttggctacagctggtacaaaggtgaaagagtggatggcaaccgtcaaattataggatatgtaataggaactcaacaagctaccccagggcccgcatacagtggtcgagagataatataccccaatgcatccctgctgatccagaacatcatccagaatgacacaggattctacaccctacacgtcataaagtcagatcttgtgaatgaagaagcaactggccagttccgggtataccgtgagtgattcccccatgacctctgggtgttgggggtcagttctacttcccacacacaggattatcaggcctgggctgtgcctgtggccccctctgcattacgcaccatgttagggtttgggcatttagtgcaggatacacacagaagagacaaacttcaacagatcagaattcctttccggcatccagaccctgcagacactcactgcagaggaaggacagtctgatgtgggggacttagcagggggaggtcagtctcagccaagcaccccgtgccctccccgtaaacctgaccctgagaaagaccctggaga

SEQ ID NO: 358633 - DNA, 687 bp, Homo sapiens
gggctgatgctgaggcgactctaaggatcccttccgggttgtgcatccctggcagaggctctgctcacagcctcacttctaaccttctggaacccgcccaccactgccaagctcactattgaatccacgccgttcaatgtcgcagaggggaaggaggtgcttctacttgtccacaatctgccccagcatctttttggctacagctggtacaaaggtgaaagagtggatggcaaccgtcaaattataggatatgtaataggaactcaacaagctaccccagggcccgcatacagtggtcgagagataatataccccaatgcatccctgctgatccagaacatcatccagaatgacacaggattctacaccctacacgtcataaagtcagatcttgtgaatgaagaagcaactggccagttccgggtatacccggagctgcccaagccctccatctccagcaacaactccaaccccgtggaggacaaggatgctgtggccttcacctgtgaacctgaggttcagaacacaacctacctgtggtgggtaaatggtcagagcctcccggtcagtcccaggctgcagctgtccaatggcaacatgaccctcactctactcacattcataggatcctgcatcgttccttttgacgctgagcggacgcgtgggtccggacgcgtgggctagttc

SEQ ID NO: 358634 - DNA, 511 bp, Homo sapiens
agaggagagagctagctgcacacaacttcagggagaatttgtttccctgatgacgtaaccaggtacctagctagctgtgtcaaacttgctgatggccacattagcctaaatgtatgtctacagtaccataaaggaggtaccccaggccgggcgtggtggctcaagcctgtaatcccagcactttgggaggctgaggtgggtggatcacctgaggtcaggagttcgagaccagcctggacaacatggtgaaacccggtctctactaaaaatacaaaaaattagccaggtgtggtggtgggcacttataatcccagctactcaggaggctgagacagggaaatcgcttgaacccgggaggcagaggttgcagtgagctgagattgcgccactgccctccagcctgggtgacagagccagactctctctctcaaaaaaaaggaggtaccacaattccaagcaaacacttatctcacacattaccaccacaaataaaaatggaaatggctgtcat

SEQ ID NO: 358635 - DNA, 580 bp, Homo sapiens
ggacaagggcagttttgttgccgggttcctcccacgccttgtaaacttgaagaggcccttgcagggtaaatggtgctgtttgacttgagtgtttgcttgagggatttgtggggcttcccggccctctgcatgatttatctcagaggaaatgaggcagccctaggggagggggcgccatggttgagagcagcacacaggtgttttgtccatatgtgtgttttgctggggagggcctctgcctggcatccccatctctgggtttgggcagtccgagtgcaccttcttggattcttctaggctgtgtcaagaatgcccagaagaccctgacaaggcttggttggggaatctaagtagagggtgtttttgcatcttttttctttactaaaatagtgtgtattctttagttaaaatagaaaaaaaatcttcaaccaatgtgggcagccacccacctactcagatccagcctagctttgtggaaatgaccatcctctgtgtaaaccattgggatggatgtgtatccttgtagattttttttttaatgtcacatttaatacccatatagtttaatttttattccctg

SEQ ID NO: 358636 - DNA, 695 bp, Homo sapiens
ataaatcagtgtatatcaaatttaaaaatccctgcatagcaaagaaaacaatcaacagagtgaaagacaacactctgactaggagaaaatatttgctaactatgtatgtcataggcagttaatattcacaatataaagaagaactcttacacctcaatagcaattaacaaatgacaatttaaaatgggctaaggacttcaagagacattctccaaagaagacatacaaatgcagaaaaagtatattaaaaactgcttaacatctctagctgtgtgagtccattctcacattgctataaggaactacccgagactggataatttataatataaaggaggtttaattgactcacagttccataagctgtacaggaaccatggctagggaggcctcgggcttaatgatggaaggtgaaggggaagcagacacatcttcatgtggcagaacaagagaaagagagagtgaaaggaaaagtgctacaaacatttaaacaaccagatatcatgagaactcactcactatcatgagaacagcaagggggaaatctgctcccatgatccaatcacctctcaccaggtcccttccatagtgctggtgattacaattcgacatgagatttgggtgggaacacagagccaaagcttatcattccacctgtggtccttactctcatgtttttctcaagtttaaaaaca

SEQ ID NO: 358637 - DNA, 1291 bp, Homo sapiens
  misc_feature (1288)..(1288): n is a, c, g, or t
  misc_feature (1291)..(1291): n is a, c, g, or t
gccgccgctgccgctgccgccgccggcccggactcgtccggagcgcagggtgtctgcccagctgcgcgcggcgcgcggaggctccggcgtccgccgctgcgccctccggcccctgctcctcgcgccggcccgcgtgggtcccggcgggcgcgaacccaccatgcagctgcagttccggagctggatgctggccgcgctcacgctgctcgtggtcttcctcatcttcgcagacatctcagagatcgaagaagaaatcgggaattcgggaggcagaggtacaatcagatcagctgtgaacagcttacatagcaaatctaatagagctgaagttgtaataaacggctcctcatcaccagctgttgttgacagaagtaatgaaagcatcaagcacaacatccagccagcctcgtccaaatggagacataaccagacgctctctctgaggatcaggaagcagattttaaagttcttggatgctgaaaaggacatttctgtcctaaagggaaccctgaagcctggagatattattcattacatcttcgatcgagacagcaccatgaatgtgtcccagaacctctacgagctcctccccaggacttcgccactgaagaataagcactttgggacttgtgccatcgtgggcaactcgggggtcttgctgaacagcggctgtgggcaggagattgacgcccacagcttcgtcatcaggtgcaacctggccccagtacaggagtatgcccgggatgtggggctcaagacagacctggtaaccatgaacccctcggtcatccagcgggcctttgaggacttggtcaatgccacgtggcgggagaagctgctgcaacggctgcacagcctcaatggcagcatcctgtggatccctgccttcatggcccggggcggcaaggagcgtgttgagtgggtcaacgagcttatcctgaagcaccacgtcaacgtgcgcactgcatacccctcgctgcgcctgctgcacgccgttcgcggatactggctgaccaacaaagtccacatcaaaagacccaccaccggcctcttgatgtataccctggccacacgtttctgcaaacaaatctacctctacggcttctggccctttccgctggatcagaaccagaacccagtcaagtaccactattatgacagcctcaagtatggctacacctcccaggccagcccgcataccatgcccttggagtttaaggccctcaagagcctacatgagcagggggctttgaaactgactgtcggccagtgcgatggggccacgtanggn

SEQ ID NO: 358638 - DNA, 1423 bp, Homo sapiens
gccgccgctgccgctgccgccgccggcccggactcgtccggagcgcagggtgtctgcccagctgcgcgcggcgcgcggaggctccggcgtccgccgctgcgccctccggcccctgctcctcgcgccggcccgcgtgggtcccggcgggcgcgaacccaccatgcagctgcagttccggagctggatgctggccgcgctcacgctgctcgtggtcttcctcatcttcgcagacatctcagagatcgaagaagaaatcgggaattcgggaggcagaggtacaatcagatcagctgtgaacagcttacatagcaaatctaatagagctgaagttgtaataaacggctcctcatcaccagctgttgttgacagaagtaatgaaagcatcaagcacaacatccagccagcctcgtccaaatggagacataaccagacgctctctctgaggatcaggaagcagattttaaagttcttggatgctgaaaaggacatttctgtcctaaagggaaccctgaagcctggagatattattcattacatcttcgatcgagacagcaccatgaatgtgtcccagaacctctacgagctcctccccaggacttcgccactgaagaataagcactttgggacttgtgccatcgtgggcaactcgggggtcttgctgaacagcggctgtgggcaggagattgacgcccacagcttcgtcatcaggtgcaacctggccccagtacaggagtatgcccgggatgtggggctcaagacagacctggtaaccatgaacccctcggtcatccagcgggcctttgaggacttggtcaatgccacgtggcgggagaagctgctgcaacggctgcacagcctcaatggcagcatcctgtggatccctgccttcatggcccggggcggcaaggagcgtgttgagtgggtcaacgagcttatcctgaagcaccacgtcaacgtgcgcactgcatacccctcgctgcgcctgctgcacgccgttcgcggatactggctgaccaacaaagtccacatcaaaagacccaccaccggcctcttgatgtataccctggccacacgtttctgcaaacaaatctacctctacggcattcctgaccactagaactgtgcttggcacagagtaggcacttaataaactcctgctgcatgaacaaaagaacaagtgtggatgcttcaaaggaagacttgcacccggctgacccccagagtggggaaggggtcccacctaataggaagaacaccaagacttccccaagaggagaaggaacggctccccctttctcggcgaggccatgtgtctggaccctgtgtgagatgctttctatactagcccttgttggggtgttgcacccattttacagatcaaacaaccaagtttatcagaaattaaagactcatttaagatgcc

SEQ ID NO: 358639 - DNA, 1228 bp, Homo sapiens
  misc_feature (1225)..(1225): n is a, c, g, or t
  misc_feature (1228)..(1228): n is a, c, g, or t
gccgccgctgccgctgccgccgccggcccggactcgtccggagcgcagggtgtctgcccagctgcgcgcggcgcgcggaggctccggcgtccgccgctgcgccctccggcccctgctcctcgcgccggcccgcgtgggtcccggcgggcgcgaacccaccatgcagctgcagttccggagctggatgctggccgcgctcacgctgctcgtggtcttcctcatcttcgcagacatctcagagatcgaagaagaaatcggagctgaagttgtaataaacggctcctcatcaccagctgttgttgacagaagtaatgaaagcatcaagcacaacatccagccagcctcgtccaaatggagacataaccagacgctctctctgaggatcaggaagcagattttaaagttcttggatgctgaaaaggacatttctgtcctaaagggaaccctgaagcctggagatattattcattacatcttcgatcgagacagcaccatgaatgtgtcccagaacctctacgagctcctccccaggacttcgccactgaagaataagcactttgggacttgtgccatcgtgggcaactcgggggtcttgctgaacagcggctgtgggcaggagattgacgcccacagcttcgtcatcaggtgcaacctggccccagtacaggagtatgcccgggatgtggggctcaagacagacctggtaaccatgaacccctcggtcatccagcgggcctttgaggacttggtcaatgccacgtggcgggagaagctgctgcaacggctgcacagcctcaatggcagcatcctgtggatccctgccttcatggcccggggcggcaaggagcgtgttgagtgggtcaacgagcttatcctgaagcaccacgtcaacgtgcgcactgcatacccctcgctgcgcctgctgcacgccgttcgcggatactggctgaccaacaaagtccacatcaaaagacccaccaccggcctcttgatgtataccctggccacacgtttctgcaaacaaatctacctctacggcttctggccctttccgctggatcagaaccagaacccagtcaagtaccactattatgacagcctcaagtatggctacacctcccaggccagcccgcataccatgcccttggagtttaaggccctcaagagcctacatgagcagggggctttgaaactgactgtcggccagtgcgatggggccacgtanggn

SEQ ID NO: 358640 - DNA, 396 bp, Homo sapiens
ctcagtgcatagttagagaaattgaggcacagagagagagggacagggccaaagctgagctcagagagcaccccagggagctgggccagaatcccatggcaacacatgcagggaaagagcttctttctctctctctcagcaggcacccatgctgccttatttttttttttttttttttgagatggagtctctctctgttgccagactggagtgcagtggcatgatcttggctcactgcaacctccaactccctggttcaagcaattcttctacctcagccttccgagtagctgggattacaggcacgcaccaccacaaccggctaatttttgtatttttagtagagacagggtttccccatgttatccaggagggtctcaatctcctgacctcgtg

SEQ ID NO: 358641 - DNA, 1734 bp, Homo sapiens
cgccagggggagtccgagcgaagtcctagccagcgagtcagaggggaggggagcagggaggggccgagggtggggaggtgagggagtggggaatggggcgggcgacaacccttcaggtacgcatgccccagaggcgcggcgcttggcgggaagctgagtcctggccttgcgtcgcactgtctgtcctcagctcgcgtagccgcgctcgcgactccctttcccggcatgccaggcggtgcggccgccctctgggccgtgtaaaggcccctcggtctaaggcttccctatttcctggttcgccggcggccattttgggtggaagcgatagctgagtggcggcggctgctgattgtgttctaggggacggagtaggggaagacgtttgctctcccggaacagcctatctcattcctttctttcgattacccgtggcgcggagagtcagggcggcggctgcggcagcaagggcggcggtggcggcggcggcagctgcagtgacatgtccagcatgaatcccgaatatgattatttattcaagttacttctgattggcgactcaggggttggaaagtcttgccttcttcttaggtttgcagatgatacatatacagaaagctacatcagcacaattggtgtggatttcaaaataagaactatagagttagacgggaaaacaatcaagcttcaaatatgggacacagcaggccaggaaagatttcgaacaatcacctccagttattacagaggagcccatggcatcatagttgtgtatgatgtgacagatcaggagtccttcaataatgttaaacagtggctgcaggaaatagatcgttatgccagtgaaaatgtcaacaaattgttggtagggaacaaatgtgatctgaccacaaagaaagtagtagactacacaacagcgaaggaatttgctgattcccttggaattccgtttttggaaaccagtgctaagaatgcaacgaatgtagaacagtctttcatgacgatggcagctgagattaaaaagcgaatgggtcccggagcaacagctggtggtgctgagaagtccaatgttaaaattcagagcactccagtcaagcagtcaggtggaggttgctgctaaaatttgcctccatccttttctcacagcaatgaatttgcaatctgaacccaagtgaaaaaacaaaattgcctgaattgtactgtatgtagctgcactacaacagattcttaccgtctccacaaaggtcagagattgtaaatggtcaatactgactttttttttattcccttgactcaagacagctaacttcattttcagaactgttttaaacctttgtgtgctggtttataaaataatgtgtgtaatccttgttgctttcctgataccagactgtttcccgtggttggttagaatatattttgttttgatgtttatattggcatgtttagatgtcaggtttagtcttctgaagatgaagttcagccattttgtatcaaacagcacaagcagtgtctgtcactttccatgcataaagtttagtgagatgttatatgtaagatctgatttgctagttcttccttgtagagttataaatggaaagattacactatctgattaatagtttcttcatactctgcatataatttgtggctgcagaatattgtaatttgttgcacactatgtaacaaaacaactgaagatatgtttaataaatattgtacttattggaagtaata

SEQ ID NO: 358642 - DNA, 1773 bp, Homo sapiens
cgccagggggagtccgagcgaagtcctagccagcgagtcagaggggaggggagcagggaggggccgagggtggggaggtgagggagtggggaatggggcgggcgacaacccttcaggtacgcatgccccagaggcgcggcgcttggcgggaagctgagtcctggccttgcgtcgcactgtctgtcctcagctcgcgtagccgcgctcgcgactccctttcccggcatgccaggcggtgcggccgccctctgggccgtgtaaaggcccctcggtctaaggcttccctatttcctggttcgccggcggccattttgggtggaagcgatagctgagtggcggcggctgctgattgtgttctaggggacggagtaggggaagacgtttgctctcccggaacagcctatctcattcctttctttcgattacccgtggcgcggagagtcagggcggcggctgcggcagcaagggcggcggtggcggcggcggcagctgcagtgacatgtccagcatgaatcccgaatatgattatttattcaagttacttctgattggcgactcaggggttggaaagtcttgccttcttcttaggtttgcagatgatacatatacagaaagctacatcagcacaattggtgtggatttcaaaataagaactatagagttagacgggaaaacaatcaagcttcaaatatgggacacagcaggccaggaaagatttcgaacaatcacctccagttattacagaggagcccatggcatcatagttgtgtatgatgtgacagatcaggagtccttcaataatgttaaacagtggctgcaggaaatagatcgttatgccagtgaaaatgtcaacaaattgttggtagggaacaaatgtgatctgaccacaaagaaagtagtagactacacaacagcgaaggaatttgctgattcccttggaattccgtttttggaaaccagtgctaagaatgcaacgaatgtagaacagtctttcatgacgatggcagctgagattaaaaagcgaatgggtcccggagcaacagctggtggtgctgagaagtccaatgttaaaattcagagcactccagtcaagcagtcaggtggaggttgctgctaaaatttgcctccatccttttctcacagcaatgaatttgcaatctgaacccaagtgaaaaaacaaaattgcctgaattgtactgtatgtagctgcactacaacagattcttaccgtctccacaaaggtcagagattgtaaatggtcaatactgactttttttttattcccttgactcaagacagctaacttcattttcagaactgttttaaacctttgtgtgctggtttataaaataatgtgtgtaatccttgttgctttcctgataccagactgtttcccgtggttggttagaatatattttgttttgatgtttatattggcatgtttagatgtcaggtttagtcttctgaagatgaagttcagccattttgtatcaaacagcacaagcagtgtctgtcactttccatgcataaagtttagtgagatgttatatgtaagatctgatttgctagttcttccttgtagagttataaatggaaagattacactatctgattaatagtttcttcatactctgcatataatttgtggctgcagaatattgtaatttgttgcacactatgtaacaaaacaactgaagatatgtttaataaatattgtacttattggaagtaataaaaaaaaaagtcgacgcggccgcgaatttagtagtagta

SEQ ID NO: 358643 - DNA, 1328 bp, Homo sapiens
cgccagggggagtccgagcgaagtcctagccagcgagtcagaggggaggggagcagggaggggccgagggtggggaggtgagggagtggggaatggggcgggcgacaacccttcagtgattatttattcaagttacttctgattggcgactcaggggttggaaagtcttgccttcttcttaggtttgcagatgatacatatacagaaagctacatcagcacaattggtgtggatttcaaaataagaactatagagttagacgggaaaacaatcaagcttcaaatatgggacacagcaggccaggaaagatttcgaacaatcacctccagttattacagaggagcccatggcatcatagttgtgtatgatgtgacagatcaggagtccttcaataatgttaaacagtggctgcaggaaatagatcgttatgccagtgaaaatgtcaacaaattgttggtagggaacaaatgtgatctgaccacaaagaaagtagtagactacacaacagcgaaggaatttgctgattcccttggaattccgtttttggaaaccagtgctaagaatgcaacgaatgtagaacagtctttcatgacgatggcagctgagattaaaaagcgaatgggtcccggagcaacagctggtggtgctgagaagtccaatgttaaaattcagagcactccagtcaagcagtcaggtggaggttgctgctaaaatttgcctccatccttttctcacagcaatgaatttgcaatctgaacccaagtgaaaaaacaaaattgcctgaattgtactgtatgtagctgcactacaacagattcttaccgtctccacaaaggtcagagattgtaaatggtcaatactgactttttttttattcccttgactcaagacagctaacttcattttcagaactgttttaaacctttgtgtgctggtttataaaataatgtgtgtaatccttgttgctttcctgataccagactgtttcccgtggttggttagaatatattttgttttgatgtttatattggcatgtttagatgtcaggtttagtcttctgaagatgaagttcagccattttgtatcaaacagcacaagcagtgtctgtcactttccatgcataaagtttagtgagatgttatatgtaagatctgatttgctagttcttccttgtagagttataaatggaaagattacactatctgattaatagtttcttcatactctgcatataatttgtggctgcagaatattgtaatttgttgcacactatgtaacaaaacaactgaagatatgtttaataaatattgtacttattggaagtaata

SEQ ID NO: 358644 - DNA, 1730 bp, Homo sapiens
cgccagggggagtccgagcgaagtcctagccagcgagtcagaggggaggggagcagggaggggccgagggtggggaggtgagggagtggggaatggggcgggcgacaacccttcaggtacgcatgccccagaggcgcggcgcttggcgggaagctgagtcctggccttgcgtcgcactgtctgtcctcagctcgcgtagccgcgctcgcgactccctttcccggcatgccaggcggtgcggccgccctctgggccgtgtaaaggcccctcggtctaaggcttccctatttcctggttcgccggcggccattttgggtggaagcgatagctgagtggcggcggctgctgattgtgttctaggggacggagtaggggaagacgtttgctctcccggaacagcctatctcattcctttctttcgattacccgtggcgcggagagtcagggcggcggctgcggcagcaagggcggcggtggcggcggcggcagctgcagtgacatgtccagcatgaatcccgaatatgattatttattcaagttacttctgattggcgactcaggggttggaaagtcttgccttcttcttaggtttgcagatgatacatatacagaaagctacatcagcacaattggtgtggatttcaaaataagaactatagagttagacgggaaaacaatcaagcttcaaatatgggacacagcaggccaggaaagatttcgaacaatcacctccagttattacagaggagcccatggcatcatagttgtgtatgatgtgacagatcaggagtccttcaataatgttaaacagtggctgcaggaaatagatcgttatgccagtgaaaatgtcaacaaattgttggtagggaacaaatgtgatctgaccacaaagaaagtagtagactacacaacagcgaaggaatttgctgattcccttggaattccgtttttggaaaccagtgctaagaatgcaacgaatgtagaacagtctttcatgacgatggcagctgagattaaaaagcgaatgggtcccggagcaacagctggtggtgctgagaagtccaatgttaaaattcagagcactccagtcaagcagtcaggtggaggttgctgctaaaatttgcctccatccttttctcacagcaatgaatttgcaatctgaacccaagtgaaaaaacaaaattgcctgaattgtactgtatgtagctgcactacaacagattcttaccgtctccacaaaggtcagagattgtaaatggtcaatactgactttttttttattcccttgactcaagacagctaacttcattttcagaactgttttaaacctttgtgtgctggtttataaaataatgtgtgtaatccttgttgctttcctgataccagactgtttcccgtggttggttagaatatattttgttttgatgtttatattggcatgtttagatgtcaggtttagtcttctgaagatgaagttcagccattttgtatcaaacagcacaagcagtgtctgtcactttccatgcataaagtttagtgagatgttatatgtaagatctgatttgctagttcttccttgtagagttataaatggaaagacgctacttcgttgttgaagggttattcatgataggcatatgggcccctccttcaggatcaggtcaggccttgcgccctcggtcgccacgctcacgtacggtccgtgggctctttggggtcgctggggttgg

SEQ ID NO: 358645 - DNA, 1694 bp, Homo sapiens
cgccagggggagtccgagcgaagtcctagccagcgagtcagaggggaggggagcagggaggggccgagggtggggaggtgagggagtggggaatggggcgggcgacaacccttcaggtacgcatgccccagaggcgcggcgcttggcgggaagctgagtcctggccttgcgtcgcactgtctgtcctcagctcgcgtagccgcgctcgcgactccctttcccggcatgccaggcggtgcggccgccctctgggccgtgtaaaggcccctcggtctaaggcttccctatttcctggttcgccggcggccattttgggtggaagcgatagctgagtggcggcggctgctgattgtgttctaggggacggagtaggggaagacgtttgctctcccggaacagcctatctcattcctttctttcgattacccgtggcgcggagagtcagggcggcggctgcggcagcaagggcggcggtggcggcggcggcagctgcagtgacatgtccagcatgaatcccgaatatgattatttattcaagttacttctgattggcgagatgatacatatacagaaagctacatcagcacaattggtgtggatttcaaaataagaactatagagttagacgggaaaacaatcaagcttcaaatatgggacacagcaggccaggaaagatttcgaacaatcacctccagttattacagaggagcccatggcatcatagttgtgtatgatgtgacagatcaggagtccttcaataatgttaaacagtggctgcaggaaatagatcgttatgccagtgaaaatgtcaacaaattgttggtagggaacaaatgtgatctgaccacaaagaaagtagtagactacacaacagcgaaggaatttgctgattcccttggaattccgtttttggaaaccagtgctaagaatgcaacgaatgtagaacagtctttcatgacgatggcagctgagattaaaaagcgaatgggtcccggagcaacagctggtggtgctgagaagtccaatgttaaaattcagagcactccagtcaagcagtcaggtggaggttgctgctaaaatttgcctccatccttttctcacagcaatgaatttgcaatctgaacccaagtgaaaaaacaaaattgcctgaattgtactgtatgtagctgcactacaacagattcttaccgtctccacaaaggtcagagattgtaaatggtcaatactgactttttttttattcccttgactcaagacagctaacttcattttcagaactgttttaaacctttgtgtgctggtttataaaataatgtgtgtaatccttgttgctttcctgataccagactgtttcccgtggttggttagaatatattttgttttgatgtttatattggcatgtttagatgtcaggtttagtcttctgaagatgaagttcagccattttgtatcaaacagcacaagcagtgtctgtcactttccatgcataaagtttagtgagatgttatatgtaagatctgatttgctagttcttccttgtagagttataaatggaaagattacactatctgattaatagtttcttcatactctgcatataatttgtggctgcagaatattgtaatttgttgcacactatgtaacaaaacaactgaagatatgtttaataaatattgtacttattggaagtaata

SEQ ID NO: 358646 - DNA, 1698 bp, Homo sapiens
atcccccgaacatgtcctggctgggtactctatacaaaaattagctggttatggtggcaaatgcctgtaatcccagctactcaggaggctcaggtggaaggattgcttgaggtgggaggttgaggctgcagcgagccatgatcatgccactgtactcagcctggatgacagaatgagacgctgcttgagaggggaaaaaaaagacacctgcttgggatgattaaagttctgtcttgactggtagttatttgaattaggtccctccagtgcttttaatcatggtagaatgtgctagcaagtgagtttgtcttacatggaagagttctgtgttcaagggctttcggccagtggcattcctaaacacagtgttaaaggcggtagggaatgtgaaaagtatgacatagttcctgctctcaacagcttgtaattttagtattattatcgtaagctcaattgtaggtactacttcttttctggactttcaggtgcttattaccgtgcaatttagtggtatgagttgaggactaatgtttctatatcacatcctgataatctccacagttatgaaaactaaactatttcccctccctcctacacttttccccaactttattttaatggaattgtttggatttcttgattgttttgtaatagttgggacacagcaggccaggaaagatttcgaacaatcacctccagttattacagaggagcccatggcatcatagttgtgtatgatgtgacagatcaggagtccttcaataatgttaaacagtggctgcaggaaatagatcgttatgccagtgaaaatgtcaacaaattgttggtagggaacaaatgtgatctgaccacaaagaaagtagtagactacacaacagcgaaggaatttgctgattcccttggaattccgtttttggaaaccagtgctaagaatgcaacgaatgtagaacagtctttcatgacgatggcagctgagattaaaaagcgaatgggtcccggagcaacagctggtggtgctgagaagtccaatgttaaaattcagagcactccagtcaagcagtcaggtggaggttgctgctaaaatttgcctccatccttttctcacagcaatgaatttgcaatctgaacccaagtgaaaaaacaaaattgcctgaattgtactgtatgtagctgcactacaacagattcttaccgtctccacaaaggtcagagattgtaaatggtcaatactgactttttttttattcccttgactcaagacagctaacttcattttcagaactgttttaaacctttgtgtgctggtttataaaataatgtgtgtaatccttgttgctttcctgataccagactgtttcccgtggttggttagaatatattttgttttgatgtttatattggcatgtttagatgtcaggtttagtcttctgaagatgaagttcagccattttgtatcaaacagcacaagcagtgtctgtcactttccatgcataaagtttagtgagatgttatatgtaagatctgatttgctagttcttccttgtagagttataaatggaaagattacactatctgattaatagtttcttcatactctgcatataatttgtggctgcagaatattgtaatttgttgcacactatgtaacaaaacaactgaagatatgtttaataaatattgtacttattggaagtaata

SEQ ID NO: 358647 - DNA, 1680 bp, Homo sapiens
cgccagggggagtccgagcgaagtcctagccagcgagtcagaggggaggggagcagggaggggccgagggtggggaggtgagggagtggggaatggggcgggcgacaacccttcaggtacgcatgccccagaggcgcggcgcttggcgggaagctgagtcctggccttgcgtcgcactgtctgtcctcagctcgcgtagccgcgctcgcgactccctttcccggcatgccaggcggtgcggccgccctctgggccgtgtaaaggcccctcggtctaaggcttccctatttcctggttcgccggcggccattttgggtggaagcgatagctgagtggcggcggctgctgattgtgttctaggggacggagtaggggaagacgtttgctctcccggaacagcctatctcattcctttctttcgattacccgtggcgcggagagtcagggcggcggctgcggcagcaagggcggcggtggcggcggcggcagctgcagtgacatgtccagcatgaatcccgaatatgattatttattcaagttacttctgattggcgactcaggggttggaaagtcttgccttcttcttaggtttgcagatgatacatatacagaaagctacatcagcacaattggtgtggatttcaaaataagaactatagagttagacgggatcacctccagttattacagaggagcccatggcatcatagttgtgtatgatgtgacagatcaggagtccttcaataatgttaaacagtggctgcaggaaatagatcgttatgccagtgaaaatgtcaacaaattgttggtagggaacaaatgtgatctgaccacaaagaaagtagtagactacacaacagcgaaggaatttgctgattcccttggaattccgtttttggaaaccagtgctaagaatgcaacgaatgtagaacagtctttcatgacgatggcagctgagattaaaaagcgaatgggtcccggagcaacagctggtggtgctgagaagtccaatgttaaaattcagagcactccagtcaagcagtcaggtggaggttgctgctaaaatttgcctccatccttttctcacagcaatgaatttgcaatctgaacccaagtgaaaaaacaaaattgcctgaattgtactgtatgtagctgcactacaacagattcttaccgtctccacaaaggtcagagattgtaaatggtcaatactgactttttttttattcccttgactcaagacagctaacttcattttcagaactgttttaaacctttgtgtgctggtttataaaataatgtgtgtaatccttgttgctttcctgataccagactgtttcccgtggttggttagaatatattttgttttgatgtttatattggcatgtttagatgtcaggtttagtcttctgaagatgaagttcagccattttgtatcaaacagcacaagcagtgtctgtcactttccatgcataaagtttagtgagatgttatatgtaagatctgatttgctagttcttccttgtagagttataaatggaaagattacactatctgattaatagtttcttcatactctgcatataatttgtggctgcagaatattgtaatttgttgcacactatgtaacaaaacaactgaagatatgtttaataaatattgtacttattggaagtaata

SEQ ID NO: 358648 - DNA, 2650 bp, Homo sapiens
  misc_feature (1033)..(1033): n is a, c, g, or t
  misc_feature (1037)..(1037): n is a, c, g, or t
  misc_feature (1042)..(1042): n is a, c, g, or t
gtgtcctttctatcaaagaaaaggacaaaagataaacgttcaaaattggaatttatttttcttttggcaaatgttaaatctcacctctaatgagaaatcatagctaattaggagataacttacatgtaagcatttagattcagtgccattagaagtgctgggtgggtgatatctgcaggagaaaaaaatgatgctagtttaaaaaatctctactattaccgtgaaatatttttaaatgaaaactttcgtcctctaaatatgactgtggaaaagaaaatgagtatatttaataacatcttttgacatctctagtagtaacagtaggtcatcttattcataaaccaaaattttaccaaatttcaggccaggcgcagtggctcacgcctgtaatcccagaactttgggaggccgaggcgggcggatcacctgaggtcaggagttagagactagcctcgccaacatggcaaaatcccatctctagtaaaaatacaaaaattagccaggcgtgggggcccgtgcctgtaatcctagccacttgggaggctgagacaggagaatcgcttgaacccagcgggcagaggttgcagtgagccgagatcgcgccattgcactccagcctggatgacagaacaagactttgtctcaaaaaaaaaaaaaaaaaattaatcaaatttcaaaaccaggttttgtagtacatttaaattgcatattccaaagcagttgggtttgcctgcgttgcagtttaatattaagctatacttccctttcaaataaggtattttcatcgttaagcctgtaaattctagtttgtcattgtttagatatttatagtcattttaatatatctgtttacggccagctgcaatggctaacacctgtaaactcagcactttttgaggccaaggtgggccgattgagctcaggagttcgagaccagcctgggcaacatagtgaaactccatctatacaaaaaatccaaaaaaaaaaagacaggtgtggtggcatgtgcctgtagtcccagctatcccggagngggncgggnggatggcttgagcttgggaggtcgagggtgcagtgagctgtgattgtgccactgcactccggcctaggtgacagaatgagacgctgcttgagaggggaaaaaaaagacacctgcttgggatgattaaagttctgtcttgactggtagttatttgaattaggtccctccagtgcttttaatcatggtagaatgtgctagcaagtgagtttgtcttacatggaagagttctgtgttcaagggctttcggccagtggcattcctaaacacagtgttaaaggcggtagggaatgtgaaaagtatgacatagttcctgctctcaacagcttgtaattttagtattattatcgtaagctcaattgtaggtactacttcttttctggactttcaggtgcttattaccgtgcaatttagtggtatgagttgaggactaatgtttctatatcacatcctgataatctccacagttatgaaaactaaactatttcccctccctcctacacttttccccaactttattttaatggaattgtttggatttcttgattgttttgtaatagtgggacacagcaggccaggaagagattttcgaacaatcacctccagttattacaagaggagccccatggcatcatagttgtgtatgatgtgacagatcaggagtgagtccttcaataatgttaaacagtggctgcaggaaatagatcgttatgccagtgaaaatgtcaacaaattgttggtagggaacaaatgtgatctgaccacaaagaaagtagtagactacacaacagcgaaggaatttgctgattcccttggaattccgtttttggaaaccagtgctaagaatgcaacgaatgtagaacagtctttcatgacgatggcagctgagattaaaaagcgaatgggtcccggagcaacagctggtggtgctgagaagtccaatgttaaaattcagagcactccagtcaagcagtcaggtggaggttgctgctaaaatttgcctccatccttttctcacagcaatgaatttgcaatctgaacccaagtgaaaaaacaaaattgcctgaattgtactgtatgtagctgcactacaacagattcttaccgtctccacaaaggtcagagattgtaaatggtcaatactgactttttttttattcccttgactcaagacagctaacttcattttcagaactgttttaaacctttgtgtgctggtttataaaataatgtgtgtaatccttgttgctttcctgataccagactgtttcccgtggttggttagaatatattttgttttgatgtttatattggcatgtttagatgtcaggtttagtcttctgaagatgaagttcagccattttgtatcaaacagcacaagcagtgtctgtcactttccatgcataaagtttagtgagatgttatatgtaagatctgatttgctagttcttccttgtagagttataaatggaaagattacactatctgattaatagtttcttcatactctgcatataatttgtggctgcagaatattgtaatttgttgcacactatgtaacaaaacaactgaagatatgtttaataaatattgtacttattggaagtaata

SEQ ID NO: 358649 - DNA, 2239 bp, Homo sapiens
  misc_feature (1033)..(1033): n is a, c, g, or t
  misc_feature (1037)..(1037): n is a, c, g, or t
  misc_feature (1042)..(1042): n is a, c, g, or t
gtgtcctttctatcaaagaaaaggacaaaagataaacgttcaaaattggaatttatttttcttttggcaaatgttaaatctcacctctaatgagaaatcatagctaattaggagataacttacatgtaagcatttagattcagtgccattagaagtgctgggtgggtgatatctgcaggagaaaaaaatgatgctagtttaaaaaatctctactattaccgtgaaatatttttaaatgaaaactttcgtcctctaaatatgactgtggaaaagaaaatgagtatatttaataacatcttttgacatctctagtagtaacagtaggtcatcttattcataaaccaaaattttaccaaatttcaggccaggcgcagtggctcacgcctgtaatcccagaactttgggaggccgaggcgggcggatcacctgaggtcaggagttagagactagcctcgccaacatggcaaaatcccatctctagtaaaaatacaaaaattagccaggcgtgggggcccgtgcctgtaatcctagccacttgggaggctgagacaggagaatcgcttgaacccagcgggcagaggttgcagtgagccgagatcgcgccattgcactccagcctggatgacagaacaagactttgtctcaaaaaaaaaaaaaaaaaattaatcaaatttcaaaaccaggttttgtagtacatttaaattgcatattccaaagcagttgggtttgcctgcgttgcagtttaatattaagctatacttccctttcaaataaggtattttcatcgttaagcctgtaaattctagtttgtcattgtttagatatttatagtcattttaatatatctgtttacggccagctgcaatggctaacacctgtaaactcagcactttttgaggccaaggtgggccgattgagctcaggagttcgagaccagcctgggcaacatagtgaaactccatctatacaaaaaatccaaaaaaaaaaagacaggtgtggtggcatgtgcctgtagtcccagctatcccggagngggncgggnggatggcttgagcttgggaggtcgagggtgcagtgagctgtgattgtgccactgcactccggcctaggtgacagagcaagaccctgtctcaaaaaaaaaaatctcttcactccttagcagtggttattttgtagctagagttgtctcactagctctttgttatttgtctgttaggtcaggaacgatgtttctgtttattccagaactatattatcgaactatattatcagtctttcaaatgtctttttaggagtccttcaataatgttaaacagtggctgcaggaaatagatcgttatgccagtgaaaatgtcaacaaattgttggtagggaacaaatgtgatctgaccacaaagaaagtagtagactacacaacagcgaaggaatttgctgattcccttggaattccgtttttggaaaccagtgctaagaatgcaacgaatgtagaacagtctttcatgacgatggcagctgagattaaaaagcgaatgggtcccggagcaacagctggtggtgctgagaagtccaatgttaaaattcagagcactccagtcaagcagtcaggtggaggttgctgctaaaatttgcctccatccttttctcacagcaatgaatttgcaatctgaacccaagtgaaaaaacaaaattgcctgaattgtactgtatgtagctgcactacaacagattcttaccgtctccacaaaggtcagagattgtaaatggtcaatactgactttttttttattcccttgactcaagacagctaacttcattttcagaactgttttaaacctttgtgtgctggtttataaaataatgtgtgtaatccttgttgctttcctgataccagactgtttcccgtggttggttagaatatattttgttttgatgtttatattggcatgtttagatgtcaggtttagtcttctgaagatgaagttcagccattttgtatcaaacagcacaagcagtgtctgtcactttccatgcataaagtttagtgagatgttatatgtaagatctgatttgctagttcttccttgtagagttataaatggaaagattacactatctgattaatagtttcttcatactctgcatataatttgtggctgcagaatattgtaatttgttgcacactatgtaacaaaacaactgaagatatgtttaataaatattgtacttattggaagtaata

SEQ ID NO: 358650 - DNA, 2105 bp, Homo sapiens
  misc_feature (488)..(488): n is a, c, g, or t
  misc_feature (492)..(492): n is a, c, g, or t
  misc_feature (497)..(497): n is a, c, g, or t
attggaggtaaaggtctctatctagcgccctcacctcatggggttctcttttaatatcaggactatgggagtctcagaatttattccattctaatggaccacaggagatctgccattaaactgaccgcagggagccactgtctctacctctgctcctccctccatgtctttgctctgtgcagaccacaggggtaactacctcaacatctgggaagctgtgagtttcccaagcaactcatttgctttcccctcttggctaccgagctggtgttcttgatgtttgtttagcagttaagaagtgtaaagtcggccagctgcaatggctaacacctgtaaactcagcactttttgaggccaaggtgggccgattgagctcaggagttcgagaccagcctgggcaacatagtgaaactccatctatacaaaaaatccaaaaaaaaaaagacaggtgtggtggcatgtgcctgtagtcccagctatcccggagngggncgggnggatggcttgagcttgggaggtcgagggtgcagtgagctgtgattgtgccactgcactccggcctaggtgacagaatgagacgctgcttgagaggggaaaaaaaagacacctgcttgggatgattaaagttctgtcttgactggtagttatttgaattaggtccctccagtgcttttaatcatggtagaatgtgctagcaagtgagtttgtcttacatggaagagttctgtgttcaagggctttcggccagtggcattcctaaacacagtgttaaaggcggtagggaatgtgaaaagtatgacatagttcctgctctcaacagcttgtaattttagtattattatcgtaagctcaattgtaggtactacttcttttctggactttcaggtgcttattaccgtgcaatttagtggtatgagttgaggactaatgtttctatatcacatcctgataatctccacagttatgaaaactaaactatttcccctccctcctacacttttccccaactttattttaatggaattgtttggatttcttgattgttttgtaatagtgggacacagcaggccaggaagagattttcgaacaatcacctccagttattacaagaggagccccatggcatcatagttgtgtatgatgtgacagatcaggagtgagtccttcaataatgttaaacagtggctgcaggaaatagatcgttatgccagtgaaaatgtcaacaaattgttggtagggaacaaatgtgatctgaccacaaagaaagtagtagactacacaacagcgaaggaatttgctgattcccttggaattccgtttttggaaaccagtgctaagaatgcaacgaatgtagaacagtctttcatgacgatggcagctgagattaaaaagcgaatgggtcccggagcaacagctggtggtgctgagaagtccaatgttaaaattcagagcactccagtcaagcagtcaggtggaggttgctgctaaaatttgcctccatccttttctcacagcaatgaatttgcaatctgaacccaagtgaaaaaacaaaattgcctgaattgtactgtatgtagctgcactacaacagattcttaccgtctccacaaaggtcagagattgtaaatggtcaatactgactttttttttattcccttgactcaagacagctaacttcattttcagaactgttttaaacctttgtgtgctggtttataaaataatgtgtgtaatccttgttgctttcctgataccagactgtttcccgtggttggttagaatatattttgttttgatgtttatattggcatgtttagatgtcaggtttagtcttctgaagatgaagttcagccattttgtatcaaacagcacaagcagtgtctgtcactttccatgcataaagtttagtgagatgttatatgtaagatctgatttgctagttcttccttgtagagttataaatggaaagattacactatctgattaatagtttcttcatactctgcatataatttgtggctgcagaatattgtaatttgttgcacactatgtaacaaaacaactgaagatatgtttaataaatattgtacttattggaagtaata

SEQ ID NO: 358651 - DNA, 1578 bp, Homo sapiens
cgccagggggagtccgagcgaagtcctagccagcgagtcagaggggaggggagcagggaggggccgagggtggggaggtgagggagtggggaatggggcgggcgacaacccttcaggtacgcatgccccagaggcgcggcgcttggcgggaagctgagtcctggccttgcgtcgcactgtctgtcctcagctcgcgtagccgcgctcgcgactccctttcccggcatgccaggcggtgcggccgccctctgggccgtgtaaaggcccctcggtctaaggcttccctatttcctggttcgccggcggccattttgggtggaagcgatagctgagtggcggcggctgctgattgtgttctaggggacggagtaggggaagacgtttgctctcccggaacagcctatctcattcctttctttcgattacccgtggcgcggagagtcagggcggcggctgcggcagcaagggcggcggtggcggcggcggcagctgcagtgacatgtccagcatgaatcccgaatatgattatttattcaagttacttctgattggcgactcaggggttggaaagtcttgccttcttcttaggtttgcagatgatacatatacagaaagctacatcagcacaattggtgtggatttcaaaataagaactatagagttagacgggaaaacaatcaagcttcaaatagtcaacaaattgttggtagggaacaaatgtgatctgaccacaaagaaagtagtagactacacaacagcgaaggaatttgctgattcccttggaattccgtttttggaaaccagtgctaagaatgcaacgaatgtagaacagtctttcatgacgatggcagctgagattaaaaagcgaatgggtcccggagcaacagctggtggtgctgagaagtccaatgttaaaattcagagcactccagtcaagcagtcaggtggaggttgctgctaaaatttgcctccatccttttctcacagcaatgaatttgcaatctgaacccaagtgaaaaaacaaaattgcctgaattgtactgtatgtagctgcactacaacagattcttaccgtctccacaaaggtcagagattgtaaatggtcaatactgactttttttttattcccttgactcaagacagctaacttcattttcagaactgttttaaacctttgtgtgctggtttataaaataatgtgtgtaatccttgttgctttcctgataccagactgtttcccgtggttggttagaatatattttgttttgatgtttatattggcatgtttagatgtcaggtttagtcttctgaagatgaagttcagccattttgtatcaaacagcacaagcagtgtctgtcactttccatgcataaagtttagtgagatgttatatgtaagatctgatttgctagttcttccttgtagagttataaatggaaagattacactatctgattaatagtttcttcatactctgcatataatttgtggctgcagaatattgtaatttgttgcacactatgtaacaaaacaactgaagatatgtttaataaatattgtacttattggaagtaata

SEQ ID NO: 358652 - DNA, 2487 bp, Homo sapiens
  misc_feature (1033)..(1033): n is a, c, g, or t
  misc_feature (1037)..(1037): n is a, c, g, or t
  misc_feature (1042)..(1042): n is a, c, g, or t
gtgtcctttctatcaaagaaaaggacaaaagataaacgttcaaaattggaatttatttttcttttggcaaatgttaaatctcacctctaatgagaaatcatagctaattaggagataacttacatgtaagcatttagattcagtgccattagaagtgctgggtgggtgatatctgcaggagaaaaaaatgatgctagtttaaaaaatctctactattaccgtgaaatatttttaaatgaaaactttcgtcctctaaatatgactgtggaaaagaaaatgagtatatttaataacatcttttgacatctctagtagtaacagtaggtcatcttattcataaaccaaaattttaccaaatttcaggccaggcgcagtggctcacgcctgtaatcccagaactttgggaggccgaggcgggcggatcacctgaggtcaggagttagagactagcctcgccaacatggcaaaatcccatctctagtaaaaatacaaaaattagccaggcgtgggggcccgtgcctgtaatcctagccacttgggaggctgagacaggagaatcgcttgaacccagcgggcagaggttgcagtgagccgagatcgcgccattgcactccagcctggatgacagaacaagactttgtctcaaaaaaaaaaaaaaaaaattaatcaaatttcaaaaccaggttttgtagtacatttaaattgcatattccaaagcagttgggtttgcctgcgttgcagtttaatattaagctatacttccctttcaaataaggtattttcatcgttaagcctgtaaattctagtttgtcattgtttagatatttatagtcattttaatatatctgtttacggccagctgcaatggctaacacctgtaaactcagcactttttgaggccaaggtgggccgattgagctcaggagttcgagaccagcctgggcaacatagtgaaactccatctatacaaaaaatccaaaaaaaaaaagacaggtgtggtggcatgtgcctgtagtcccagctatcccggagngggncgggnggatggcttgagcttgggaggtcgagggtgcagtgagctgtgattgtgccactgcactccggcctaggtgacagagcaagaccctgtctcaaaaaaaaaaatctcttcactccttagcagtggttattttgtagctagagttgtctcactagctctttgttatttgtctgttaggtcaggaacgatgtttctgtttattccagaactatattatcgaactatattatcagtctttcaaatgtctttttaggagtccttcaataatgttaaacagtggctgcaggaaatagatcgttatgccagtgaaaatgtcaacaaattgttggtagggaacaaatgtgatctgaccacaaagaaagtagtagactacacaacagcgaaggtatgtttaaagtttaattttcatactgaatttgaaggtgttgaattatgtatgggttctgcagtaacagtaaggccacagccttttaaaaatatgtgcactagaatactgtgacagtgacaatttgtgtagcatctgtttggatccaatgaacttagttcctcacgctccattatggatggtagaaatgcactaagaattagtgaaaaagatttttcagtgttaattgtgcctcattattctcttaggaatttgctgattcccttggaattccgtttttggaaaccagtgctaagaatgcaacgaatgtagaacagtctttcatgacgatggcagctgagattaaaaagcgaatgggtcccggagcaacagctggtggtgctgagaagtccaatgttaaaattcagagcactccagtcaagcagtcaggtggaggttgctgctaaaatttgcctccatccttttctcacagcaatgaatttgcaatctgaacccaagtgaaaaaacaaaattgcctgaattgtactgtatgtagctgcactacaacagattcttaccgtctccacaaaggtcagagattgtaaatggtcaatactgactttttttttattcccttgactcaagacagctaacttcattttcagaactgttttaaacctttgtgtgctggtttataaaataatgtgtgtaatccttgttgctttcctgataccagactgtttcccgtggttggttagaatatattttgttttgatgtttatattggcatgtttagatgtcaggtttagtcttctgaagatgaagttcagccattttgtatcaaacagcacaagcagtgtctgtcactttccatgcataaagtttagtgagatgttatatgtaagatctgatttgctagttcttccttgtagagttataaatggaaagattacactatctgattaatagtttcttcatactctgcatataatttgtggctgcagaatattgtaatttgttgcacactatgtaacaaaacaactgaagatatgtttaataaatattgtacttattggaagtaata

SEQ ID NO: 358653 - DNA, 1179 bp, Homo sapiens
  misc_feature (12)..(12): n is a, c, g, or t
ggtctagagganccttatgtctcgatcgttatgccagtgaaaatgtcaacaaattgttggtagggaacaaatgtgatctgaccacaaagaaagtagtagactacacaacagcgaaggtatgtttaaagtttaattttcatactgaatttgaaggtgttgaattatgtatgggttctgcagtaacagtaaggccacagccttttaaaaatatgtgcactagaatactgtgacagtgacaatttgtgtagcatctgtttggatccaatgaacttagttcctcacgctccattatggatggtagaaatgcactaagaattagtgaaaaagatttttcagtgttaattgtgcctcattattctcttaggaatttgctgattcccttggaattccgtttttggaaaccagtgctaagaatgcaacgaatgtagaacagtctttcatgacgatggcagctgagattaaaaagcgaatgggtcccggagcaacagctggtggtgctgagaagtccaatgttaaaattcagagcactccagtcaagcagtcaggtggaggttgctgctaaaatttgcctccatccttttctcacagcaatgaatttgcaatctgaacccaagtgaaaaaacaaaattgcctgaattgtactgtatgtagctgcactacaacagattcttaccgtctccacaaaggtcagagattgtaaatggtcaatactgactttttttttattcccttgactcaagacagctaacttcattttcagaactgttttaaacctttgtgtgctggtttataaaataatgtgtgtaatccttgttgctttcctgataccagactgtttcccgtggttggttagaatatattttgttttgatgtttatattggcatgtttagatgtcaggtttagtcttctgaagatgaagttcagccattttgtatcaaacagcacaagcagtgtctgtcactttccatgcataaagtttagtgagatgttatatgtaagatctgatttgctagttcttccttgtagagttataaatggaaagattacactatctgattaatagtttcttcatactctgcatataatttgtggctgcagaatattgtaatttgttgcacactatgtaacaaaacaactgaagatatgtttaataaatattgtacttattggaagtaata

SEQ ID NO: 358654 - DNA, 1360 bp, Homo sapiens
cgccagggggagtccgagcgaagtcctagccagcgagtcagaggggaggggagcagggaggggccgagggtggggaggtgagggagtggggaatggggcgggcgacaacccttcaggtacgcatgccccagaggcgcggcgcttggcgggaagctgagtcctggccttgcgtcgcactgtctgtcctcagctcgcgtagccgcgctcgcgactccctttcccggcatgccaggcggtgcggccgccctctgggccgtgtaaaggcccctcggtctaaggcttccctatttcctggttcgccggcggccattttgggtggaagcgatagctgagtggcggcggctgctgattgtgttctaggggacggagtaggggaagacgtttgctctcccggaacagcctatctcattcctttctttcgattacccgtggcgcggagagtcagggcggcggctgcggcagcaagggcggcggtggcggcggcggcagctgcagtgacatgtccagcatgaatcccgaatatgattatttattcaagttacttctgattggcgactcaggggttggaaagtcttgccttcttcttaggtttgcagatgatacatatacagaaagctacatcagcacaattggtgtggatttcaaaataagaactatagagttagacgggaaaacaatcaagcttcaaatatgggacacagcaggccaggaaagatttcgaacaatcacctccagttattacagaggagcccatggcatcatagttgtgtatgatgtgacagatcaggtaagttccaagaggagattgtgttacagtgaccaagtaggaagccattatttgattaatgtcagattcatttactacttcatatataagccatcagtattaattttatggcagaaaactttgtccactctcaaatataaatgtgaatcacttaaaagacatttgttttcctgtaataaataaaagattagtaattagttttacgtttgctttcaagggattctggttgtatttattgtcaactaaataactttgatcaaatagccaagactctaacatataggcaagagtttgtagggaatcgtgagttgcttggcttatactgtgttcttggtgttaagtattaacaggaatatggcctggtaattagaacttgtccatcagaattgccaaaagtggggattcgggggtctctgcctatggaggatgtggttcagaaataaagaatttgaatagggataagctgtagggaggatcttagtatgaggattgagtatcctgaagattagctgtgaggagaggggcagagcgatgggagggaacaatgtgggacagtgtgaagcatgtgatcca

SEQ ID NO: 358655 - DNA, 1171 bp, Homo sapiens
cgccagggggagtccgagcgaagtcctagccagcgagtcagaggggaggggagcagggaggggccgagggtggggaggtgagggagtggggaatggggcgggcgacaacccttcaggtacgcatgccccagaggcgcggcgcttggcgggaagctgagtcctggccttgcgtcgcactgtctgtcctcagctcgcgtagccgcgctcgcgactccctttcccggcatgccaggcggtgcggccgccctctgggccgtgtaaaggcccctcggtctaaggcttccctatttcctggttcgccggcggccattttgggtggaagcgatagctgagtggcggcggctgctgattgtgttctaggggatgggacacagcaggccaggaaagatttcgaacaatcacctccagttattacagaggagcccatggcatcatagttgtgtatgatgtgacagatcaggagtccttcaataatgttaaacagtggctgcaggaaatagatcgttatgccagtgaaaatgtcaacaaattgttggtagggaacaaatgtgatctgaccacaaagaaagtagtagactacacaacagcgaaggaatttgctgattcccttggaattccgtttttggaaaccagtgctaagaatgcaacgaatgtagaacagtctttcatgacgatggcagctgagattaaaaagcgaatgggtcccggagcaacagctggtggtgctgagaagtccaatgttaaaattcagagcactccagtcaagcagtcaggtggaggttgctgctaaaatttgcctccatccttttctcacagcaatgaatttgcaatctgaacccaagtgaaaaaacaaaattgcctgaattgtactgtatgtagctgcactacaacagattcttaccgtctccacaaaggtcagagatgcaacggtcatccgactcccctatcccctgaccaagacgctaactccatctacgacgctcacacctgcgtgcgcctcctcaacacgccgaaccgcgcccgatccaccgtccgggtggcccccaatcggccggccccgccgcaccccgcccccgcgcgccaccccgccaacgcaccgacccccaccaccccgccccccccccgcccccgaaccaaccacccacgccaccccaccccacgccccccccac

SEQ ID NO: 358656 - DNA, 1324 bp, Homo sapiens
atcccccgaacatgtcctggctgggtactctatacaaaaattagctggttatggtggcaaatgcctgtaatcccagctactcaggaggctcaggtggaaggattgcttgaggtgggaggttgaggctgcagcgagccatgatcatgccactgtactcagcctggatgacagaatgagacgctgcttgagaggggaaaaaaaagacacctgcttgggatgattaaagttctgtcttgactggtagttatttgaattaggtccctccagtgcttttaatcatggtagaatgtgctagcaagtgagtttgtcttacatggaagagttctgtgttcaagggctttcggccagtggcattcctaaacacagtgttaaaggcggtagggaatgtgaaaagtatgacatagttcctgctctcaacagcttgtaattttagtattattatcgtaagctcaattgtaggtactacttcttttctggactttcaggtgcttattaccgtgcaatttagtggtatgagttgaggactaatgtttctatatcacatcctgataatctccacagttatgaaaactaaactatttcccctccctcctacacttttccccaactttattttaatggaattgtttggatttcttgattgttttgtaatagttgggacacagcaggccaggaaagatttcgaacaatcacctccagttattacagaggagcccatggcatcatagttgtgtatgatgtgacagatcaggtaagttccaagaggagattgtgttacagtgaccaagtaggaagccattatttgattaatgtcagattcatttactacttcatatataagccatcagtattaattttatggcagaaaactttgtccactctcaaatataaatgtgaatcacttaaaagacatttgttttcctgtaataaataaaagattagtaattagttttacgtttgctttcaagggattctggttgtatttattgtcaactaaataactttgatcaaatagccaagactctaacatataggcaagagtttgtagggaatcgtgagttgcttggcttatactgtgttcttggtgttaagtattaacaggaatatggcctggtaattagaacttgtccatcagaattgccaaaagtggggattcgggggtctctgcctatggaggatgtggttcagaaataaagaatttgaatagggataagctgtagggaggatcttagtatgaggattgagtatcctgaagattagctgtgaggagaggggcagagcgatgggagggaacaatgtgggacagtgtgaagcatgtgatcca

SEQ ID NO: 358657 - DNA, 1101 bp, Homo sapiens
cgccagggggagtccgagcgaagtcctagccagcgagtcagaggggaggggagcagggaggggccgagggtggggaggtgagggagtggggaatggggcgggcgacaacccttcaggtacgcatgccccagaggcgcggcgcttggcgggaagctgagtcctggccttgcgtcgcactgtctgtcctcagctcgcgtagccgcgctcgcgactccctttcccggcatgccaggcggtgcggccgccctctgggccgtgtaaaggcccctcggtctaaggcttccctatttcctggttcgccggcggccattttgggtggaagcgatagctgagtggcggcggctgctgattgtgttctaggggacggagtaggggaagacgtttgctctcccggaacagcctatctcattcctttctttcgattacccgtggcgcggagagtcagggcggcggctgcggcagcaagggcggcggtggcggcggcggcagctgcagtgacatgtccagcatgaatcccgaatatgattatttattcaagttacttctgattggcgactcaggggttggaaagtcttgccttcttcttaggtttgcagtatccagggtgtgagcaagcagaactcagacagctctgtcatgctgaagctggaatacagtcccttacctctgagaagcgtctcctggcagatgaaaccctcaatcactctgtcgctaacaggacacgtccaaacccaggaggtcgccccagaccccatcctgctcagttcacacgccagtggtaactgaacactagcagaatgactggttcatctcagcttcttcactgaattttttatctgcttgatgaagaactcacccccgagggaagcaggacagcacagtgttgaaggacatgggttttggagccagacaaacctgaggccagcccctaactttgccaccttccagatgtatgacttcgagcctcactttcctcccctcatagcaccagctcctcagaaggtaaggattaaatacacccatgtgtgcaaagcacatggtaagagcttaacgaacaacaggaattctaataataagcaccggactcatccccgtgaaagg

SEQ ID NO: 358658 - DNA, 582 bp, Homo sapiens
aaactattacagcataaactattacagcataaactattacagcataaactattacagcataaactattacagcataaactattacagcataaactatttcccctccctcctacacttttccccaactttattttaatggaattgtttggatttcttgattgttttgtaatagttgggacacagcaggccaggaaagatttcgaacaatcacctccagttattacagaggagcccatggcatcatagttgtgtatgatgtgacagatcaggtaagttccaagaggagattgtgttacagtgaccaagtaggaagccattatttgattaatgtcagattcatttactacttcatatataagccatcagtattaattttatggcagaaaactttgtccactctcaaatataaatgtgaatcacttaaaagacatttgttttcctgtaataaataaaagattagtaattagtttatgctgtagcataaactagtttatgctgtaatagtttatgctgtaatagtttatgctgtaatagtttatgctgtaatagtttatgctgtaatagtttatgctgtaatagttt

SEQ ID NO: 358659 - DNA, 2759 bp, Homo sapiens
cgccagggggagtccgagcgaagtcctagccagcgagtcagaggggaggggagcagggaggggccgagggtggggaggtgagggagtggggaatggggcgggcgacaacccttcaggtacgcatgccccagaggcgcggcgcttggcgggaagctgagtcctggccttgcgtcgcactgtctgtcctcagctcgcgtagccgcgctcgcgactccctttcccggcatgccaggcggtgcggccgccctctgggccgtgtaaaggcccctcggtctaaggcttccctatttcctggttcgccggcggccattttgggtggaagcgatagctgagtggcggcggctgctgattgtgttctaggggacggagtaggggaagacgtttgctctcccggaacagcctatctcattcctttctttcgattacccgtggcgcggagagtcagggcggcggctgcggcagcaagggcggcggtggcggcggcggcagctgcagtgacatgtccagcatgaatcccgaatatgattatttattcaagttacttctgattggcgactcaggggttggaaagtcttgccttcttcttaggtttgcagatgatacatatacagaaagctacatcagcacaattggtgtggatttcaaaataagaactatagagttagacgggaaaacaatcaagcttcaaatatgggacacagcaggccaggaaagatttcgaacaatcacctccagttattacagaggagcccatggcatcatagttgtgtatgatgtgacagatcaggagtccttcaataatgttaaacagtggctgcaggaaatagatcgttatgccagtgaaaatgtcaacaaattgttggtagggaacaaatgtgatctgaccacaaagaaagtagtagactacacaacagcgaaggaatttgctgattcccttggaattccgtttttggaaaccagtgctaagaatgcaacgaatgtagaacagtctttcatgacgatggcagctgagattaaaaagcgaatgggtcccggagcaacagctggtggtgctgagaagtccaatgttaaaattcagagcactccagtcaagcagtcaggtggaggttgctgctaaaatttgcctccatccttttctcacagcaatgaatttgcaatctgaacccaagtgaaaaaacaaaattgcctgaattgtactgtatgtagctgcactacaacagattcttaccgtctccacaaaggtcagagattgtaaatggtcaatactgactttttttttattcccttgactcaagacagctaacttcattttcagaactgttttaaacctttgtgtgctggtttataaaataatgtgtgtaatccttgttgctttcctgataccagactgtttcccgtggttggttagaatatattttgttttgatgtttatattggcatgtttagatgtcaggtttagtcttctgaagatgaagttcagccattttgtatcaaacagcacaagcagtgtctgtcactttccatgcataaagtttagtgagatgttatatgtaagatctgatttgctagttcttccttgtagagttataaatggaaagattacactatctgattaatagtttcttcatactctgcatataatttgtggctgcagaatattgtaatttgttgcacactatgtaacaaaacaactgaagatatgtttaataaatattgtacttattggaagtaatatcaaactgtatggtgataagtattgttttgattcttatggttaaagggaaatagagccttgcattatattcaacacagccatttgtgtgtgcacaatgcaaactaaggtattctagacctatcttagagcagcatccagtatttgctttctagataatatgcccaataacatgacctagaggggcttctgtgctgtgtagggatttaaccaacttcagtggttcagggagctcaaactatatgtaaaacaagtttagaatgtatgctatctagcccgttatctctgatccttctctaaaaccatttgaaatagcttcattgatcaacatttcataaatgcatctgtggtagaggtagaaagcagcacctttcctaattggcaaatgatcagactaatgtgtgctaatgtttttcttccatgctttcagtcagattcaactattttatcctccacagttgcttaacttggtgttggaggagggtttaagcattaagataggaagcaggaaatttgattgctctaaatttagaaattatatccctaaaaattaaaacatgaatactgggtggtaatgataattgaggcaaatgtatttattttggtgacattttgcatatatgaagattttctgaaataggaccttcaagatcctagggggttttgtttggtttttaattgtgaggaataaaaaatcttctgcccacactggcattttaaggtgactgaggtcaaacgttgtttccttaggttgaaatagcagccaaaacattcttcacgcaggggcttgggatatggctgctggcaacacattttgttgtgggctccttaatttaatgataaaatttaagctaaacacaagccaaaaatgaataggtttttttaatttttatttttcactaaacaggcaattgaaatacatggtacaaaaataagtggtaagataattgtaaaatgaaatggacagaatattcaattttccatctatgaaaatttcacaataaaaatcatagtttactttgtatta

SEQ ID NO: 358660 - DNA, 1701 bp, Homo sapiens
cgccagggggagtccgagcgaagtcctagccagcgagtcagaggggaggggagcagggaggggccgagggtggggaggtgagggagtggggaatggggcgggcgacaacccttcaggtacgcatgccccagaggcgcggcgcttggcgggaagctgagtcctggccttgcgtcgcactgtctgtcctcagctcgcgtagccgcgctcgcgactccctttcccggcatgccaggcggtgcggccgccctctgggccgtgtaaaggcccctcggtctaaggcttccctatttcctggttcgccggcggccattttgggtggaagcgatagctgagtggcggcggctgctgattgtgttctaggggacggagtaggggaagacgtttgctctcccggaacagcctatctcattcctttctttcgattacccgtggcgcggagagtcagggcggcggcagctgcagtgacatgtccagcatgaatcccgaatatgattatttattcaagttacttctgattggcgactcaggggttggaaagtcttgccttcttcttaggtttgcagatgatacatatacagaaagctacatcagcacaattggtgtggatttcaaaataagaactatagagttagacgggaaaacaatcaagcttcaaatatgggacacagcaggccaggaaagatttcgaacaatcacctccagttattacagaggagcccatggcatcatagttgtgtatgatgtgacagatcaggagtccttcaataatgttaaacagtggctgcaggaaatagatcgttatgccagtgaaaatgtcaacaaattgttggtagggaacaaatgtgatctgaccacaaagaaagtagtagactacacaacagcgaaggaatttgctgattcccttggaattccgtttttggaaaccagtgctaagaatgcaacgaatgtagaacagtctttcatgacgatggcagctgagattaaaaagcgaatgggtcccggagcaacagctggtggtgctgagaagtccaatgttaaaattcagagcactccagtcaagcagtcaggtggaggttgctgctaaaatttgcctccatccttttctcacagcaatgaatttgcaatctgaacccaagtgaaaaaacaaaattgcctgaattgtactgtatgtagctgcactacaacagattcttaccgtctccacaaaggtcagagattgtaaatggtcaatactgactttttttttattcccttgactcaagacagctaacttcattttcagaactgttttaaacctttgtgtgctggtttataaaataatgtgtgtaatccttgttgctttcctgataccagactgtttcccgtggttggttagaatatattttgttttgatgtttatattggcatgtttagatgtcaggtttagtcttctgaagatgaagttcagccattttgtatcaaacagcacaagcagtgtctgtcactttccatgcataaagtttagtgagatgttatatgtaagatctgatttgctagttcttccttgtagagttataaatggaaagattacactatctgattaatagtttcttcatactctgcatataatttgtggctgcagaatattgtaatttgttgcacactatgtaacaaaacaactgaagatatgtttaataaatattgtacttattggaagtaata

SEQ ID NO: 358661 - DNA, 1681 bp, Homo sapiens
cgccagggggagtccgagcgaagtcctagccagcgagtcagaggggaggggagcagggaggggccgagggtggggaggtgagggagtggggaatggggcgggcgacaacccttcaggtacgcatgccccagaggcgcggcgcttggcgggaagctgagtcctggccttgcgtcgcactgtctgtcctcagctcgcgtagccgcgctcgcgactccctttcccggcatgccaggcggtgcggccgccctctgggccgtgtaaaggcccctcggtctaaggcttccctatttcctggttcgccggcggccattttgggtggaagcgatagctgagtggcggcggctgctgattgtgttctaggggacggagtaggggaagacgtttgctctcccggaacagcctatctcattcctttctttcgattacccgtggcgcggagagtcagggcggcggctgcggcagcaagggcggcggtggcggcggcggcagctgcagtgacatgtccagcatgaatcccgaatatgattatttattcaagttacttctgattggcgactcaggggttggaaagtcttgccttcttcttaggtttgcagatgatacatatacagaaagctacatcagcacaattggtgtggatttcaaaataagaactatagagttagacgggaaaacaatcaagcttcaaatatgggacacagcaggccaggaaagatttcgaacaatcacctccagttattacagaggagcccatggcatcatagttgtgtatgatgtgacagatcaggagtccttcaataatgttaaacagtggctgcaggaaatagatcgttatgccagtgaaaatgtcaacaaattgttggtagggaacaaatgtgatctgaccacaaagaaagtagtagactacacaacagcgaaggaatttgctgattcccttggaattccgtttttggaaaccagtgctaagaatgcaacgaatgtagaacagtctttcatgacgatggcagctgagattaaaaagcgaatgggtcccggagcaacagctggtggtgctgagaagtccaatgttaaaattcagagcactccagtcaagcagtcaggtggaggttgctgctaaaatttgcctccatccttttctcacagcaatgaatttgcaatctgaacccaagtgaaaacgtctccacaaaggtcagagattgtaaatggtcaatactgactttttttttattcccttgactcaagacagctaacttcattttcagaactgttttaaacctttgtgtgctggtttataaaataatgtgtgtaatccttgttgctttcctgataccagactgtttcccgtggttggttagaatatattttgttttgatgtttatattggcatgtttagatgtcaggtttagtcttctgaagatgaagttcagccattttgtatcaaacagcacaagcagtgtctgtcactttccatgcataaagtttagtgagatgttatatgtaagatctgatttgctagttcttccttgtagagttataaatggaaagattacactatctgattaatagtttcttcatactctgcatataatttgtggctgcagaatattgtaatttgttgcacactatgtaacaaaacaactgaagatatgtttaataaatattgtacttattggaagtaata

SEQ ID NO: 358662 - DNA, 1982 bp, Homo sapiens
cgccagggggagtccgagcgaagtcctagccagcgagtcagaggggaggggagcagggaggggccgagggtggggaggtgagggagtggggaatggggcgggcgacaacccttcaggtacgcatgccccagaggcgcggcgcttggcgggaagctgagtcctggccttgcgtcgcactgtctgtcctcagctcgcgtagccgcgctcgcgactccctttcccggcatgccaggcggtgcggccgccctctgggccgtgtaaaggcccctcggtctaaggcttccctatttcctggttcgccggcggccattttgggtggaagcgatagctgagtggcggcggctgctgattgtgttctaggggacggagtaggggaagacgtttgctctcccggaacagcctatctcattcctttctttcgattacccgtggcgcggagagtcagggcggcggctgcggcagcaagggcggcggtggcggcggcggcagctgcagtgacatgtccagcatgaatcccgaatatgattatttattcaagttacttctgattggcgactcaggggttggaaagtcttgccttcttcttaggtttgcagatgatacatatacagaaagctacatcagcacaattggtgtggatttcaaaataagaactatagagttagacgggaaaacaatcaagcttcaaatatgggacacagcaggccaggaaagatttcgaacaatcacctccagttattacagaggagcccatggcatcatagttgtgtatgatgtgacagatcaggagtccttcaataatgttaaacagtggctgcaggaaatagatcgttatgccagtgaaaatgtcaacaaattgttggtagggaacaaatgtgatctgaccacaaagaaagtagtagactacacaacagcgaaggtatgtttaaagtttaattttcatactgaatttgaaggtgttgaattatgtatgggttctgcagtaacagtaaggccacagccttttaaaaatatgtgcactagaatactgtgacagtgacaatttgtgtagcatctgtttggatccaatgaacttagttcctcacgctccattatggatggtagaaatgcactaagaattagtgaaaaagatttttcagtgttaattgtgcctcattattctcttaggaatttgctgattcccttggaattccgtttttggaaaccagtgctaagaatgcaacgaatgtagaacagtctttcatgacgatggcagctgagattaaaaagcgaatgggtcccggagcaacagctggtggtgctgagaagtccaatgttaaaattcagagcactccagtcaagcagtcaggtggaggttgctgctaaaatttgcctccatccttttctcacagcaatgaatttgcaatctgaacccaagtgaaaaaacaaaattgcctgaattgtactgtatgtagctgcactacaacagattcttaccgtctccacaaaggtcagagattgtaaatggtcaatactgactttttttttattcccttgactcaagacagctaacttcattttcagaactgttttaaacctttgtgtgctggtttataaaataatgtgtgtaatccttgttgctttcctgataccagactgtttcccgtggttggttagaatatattttgttttgatgtttatattggcatgtttagatgtcaggtttagtcttctgaagatgaagttcagccattttgtatcaaacagcacaagcagtgtctgtcactttccatgcataaagtttagtgagatgttatatgtaagatctgatttgctagttcttccttgtagagttataaatggaaagattacactatctgattaatagtttcttcatactctgcatataatttgtggctgcagaatattgtaatttgttgcacactatgtaacaaaacaactgaagatatgtttaataaatattgtacttattggaagtaata

SEQ ID NO: 358663 - DNA, 1542 bp, Homo sapiens
cgccagggggagtccgagcgaagtcctagccagcgagtcagaggggaggggagcagggaggggccgagggtggggaggtgagggagtggggaatggggcgggcgacaacccttcaggtacgcatgccccagaggcgcggcgcttggcgggaagctgagtcctggccttgcgtcgcactgtctgtcctcagctcgcgtagccgcgctcgcgactccctttcccggcatgccaggcggtgcggccgccctctgggccgtgtaaaggcccctcggtctaaggcttccctatttcctggttcgccggcggccattttgggtggaagcgatagctgagtggcggcggctgctgattgtgttctaggggacggagtaggggaagacgtttgctctcccggaacagcctatctcattcctttctttcgattacccgtggcgcggagagtcagggcggcggctgcggcagcaagggcggcggtggcggcggcggcagctgcagtgacatgtccagcatgaatcccgaatatgattatttattcaagttacttctgattggcgactcaggggttggaaagtcttgccttcttcttaggtttgcagagtccttcaataatgttaaacagtggctgcaggaaatagatcgttatgccagtgaaaatgtcaacaaattgttggtagggaacaaatgtgatctgaccacaaagaaagtagtagactacacaacagcgaaggaatttgctgattcccttggaattccgtttttggaaaccagtgctaagaatgcaacgaatgtagaacagtctttcatgacgatggcagctgagattaaaaagcgaatgggtcccggagcaacagctggtggtgctgagaagtccaatgttaaaattcagagcactccagtcaagcagtcaggtggaggttgctgctaaaatttgcctccatccttttctcacagcaatgaatttgcaatctgaacccaagtgaaaaaacaaaattgcctgaattgtactgtatgtagctgcactacaacagattcttaccgtctccacaaaggtcagagattgtaaatggtcaatactgactttttttttattcccttgactcaagacagctaacttcattttcagaactgttttaaacctttgtgtgctggtttataaaataatgtgtgtaatccttgttgctttcctgataccagactgtttcccgtggttggttagaatatattttgttttgatgtttatattggcatgtttagatgtcaggtttagtcttctgaagatgaagttcagccattttgtatcaaacagcacaagcagtgtctgtcactttccatgcataaagtttagtgagatgttatatgtaagatctgatttgctagttcttccttgtagagttataaatggaaagattacactatctgattaatagtttcttcatactctgcatataatttgtggctgcagaatattgtaatttgttgcacactatgtaacaaaacaactgaagatatgtttaataaatattgtacttattggaagtaata

SEQ ID NO: 358664 - DNA, 1506 bp, Homo sapiens
cgccagggggagtccgagcgaagtcctagccagcgagtcagaggggaggggagcagggaggggccgagggtggggaggtgagggagtggggaatggggcgggcgacaacccttcaggtacgcatgccccagaggcgcggcgcttggcgggaagctgagtcctggccttgcgtcgcactgtctgtcctcagctcgcgtagccgcgctcgcgactccctttcccggcatgccaggcggtgcggccgccctctgggccgtgtaaaggcccctcggtctaaggcttccctatttcctggttcgccggcggccattttgggtggaagcgatagctgagtggcggcggctgctgattgtgttctaggggacggagtaggggaagacgtttgctctcccggaacagcctatctcattcctttctttcgattacccgtggcgcggagagtcagggcggcggctgcggcagcaagggcggcggtggcggcggcggcagctgcagtgacatgtccagcatgaatcccgaatatgattatttattcaagttacttctgattggcgactcaggggttggaaagtcttgccttcttcttaggtttgcagatgatacatatacagaaagctacatcagcacaattggtgtggatttcaaaataagaactatagagttagacgggaaaacaatcaagcttcaaatagaatttgctgattcccttggaattccgtttttggaaaccagtgctaagaatgcaacgaatgtagaacagtctttcatgacgatggcagctgagattaaaaagcgaatgggtcccggagcaacagctggtggtgctgagaagtccaatgttaaaattcagagcactccagtcaagcagtcaggtggaggttgctgctaaaatttgcctccatccttttctcacagcaatgaatttgcaatctgaacccaagtgaaaaaacaaaattgcctgaattgtactgtatgtagctgcactacaacagattcttaccgtctccacaaaggtcagagattgtaaatggtcaatactgactttttttttattcccttgactcaagacagctaacttcattttcagaactgttttaaacctttgtgtgctggtttataaaataatgtgtgtaatccttgttgctttcctgataccagactgtttcccgtggttggttagaatatattttgttttgatgtttatattggcatgtttagatgtcaggtttagtcttctgaagatgaagttcagccattttgtatcaaacagcacaagcagtgtctgtcactttccatgcataaagtttagtgagatgttatatgtaagatctgatttgctagttcttccttgtagagttataaatggaaagattacactatctgattaatagtttcttcatactctgcatataatttgtggctgcagaatattgtaatttgttgcacactatgtaacaaaacaactgaagatatgtttaataaatattgtacttattggaagtaata

SEQ ID NO: 358665 - DNA, 1254 bp, Homo sapiens
cgccagggggagtccgagcgaagtcctagccagcgagtcagaggggaggggagcagggaggggccgagggtggggaggtgagggagtggggaatggggcgggcgacaacccttcaggtacgcatgccccagaggcgcggcgcttggcgggaagctgagtcctggccttgcgtcgcactgtctgtcctcagctcgcgtagccgcgctcgcgactccctttcccggcatgccaggcggtgcggccgccctctgggccgtgtaaaggcccctcggtctaaggcttccctatttcctggttcgccggcggccattttgggtggaagcgatagctgagtggcggcggctgctgattgtgttctaggggacggagtaggggaagacgtttgctctcccggaacagcctatctcattcctttctttcgattacccgtggcgcggagagtcagggcggcggctgcggcagcaagggcggcggtggcggcggcggcagctgcagtgacatgtccagcatgaatcccgaatatgattatttattcaagttacttctgattggcgactcaggggttggaaagtcttgccttcttcttaggtttgcagatgatacatatacagaaagctacatcagcacaattggtgtggatttcaaaataagaactatagagttagacgggaaaacaatcaagcttcaaatatgggacacagcaggccaggaaagatttcgaacaatcacctccagttattacagaggagcccatggcatcatagttgtgtatgatgtgacagatcaggagtccttcaataatgttaaacagtggctgcaggaaatagatcgttatgccagtgaaaatgtcaacaaattgttggtagggaacaaatgtgatctgaccacaaagaaagtagtagactacacaacagcgaaggtatgtttaaagtttaattttcatactgaatttgaaggtgttgaattatgtatgggttctgcagtaacagtaaggccacagccttttaaaaatatgtgcactagaatactgtgacagtgacaatttgtgtagcatctgtttggatccaatgaacttagttcctcacgctccattatggatggtagaaatgcactaagaattagtgaaaaagatttttcagtgttaattgtgcctcattattctcttaggaatttgctgattcccttggaattccgtttttggaaaccagtgctaagaatgcaacgatcgagacataggtccggctcgattctata

SEQ ID NO: 358666 - DNA, 773 bp, Homo sapiens
agaagaaatttagagagtatcttggattcttgtcagtaagatttgttgtatcaacttagaaacactttcattttagcccatattatacaatcaatttctgtaatttttatgtttacttatgtattaagccttgaagattcagtttaaggagatttatttttttctttttactgaacatgaagttacttcataagtgccttgattggatgattggaactattagtaatttacccctcaaattatatctaataatctaagcattcattgtgctttcctaaaaacaatcaagtcctgatcttttctggatcatttgaacttaaatggagaaaaggcagagcatctatgtattatgagtcactgccaatcaaagatatcagaaatacttctctaaaattaatgtcatatttaatatatgataatttgcttctataattcctttcaggagcatacctattgaataaaatatagtgtatgtgtattgatttttgataatgtatacacatatttcagttgttttgaatctacctttataaaaagcttttggtactattttattacagttattactttttaatttttttttttttaagatgcaggatcttgctgtgttgtccaggctggtatcaaactcctgggctcaagtgatcctcctggatagctgggattatatgcatccgccaccatacctggctaagttttgtatttttagtagagacggggtttcagcatgttggccaggctggtttcaaactcctgacctcaggtgatctgcc

SEQ ID NO: 358667 - DNA, 4837 bp, Homo sapiens
aggcagctggggagcctgggctgtggccctaggagggggcgcggcggcgggctctctccttttgttgttgtttcctcagcctggggagctgaaggggagacgcgtctgggtggggctgctcggagcccgggcctggtggcccctggggctcccgggcgggcagggtagggcagagtagagcgggcttcaacatgatggcggccgaggccggcagtgaggagggcggcccggtaacagccggagctggaggaggcggcgcggcagcgggctccagtgcctatcccgcagtgtgtcgggtgaagatacccgcggccctgcctgtggcagccgccccctatcctgggctggtggagaccggagtggctggaactctgggtggcggagccgctttggggtcagagttcctaggagccgggtctgtggcaggggcactggggggagctggactgacagggggaggtactgctgctggcgtagctggtgctgctgctggcgtggccggtgctgctgttgctggacctagtggagacatggctctcaccaaactgcccacttcgttgcttgctgagactctcgggccaggcggcggttttccccctctgccccctcccccttacctgccccctttgggggcgggcctcgggacagtggacgaaggtgactctctggatggaccagaatacgaggaggaagaggtggccataccgttgaccgctcctccaactaaccagtaagttaagactgctgttcaggaatttgggaagctggctccagaaaagaagtggaaatgaaggggtggtatcacggaaaacttgacagaacgatagcagaagaacgcctcaggcaggcagggaagtctggcagttatcttataagagagagtgatcggaggccagggtcctttgtactttcatttcttagccagatgaatgttgtcaaccattttaggattattgctatgtgtggagattactacattggtggaagacgtttttcttcactgtcagacctaataggttattacagtcatgtttcttgtttgcttaaaggagaaaaattactttacccagttgcaccaccagagccagtagaagatagaaggcgtgtacgagctattctaccttacacaaaagtaccagacactgatgaaataagtttcttaaaaggagatatgttcattgttcataatgaattagaagatggatggatgtgggttacaaatttaagaacagatgaacaaggccttattgttgaagacctagtagaagaggtgggccgggaagaagatccacatgaaggaaaaatatggttccatgggaagatttccaaacaggaagcttataatttactaatgacagttggtcaagtctgcagttttcttgtgaggccctcagataatactcctggcgattattcactttatttccggaccaatgaaaatattcagcgatttaaaatatgtccaacgccaaacaatcagtttatgatgggaggccggtattataacagcattggggacatcatagatcactatcgaaaagaacagattgttgaaggatattatcttaaggaacctgtaccaatgcaggatcaagaacaagtactcaatgacacagtggatggcaaggaaatctataataccatccgtcgtaaaacaaaggatgccttttataaaaacattgttaagaaaggttatcttctgaaaaagggcaaaggaaaacgttggaaaaatttatattttatcttagagggtagtgatgcccaacttatttattttgaaagcgaaaaacgagctaccaaaccaaaaggattaatagatctcagtgtatgttctgtctatgtcgttcatgatagtctctttggcaggccaaactgttttcagatagtagttcagcactttagtgaagaacattacatcttttactttgcaggagaaactccagaacaagcagaggattggatgaaaggtctgcaggcattttgcaatttacggaaaagtagtccagggacatccaataaacgccttcgtcaggtcagcagccttgttttacatattgaagaagcccataaactcccagtaaaacattttactaatccatattgtaacatctacctgaatagtgtccaagtagcaaaaactcatgcaagggaagggcaaaacccagtatggtcagaagagtttgtctttgatgatcttcctcctgacatcaatagatttgaaataactcttagtaataaaacaaagaaaagcaaagatcctgatatcttatttatgcgctgccagttgagccgattacagaaagggcatgccacagatgaatggtttctgctcagctcccatataccattaaaaggtattgaaccagggtccctgcgtgttcgagcacgatactctatggaaaaaatcatgccagaagaagagtacagtgaatttaaagagcttatactgcaaaaggaacttcatgtagtctatgctttatcacatgtatgtggacaagaccgaacactactggccagcatcctactgaggatttttcttcacgaaaagcttgaatcgttgttgttatgcacactaaatgacagagaaataagcatggaagatgaagccactaccctatttcgagccacaacacttgcaagcaccttgatggagcagtatatgaaagccactgctacacagtttgttcatcatgctttgaaagactctattttaaagataatggaaagcaagcagtcttgtgagttaagtccatcaaagttagaaaaaaatgaagatgtgaacactaatttaacacacctattgaacatactttcagagcttgtggagaaaatattcatggcttcagaaatacttccaccgacattgagatatatttatgggtgtttacagaaatctgttcagcataagtggcctacaaataccaccatgagaacaagagttgttagtggttttgtttttcttcgactcatctgtcctgccatcctgaatccacggatgttcaatatcatctcagattctccatctcctattgctgcaagaacactgatattagtggctaaatctgtgcagaacttagcaaatcttgtggaatttggagctaaggagccctacatggaaggtgtcaatccattcatcaaaagcaacaaacatcgtatgatcatgtttttagatgaacttgggaatgtacctgaacttccggacactacagagcattctagaacggacctgtcccgtgatttagcagcattgcatgagatttgcgtggctcattcagatgaacttcgaacgctcagtaatgagcgtggtgcacagcagcacgtattgaaaaagcttctggctataacagaactgcttcaacaaaaacaaaaccagtatacaaaaaccaatgatgtcaggtagcagccttcgccccagtgttctgcatggattcagcatgtccaacatggtaattcacttcagtttaatgtctcctttgctcttgccaaaaaatagcacacttttccacattccagtgatgtgtgagctatgcaaacaaaatccaagattctgctggtgaataactatgccagcaaccttgtaagctatctgtgcaggatatttgcactatttccacatggaatcaatctttaacaacctctgagccttggtgtacagaccacctttcacaaaacgaaatgctatgactgtatcttgatatctcgaactttcaaaatatattttcagtacacccagttgccaaagttttgctgtctcttagagaaagaactatgaaatcaactgacaagaaacacattcttattgacaattgtgtataactggattgcagactgttcttactgtaactacttcctgattaggaatatgaccatttgactgttcaatgattatttgtatttacagtttccagagtttgtcattataataggaacaatctttgctgtatacttttaaaaaatactctgctatttctcttgctggaactgttgaaagaaaatatatagaatgatctattgctcatcagctttattttttaaacatacgacttattttgttgaaattgtcaaagactgtatttagatctcataatgctttgttaaatgtttacaagtaaatagtttgaattcagtaaatattattggttgttgtattgatcaatgcatgttacccattcaaccattttatagactaccaatttcttttatgttaactagaatgcttttgttaaaagttatttgttcattatttgtgctacccctttgattatgcagacaacctcatcagctgcctaacttatccatctttgaacttctgactacttgttgtatctgctggatatttagttcaactgtatagttttatttacttctgtatgtgtatttttgtgaagtattcacaaaggttaagttaaaataaaaccaagggatatcttgcataattgattacttctgtctaaaagagctaagcatttaatttatttattttcttcctccttcaggggcagtttaaaccttagcatcagagcaaggcccagggagaagctgaagctttagattagtatttttgctaatggcctcttttgaaaaggattttataaatgcaataattccttccctctcataattgtgcagggcagatagataggacatatggaacatacgtggcagaatgacattggtaatcaaagtgagtgagacaggaacccaaggaggtgttcccacagtaaggaaagccctagattccaagagcaacactttatgctattcctctaatgtataaaatacaggaaaaaaaaatgctaagggcttaaaagatgtctgcttagtagttccaagctac

SEQ ID NO: 358668 - DNA, 4630 bp, Homo sapiens
  misc_feature (4445)..(4445): n is a, c, g, or t
aggcagctggggagcctgggctgtggccctaggagggggcgcggcggcgggctctctccttttgttgttgtttcctcagcctggggagctgaaggggagacgcgtctgggtggggctgctcggagcccgggcctggtggcccctggggctcccgggcgggcagggtagggcagagtagagcgggcttcaacatgatggcggccgaggccggcagtgaggagggcggcccggtaacagccggagctggaggaggcggcgcggcagcgggctccagtgcctatcccgcagtgtgtcgggtgaagatacccgcggccctgcctgtggcagccgccccctatcctgggctggtggagaccggagtggctggaactctgggtggcggagccgctttggggtcagagttcctaggagccgggtctgtggcaggggcactggggggagctggactgacagggggaggtactgctgctggcgtagctggtgctgctgctggcgtggccggtgctgctgttgctggacctagtggagacatggctctcaccaaactgcccacttcgttgcttgctgagactctcgggccaggcggcggttttccccctctgccccctcccccttacctgccccctttgggggcgggcctcgggacagtggacgaaggtgactctctggatggaccagaatacgaggaggaagaggtggccataccgttgaccgctcctccaactaaccagtaagttaagactgctgttcaggaatttgggaagctggctccagaaaagaagtggaaatgaaggggtggtatcacggaaaacttgacagaacgatagcagaagaacgcctcaggcaggcagggaagtctggcagttatcttataagagagagtgatcggaggccagggtcctttgtactttcatttcttagccagatgaatgttgtcaaccattttaggattattgctatgtgtggagattactacattggtggaagacgtttttcttcactgtcagacctaataggttattacagtcatgtttcttgtttgcttaaaggagaaaaattactttacccagttgcaccaccagagccagtagaagatagaaggcgtgtacgagctattctaccttacacaaaagtaccagacactgatgaaataagtttcttaaaaggagatatgttcattgttcataatgaattagaagatggatggatgtgggttacaaatttaagaacagatgaacaaggccttattgttgaagacctagtagaagaggtgggccgggaagaagatccacatgaaggaaaaatatggttccatgggaagatttccaaacaggaagcttataatttactaatgacagttggtcaagtctgcagttttcttgtgaggccctcagataatactcctggcgattattcactttatttccggaccaatgaaaatattcagcgatttaaaatatgtccaacgccaaacaatcagtttatgatgggaggccggtattataacagcattggggacatcatagatcactatcgaaaagaacagattgttgaaggatattatcttaaggaacctgtaccaatgcaggatcaagaacaagtactcaatgacacagtggatggcaaggaaatctataataccatccgtcgtaaaacaaaggatgccttttataaaaacattgttaagaaaggttatcttctgaaaaagggcaaaggaaaacgttggaaaaatttatattttatcttagagggtagtgatgcccaacttatttattttgaaagcgaaaaacgagctaccaaaccaaaaggattaatagatctcagtgtatgttctgtctatgtcgttcatgatagtctctttggcaggccaaactgttttcagatagtagttcagcactttagtgaagaacattacatcttttactttgcaggagaaactccagaacaagcagaggattggatgaaaggtctgcaggcattttgcaatttacggaaaagtagtccagggacatccaataaacgccttcgtcaggtcagcagccttgttttacatattgaagaagcccataaactcccagtaaaacattttactaatccatattgtaacatctacctgaatagtgtccaagtagcaaaaactcatgcaagggaagggcaaaacccagtatggtcagaagagtttgtctttgatgatcttcctcctgacatcaatagatttgaaataactcttagtaataaaacaaagaaaagcaaagatcctgatatcttatttatgcgctgccagttgagccgattacagaaagggcatgccacagatgaatggtttctgctcagctcccatataccattaaaaggtattgaaccagggtccctgcgtgttcgagcacgatactctatggaaaaaatcatgccagaagaagagtacagtgaatttaaagagcttatactgcaaaaggaacttcatgtagtctatgctttatcacatgtatgtggacaagaccgaacactactggccagcatcctactgaggatttttcttcacgaaaagcttgaatcgttgttgttatgcacactaaatgacagagaaataagcatggaagatgaagccactaccctatttcgagccacaacacttgcaagcaccttgatggagcagtatatgaaagccactgctacacagtttgttcatcatgctttgaaagactctattttaaagataatggaaagcaagcagtcttgtgagttaagtccatcaaagttagaaaaaaatgaagatgtgaacactaatttaacacacctattgaacatactttcagagcttgtggagaaaatattcatggcttcagaaatacttccaccgacattgagatatatttatgggtgtttacagaaatctgttcagcataagtggcctacaaataccaccatgagaacaagagttgttagtggttttgtttttcttcgactcatctgtcctgccatcctgaatccacggatgttcaatatcatctcagattctccatctcctattgctgcaagaacactgatattagtggctaaatctgtgcagaacttagcaaatcttgtggaatttggagctaaggagccctacatggaaggtgtcaatccattcatcaaaagcaacaaacatcgtatgatcatgtttttagatgaacttgggaatgtacctgaacttccggacactacagagcattctagaacggacctgtcccgtgatttagcagcattgcatgagatttgcgtggctcattcagatgaacttcgaacgctcagtaatgagcgtggtgcacagcagcacgtattgaaaaagcttctggctataacagaactgcttcaacaaaaacaaaaccagtatacaaaaaccaatgatgtcaggtagcagccttcgccccagtgttctgcatggattcagcatgtccaacatggtaattcacttcagtttaatgtctcctttgctcttgccaaaaaatagcacacttttccacattccagtgatgtgtgagctatgcaaacaaaatccaagattctgctggtgaataactatgccagcaaccttgtaagctatctgtgcaggatatttgcactatttccacatggaatcaatctttaacaacctctgagccttggtgtacagaccacctttcacaaaacgaaatgctatgactgtatcttgatatctcgaactttcaaaatatattttcagtacacccagttgccaaagttttgctgtctcttagagaaagaactatgaaatcaactgacaagaaacacattcttattgacaattgtgtataactggattgcagactgttcttactgtaactacttcctgattaggaatatgaccatttgactgttcaatgattatttgtatttacagtttccagagtttgtcattataataggaacaatctttgctgtatacttttaaaaaatactctgctatttctcttgctggaactgttgaaagaaaatatatagaatgatctattgctcatcagctttattttttaaacatacgacttattttgttgaaattgtcaaagactgtatttagatctcataatgctttgttaaatgtttacaagtaaatagtttgaattcagtaaatattattggttgttgtattgatcaatgcatgttacccattcaaccattttatagactaccaatttcttttatgttaactagaatgcttttgttaaaagttatttgttcattatttgtgctacccctttgattatgcagacaacctcatcagctgcctaacttatccatctttgaacttctgactacttgttgtatctgctggatatttagttcaactgtatagttttatttacttctgtatgtgtatttttgtgaagtattcacaaaggttaagttaaaataaaaccaagggatatcttgcataatcgtaaaanaaaagaaaaaaacaaaaaccaaaaacttttgtttgggcggcgcatgaggccctgagaaaaagtttttaaacccctccgttgggggcccggggccccagtggtttacggacaccgggcacacgcggtgccccaaggaaaaccccggggaaacaaggcggctggctttttcaccaaataaaaaaggg

SEQ ID NO: 358669 - DNA, 4610 bp, Homo sapiens
catttataaacaattttcactccaatatgtagaataactttcatgatgggctttattagagggtagtgaattctttgtagattgaaaaaccatttggacattgtctagtctgtgaagatgtttcgggcattcagttagtggttagatttaaggaatttctccttctaaaattctaattacagttccccaaacacattgtctctgattcactgatgtattaccattgcctagaatagtgtctggcattagtaggcattcagaaaatgtttgttgagtaaatgaatgtttctatgtttatagttttccctcttccttgacattcttgccctgatagattgccttgtaaaatttgattcatctttatgagctcagttcatatgtcatccctgtttcacagaggatttatgcctttctggagtctcttaggcaaaattgtttccttctgtatttccatagcaccttgctaattctgcattctgttacactgtctaaaattaataattgtgtaaaactcttctacaagagattaactccttttgggcagtgacacaatgataatgctattcatttttatagtttttttttttaagcctactcccttggatatagtaacattcagtgagtgtttgattttagtttgattaggtatttaatgagtgaggaccaaattgtgagaagtaaatccacatgtagttagaccatttttctccataatagtggaatgagtaacactattgtatcttaaatcagaggaatatagaataaaataaagttcaaaacatagtaaaagggggatgtcttttatattgaaagtagaagttgatgttcactttttacgggctcagaatgtcttactgaagaggtagcatttgagatagttccttcccagattggttaggtatttatctaacaagtagaaagcaaaaagtggaaagtacattctaagaacaaaaagtacaagctacagtggtgggagattggcaaataggaagttatgtgtgaccatggtataggaaccaaaaaacaattggtagtatgagacaggaaatgtagacttgagtcctgtggtaaacgacttcagttgcagaatgagaaatttgtaggcagtagagaggtgttttttttttgtttggtttttcttaatgtagggcacagctgctgttgaaactgatgtatccagattagagtggtggagtaggacataattatattagttgggctgttgtttaagaaaagtcgataagagggcctgagttagggtaatggcaacaagaaaagattaagagaggtttggaaagatatttactgaacagaaacatctttttttatataaacataaataaggatagtgtggggatatgtttgcagatacgattttcatgaattttaataaaaattgattaatagttaattatataaaatactgtcttaatgtcttccctttagggccgggaagaagatccacatgaaggaaaaatatggttccatgggaagatttccaaacaggaagcttataatttactaatgacagttggtcaagtctgcagttttcttgtgaggccctcagataatactcctggcgattattcactttatttccggaccaatgaaaatattcagcgatttaaaatatgtccaacgccaaacaatcagtttatgatgggaggccggtattataacagcattggggacatcatagatcactatcgaaaagaacagattgttgaaggatattatcttaaggaacctgtaccaatgcaggatcaagaacaagtactcaatgacacagtggatggcaaggaaatctataataccatccgtcgtaaaacaaaggatgccttttataaaaacattgttaagaaaggttatcttctgaaaaagggcaaaggaaaacgttggaaaaatttatattttatcttagagggtagtgatgcccaacttatttattttgaaagcgaaaaacgagctaccaaaccaaaaggattaatagatctcagtgtatgttctgtctatgtcgttcatgatagtctctttggcaggccaaactgttttcagatagtagttcagcactttagtgaagaacattacatcttttactttgcaggagaaactccagaacaagcagaggattggatgaaaggtctgcaggcattttgcaatttacggaaaagtagtccagggacatccaataaacgccttcgtcaggtcagcagccttgttttacatattgaagaagcccataaactcccagtaaaacattttactaatccatattgtaacatctacctgaatagtgtccaagtagcaaaaactcatgcaagggaagggcaaaacccagtatggtcagaagagtttgtctttgatgatcttcctcctgacatcaatagatttgaaataactcttagtaataaaacaaagaaaagcaaagatcctgatatcttatttatgcgctgccagttgagccgattacagaaagggcatgccacagatgaatggtttctgctcagctcccatataccattaaaaggtattgaaccagggtccctgcgtgttcgagcacgatactctatggaaaaaatcatgccagaagaagagtacagtgaatttaaagagcttatactgcaaaaggaacttcatgtagtctatgctttatcacatgtatgtggacaagaccgaacactactggccagcatcctactgaggatttttcttcacgaaaagcttgaatcgttgttgttatgcacactaaatgacagagaaataagcatggaagatgaagccactaccctatttcgagccacaacacttgcaagcaccttgatggagcagtatatgaaagccactgctacacagtttgttcatcatgctttgaaagactctattttaaagataatggaaagcaagcagtcttgtgagttaagtccatcaaagttagaaaaaaatgaagatgtgaacactaatttaacacacctattgaacatactttcagagcttgtggagaaaatattcatggcttcagaaatacttccaccgacattgagatatatttatgggtgtttacagaaatctgttcagcataagtggcctacaaataccaccatgagaacaagagttgttagtggttttgtttttcttcgactcatctgtcctgccatcctgaatccacggatgttcaatatcatctcagattctccatctcctattgctgcaagaacactgatattagtggctaaatctgtgcagaacttagcaaatcttgtggaatttggagctaaggagccctacatggaaggtgtcaatccattcatcaaaagcaacaaacatcgtatgatcatgtttttagatgaacttgggaatgtacctgaacttccggacactacagagcattctagaacggacctgtcccgtgatttagcagcattgcatgagatttgcgtggctcattcagatgaacttcgaacgctcagtaatgagcgtggtgcacagcagcacgtattgaaaaagcttctggctataacagaactgcttcaacaaaaacaaaaccagtatacaaaaaccaatgatgtcaggtagcagccttcgccccagtgttctgcatggattcagcatgtccaacatggtaattcacttcagtttaatgtctcctttgctcttgccaaaaaatagcacacttttccacattccagtgatgtgtgagctatgcaaacaaaatccaagattctgctggtgaataactatgccagcaaccttgtaagctatctgtgcaggatatttgcactatttccacatggaatcaatctttaacaacctctgagccttggtgtacagaccacctttcacaaaacgaaatgctatgactgtatcttgatatctcgaactttcaaaatatattttcagtacacccagttgccaaagttttgctgtctcttagagaaagaactatgaaatcaactgacaagaaacacattcttattgacaattgtgtataactggattgcagactgttcttactgtaactacttcctgattaggaatatgaccatttgactgttcaatgattatttgtatttacagtttccagagtttgtcattataataggaacaatctttgctgtatacttttaaaaaatactctgctatttctcttgctggaactgttgaaagaaaatatatagaatgatctattgctcatcagctttattttttaaacatacgacttattttgttgaaattgtcaaagactgtatttagatctcataatgctttgttaaatgtttacaagtaaatagtttgaattcagtaaatattattggttgttgtattgatcaatgcatgttacccattcaaccattttatagactaccaatttcttttatgttaactagaatgcttttgttaaaagttatttgttcattatttgtgctacccctttgattatgcagacaacctcatcagctgcctaacttatccatctttgaacttctgactacttgttgtatctgctggatatttagttcaactgtatagttttatttacttctgtatgtgtatttttgtgaagtattcacaaaggttaagttaaaataaaaccaagggatatcttgcataat

SEQ ID NO: 358670 - DNA, 3811 bp, Homo sapiens
gtaaaatttaaatacttaggttattgtatgctctatgtcttgactatgatgccttttataataatttctaaaggcttaatttaagaatacagaatataaaatacatagcaacctagtttgataggctgttagctcaaatagagttgagaacactaagtccttcttttctttcagttcttgatggtgctatccactcattcttatcacccaatcttatattctgactttcagcaaagtaagagtcaatatcttgattttatttgaggagagaatttatcagatgttataggaaaattcagaaatgaattcattaattttttcagggaagttctggagtaggctctatctgtactactcctccttccccttaccccacaaaaagaaaaaaaaagacctataacagtctgttattatcaggattaaaaattgttgccatttttgtattggtaatgaaaattgtagtttatatttgatagtttctagttttactatctttagttgaaattaagtataatatgtatataaaatgtattaaaatgtaataagaatgagatgatttgattaattgcatttattttatcactttgaattaaatttactatattggttgtttaattttgatcatatgataacagcaaaaaggactttatttatatatctaatttattctctttttaagatggttccatgggaagatttccaaacaggaagcttataatttactaatgacagttggtcaagtctgcagttttcttgtgaggccctcagataatactcctggcgattattcactttatttccggaccaatgaaaatattcagcgatttaaaatatgtccaacgccaaacaatcagtttatgatgggaggccggtattataacagcattggggacatcatagatcactatcgaaaagaacagattgttgaaggatattatcttaaggaacctgtaccaatgcaggatcaagaacaagtactcaatgacacagtggatggcaaggaaatctataataccatccgtcgtaaaacaaaggatgccttttataaaaacattgttaagaaaggttatcttctgaaaaagggcaaaggaaaacgttggaaaaatttatattttatcttagagggtagtgatgcccaacttatttattttgaaagcgaaaaacgagctaccaaaccaaaaggattaatagatctcagtgtatgttctgtctatgtcgttcatgatagtctctttggcaggccaaactgttttcagatagtagttcagcactttagtgaagaacattacatcttttactttgcaggagaaactccagaacaagcagaggattggatgaaaggtctgcaggcattttgcaatttacggaaaagtagtccagggacatccaataaacgccttcgtcaggtcagcagccttgttttacatattgaagaagcccataaactcccagtaaaacattttactaatccatattgtaacatctacctgaatagtgtccaagtagcaaaaactcatgcaagggaagggcaaaacccagtatggtcagaagagtttgtctttgatgatcttcctcctgacatcaatagatttgaaataactcttagtaataaaacaaagaaaagcaaagatcctgatatcttatttatgcgctgccagttgagccgattacagaaagggcatgccacagatgaatggtttctgctcagctcccatataccattaaaaggtattgaaccagggtccctgcgtgttcgagcacgatactctatggaaaaaatcatgccagaagaagagtacagtgaatttaaagagcttatactgcaaaaggaacttcatgtagtctatgctttatcacatgtatgtggacaagaccgaacactactggccagcatcctactgaggatttttcttcacgaaaagcttgaatcgttgttgttatgcacactaaatgacagagaaataagcatggaagatgaagccactaccctatttcgagccacaacacttgcaagcaccttgatggagcagtatatgaaagccactgctacacagtttgttcatcatgctttgaaagactctattttaaagataatggaaagcaagcagtcttgtgagttaagtccatcaaagttagaaaaaaatgaagatgtgaacactaatttaacacacctattgaacatactttcagagcttgtggagaaaatattcatggcttcagaaatacttccaccgacattgagatatatttatgggtgtttacagaaatctgttcagcataagtggcctacaaataccaccatgagaacaagagttgttagtggttttgtttttcttcgactcatctgtcctgccatcctgaatccacggatgttcaatatcatctcagattctccatctcctattgctgcaagaacactgatattagtggctaaatctgtgcagaacttagcaaatcttgtggaatttggagctaaggagccctacatggaaggtgtcaatccattcatcaaaagcaacaaacatcgtatgatcatgtttttagatgaacttgggaatgtacctgaacttccggacactacagagcattctagaacggacctgtcccgtgatttagcagcattgcatgagatttgcgtggctcattcagatgaacttcgaacgctcagtaatgagcgtggtgcacagcagcacgtattgaaaaagcttctggctataacagaactgcttcaacaaaaacaaaaccagtatacaaaaaccaatgatgtcaggtagcagccttcgccccagtgttctgcatggattcagcatgtccaacatggtaattcacttcagtttaatgtctcctttgctcttgccaaaaaatagcacacttttccacattccagtgatgtgtgagctatgcaaacaaaatccaagattctgctggtgaataactatgccagcaaccttgtaagctatctgtgcaggatatttgcactatttccacatggaatcaatctttaacaacctctgagccttggtgtacagaccacctttcacaaaacgaaatgctatgactgtatcttgatatctcgaactttcaaaatatattttcagtacacccagttgccaaagttttgctgtctcttagagaaagaactatgaaatcaactgacaagaaacacattcttattgacaattgtgtataactggattgcagactgttcttactgtaactacttcctgattaggaatatgaccatttgactgttcaatgattatttgtatttacagtttccagagtttgtcattataataggaacaatctttgctgtatacttttaaaaaatactctgctatttctcttgctggaactgttgaaagaaaatatatagaatgatctattgctcatcagctttattttttaaacatacgacttattttgttgaaattgtcaaagactgtatttagatctcataatgctttgttaaatgtttacaagtaaatagtttgaattcagtaaatattattggttgttgtattgatcaatgcatgttacccattcaaccattttatagactaccaatttcttttatgttaactagaatgcttttgttaaaagttatttgttcattatttgtgctacccctttgattatgcagacaacctcatcagctgcctaacttatccatctttgaacttctgactacttgttgtatctgctggatatttagttcaactgtatagttttatttacttctgtatgtgtatttttgtgaagtattcacaaaggttaagttaaaataaaaccaagggatatcttgcataat

SEQ ID NO: 358671 - DNA, 3028 bp, Homo sapiens
gaagacttagtagaagagtgggcccgggaagaagatccacatgaaggaaaaatatggttccatgggaagatttccaaacaggaagcttataatttactaatgacagttggtcaagtctgcagttttcttgtgaggccctcagataatactcctggcgattattcactttatttccggaccaatgaaaatattcagcgatttaaaatatgtccaacgccaaacaatcagtttatgatgggaggccggtattataacagcattggggacatcatagatcactatcgaaaagaacagattgttgaaggatattatcttaaggaacctgtaccaatgcaggatcaagaacaagtactcaatgacacagtggatggcaaggaaatctataataccatccgtcgtaaaacaaaggatgccttttataaaaacattgttaagaaaggttatcttctgaaaaagggccaaactgttttcagatagtagttcagcactttagtgaagaacattacatcttttactttgcaggagaaactccagaacaagcagaggattggatgaaaggtctgcaggcattttgcaatttacggaaaagtagtccagggacatccaataaacgccttcgtcaggtcagcagccttgttttacatattgaagaagcccataaactcccagtaaaacattttactaatccatattgtaacatctacctgaatagtgtccaagtagcaaaaactcatgcaagggaagggcaaaacccagtatggtcagaagagtttgtctttgatgatcttcctcctgacatcaatagatttgaaataactcttagtaataaaacaaagaaaagcaaagatcctgatatcttatttatgcgctgccagttgagccgattacagaaagggcatgccacagatgaatggtttctgctcagctcccatataccattaaaaggtattgaaccagggtccctgcgtgttcgagcacgatactctatggaaaaaatcatgccagaagaagagtacagtgaatttaaagagcttatactgcaaaaggaacttcatgtagtctatgctttatcacatgtatgtggacaagaccgaacactactggccagcatcctactgaggatttttcttcacgaaaagcttgaatcgttgttgttatgcacactaaatgacagagaaataagcatggaagatgaagccactaccctatttcgagccacaacacttgcaagcaccttgatggagcagtatatgaaagccactgctacacagtttgttcatcatgctttgaaagactctattttaaagataatggaaagcaagcagtcttgtgagttaagtccatcaaagttagaaaaaaatgaagatgtgaacactaatttaacacacctattgaacatactttcagagcttgtggagaaaatattcatggcttcagaaatacttccaccgacattgagatatatttatgggtgtttacagaaatctgttcagcataagtggcctacaaataccaccatgagaacaagagttgttagtggttttgtttttcttcgactcatctgtcctgccatcctgaatccacggatgttcaatatcatctcagattctccatctcctattgctgcaagaacactgatattagtggctaaatctgtgcagaacttagcaaatcttgtggaatttggagctaaggagccctacatggaaggtgtcaatccattcatcaaaagcaacaaacatcgtatgatcatgtttttagatgaacttgggaatgtacctgaacttccggacactacagagcattctagaacggacctgtcccgtgatttagcagcattgcatgagatttgcgtggctcattcagatgaacttcgaacgctcagtaatgagcgtggtgcacagcagcacgtattgaaaaagcttctggctataacagaactgcttcaacaaaaacaaaaccagtatacaaaaaccaatgatgtcaggtagcagccttcgccccagtgttctgcatggattcagcatgtccaacatggtaattcacttcagtttaatgtctcctttgctcttgccaaaaaatagcacacttttccacattccagtgatgtgtgagctatgcaaacaaaatccaagattctgctggtgaataactatgccagcaaccttgtaagctatctgtgcaggatatttgcactatttccacatggaatcaatctttaacaacctctgagccttggtgtacagaccacctttcacaaaacgaaatgctatgactgtatcttgatatctcgaactttcaaaatatattttcagtacacccagttgccaaagttttgctgtctcttagagaaagaactatgaaatcaactgacaagaaacacattcttattgacaattgtgtataactggattgcagactgttcttactgtaactacttcctgattaggaatatgaccatttgactgttcaatgattatttgtatttacagtttccagagtttgtcattataataggaacaatctttgctgtatacttttaaaaaatactctgctatttctcttgctggaactgttgaaagaaaatatatagaatgatctattgctcatcagctttattttttaaacatacgacttattttgttgaaattgtcaaagactgtatttagatctcataatgctttgttaaatgtttacaagtaaatagtttgaattcagtaaatattattggttgttgtattgatcaatgcatgttacccattcaaccattttatagactaccaatttcttttatgttaactagaatgcttttgttaaaagttatttgttcattatttgtgctacccctttgattatgcagacaacctcatcagctgcctaacttatccatctttgaacttctgactacttgttgtatctgctggatatttagttcaactgtatagttttatttacttctgtatgtgtatttttgtgaagtattcacaaaggttaagttaaaataaaaccaagggatatcttgcataat

SEQ ID NO: 358672 - DNA, 4687 bp, Homo sapiens
aggcagctggggagcctgggctgtggccctaggagggggcgcggcggcgggctctctccttttgttgttgtttcctcagcctggggagctgaaggggagacgcgtctgggtggggctgctcggagcccgggcctggtggcccctggggctcccgggcgggcagggtagggcagagtagagcgggcttcaacatgatggcggccgaggccggcagtgaggagggcggcccggtaacagccggagctggaggaggcggcgcggcagcgggctccagtgcctatcccgcagtgtgtcgggtgaagatacccgcggccctgcctgtggcagccgccccctatcctgggctggtggagaccggagtggctggaactctgggtggcggagccgctttggggtcagagttcctaggagccgggtctgtggcaggggcactggggggagctggactgacagggggaggtactgctgctggcgtagctggtgctgctgctggcgtggccggtgctgctgttgctggacctagtggagacatggctctcaccaaactgcccacttcgttgcttgctgagactctcgggccaggcggcggttttccccctctgccccctcccccttacctgccccctttgggggcgggcctcgggacagtggacgaaggtgactctctggatggaccagaatacgaggaggaagaggtggccataccgttgaccgctcctccaactaaccagtggtatcacggaaaacttgacagaacgatagcagaagaacgcctcaggcaggcagggaagtctggcagttatcttataagagagagtgatcggaggccagggtcctttgtactttcatttcttagccagatgaatgttgtcaaccattttaggattattgctatgtgtggagattactacattggtggaagacgtttttcttcactgtcagacctaataggttattacagtcatgtttcttgtttgcttaaaggagaaaaattactttacccagttgcaccaccagagccagtagaagatagaaggcgtgtacgagctattctaccttacacaaaagtaccagacactgatgaaataagtttcttaaaaggagatatgttcattgttcataatgaattagaagatggatggatgtgggttacaaatttaagaacagatgaacaaggccttattgttgaagacctagtagaagaggtgggccgggaagaagatccacatgaaggaaaaatatggttccatgggaagatttccaaacaggaagcttataatttactaatgacagttggtcaagtctgcagttttcttgtgaggccctcagataatactcctggcgattattcactttatttccggaccaatgaaaatattcagcgatttaaaatatgtccaacgccaaacaatcagtttatgatgggaggccggtattataacagcattggggacatcatagatcactatcgaaaagaacagattgttgaaggatattatcttaaggaacctgtaccaatgcaggatcaagaacaagtactcaatgacacagtggatggcaaggaaatctataataccatccgtcgtaaaacaaaggatgccttttataaaaacattgttaagaaaggttatcttctgaaaaagggcaaaggaaaacgttggaaaaatttatattttatcttagagggtagtgatgcccaacttatttattttgaaagcgaaaaacgagctaccaaaccaaaaggattaatagatctcagtgtatgttctgtctatgtcgttcatgatagtctctttggcaggccaaactgttttcagatagtagttcagcactttagtgaagaacattacatcttttactttgcaggagaaactccagaacaagcagaggattggatgaaaggtctgcaggcattttgcaatttacggaaaagtagtccagggacatccaataaacgccttcgtcaggtcagcagccttgttttacatattgaagaagcccataaactcccagtaaaacattttactaatccatattgtaacatctacctgaatagtgtccaagtagcaaaaactcatgcaagggaagggcaaaacccagtatggtcagaagagtttgtctttgatgatcttcctcctgacatcaatagatttgaaataactcttagtaataaaacaaagaaaagcaaagatcctgatatcttatttatgcgctgccagttgagccgattacagaaagggcatgccacagatgaatggtttctgctcagctcccatataccattaaaaggtattgaaccagggtccctgcgtgttcgagcacgatactctatggaaaaaatcatgccagaagaagagtacagtgaatttaaagaggtattaaattatttatcagtcttgtttttgttggaattaacagaaacatttaacatttaataaaagatccattaaggtaaacatagtaattcatagcttagtagcacaatgatgccagagattttaaaccttgttttatactgtaattttggtagaaataagtagactacgaattcattctattttaaataaatttattcaatgggacatcattttaaatataagaacttgtgaaagaccatatttcctgttagtctcatggagcatgcttataatgctacgtactttaaacaatcttttaaaatgtcattttagcttatactgcaaaaggaacttcatgtagtctatgctttatcacatgtatgtggacaagaccgaacactactggccagcatcctactgaggatttttcttcacgaaaagcttgaatcgttgttgttatgcacactaaatgacagagaaataagcatggaagatgaagccactaccctatttcgagccacaacacttgcaagcaccttgatggagcagtatatgaaagccactgctacacagtttgttcatcatgctttgaaagactctattttaaagataatggaaagcaagcagtcttgtgagttaagtccatcaaagttagaaaaaaatgaagatgtgaacactaatttaacacacctattgaacatactttcagagcttgtggagaaaatattcatggcttcagaaatacttccaccgacattgagatatatttatgggtgtttacagaaatctgttcagcataagtggcctacaaataccaccatgagaacaagagttgttagtggttttgtttttcttcgactcatctgtcctgccatcctgaatccacggatgttcaatatcatctcagattctccatctcctattgctgcaagaacactgatattagtggctaaatctgtgcagaacttagcaaatcttgtggaatttggagctaaggagccctacatggaaggtgtcaatccattcatcaaaagcaacaaacatcgtatgatcatgtttttagatgaacttgggaatgtacctgaacttccggacactacagagcattctagaacggacctgtcccgtgatttagcagcattgcatgagatttgcgtggctcattcagatgaacttcgaacgctcagtaatgagcgtggtgcacagcagcacgtattgaaaaagcttctggctataacagaactgcttcaacaaaaacaaaaccagtatacaaaaaccaatgatgtcaggtagcagccttcgccccagtgttctgcatggattcagcatgtccaacatggtaattcacttcagtttaatgtctcctttgctcttgccaaaaaatagcacacttttccacattccagtgatgtgtgagctatgcaaacaaaatccaagattctgctggtgaataactatgccagcaaccttgtaagctatctgtgcaggatatttgcactatttccacatggaatcaatctttaacaacctctgagccttggtgtacagaccacctttcacaaaacgaaatgctatgactgtatcttgatatctcgaactttcaaaatatattttcagtacacccagttgccaaagttttgctgtctcttagagaaagaactatgaaatcaactgacaagaaacacattcttattgacaattgtgtataactggattgcagactgttcttactgtaactacttcctgattaggaatatgaccatttgactgttcaatgattatttgtatttacagtttccagagtttgtcattataataggaacaatctttgctgtatacttttaaaaaatactctgctatttctcttgctggaactgttgaaagaaaatatatagaatgatctattgctcatcagctttattttttaaacatacgacttattttgttgaaattgtcaaagactgtatttagatctcataatgctttgttaaatgtttacaagtaaatagtttgaattcagtaaatattattggttgttgtattgatcaatgcatgttacccattcaaccattttatagactaccaatttcttttatgttaactagaatgcttttgttaaaagttatttgttcattatttgtgctacccctttgattatgcagacaacctcatcagctgcctaacttatccatctttgaacttctgactacttgttgtatctgctggatatttagttcaactgtatagttttatttacttctgtatgtgtatttttgtgaagtattcacaaaggttaagttaaaataaaaccaagggatatcttgcataat

SEQ ID NO: 358673 - DNA, 2894 bp, Homo sapiens
caatataagagggaatggtctaagggcatccaaactaacaattacttagaaaaataagctgtggaactcttttatagaaatagaatcttccagataagtattatataacatacgggattttaatttgagtagtgacagttgtttacttatattaataaagaattttcttcttaacttcattttctctttatcattgttttatggtagaaaaggtgtatttcattatttctccaggaatatactgggagaaataacttgtaaaataaaattgcattgtttttatcttttaggtgggaagaattattttaaatgtctgaatgttttaagtatgtcatatacaaatatataaccaaagctcacattttctgaaaaaaaaggggaaaataagtcattatttttggctttgtatcttagagtaattgcttttgaaatgtagtgcaattctagaaatctggggtaatatatatatatatatttttttttttttaggtcagcagccttgttttacatattgaagaagcccataaactcccagtaaaacattttactaatccatattgtaacatctacctgaatagtgtccaagtagcaaaaactcatgcaagggaagggcaaaacccagtatggtcagaagagtttgtctttgatgatcttcctcctgacatcaatagatttgaaataactcttagtaataaaacaaagaaaagcaaagatcctgatatcttatttatgcgctgccagttgagccgattacagaaagggcatgccacagatgaatggtttctgctcagctcccatataccattaaaaggtattgaaccagggtccctgcgtgttcgagcacgatactctatggaaaaaatcatgccagaagaagagtacagtgaatttaaagagcttatactgcaaaaggaacttcatgtagtctatgctttatcacatgtatgtggacaagaccgaacactactggccagcatcctactgaggatttttcttcacgaaaagcttgaatcgttgttgttatgcacactaaatgacagagaaataagcatggaagatgaagccactaccctatttcgagccacaacacttgcaagcaccttgatggagcagtatatgaaagccactgctacacagtttgttcatcatgctttgaaagactctattttaaagataatggaaagcaagcagtcttgtgagttaagtccatcaaagttagaaaaaaatgaagatgtgaacactaatttaacacacctattgaacatactttcagagcttgtggagaaaatattcatggcttcagaaatacttccaccgacattgagatatatttatgggtgtttacagaaatctgttcagcataagtggcctacaaataccaccatgagaacaagagttgttagtggttttgtttttcttcgactcatctgtcctgccatcctgaatccacggatgttcaatatcatctcagattctccatctcctattgctgcaagaacactgatattagtggctaaatctgtgcagaacttagcaaatcttgtggaatttggagctaaggagccctacatggaaggtgtcaatccattcatcaaaagcaacaaacatcgtatgatcatgtttttagatgaacttgggaatgtacctgaacttccggacactacagagcattctagaacggacctgtcccgtgatttagcagcattgcatgagatttgcgtggctcattcagatgaacttcgaacgctcagtaatgagcgtggtgcacagcagcacgtattgaaaaagcttctggctataacagaactgcttcaacaaaaacaaaaccagtatacaaaaaccaatgatgtcaggtagcagccttcgccccagtgttctgcatggattcagcatgtccaacatggtaattcacttcagtttaatgtctcctttgctcttgccaaaaaatagcacacttttccacattccagtgatgtgtgagctatgcaaacaaaatccaagattctgctggtgaataactatgccagcaaccttgtaagctatctgtgcaggatatttgcactatttccacatggaatcaatctttaacaacctctgagccttggtgtacagaccacctttcacaaaacgaaatgctatgactgtatcttgatatctcgaactttcaaaatatattttcagtacacccagttgccaaagttttgctgtctcttagagaaagaactatgaaatcaactgacaagaaacacattcttattgacaattgtgtataactggattgcagactgttcttactgtaactacttcctgattaggaatatgaccatttgactgttcaatgattatttgtatttacagtttccagagtttgtcattataataggaacaatctttgctgtatacttttaaaaaatactctgctatttctcttgctggaactgttgaaagaaaatatatagaatgatctattgctcatcagctttattttttaaacatacgacttattttgttgaaattgtcaaagactgtatttagatctcataatgctttgttaaatgtttacaagtaaatagtttgaattcagtaaatattattggttgttgtattgatcaatgcatgttacccattcaaccattttatagactaccaatttcttttatgttaactagaatgcttttgttaaaagttatttgttcattatttgtgctacccctttgattatgcagacaacctcatcagctgcctaacttatccatctttgaacttctgactacttgttgtatctgctggatatttagttcaactgtatagttttatttacttctgtatgtgtatttttgtgaagtattcacaaaggttaagttaaaataaaaccaagggatatcttgcataat

SEQ ID NO: 358674 - DNA, 4460 bp, Homo sapiens
aggcagctggggagcctgggctgtggccctaggagggggcgcggcggcgggctctctccttttgttgttgtttcctcagcctggggagctgaaggggagacgcgtctgggtggggctgctcggagcccgggcctggtggcccctggggctcccgggcgggcagggtagggcagagtagagcgggcttcaacatgatggcggccgaggccggcagtgaggagggcggcccggtaacagccggagctggaggaggcggcgcggcagcgggctccagtgcctatcccgcagtgtgtcgggtgaagatacccgcggccctgcctgtggcagccgccccctatcctgggctggtggagaccggagtggctggaactctgggtggcggagccgctttggggtcagagttcctaggagccgggtctgtggcaggggcactggggggagctggactgacagggggaggtactgctgctggcgtagctggtgctgctgctggcgtggccggtgctgctgttgctggacctagtggagacatggctctcaccaaactgcccacttcgttgcttgctgagactctcgggccaggcggcggttttccccctctgccccctcccccttacctgccccctttgggggcgggcctcgggacagtggacgaaggtgactctctggatggaccagaatacgaggaggaagaggtggccataccgttgaccgctcctccaactaaccagtggtatcacggaaaacttgacagaacgatagcagaagaacgcctcaggcaggcagggaagtctggcagttatcttataagagagagtgatcggaggccagggtcctttgtactttcatttcttagccagatgaatgttgtcaaccattttaggattattgctatgtgtggagattactacattggtggaagacgtttttcttcactgtcagacctaataggttattacagtcatgtttcttgtttgcttaaaggagaaaaattactttacccagttgcaccaccagagccagtagaagatagaaggcgtgtacgagctattctaccttacacaaaagtaccagacactgatgaaataagtttcttaaaaggagatatgttcattgttcataatgaattagaagatggatggatgtgggttacaaatttaagaacagatgaacaaggccttattgttgaagacctagtagaagaggtgggccgggaagaagatccacatgaaggaaaaatatggttccatgggaagatttccaaacaggaagcttataatttactaatgacagttggtcaagtctgcagttttcttgtgaggccctcagataatactcctggcgattattcactttatttccggaccaatgaaaatattcagcgatttaaaatatgtccaacgccaaacaatcagtttatgatgggaggccggtattataacagcattggggacatcatagatcactatcgaaaagaacagattgttgaaggatattatcttaaggaacctgtaccaatgcaggatcaagaacaagtactcaatgacacagtggatggcaaggaaatctataataccatccgtcgtaaaacaaaggatgccttttataaaaacattgttaagaaaggttatcttctgaaaaagggcaaaggaaaacgttggaaaaatttatattttatcttagagggtagtgatgcccaacttatttattttgaaagcgaaaaacgagctaccaaaccaaaaggattaatagatctcagtgtatgttctgtctatgtcgttcatgatagtctctttggcaggccaaactgttttcagatagtagttcagcactttagtgaagaacattacatcttttactttgcaggagaaactccagaacaagcagaggattggatgaaaggtctgcaggcattttgcaatttacggaaaagtagtccagggacatccaataaacgccttcgtcaggtcagcagccttgttttacatattgaagaagcccataaactcccagtaaaacattttactaatccatattgtaacatctacctgaatagtgtccaagtagcaaaaactcatgcaagggaagggcaaaacccagtatggtcagaagagtttgtctttgatgatcttcctcctgacatcaatagatttgaaataactcttagtaataaaacaaagaaaagcaaagatcctgatatcttatttatgcgctgccagttgagccgattacagaaagggcatgccacagatgaatggtttctgctcagctcccatataccattaaaaggtattgaaccagggtccctgcgtgttcgagcacgatactctatggaaaaaatcatgccagaagaagagtacagtgaatttaaagagcttatactgcaaaaggaacttcatgtagtctatgctttatcacatgtatgtggacaagaccgaacactactggccagcatcctactgaggatttttcttcacgaaaagcttgaatcgttgttgttatgcacactaaatgacagagaaataagcatggaagatgaagccactaccctatttcgagccacaacacttgcaagcaccttgatggagcagtatatgaaagccactgctacacagtttgttcatcatgctttgaaagactctattttaaagataatggaaagcaagcagtcttgtgagttaagtccatcaaagttagaaaaaaatgaagatgtgaacactaatttaacacacctattgaacatactttcagagcttgtggagaaaatattcatggcttcagaaatacttccaccgacattgagatatatttatgggtgtttacagaaatctgttcagcataagtggcctacaaataccaccatgagaacaagagttgttagtggttttgtttttcttcgactcatctgtcctgccatcctgaatccacggatgttcaatatcatctcagattctccatctcctattgctgcaagaacactgatattagtggctaaatctgtgcagaacttagcaaatcttgtggaatttggagctaaggagccctacatggaaggtgtcaatccattcatcaaaagcaacaaacatcgtatgatcatgtttttagatgaacttgggaatgtacctgaacttccggacactacagagcattctagaacggacctgtcccgtgatttagcagcattgcatgagatttgcgtggctcattcagatgaacttcgaacgctcagtaatgagcgtggtgcacagcagcacgtattgaaaaagcttctggctataacagaactgcttcaacaaaaacaaaaccagtatacaaaaaccaatgatgtcaggtagcagccttcgccccagtgttctgcatggattcagcatgtccaacatggtaattcacttcagtttaatgtctcctttgctcttgccaaaaaatagcacacttttccacattccagtgatgtgtgagctatgcaaacaaaatccaagattctgctggtgaataactatgccagcaaccttgtaagctatctgtgcaggatatttgcactatttccacatggaatcaatctttaacaacctctgagccttggtgtacagaccacctttcacaaaacgaaatgctatgactgtatcttgatatctcgaactttcaaaatatattttcagtacacccagttgccaaagttttgctgtctcttagagaaagaactatgaaatcaactgacaagaaacacattcttattgacaattgtgtataactggattgcagactgttcttactgtaactacttcctgattaggaatatgaccatttgactgttcaatgattatttgtatttacagtttccagagtttgtcattataataggaacaatctttgctgtatacttttaaaaaatactctgctatttctcttgctggaactgttgaaagaaaatatatagaatgatctattgctcatcagctttattttttaaacatacgacttattttactgaattcaaactatttacttgtaaacatttaacaagcattatgagatctaaatacagtctttgacatttcaacaaataagtcgtatgttgaaattgtcaaagactgtatttagatctcataatgctttgttaaatgtttacaagtaaatagtttgaattcagtaaatattattggttgttgtattgatcaatgcatgttacccattcaaccattttatagactaccaatttcttttatgttaactagaatgcttttgttaaaagttatttgttcattatttgtgctacccctttgattatgcagacaacctcatcagctgcctaacttatccatctttgaacttctgactacttgttgtatctgctggatatttagttcaactgtatagttttatttacttctgtatgtgtatttttgtgaagtattcacaaaggttaagttaaaataaaaccaagggatatcttgcataat

SEQ ID NO: 358675 - DNA, 2629 bp, Homo sapiens
tattgaatttgtgatgttactgaaaactcctttaatgaaaagcatttaacaccatagggaagactgaacaccaggaaaatttacttgcatgactaattatcgtgttctctttttaaacaataattgcttgtttttcttcccaagtatttatgcgctgccagttgagccgattacagaaagggcatgccacagatgaatggtttctgctcagctcccatataccattaaaaggtattgaaccagggtccctgcgtgttcgagcacgatactctatggaaaaaatcatgccagaagaagagtacagtgaatttaaagaggtattaaattatttatcagtcttgtttttgttggaattaacagaaacatttaacatttaataaaagatccattaaggtaaacatagtaattcatagcttagtagcacaatgatgccagagattttaaaccttgttttatactgtaattttggtagaaataagtagactacgaattcattctattttaaataaatttattcaatgggacatcattttaaatataagaacttgtgaaagaccatatttcctgttagtctcatggagcatgcttataatgctacgtactttaaacaatcttttaaaatgtcattttagcttatactgcaaaaggaacttcatgtagtctatgctttatcacatgtatgtggacaagaccgaacactactggccagcatcctactgaggatttttcttcacgaaaagcttgaatcgttgttgttatgcacactaaatgacagagaaataagcatggaagatgaagccactaccctatttcgagccacaacacttgcaagcaccttgatggagcagtatatgaaagccactgctacacagtttgttcatcatgctttgaaagactctattttaaagataatggaaagcaagcagtcttgtgagttaagtccatcaaagttagaaaaaaatgaagatgtgaacactaatttaacacacctattgaacatactttcagagcttgtggagaaaatattcatggcttcagaaatacttccaccgacattgagatatatttatgggtgtttacagaaatctgttcagcataagtggcctacaaataccaccatgagaacaagagttgttagtggttttgtttttcttcgactcatctgtcctgccatcctgaatccacggatgttcaatatcatctcagattctccatctcctattgctgcaagaacactgatattagtggctaaatctgtgcagaacttagcaaatcttgtggaatttggagctaaggagccctacatggaaggtgtcaatccattcatcaaaagcaacaaacatcgtatgatcatgtttttagatgaacttgggaatgtacctgaacttccggacactacagagcattctagaacggacctgtcccgtgatttagcagcattgcatgagatttgcgtggctcattcagatgaacttcgaacgctcagtaatgagcgtggtgcacagcagcacgtattgaaaaagcttctggctataacagaactgcttcaacaaaaacaaaaccagtatacaaaaaccaatgatgtcaggtagcagccttcgccccagtgttctgcatggattcagcatgtccaacatggtaattcacttcagtttaatgtctcctttgctcttgccaaaaaatagcacacttttccacattccagtgatgtgtgagctatgcaaacaaaatccaagattctgctggtgaataactatgccagcaaccttgtaagctatctgtgcaggatatttgcactatttccacatggaatcaatctttaacaacctctgagccttggtgtacagaccacctttcacaaaacgaaatgctatgactgtatcttgatatctcgaactttcaaaatatattttcagtacacccagttgccaaagttttgctgtctcttagagaaagaactatgaaatcaactgacaagaaacacattcttattgacaattgtgtataactggattgcagactgttcttactgtaactacttcctgattaggaatatgaccatttgactgttcaatgattatttgtatttacagtttccagagtttgtcattataataggaacaatctttgctgtatacttttaaaaaatactctgctatttctcttgctggaactgttgaaagaaaatatatagaatgatctattgctcatcagctttattttttaaacatacgacttattttgttgaaattgtcaaagactgtatttagatctcataatgctttgttaaatgtttacaagtaaatagtttgaattcagtaaatattattggttgttgtattgatcaatgcatgttacccattcaaccattttatagactaccaatttcttttatgttaactagaatgcttttgttaaaagttatttgttcattatttgtgctacccctttgattatgcagacaacctcatcagctgcctaacttatccatctttgaacttctgactacttgttgtatctgctggatatttagttcaactgtatagttttatttacttctgtatgtgtatttttgtgaagtattcacaaaggttaagttaaaataaaaccaagggatatcttgcataat

SEQ ID NO: 358676 - DNA, 3601 bp, Homo sapiens
aggcagctggggagcctgggctgtggccctaggagggggcgcggcggcgggctctctccttttgttgttgtttcctcagcctggggagctgaaggggagacgcgtctgggtggggctgctcggagcccgggcctggtggcccctggggctcccgggcgggcagggtagggcagagtagagcgggcttcaacatgatggcggccgaggccggcagtgaggagggcggcccggtaacagccggagctggaggaggcggcgcggcagcgggctccagtgcctatcccgcagtgtgtcgggtgaagatacccgcggccctgcctgtggcagccgccccctatcctgggctggtggagaccggagtggctggaactctgggtggcggagccgctttggggtcagagttcctaggagccgggtctgtggcaggggcactggggggagctggactgacagggggaggtactgctgctggcgtagctggtgctgctgctggcgtggccggtgctgctgttgctggacctagtggagacatggctctcaccaaactgcccacttcgttgcttgctgagactctcgggccaggcggcggttttccccctctgccccctcccccttacctgccccctttgggggcgggcctcgggacagtggacgaaggtgactctctggatggaccagaatacgaggaggaagaggtggccataccgttgaccgctcctccaactaaccagtggtatcacggaaaacttgacagaacgatagcagaagaacgcctcaggcaggcagggaagtctggcagttatcttataagagagagtgatcggaggccagggtcctttgtactttcatttcttagccagatgaatgttgtcaaccattttaggattattgctatgtgtggagattactacattggtggaagacgtttttcttcactgtcagacctaataggttattacagtcatgtttcttgtttgcttaaaggagaaaaattactttacccagttgcaccaccagagccagtagaagatagaaggcgtgtacgagctattctaccttacacaaaagtaccagacactgatgaaataagtttcttaaaaggagatatgttcattgttcataatgaattagaagatggatggatgtgggttacaaatttaagaacagatgaacaaggccttattgttgaagacctagtagaagaggtgggccgggaagaagatccacatgaaggaaaaatatggttccatgggaagatttccaaacaggaagcttataatttactaatgacagttggtcaagtctgcagttttcttgtgaggccctcagataatactcctggcgattattcactttatttccggaccaatgaaaatattcagcgatttaaaatatgtccaacgccaaacaatcagtttatgatgggaggccggtattataacagcattggggacatcatagatcactatcgaaaagaacagattgttgaaggatattatcttaaggaacctgtaccaatgcaggatcaagaacaagtactcaatgacacagtggatggcaaggaaatctataataccatccgtcgtaaaacaaaggatgccttttataaaaacattgttaagaaaggttatcttctgaaaaagggcaaaggaaaacgttggaaaaatttatattttatcttagagggtagtgatgcccaacttatttattttgaaagcgaaaaacgagctaccaaaccaaaaggattaatagatctcagtgtatgttctgtctatgtcgttcatgatagtctctttggcaggccaaactgttttcagatagtagttcagcactttagtgaagaacattacatcttttactttgcaggagaaactccagaacaagcagaggattggatgaaaggtctgcaggcattttgcaatttacggaaaagtagtccagggacatccaataaacgccttcgtcaggtcagcagccttgttttacatattgaagaagcccataaactcccagtaaaacattttactaatccatattgtaacatctacctgaatagtgtccaagtagcaaaaactcatgcaagggaagggcaaaacccagtatggtcagaagagtttgtctttgatgatcttcctcctgacatcaatagatttgaaataactcttagtaataaaacaaagaaaagcaaagatcctgatatcttatttatgcgctgccagttgagccgattacagaaagggcatgccacagatgaatggtttctgctcagctcccatataccattaaaaggtattgaaccagggtccctgcgtgttcgagcacgatactctatggaaaaaatcatgccagaagaagagtacagtgaatttaaagagcttatactgcaaaaggaacttcatgtagtctatgctttatcacatgtatgtggacaagaccgaacactactggccagcatcctactgaggatttttcttcacgaaaagcttgaatcgttgttgttatgcacactaaatgacagagaaataagcatggaagatgaagccactaccctatttcgagccacaacacttgcaagcaccttgatggagcagtatatgaaagccactgctacacagtttgttcatcatgctttgaaagactctattttaaagataatggaaagcaagcagtcttgtgagttaagtccatcaaagttagaaaaaaatgaagatgtgaacactaatttaacacacctattgaacatactttcagagcttgtggagaaaatattcatggcttcagaaatacttccaccgacattgagatatatttatgggtgtttacagaaatctgttcagcataagtggcctacaaataccaccatgagaacaagagttgttagtggttttgtttttcttcgactcatctgtcctgccatcctgaatccacggatgttcaatatcatctcagattctccatctcctattgctgcaagaacactgatattagtggctaaatctgtgcagaacttagcaaatcttgtggaatttggagctaaggagccctacatggaaggtgtcaatccattcatcaaaagcaacaaacatcgtatgatcatgtttttagatgaacttgggaatgtacctgaacttccggacactacagagcattctagaacggacctgtcccgtgatttagcagcattgcatgagatttgcgtggctcattcagatgaacttcgaacgctcagtaatgagcgtggtgcacagcagcacgtattgaaaaagcttctggctataacagaactgcttcaacaaaaacaaaaccagtatacaaaaaccaatgatgtcaggtagcagccttcgccccagtgttctgcatggaacccacgccgtgggttccttgcagatctgtgaccttacccccaaccctgtgctctctgaaacatgtgctgtgtccactcagggttgaatggattaagggcggtgcaagatgtgcttgttaaacagatgcttgaacgcagtatgctcgttaagagtcatcaccagtccctaatctcaagtacccagggacacaaaaacagcggaaggccgcagggtcctctgcaaggaacccacgcggg

SEQ ID NO: 358677 - DNA, 2324 bp, Homo sapiens
gaattctggttaacatttttatcttgttacattaaatttttgagactctgcatcatattacaaaagatctcagcagacagaaataacgggccccgactaaaatgatgtacatttaatactgaaaaacatcaggttttgctcttgagtctgaatgttaattctactggaaaacagtgtaataacactttggtagcatgtgtgaaaatggctagttagtaagtcaatattgattttatttttttttctttcagtttctgtcttgtcttttctctgtcacatacagatatagtgcatggccaaagtgattctcaaactgtgaaacaaatgattattatttgggatgtttgtcaaatttcacatccagaggttctgaagtgtggccttgaaagctgcacgtctaacaaactcttagaggaatttataggtattccgatgcaagtgaaccatggcctacactttgagaaacagtagactacattgatagacttctatctgccatctgcaccaaacagatacagataaggatgtattcaaagaccagaccagaatttgaagggacttaataccaggtcaattaagatattggagatatagaacaaaatgagttacactttgaatgtcctcagctgacataagggctactgagaggaagtgaccacagggacagttttgactagtttctaatgtagtttcaggagatagtgaatgctgtcaccgcactggctaaccatttggcagggattttgtagaagggattaaagcattgagtttggtgactgagttctctacaacctgagattctagaatcctcaagtcctgtttctccccgcccctccccccgcagctttcaaaactaataatatgacttgacttgccttagatattaaataaaaaaagccttttttaaaagagagataaactgcttctgacaacatgtgatagtgtgatagttctggcctaaaaaataggagcatgccaaacacaaacaaatttctgttcactttagggtataaaaattctcttagttatgaccagaaatactcagccaatgactgaataatagagacttatgttttgaggggaattgtggtaatattttatgcatccttttgctttgatacagtttttttcaaatccaggttcccatcctgaaattgctgaccgagctttcatttattttcataccatttttcctctgtctagcacgtattgaaaaagcttctggctataacagaactgcttcaacaaaaacaaaaccagtatacaaaaaccaatgatgtcaggtagcagccttcgccccagtgttctgcatggattcagcatgtccaacatggtaattcacttcagtttaatgtctcctttgctcttgccaaaaaatagcacacttttccacattccagtgatgtgtgagctatgcaaacaaaatccaagattctgctggtgaataactatgccagcaaccttgtaagctatctgtgcaggatatttgcactatttccacatggaatcaatctttaacaacctctgagccttggtgtacagaccacctttcacaaaacgaaatgctatgactgtatcttgatatctcgaactttcaaaatatattttcagtacacccagttgccaaagttttgctgtctcttagagaaagaactatgaaatcaactgacaagaaacacattcttattgacaattgtgtataactggattgcagactgttcttactgtaactacttcctgattaggaatatgaccatttgactgttcaatgattatttgtatttacagtttccagagtttgtcattataataggaacaatctttgctgtatacttttaaaaaatactctgctatttctcttgctggaactgttgaaagaaaatatatagaatgatctattgctcatcagctttattttttaaacatacgacttattttgttgaaattgtcaaagactgtatttagatctcataatgctttgttaaatgtttacaagtaaatagtttgaattcagtaaatattattggttgttgtattgatcaatgcatgttacccattcaaccattttatagactaccaatttcttttatgttaactagaatgcttttgttaaaagttatttgttcattatttgtgctacccctttgattatgcagacaacctcatcagctgcctaacttatccatctttgaacttctgactacttgttgtatctgctggatatttagttcaactgtatagttttatttacttctgtatgtgtatttttgtgaagtattcacaaaggttaagttaaaataaaaccaagggatatcttgcataat

SEQ ID NO: 358678 - DNA, 4112 bp, Homo sapiens
aggcagctggggagcctgggctgtggccctaggagggggcgcggcggcgggctctctccttttgttgttgtttcctcagcctggggagctgaaggggagacgcgtctgggtggggctgctcggagcccgggcctggtggcccctggggctcccgggcgggcagggtagggcagagtagagcgggcttcaacatgatggcggccgaggccggcagtgaggagggcggcccggtaacagccggagctggaggaggcggcgcggcagcgggctccagtgcctatcccgcagtgtgtcgggtgaagatacccgcggccctgcctgtggcagccgccccctatcctgggctggtggagaccggagtggctggaactctgggtggcggagccgctttggggtcagagttcctaggagccgggtctgtggcaggggcactggggggagctggactgacagggggaggtactgctgctggcgtagctggtgctgctgctggcgtggccggtgctgctgttgctggacctagtggagacatggctctcaccaaactgcccacttcgttgcttgctgagactctcgggccaggcggcggttttccccctctgccccctcccccttacctgccccctttgggggcgggcctcgggacagtggacgaaggtgactctctggatggaccagaatacgaggaggaagaggtggccataccgttgaccgctcctccaactaaccagtggtatcacggaaaacttgacagaacgatagcagaagaacgcctcaggcaggcagggaagtctggcagttatcttataagagagagtgatcggaggccagggtcctttgtactttcatttcttagccagatgaatgttgtcaaccattttaggattattgctatgtgtggagattactacattggtggaagacgtttttcttcactgtcagacctaataggttattacagtcatgtttcttgtttgcttaaaggagaaaaattactttacccagttgcaccaccagagccagtagaagatagaaggcgtgtacgagctattctaccttacacaaaagtaccagacactgatgaaataagtttcttaaaaggagatatgttcattgttcataatgaattagaagatggatggatgtgggttacaaatttaagaacagatgaacaaggccttattgttgaagacctagtagaagaggtgggccgggaagaagatccacatgaaggaaaaatatggttccatgggaagatttccaaacaggaagcttataatttactaatgacagttggtcaagtctgcagttttcttgtgaggccctcagataatactcctggcgattattcactttatttccggaccaatgaaaatattcagcgatttaaaatatgtccaacgccaaacaatcagtttatgatgggaggccggtattataacagcattggggacatcatagatcactatcgaaaagaacagattgttgaaggatattatcttaaggaacctgtaccaatgcaggatcaagaacaagtactcaatgacacagtggatggcaaggaaatctataataccatccgtcgtaaaacaaaggatgccttttataaaaacattgttaagaaaggttatcttctgaaaaagggcaaaggaaaacgttggaaaaatttatattttatcttagagggtagtgatgcccaacttatttattttgaaagcgaaaaacgagctaccaaaccaaaaggattaatagatctcagtgtatgttctgtctatgtcgttcatgatagtctctttggcaggccaaactgttttcagatagtagttcagcactttagtgaagaacattacatcttttactttgcaggagaaactccagaacaagcagaggattggatgaaaggtctgcaggcattttgcaatttacggaaaagtagtccagggacatccaataaacgccttcgtcaggtcagcagccttgttttacatattgaagaagcccataaactcccagtaaaacattttactaatccatattgtaacatctacctgaatagtgtccaagtagcaaaaactcatgcaagggaagggcaaaacccagtatggtcagaagagtttgtctttgatgatcttcctcctgacatcaatagatttgaaataactcttagtaataaaacaaagaaaagcaaagatcctgatatcttatttatgcgctgccagttgagccgattacagaaagggcatgccacagatgaatggtttctgctcagctcccatataccattaaaaggtattgaaccagggtccctgcgtgttcgagcacgatactctatggaaaaaatcatgccagaagaagagtacagtgaatttaaagagcttatactgcaaaaggaacttcatgtagtctatgctttatcacatgtatgtggacaagaccgaacactactggccagcatcctactgaggatttttcttcacgaaaagcttgaatcgttgttgttatgcacactaaatgacagagaaataagcatggaagatgaagccactaccctatttcgagccacaacacttgcaagcaccttgatggagcagtatatgaaagccactgctacacagtttgttcatcatgctttgaaagactctattttaaagataatggaaagcaagcagtcttgtgagttaagtccatcaaagttagaaaaaaatgaagatgtgaacactaatttaacacacctattgaacatactttcagagcttgtggagaaaatattcatggcttcagaaatacttccaccgacattgagatatatttatgggtgtttacagaaatctgttcagcataagtggcctacaaataccaccatgagaacaagagttgttagtggttttgtttttcttcgactcatctgtcctgccatcctgaatccacggatgttcaatatcatctcagattctccatctcctattgctgcaagaacactgatattagtggctaaatctgtgcagaacttagcaaatcttgtggaatttggagctaaggagccctacatggaaggtgtcaatccattcatcaaaagcaacaaacatcgtatgatcatgtttttagatgaacttggggtatgtatatagttttcaggtactttttttaagacttctagttgatatagctgagttaacccatttaagcagcaatctttagaaagattttctatccaaaactaaaaagacaaaaagcctgcaaatttttgtctgccttcctaaacaaaaaacatatttttgtttgtaattaaaaccatttattcttacactaaatagtttacaccaaagcatacattattgtggcttttagactacttccatcattttttagggtctgtcttgcttttcatatccttttaaagctatcacatctgactgccatgacattctgttgcctccttagcttttttactttgctgctactatgtggggcgtgaagcaagacgatgacacagttctgaccaggttaaataagtagactgaaaagtcttcttttctaggaataaaagacgtggattcggtgttacacttcattcagtgtgaatatctgtgcctcatttgggccttgttaataaaataaattgtgattacaaaattacgaatgagggtattttataatttctaggaccctgcctttcttaatcaagttaaattttcatgattgaacagattttcaggtactgagtcagttttaaactaaacttattagtaattcagttcatatacagagaaaccaggaaggtgcatgtacatgtgaatagagccaggtgtaaggcatggcattagggagtgctaggattggagattgaggtgtccatgttctgtcttaatgtattcagattcagttaaaaagaccaccacaatttgtggcaaacaaatcaggaatgccgttgagtcactagtttgcaacctcaggtataaaaactagtgtatgaaaaattatggcatagctccatatttatagtgaaatttatagtgaaatggacaaaaatgctaaaagtccatcatgcttctatatgtgaactgggatatagttggtcaatcattggaaaatattttactataatgtttaag

SEQ ID NO: 358679 - DNA, 3787 bp, Homo sapiens
aggcagctggggagcctgggctgtggccctaggagggggcgcggcggcgggctctctccttttgttgttgtttcctcagcctggggagctgaaggggagacgcgtctgggtggggctgctcggagcccgggcctggtggcccctggggctcccgggcgggcagggtagggcagagtagagcgggcttcaacatgatggcggccgaggccggcagtgaggagggcggcccggtaacagccggagctggaggaggcggcgcggcagcgggctccagtgcctatcccgcagtgtgtcgggtgaagatacccgcggccctgcctgtggcagccgccccctatcctgggctggtggagaccggagtggctggaactctgggtggcggagccgctttggggtcagagttcctaggagccgggtctgtggcaggggcactggggggagctggactgacagggggaggtactgctgctggcgtagctggtgctgctgctggcgtggccggtgctgctgttgctggacctagtggagacatggctctcaccaaactgcccacttcgttgcttgctgagactctcgggccaggcggcggttttccccctctgccccctcccccttacctgccccctttgggggcgggcctcgggacagtggacgaaggtgactctctggatggaccagaatacgaggaggaagaggtggccataccgttgaccgctcctccaactaaccagtggtatcacggaaaacttgacagaacgatagcagaagaacgcctcaggcaggcagggaagtctggcagttatcttataagagagagtgatcggaggccagggtcctttgtactttcatttcttagccagatgaatgttgtcaaccattttaggattattgctatgtgtggagattactacattggtggaagacgtttttcttcactgtcagacctaataggttattacagtcatgtttcttgtttgcttaaaggagaaaaattactttacccagttgcaccaccagagccagtagaagatagaaggcgtgtacgagctattctaccttacacaaaagtaccagacactgatgaaataagtttcttaaaaggagatatgttcattgttcataatgaattagaagatggatggatgtgggttacaaatttaagaacagatgaacaaggccttattgttgaagacctagtagaagaggtgggccgggaagaagatccacatgaaggaaaaatatggttccatgggaagatttccaaacaggaagcttataatttactaatgacagttggtcaagtctgcagttttcttgtgaggccctcagataatactcctggcgattattcactttatttccggaccaatgaaaatattcagcgatttaaaatatgtccaacgccaaacaatcagtttatgatgggaggccggtattataacagcattggggacatcatagatcactatcgaaaagaacagattgttgaaggatattatcttaaggaacctgtaccaatgcaggatcaagaacaagtactcaatgacacagtggatggcaaggaaatctataataccatccgtcgtaaaacaaaggatgccttttataaaaacattgttaagaaaggttatcttctgaaaaagggcaaaggaaaacgttggaaaaatttatattttatcttagagggtagtgatgcccaacttatttattttgaaagcgaaaaacgagctaccaaaccaaaaggattaatagatctcagtgtatgttctgtctatgtcgttcatgatagtctctttggcaggccaaactgttttcagatagtagttcagcactttagtgaagaacattacatcttttactttgcaggagaaactccagaacaagcagaggattggatgaaaggtctgcaggcattttgcaatttacggaaaagtagtccagggacatccaataaacgccttcgtcaggtcagcagccttgttttacatattgaagaagcccataaactcccagtaaaacattttactaatccatattgtaacatctacctgaatagtgtccaagtagcaaaaactcatgcaagggaagggcaaaacccagtatggtcagaagagtttgtctttgatgatcttcctcctgacatcaatagatttgaaataactcttagtaataaaacaaagaaaagcaaagatcctgatatcttatttatgcgctgccagttgagccgattacagaaagggcatgccacagatgaatggtttctgctcagctcccatataccattaaaaggtattgaaccagggtccctgcgtgttcgagcacgatactctatggaaaaaatcatgccagaagaagagtacagtgaatttaaagagcttatactgcaaaaggaacttcatgtagtctatgctttatcacatgtatgtggacaagaccgaacactactggccagcatcctactgaggatttttcttcacgaaaagcttgaatcgttgttgttatgcacactaaatgacagagaaataagcatggaagatgaagccactaccctatttcgagccacaacacttgcaagcaccttgatggagcagtatatgaaagccactgctacacagtttgttcatcatgctttgaaagactctattttaaagataatggaaagcaagcagtcttgtgagttaagtccatcaaagttagaaaaaaatgaagatgtgaacactaatttaacacacctattgaacatactttcagagcttgtggagaaaatattcatggcttcagaaatacttccaccgacattgagatatatttatgggtgtttacagaaatctgttcagcataagtggcctacaaataccaccatgagaacaagagttgttagtggttttgtttttcttcgactcatctgtcctgccatcctgaatccacggatgttcaatatcatctcagattctccatctcctattgctgcaagaacactgatattagtggctaaatctgtgcagaacttagcaaatcttgtggaatttggagctaaggagccctacatggaaggtgtcaatccattcatcaaaagcaacaaacatcgtatgatcatgtttttagatgaacttgggcttttttactttgctgctactatgtggggcgtgaagcaagacgatgacacagttctgaccaggttaaataagtagactgaaaagtcttcttttctaggaataaaagacgtggattcggtgttacacttcattcagtgtgaatatctgtgcctcatttgggccttgttaataaaataaattgtgattacaaaattacgaatgagggtattttataatttctaggaccctgcctttcttaatcaagttaaattttcatgattgaacagattttcaggtactgagtcagttttaaactaaacttattagtaattcagttcatatacagagaaaccaggaaggtgcatgtacatgtgaatagagccaggtgtaaggcatggcattagggagtgctaggattggagattgaggtgtccatgttctgtcttaatgtattcagattcagttaaaaagaccaccacaatttgtggcaaacaaatcaggaatgccgttgagtcactagtttgcaacctcaggtataaaaactagtgtatgaaaaattatggcatagctccatatttatagtgaaatttatagtgaaatggacaaaaatgctaaaagtccatcatgcttctatatgtgaactgggatatagttggtcaatcattggaaaatattttactataatgtttaag

SEQ ID NO: 358680 - DNA, 3221 bp, Homo sapiens
  misc_feature (3154)..(3154): n is a, c, g, or t
  misc_feature (3182)..(3182): n is a, c, g, or t
  misc_feature (3188)..(3188): n is a, c, g, or t
  misc_feature (3213)..(3213): n is a, c, g, or t
  misc_feature (3220)..(3220): n is a, c, g, or t
aggcagctggggagcctgggctgtggccctaggagggggcgcggcggcgggctctctccttttgttgttgtttcctcagcctggggagctgaaggggagacgcgtctgggtggggctgctcggagcccgggcctggtggcccctggggctcccgggcgggcagggtagggcagagtagagcgggcttcaacatgatggcggccgaggccggcagtgaggagggcggcccggtaacagccggagctggaggaggcggcgcggcagcgggctccagtgcctatcccgcagtgtgtcgggtgaagatacccgcggccctgcctgtggcagccgccccctatcctgggctggtggagaccggagtggctggaactctgggtggcggagccgctttggggtcagagttcctaggagccgggtctgtggcaggggcactggggggagctggactgacagggggaggtactgctgctggcgtagctggtgctgctgctggcgtggccggtgctgctgttgctggacctagtggagacatggctctcaccaaactgcccacttcgttgcttgctgagactctcgggccaggcggcggttttccccctctgccccctcccccttacctgccccctttgggggcgggcctcgggacagtggacgaaggtgactctctggatggaccagaatacgaggaggaagaggtggccataccgttgaccgctcctccaactaaccagtggtatcacggaaaacttgacagaacgatagcagaagaacgcctcaggcaggcagggaagtctggcagttatcttataagagagagtgatcggaggccagggtcctttgtactttcatttcttagccagatgaatgttgtcaaccattttaggattattgctatgtgtggagattactacattggtggaagacgtttttcttcactgtcagacctaataggttattacagtcatgtttcttgtttgcttaaaggagaaaaattactttacccagttgcaccaccagagccagtagaagatagaaggcgtgtacgagctattctaccttacacaaaagtaccagacactgatgaaataagtttcttaaaaggagatatgttcattgttcataatgaattagaagatggatggatgtgggttacaaatttaagaacagatgaacaaggccttattgttgaagacctagtagaagaggtgggccgggaagaagatccacatgaaggaaaaatatggttccatgggaagatttccaaacaggaagcttataatttactaatgacagttggtcaagtctgcagttttcttgtgaggccctcagataatactcctggcgattattcactttatttccggaccaatgaaaatattcagcgatttaaaatatgtccaacgccaaacaatcagtttatgatgggaggccggtattataacagcattggggacatcatagatcactatcgaaaagaacagattgttgaaggatattatcttaaggaacctgtaccaatgcaggatcaagaacaagtactcaatgacacagtggatggcaaggaaatctataataccatccgtcgtaaaacaaaggatgccttttataaaaacattgttaagaaaggttatcttctgaaaaagggcaaaggaaaacgttggaaaaatttatattttatcttagagggtagtgatgcccaacttatttattttgaaagcgaaaaacgagctaccaaaccaaaaggattaatagatctcagtgtatgttctgtctatgtcgttcatgatagtctctttggcaggccaaactgttttcagatagtagttcagcactttagtgaagaacattacatcttttactttgcaggagaaactccagaacaagcagaggattggatgaaaggtctgcaggcattttgcaatttacggaaaagtagtccagggacatccaataaacgccttcgtcaggtcagcagccttgttttacatattgaagaagcccataaactcccagtaaaacattttactaatccatattgtaacatctacctgaatagtgtccaagtagcaaaaactcatgcaagggaagggcaaaacccagtatggtcagaagagtttgtctttgatgatcttcctcctgacatcaatagatttgaaataactcttagtaataaaacaaagaaaagcaaagatcctgatatcttatttatgcgctgccagttgagccgattacagaaagggcatgccacagatgaatggtttctgctcagctcccatataccattaaaaggtattgaaccagggtccctgcgtgttcgagcacgatactctatggaaaaaatcatgccagaagaagagtacagtgaatttaaagagcttatactgcaaaaggaacttcatgtagtctatgctttatcacatgtatgtggacaagaccgaacactactggccagcatcctactgaggatttttcttcacgaaaagcttgaatcgttgttgttatgcacactaaatgacagagaaataagcatggaagatgaagccactaccctatttcgagccacaacacttgcaagcaccttgatggagcagtatatgaaagccactgctacacagtttgttcatcatgctttgaaagactctattttaaagataatggaaagcaagcagtcttgtgagttaagtccatcaaagttagaaaaaaatgaagatgtgaacactaatttaacacacctattgaacatactttcagagcttgtggagaaaatattcatggcttcagaaatacttccaccgacattgagatatatttatgggtgtttacagaaatctgttcagcataagtggcctacaaataccaccatgagaacaagagttgttagtggttttgtttttcttcgactcatctgtcctgccatcctgaatccacggatgttcaatatcatctcagattctccatctcctattgctgcaagaacactgatattagtggctaaatctgtgcagaacttagcaaatcttgtggaatttggagctaaggagccctacatggaaggtgtcaatccattcatcaaaagcaacaaacatcgtatgatcatgtttttagatgaacttgggaatgtacctgaacttccgggcactacaggggcaatccnagaacgggggccctggtccccggtggantttaancaaggcaattggccaatggaggaantttgcgnt

SEQ ID NO: 358681 - DNA, 1213 bp, Homo sapiens
cgtgggttccttgcagaccactaatttttttctcgcgtgggttccttgcagatgaacttcgaacgctcagtaatgagcgtggtgcacagcagcacgtattgaaaaagcttctggctataacagaactgcttcaacaaaaacaaaaccagtatacaaaaaccaatgatgtcaggtagcagccttcgccccagtgttctgcatggattcagcatgtccaacatggtaattcacttcagtttaatgtctcctttgctcttgccaaaaaatagcacacttttccacattccagtgatgtgtgagctatgcaaacaaaatccaagattctgctggtgaataactatgccagcaaccttgtaagctatctgtgcaggatatttgcactatttccacatggaatcaatctttaacaacctctgagccttggtgtacagaccacctttcacaaaacgaaatgctatgactgtatcttgatatctcgaactttcaaaatatattttcagtacacccagttgccaaagttttgctgtctcttagagaaagaactatgaaatcaactgacaagaaacacattcttattgacaattgtgtataactggattgcagactgttcttactgtaactacttcctgattaggaatatgaccatttgactgttcaatgattatttgtatttacagtttccagagtttgtcattataataggaacaatctttgctgtatacttttaaaaaatactctgctatttctcttgctggaactgttgaaagaaaatatatagaatgatctattgctcatcagctttattttttaaacatacgacttattttgttgaaattgtcaaagactgtatttagatctcataatgctttgttaaatgtttacaagtaaatagtttgaattcagtaaatattattggttgttgtattgatcaatgcatgttacccattcaaccattttatagactaccaatttcttttatgttaactagaatgcttttgttaaaagttatttgttcattatttgtgctacccctttgattatgcagacaacctcatcagctgcctaacttatccatctttgaacttctgactacttgttgtatctgctggatatttagttcaactgtatagttttatttacttctgtatgtgtatttttgtgaagtattcacaaaggttaagttaaaataaaaccaagggatatcttgcataat

SEQ ID NO: 358682 - DNA, 1084 bp, Homo sapiens
agttatacactagttgtcactaagaatgtgtatcttgtcagttagttcagccttcgccccagtgttctgcatggattcagcatgtccaacatggtaattcacttcagtttaatgtctcctttgctcttgccaaaaaatagcacacttttccacattccagtgatgtgtgagctatgcaaacaaaatccaagattctgctggtgaataactatgccagcaaccttgtaagctatctgtgcaggatatttgcactatttccacatggaatcaatctttaacaacctctgagccttggtgtacagaccacctttcacaaaacgaaatgctatgactgtatcttgatatctcgaactttcaaaatatattttcagtacacccagttgccaaagttttgctgtctcttagagaaagaactatgaaatcaactgacaagaaacacattcttattgacaattgtgtataactggattgcagactgttcttactgtaactacttcctgattaggaatatgaccatttgactgttcaatgattatttgtatttacagtttccagagtttgtcattataataggaacaatctttgctgtatacttttaaaaaatactctgctatttctcttgctggaactgttgaaagaaaatatatagaatgatctattgctcatcagctttattttttaaacatacgacttattttgttgaaattgtcaaagactgtatttagatctcataatgctttgttaaatgtttacaagtaaatagtttgaattcagtaaatattattggttgttgtattgatcaatgcatgttacccattcaaccattttatagactaccaatttcttttatgttaactagaatgcttttgttaaaagttatttgttcattatttgtgctacccctttgattatgcagacaacctcatcagctgcctaacttatccatctttgaacttctgactacttgttgtatctgctggatatttagttcaactgtatagttttatttacttctgtatgtgtatttttgtgaagtattcacaaaggttaagttaaaataaaaccaagggatatcttgcataat

SEQ ID NO: 358683 - DNA, 838 bp, Homo sapiens
acttggctgttttttatttaggatcctaaaatgtaaactgactccactaccgaccttgtatctaggtaggtttccagcttcaaaatgggatacatactatggcagaactggaagagacctcagaatcaccatagtgaaccggctcaaaactataaacagacacaggagtatgaaatcaactgacaagaaacacattcttattgacaattgtgtataactggattgcagactgttcttactgtaactacttcctgattaggaatatgaccatttgactgttcaatgattatttgtatttacagtttccagagtttgtcattataataggaacaatctttgctgtatacttttaaaaaatactctgctatttctcttgctggaactgttgaaagaaaatatatagaatgatctattgctcatcagctttattttttaaacatacgacttattttgttgaaattgtcaaagactgtatttagatctcataatgctttgttaaatgtttacaagtaaatagtttgaattcagtaaatattattggttgttgtattgatcaatgcatgttacccattcaaccattttatagactaccaatttcttttatgttaactagaatgcttttgttaaaagttatttgttcattatttgtgctacccctttgattatgcagacaacctcatcagctgcctaacttatccatctttgaacttctgactacttgttgtatctgctggatatttagttcaactgtatagttttatttacttctgtatgtgtatttttgtgaagtattcacaaaggttaagttaaaataaaaccaagggatatcttgcataat

SEQ ID NO: 358684 - DNA, 2991 bp, Homo sapiens
aggcagctggggagcctgggctgtggccctaggagggggcgcggcggcgggctctctccttttgttgttgtttcctcagcctggggagctgaaggggagacgcgtctgggtggggctgctcggagcccgggcctggtggcccctggggctcccgggcgggcagggtagggcagagtagagcgggcttcaacatgatggcggccgaggccggcagtgaggagggcggcccggtaacagccggagctggaggaggcggcgcggcagcgggctccagtgcctatcccgcagtgtgtcgggtgaagatacccgcggccctgcctgtggcagccgccccctatcctgggctggtggagaccggagtggctggaactctgggtggcggagccgctttggggtcagagttcctaggagccgggtctgtggcaggggcactggggggagctggactgacagggggaggtactgctgctggcgtagctggtgctgctgctggcgtggccggtgctgctgttgctggacctagtggagacatggctctcaccaaactgcccacttcgttgcttgctgagactctcgggccaggcggcggttttccccctctgccccctcccccttacctgccccctttgggggcgggcctcgggacagtggacgaaggtgactctctggatggaccagaatacgaggaggaagaggtggccataccgttgaccgctcctccaactaaccagtggtatcacggaaaacttgacagaacgatagcagaagaacgcctcaggcaggcagggaagtctggcagttatcttataagagagagtgatcggaggccagggtcctttgtactttcatttcttagccagatgaatgttgtcaaccattttaggattattgctatgtgtggagattactacattggtggaagacgtttttcttcactgtcagacctaataggttattacagtcatgtttcttgtttgcttaaaggagaaaaattactttacccagttgcaccaccagagccagtagaagatagaaggcgtgtacgagctattctaccttacacaaaagtaccagacactgatgaaataagtttcttaaaaggagatatgttcattgttcataatgaattagaagatggatggatgtgggttacaaatttaagaacagatgaacaaggccttattgttgaagacctagtagaagaggtgggccgggaagaagatccacatgaaggaaaaatatggttccatgggaagatttccaaacaggaagcttataatttactaatgacagttggtcaagtctgcagttttcttgtgaggccctcagataatactcctggcgattattcactttatttccggaccaatgaaaatattcagcgatttaaaatatgtccaacgccaaacaatcagtttatgatgggaggccggtattataacagcattggggacatcatagatcactatcgaaaagaacagattgttgaaggatattatcttaaggaacctgtaccaatgcaggatcaagaacaagtactcaatgacacagtggatggcaaggaaatctataataccatccgtcgtaaaacaaaggatgccttttataaaaacattgttaagaaaggttatcttctgaaaaagggcaaaggaaaacgttggaaaaatttatattttatcttagagggtagtgatgcccaacttatttattttgaaagcgaaaaacgagctaccaaaccaaaaggattaatagatctcagtgtatgttctgtctatgtcgttcatgatagtctctttggcaggccaaactgttttcagatagtagttcagcactttagtgaagaacattacatcttttactttgcaggagaaactccagaacaagcagaggattggatgaaaggtctgcaggcattttgcaatttacggaaaagtagtccagggacatccaataaacgccttcgtcaggtcagcagccttgttttacatattgaagaagcccataaactcccagtaaaacattttactaatccatattgtaacatctacctgaatagtgtccaagtagcaaaaactcatgcaagggaagggcaaaacccagtatggtcagaagagtttgtctttgatgatcttcctcctgacatcaatagatttgaaataactcttagtaataaaacaaagaaaagcaaagatcctgatatcttatttatgcgctgccagttgagccgattacagaaagggcatgccacagatgaatggtttctgctcagctcccatataccattaaaaggtattgaaccagggtccctgcgtgttcgagcacgatactctatggaaaaaatcatgccagaagaagagtacagtgaatttaaagagcttatactgcaaaaggaacttcatgtagtctatgctttatcacatgtatgtggacaagaccgaacactactggccagcatcctactgaggatttttcttcacgaaaagcttgaatcgttgttgttatgcacactaaatgacagagaaataagcatggaaggtatggtatggccatgttagtgtgatacaagaaactgggtttagattttatatcaaggatatatggactctatctctgaatatactaaattgttaaattatattgcaaaataagttattctgttttccctccttaaaaattgcagttggatgtcagttctgattatgttggttactatgggaagctgatatttctaatgtaggttttggcagataagtactagaagccacaagaaggtggtatctgtgtctacatcaatggcttgactgtttggcatatttatctgtattctcttgttttttattttcttttgagatggcatctcagtcgcccaggctgcagtgcagtggcgcagtctcggctcactgcaacctctacctctcaggttcaagcgattctcctgcctcagcctcctaagtagctgggactacaggcatatgccaccacacccagcta

SEQ ID NO: 358685 - DNA, 3306 bp, Homo sapiens
aggcagctggggagcctgggctgtggccctaggagggggcgcggcggcgggctctctccttttgttgttgtttcctcagcctggggagctgaaggggagacgcgtctgggtggggctgctcggagcccgggcctggtggcccctggggctcccgggcgggcagggtagggcagagtagagcgggcttcaacatgatggcggccgaggccggcagtgaggagggcggcccggtaacagccggagctggaggaggcggcgcggcagcgggctccagtgcctatcccgcagtgtgtcgggtgaagatacccgcggccctgcctgtggcagccgccccctatcctgggctggtggagaccggagtggctggaactctgggtggcggagccgctttggggtcagagttcctaggagccgggtctgtggcaggggcactggggggagctggactgacagggggaggtactgctgctggcgtagctggtgctgctgctggcgtggccggtgctgctgttgctggacctagtggagacatggctctcaccaaactgcccacttcgttgcttgctgagactctcgggccaggcggcggttttccccctctgccccctcccccttacctgccccctttgggggcgggcctcgggacagtggacgaaggtgactctctggatggaccagaatacgaggaggaagaggtggccataccgttgaccgctcctccaactaaccagtggtatcacggaaaacttgacagaacgatagcagaagaacgcctcaggcaggcagggaagtctggcagttatcttataagagagagtgatcggaggccagggtcctttgtactttcatttcttagccagatgaatgttgtcaaccattttaggattattgctatgtgtggagattactacattggtggaagacgtttttcttcactgtcagacctaataggttattacagtcatgtttcttgtttgcttaaaggagaaaaattactttacccagttgcaccaccagagccagtagaagatagaaggcgtgtacgagctattctaccttacacaaaagtaccagacactgatgaaataagtttcttaaaaggagatatgttcattgttcataatgaattagaagatggatggatgtgggttacaaatttaagaacagatgaacaaggccttattgttgaagacctagtagaagaggtgggccgggaagaagatccacatgaaggaaaaatatggttccatgggaagatttccaaacaggaagcttataatttactaatgacagttggtcaagtctgcagttttcttgtgaggccctcagataatactcctggcgattattcactttatttccggaccaatgaaaatattcagcgatttaaaatatgtccaacgccaaacaatcagtttatgatgggaggccggtattataacagcattggggacatcatagatcactatcgaaaagaacagattgttgaaggatattatcttaaggaacctgtaccaatgcaggatcaagaacaagtactcaatgacacagtggatggcaaggaaatctataataccatccgtcgtaaaacaaaggatgccttttataaaaacattgttaagaaaggttatcttctgaaaaagggcaaaggaaaacgttggaaaaatttatattttatcttagagggtagtgatgcccaacttatttattttgaaagcgaaaaacgagctaccaaaccaaaaggattaatagatctcagtgtatgttctgtctatgtcgttcatgatagtctctttggcaggccaaactgttttcagatagtagttcagcactttagtgaagaacattacatcttttactttgcaggagaaactccagaacaagcagaggattggatgaaaggtctgcaggcattttgcaatttacggaaaagtagtccagggacatccaataaacgccttcgtcaggtcagcagccttgttttacatattgaagaagcccataaactcccagtaaaacattttactaatccatattgtaacatctacctgaatagtgtccaagtagcaaaaactcatgcaagggaagggcaaaacccagtatggtcagaagagtttgtctttgatgatcttcctcctgacatcaatagatttgaaataactcttagtaataaaacaaagaaaagcaaagatcctgatatcttatttatgcgctgccagttgagccgattacagaaagggcatgccacagatgaatggtttctgctcagctcccatataccattaaaaggtattgaaccagggtccctgcgtgttcgagcacgatactctatggaaaaaatcatgccagaagaagagtacagtgaatttaaagaggtattaaattatttatcagtcttgtttttgttggaattaacagaaacatttaacatttaataaaagatccattaaggtaaacatagtaattcatagcttagtagcacaatgatgccagagattttaaaccttgttttatactgtaattttggtagaaataagtagactacgaattcattctattttaaataaatttattcaatgggacatcattttaaatataagaacttgtgaaagaccatatttcctgttagtctcatggagcatgcttataatgctacgtactttaaacaatcttttaaaatgtcattttagcttatactgcaaaaggaacttcatgtagtctatgctttatcacatgtatgtggacaagaccgaacactactggccagcatcctactgaggatttttcttcacgaaaagcttgaatcgttgttgttatgcacactaaatgacagagaaataagcatggaaggtatggtatggccatgttagtgtgatacaagaaactgggtttagattttatatcaaggatatatggactctatctctgaatatactaaattgttaaattatattgcaaaataagttattctgttttccctccttaaaaattgcagttggatgtcagttctgattatgttggttactatgggaagctgatatttctaatgtaggttttggcagataagtactagaagccacaagaaggtggtatctgtgtctacatcaatggcttgactgtttggcatatttatctgtattctcttgttttttattttcttttgagatggcatctcagtcgcccaggctgcagtgcagtggcgcagtctcggctcactgcaacctctacctctcaggttcaagcgattctcctgcctcagcctcctaagtagctgggactacaggcatatgccaccacacccagcta

SEQ ID NO: 358686 - DNA, 2071 bp, Homo sapiens
aggcagctggggagcctgggctgtggccctaggagggggcgcggcggcgggctctctccttttgttgttgtttcctcagcctggggagctgaaggggagacgcgtctgggtggggctgctcggagcccgggcctggtggcccctggggctcccgggcgggcagggtagggcagagtagagcgggcttcaacatgatggcggccgaggccggcagtgaggagggcggcccggtaacagccggagctggaggaggcggcgcggcagcgggctccagtgcctatcccgcagtgtgtcgggtgaagatacccgcggccctgcctgtggcagccgccccctatcctgggctggtggagaccggagtggctggaactctgggtggcggagccgctttggggtcagagttcctaggagccgggtctgtggcaggggcactggggggagctggactgacagggggaggtactgctgctggcgtagctggtgctgctgctggcgtggccggtgctgctgttgctggacctagtggagacatggctctcaccaaactgcccacttcgttgcttgctgagactctcgggccaggcggcggttttccccctctgccccctcccccttacctgccccctttgggggcgggcctcgggacagtggacgaaggtgactctctggatggaccagaatacgaggaggaagaggtggccataccgttgaccgctcctccaactaaccagtggtatcacggaaaacttgacagaacgatagcagaagaacgcctcaggcaggcagggaagtctggcagttatcttataagagagagtgatcggaggccagggtcctttgtactttcatttcttagccagatgaatgttgtcaaccattttaggattattgctatgtgtggagattactacattggtggaagacgtttttcttcactgtcagacctaataggttattacagtcatgtttcttgtttgcttaaaggagaaaaattactttacccagttgcaccaccagagccagtagaagatagaaggcgtgtacgagctattctaccttacacaaaagtaccagacactgatgaaataagtttcttaaaaggagatatgttcattgttcataatgaattagaagatggatggatgtgggttacaaatttaagaacagatgaacaaggccttattgttgaagacctagtagaagaggtgggccgggaagaagatccacatgaaggaaaaatgtgagtttgtgttaattattaaaatgaaaaaaaaaatctatattgtaaatttactaattggaaaactttggccaaaaaaattgttttttaaggttttggactgacttaacttttaaatttggcttagggaactgatttctaaatattttcttaaggatctagtgataaagtcttgtttttaaataaaaggtagctgataactaaatataactctttttatcaccacactgaagactttgaataaacactacatttataacattatgaatgtcacaatttggcacattttaaattattcatagtatttcttggttattcatagtatttcttgttttatagccacatcttttatccccccaaaataacggttcttcacaattttaataagattcagcaaggtctttttttttcataatcttcagactgattttatgtatatgtaagttttcttttgaagatctgaaccattaatcccaattctctcttactcacattttaatagactattcatctcctaatatcttttcagtacaacattttttcttatctttcagcatttagggatggaacttgaggcttgcctcaagtgtttgctttttctgttttctaaccattagaatataaaaacattcaactgactactccatttgcagtcaccttgtttaatgcttcacccttctgtaagtggaatatgtaagatatattctgagttcatttttattgtttcttgtagctacaaaatagattccattagtgagactgtaccctgctgtttgtattagtttgaagtctcctctctacctatatcaggagtttcaaattcttttttgt

SEQ ID NO: 358687 - DNA, 940 bp, Homo sapiens
gtcggtaccgataaactattacagcataaactattcagcttcctacactattaagtttaccacagcataaactattcaagcagagtgctgtttttctttgcaggattggatgaaaggtctgcaggcattttgcaatttacggaaaagtagtccagggacatccaataaacgccttcgtcaggtcagcagccttgttttacatattgaagaagcccataaactcccagtaaaacattttactaatccatattgtaacatctacctgaatagtgtccaagtagcaaaaactcatgcaagggaagggcaaaacccagtatggtcagaagagtttgtctttgatgatcttcctcctgacatcaatagatttgaaataactcttagtaataaaacaaagaaaagcaaagatcctgatatcttatttatgcgctgccagttgagccgattacagaaagggcatgccacagatgaatggtttctgctcagctcccatataccattaaaaggtattgaaccagggtccctgcgtgttcgagcacgatactctatggaaaaaatcatgccagaagaagagtacagtgaatttaaagagcttatactgcaaaaggaacttcatgtagtctatgctttatcacatgtatgtggacaagaccgaacactactggccagcatcctactgaggatttttcttcacgaaaagcttgaatcgttgttgttatgcacactaaatgacagagaaataagcatggaagatgaagccactaacctaatacacgagaccaacaacactaggcaagcaccttggatggaggcagaaatactgaaaggccacggaaacacgagggcggtcagacatgctgtgaaagactccatagaaaagataatggcaaagccagggcaaggggagaaaagccatcaacgatagaaagaacagcagacggag

SEQ ID NO: 358688 - DNA, 2309 bp, Homo sapiens
catttataaacaattttcactccaatatgtagaataactttcatgatgggctttattagagggtagtgaattctttgtagattgaaaaaccatttggacattgtctagtctgtgaagatgtttcgggcattcagttagtggttagatttaaggaatttctccttctaaaattctaattacagttccccaaacacattgtctctgattcactgatgtattaccattgcctagaatagtgtctggcattagtaggcattcagaaaatgtttgttgagtaaatgaatgtttctatgtttatagttttccctcttccttgacattcttgccctgatagattgccttgtaaaatttgattcatctttatgagctcagttcatatgtcatccctgtttcacagaggatttatgcctttctggagtctcttaggcaaaattgtttccttctgtatttccatagcaccttgctaattctgcattctgttacactgtctaaaattaataattgtgtaaaactcttctacaagagattaactccttttgggcagtgacacaatgataatgctattcatttttatagtttttttttttaagcctactcccttggatatagtaacattcagtgagtgtttgattttagtttgattaggtatttaatgagtgaggaccaaattgtgagaagtaaatccacatgtagttagaccatttttctccataatagtggaatgagtaacactattgtatcttaaatcagaggaatatagaataaaataaagttcaaaacatagtaaaagggggatgtcttttatattgaaagtagaagttgatgttcactttttacgggctcagaatgtcttactgaagaggtagcatttgagatagttccttcccagattggttaggtatttatctaacaagtagaaagcaaaaagtggaaagtacattctaagaacaaaaagtacaagctacagtggtgggagattggcaaataggaagttatgtgtgaccatggtataggaaccaaaaaacaattggtagtatgagacaggaaatgtagacttgagtcctgtggtaaacgacttcagttgcagaatgagaaatttgtaggcagtagagaggtgttttttttttgtttggtttttcttaatgtagggcacagctgctgttgaaactgatgtatccagattagagtggtggagtaggacataattatattagttgggctgttgtttaagaaaagtcgataagagggcctgagttagggtaatggcaacaagaaaagattaagagaggtttggaaagatatttactgaacagaaacatctttttttatataaacataaataaggatagtgtggggatatgtttgcagatacgattttcatgaattttaataaaaattgattaatagttaattatataaaatactgtcttaatgtcttccctttagggccgggaagaagatccacatgaaggaaaaatgtgagtttgtgttaattattaaaatgaaaaaaaaaatctatattgtaaatttactaattggaaaactttggccaaaaaaattgttttttaaggttttggactgacttaacttttaaatttggcttagggaactgatttctaaatattttcttaaggatctagtgataaagtcttgtttttaaataaaaggtagctgataactaaatataactctttttatcaccacactgaagactttgaataaacactacatttataacattatgaatgtcacaatttggcacattttaaattattcatagtatttcttggttattcatagtatttcttgttttatagccacatcttttatccccccaaaataacggttcttcacaattttaataagattcagcaaggtctttttttttcataatcttcagactgattttatgtatatgtaagttttcttttgaagatctgaaccattaatcccaattctctcttactcacattttaatagactattcatctcctaatatcttttcagtacaacattttttcttatctttcagcatttagggatggaacttgaggcttgcctcaagtgtttgctttttctgttttctaaccattagaatataaaaacattcaactgactactccatttgcagtcaccttgtttaatgcttcacccttctgtaagtggaatatgtaagatatattctgagttcatttttattgtttcttgtagctacaaaatagattccattagtgagactgtaccctgctgtttgtattagtttgaagtctcctctctacctatatcaggagtttcaaattcttttttgt

SEQ ID NO: 358689 - DNA, 523 bp, Homo sapiens
gtaacattataaattaatagtggagtaattccacgtcatttataaacaattttcactccaatatgtagaataactttcatgatgggctttattagagggtagtgaattctttgtagattgaaaaaccatttggacattgtctagtctgtgaagatgtttcgggcattcagttagtggttagatttaaggaatttctccttctaaaattctaattacagttccccaaacacatttatactttcatgtattaactctagaatgtatgctctctgaggggagggatttttgtctctgattcactgatgtattaccattgcctagaatagtgtctggcattagtaggcattcagaaaatgtttgttgagtaaatgaatgtttctatgtttatagttttccctcttccttgacattcttgccctgatagattgccttgtaaaatttgattcatctttatgagctcagttcatatgtcatccctgtttcacagaggatttatgcctttctggagtctcttaggcaaaat

SEQ ID NO: 358690 - DNA, 470 bp, Homo sapiens
agatgcaggatcttgctgtgttgtccaggctggtatcaaactcctgggctcaagtgatcctcctggatagctgggattatatgcatgtaccactgtgcctagcacagtcattactgtttaatgattaattgaaaacattgattaagcacagagtattcttaagcaaactggtcttcactttttagaatcttcttattacgaagatttacatacagaatttagcagttttagccagtattccctaactatgcttaggttccttccaaattaggacaggtgtagatattactgaccagaagttactgctgcaaaatttctgctctctatttttatgtattaaagctggtaagatacaccagagagatagcagacaagcaatgtggatggttgtgaatcataaaccagaaaatttgaaagaaattatcttaaaaaaaaaacaagttcctggtgaaaatttacatatgtttatg

SEQ ID NO: 358691 - DNA, 4372 bp, Homo sapiens
aggcagctggggagcctgggctgtggccctaggagggggcgcggcggcgggctctctccttttgttgttgtttcctcagcctggggagctgaaggggagacgcgtctgggtggggctgctcggagcccgggcctggtggcccctggggctcccgggcgggcagggtagggcagagtagagcgggcttcaacatgatggcggccgaggccggcagtgaggagggcggcccggtaacagccggagctggaggaggcggcgcggcagcgggctccagtgcctatcccgcagtgtgtcgggtgaagatacccgcggccctgcctgtggcagccgccccctatcctgggctggtggagaccggagtggctggaactctgggtggcggagccgctttggggtcagagttcctaggagccgggtctgtggcaggggcactggggggagctggactgacagggggaggtactgctgctggcgtagctggtgctgctgctggcgtggccggtgctgctgttgctggacctagtggagacatggctctcaccaaactgcccacttcgttgcttgctgagactctcgggccaggcggcggttttccccctctgccccctcccccttacctgccccctttgggggcgggcctcgggacagtggacgaaggtgactctctggatggaccagaatacgaggaggaagaggtggccataccgttgaccgctcctccaactaaccagtggtatcacggaaaacttgacagaacgatagcagaagaacgcctcaggcaggcagggaagtctggcagttatcttataagagagagtgatcggaggccagggtcctttgtactttcatttcttagccagatgaatgttgtcaaccattttaggattattgctatgtgtggagattactacattggtggaagacgtttttcttcactgtcagacctaataggttattacagtcatgtttcttgtttgcttaaaggagaaaaattactttacccagttgcaccaccagagccagtagaagatagaaggcgtgtacgagctattctaccttacacaaaagtaccagacactgatgaaataagtttcttaaaaggagatatgttcattgttcataatgaattagaagatggatggatgtgggttacaaatttaagaacagatgaacaaggccttattgttgaagacctagtagaagaggtgggccgggaagaagatccacatgaaggaaaaatatggttccatgggaagatttccaaacaggaagcttataatttactaatgacagttggtcaagtctgcagttttcttgtgaggccctcagataatactcctggcgattattcactttatttccggaccaatgaaaatattcagcgatttaaaatatgtccaacgccaaacaatcagtttatgatgggaggccggtattataacagcattggggacatcatagatcactatcgaaaagaacagattgttgaaggatattatcttaaggaacctgtaccaatgcaggatcaagaacaagtactcaatgacacagtggatggcaaggaaatctataataccatccgtcgtaaaacaaaggatgccttttataaaaacattgttaagaaaggttatcttctgaaaaagggcaaaggaaaacgttggaaaaatttatattttatcttagagggtagtgatgcccaacttatttattttgaaagcgaaaaacgagctaccaaaccaaaaggattaatagatctcagtgtatgttctgtctatgtcgttcatgatagtctctttggcaggccaaactgttttcagatagtagttcagcactttagtgaagaacattacatcttttactttgcaggagaaactccagaacaagcagaggattggatgaaaggtctgcaggcattttgcaatttacggaaaagtagtccagggacatccaataaacgccttcgtcaggtcagcagccttgttttacatattgaagaagcccataaactcccagtaaaacattttactaatccatattgtaacatctacctgaatagtgtccaagtagcaaaaactcatgcaagggaagggcaaaacccagtatggtcagaagagtttgtctttgatgatcttcctcctgacatcaatagatttgaaataactcttagtaataaaacaaagaaaagcaaagatcctgatatcttatttatgcgctgccagttgagccgattacagaaagggcatgccacagatgaatggtttctgctcagctcccatataccattaaaaggtattgaaccagggtccctgcgtgttcgagcacgatactctatggaaaaaatcatgccagaagaagagtacagtgaatttaaagagcttatactgcaaaaggaacttcatgtagtctatgctttatcacatgtatgtggacaagaccgaacactactggccagcatcctactgaggatttttcttcacgaaaagcttgaatcgttgttgttatgcacactaaatgacagagaaataagcatggaagatgaagccactaccctatttcgagccacaacacttgcaagcaccttgatggagcagtatatgaaagccactgctacacagtttgttcatcatgctttgaaagactctattttaaagataatggaaagcaagcagtcttgtgagttaagtccatcaaagttagaaaaaaatgaagatgtgaacactaatttaacacacctattgaacatactttcagagcttgtggagaaaatattcatggcttcagaaatacttccaccgacattgagatatatttatgggtgtttacagaaatctgttcagcataagtggcctacaaataccaccatgagaacaagagttgttagtggttttgtttttcttcgactcatctgtcctgccatcctgaatccacggatgttcaatatcatctcagattctccatctcctattgctgcaagaacactgatattagtggctaaatctgtgcagaacttagcaaatcttgtggaatttggagctaaggagccctacatggaaggtgtcaatccattcatcaaaagcaacaaacatcgtatgatcatgtttttagatgaacttgggaatgtacctgaacttccggacactacagagcattctagaacggacctgtcccgtgatttagcagcattgcatgagatttgcgtggctcattcagatgaacttcgaacgctcagtaatgagcgtggtgcacagcagcacgtattgaaaaagcttctggctataacagaactgcttcaacaaaaacaaaaccagtatacaaaaaccaatgatgtcaggtagcagccttcgccccagtgttctgcatggattcagcatgtccaacatggtaattcacttcagtttaatgtctcctttgctcttgccaaaaaatagcacacttttccacattccagtgatgtgtgagctatgcaaacaaaatccaagattctgctggtgaataactatgccagcaaccttgtaagctatctgtgcaggatatttgcactatttccacatggaatcaatctttaacaacctctgagccttggtgtacagaccacctttcacaaaacgaaatgctatgactgtatcttgatatctcgaactttcaaaatatattttcagtacacccagttgccaaagttttgctgtctcttagagaaagaactatgaaatcaactgacaagaaacacattcttattgacaattgtgtataactggattgcagactgttcttactgtaactacttcctgattaggaatatgaccatttgactgttcaatgattatttgtatttacagtttccagagtttgtcattataataggaacaatctttgctgtatacttttaaaaaatactctgctatttctcttgctggaactgttgaaagaaaatatatagaatgatctattgctcatcagctttattttttaaacatacgacttattttgttgaaattgtcaaagactgtatttagatctcataatgctttgttaaatgtttacaagtaaatagtttgaattcagtaaatattattggttgttgtattgatcaatgcatgttacccattcaaccattttatagactaccaatttcttttatgttaactagaatgcttttgttaaaagttatttgttcattatttgtgctacccctttgattatgcagacaacctcatcagctgcctaacttatccatctttgaacttctgactacttgttgtatctgctggatatttagttcaactgtatagttttatttacttctgtatgtgtatttttgtgaagtattcacaaaggttaagttaaaataaaaccaagggatatcttgcataat

SEQ ID NO: 358692 - DNA, 4437 bp, Homo sapiens
aggcagctggggagcctgggctgtggccctaggagggggcgcggcggcgggctctctccttttgttgttgtttcctcagcctggggagctgaaggggagacgcgtctgggtggggctgctcggagcccgggcctggtggcccctggggctcccgggcgggcagggtagggcagagtagagcgggcttcaacatgatggcggccgaggccggcagtgaggagggcggcccggtaacagccggagctggaggaggcggcgcggcagcgggctccagtgcctatcccgcagtgtgtcgggtgaagatacccgcggccctgcctgtggcagccgccccctatcctgggctggtggagaccggagtggctggaactctgggtggcggagccgctttggggtcagagttcctaggagccgggtctgtggcaggggcactggggggagctggactgacagggggaggtactgctgctggcgtagctggtgctgctgctggcgtggccggtgctgctgttgctggacctagtggagacatggctctcaccaaactgcccacttcgttgcttgctgagactctcgggccaggcggcggttttccccctctgccccctcccccttacctgccccctttgggggcgggcctcgggacagtggacgaaggtgactctctggatggaccagaatacgaggaggaagaggtggccataccgttgaccgctcctccaactaaccagtaagttaagactgctgttcaggaatttgggaagctggctccagaaaagaagtggaaatgaaggggtggtatcacggaaaacttgacagaacgatagcagaagaacgcctcaggcaggcagggaagtctggcagttatcttataagagagagtgatcggaggccagggtcctttgtactttcatttcttagccagatgaatgttgtcaaccattttaggattattgctatgtgtggagattactacattggtggaagacgtttttcttcactgtcagacctaataggttattacagtcatgtttcttgtttgcttaaaggagaaaaattactttacccagttgcaccaccagagccagtagaagatagaaggcgtgtacgagctattctaccttacacaaaagtaccagacactgatgaaataagtttcttaaaaggagatatgttcattgttcataatgaattagaagatggatggatgtgggttacaaatttaagaacagatgaacaaggccttattgttgaagacctagtagaagaggtgggccgggaagaagatccacatgaaggaaaaatatggttccatgggaagatttccaaacaggaagcttataatttactaatgacagttggtcaagtctgcagttttcttgtgaggccctcagataatactcctggcgattattcactttatttccggaccaatgaaaatattcagcgatttaaaatatgtccaacgccaaacaatcagtttatgatgggaggccggtattataacagcattggggacatcatagatcactatcgaaaagaacagattgttgaaggatattatcttaaggaacctgtaccaatgcaggatcaagaacaagtactcaatgacacagtggatggcaaggaaatctataataccatccgtcgtaaaacaaaggatgccttttataaaaacattgttaagaaaggttatcttctgaaaaagggcaaaggaaaacgttggaaaaatttatattttatcttagagggtagtgatgcccaacttatttattttgaaagcgaaaaacgagctaccaaaccaaaaggattaatagatctcagtgtatgttctgtctatgtcgttcatgatagtctctttggcaggccaaactgttttcagatagtagttcagcactttagtgaagaacattacatcttttactttgcaggagaaactccagaacaagcagaggattggatgaaaggtctgcaggcattttgcaatttacggaaaagtagtccagggacatccaataaacgccttcgtcaggtcagcagccttgttttacatattgaagaagcccataaactcccagtaaaacattttactaatccatattgtaacatctacctgaatagtgtccaagtagcaaaaactcatgcaagggaagggcaaaacccagtatggtcagaagagtttgtctttgatgatcttcctcctgacatcaatagatttgaaataactcttagtaataaaacaaagaaaagcaaagatcctgatatcttatttatgcgctgccagttgagccgattacagaaagggcatgccacagatgaatggtttctgctcagctcccatataccattaaaaggtattgaaccagggtccctgcgtgttcgagcacgatactctatggaaaaaatcatgccagaagaagagtacagtgaatttaaagagcttatactgcaaaaggaacttcatgtagtctatgctttatcacatgtatgtggacaagaccgaacactactggccagcatcctactgaggatttttcttcacgaaaagcttgaatcgttgttgttatgcacactaaatgacagagaaataagcatggaagatgaagccactaccctatttcgagccacaacacttgcaagcaccttgatggagcagtatatgaaagccactgctacacagtttgttcatcatgctttgaaagactctattttaaagataatggaaagcaagcagtcttgtgagttaagtccatcaaagttagaaaaaaatgaagatgtgaacactaatttaacacacctattgaacatactttcagagcttgtggagaaaatattcatggcttcagaaatacttccaccgacattgagatatatttatgggtgtttacagaaatctgttcagcataagtggcctacaaataccaccatgagaacaagagttgttagtggttttgtttttcttcgactcatctgtcctgccatcctgaatccacggatgttcaatatcatctcagattctccatctcctattgctgcaagaacactgatattagtggctaaatctgtgcagaacttagcaaatcttgtggaatttggagctaaggagccctacatggaaggtgtcaatccattcatcaaaagcaacaaacatcgtatgatcatgtttttagatgaacttgggaatgtacctgaacttccggacactacagagcattctagaacggacctgtcccgtgatttagcagcattgcatgagatttgcgtggctcattcagatgaacttcgaacgctcagtaatgagcgtggtgcacagcagcacgtattgaaaaagcttctggctataacagaactgcttcaacaaaaacaaaaccagtatacaaaaaccaatgatgtcaggtagcagccttcgccccagtgttctgcatggattcagcatgtccaacatggtaattcacttcagtttaatgtctcctttgctcttgccaaaaaatagcacacttttccacattccagtgatgtgtgagctatgcaaacaaaatccaagattctgctggtgaataactatgccagcaaccttgtaagctatctgtgcaggatatttgcactatttccacatggaatcaatctttaacaacctctgagccttggtgtacagaccacctttcacaaaacgaaatgctatgactgtatcttgatatctcgaactttcaaaatatattttcagtacacccagttgccaaagttttgctgtctcttagagaaagaactatgaaatcaactgacaagaaacacattcttattgacaattgtgtataactggattgcagactgttcttactgtaactacttcctgattaggaatatgaccatttgactgttcaatgattatttgtatttacagtttccagagtttgtcattataataggaacaatctttgctgtatacttttaaaaaatactctgctatttctcttgctggaactgttgaaagaaaatatatagaatgatctattgctcatcagctttattttttaaacatacgacttattttgttgaaattgtcaaagactgtatttagatctcataatgctttgttaaatgtttacaagtaaatagtttgaattcagtaaatattattggttgttgtattgatcaatgcatgttacccattcaaccattttatagactaccaatttcttttatgttaactagaatgcttttgttaaaagttatttgttcattatttgtgctacccctttgattatgcagacaacctcatcagctgcctaacttatccatctttgaacttctgactacttgttgtatctgctggatatttagttcaactgtatagttttatttacttctgtatgtgtatttttgtgaagtattcacaaaggttaagttaaaataaaaccaagggatatcttgcataat

SEQ ID NO: 358693 - DNA, 764 bp, Homo sapiens
  misc_feature (753)..(753): n is a, c, g, or t
  misc_feature (762)..(762): n is a, c, g, or t
gatctggtacaatggagtattatttctttaagaattataattttatgttaattatttattgtgagtgttttggaagctggtataaatattttgctactttttattaagcttcctaataatttttgtttttattttaaaggccaaactgttttcagatagtagttcagcactttagtgaagaacattacatcttttactttgcaggagaaactccagaacaagcagaggattggatgaaaggtctgcaggcattttgcaatttacggaaaagtagtccagggacatccaataaacgccttcgtcaggtcagcagccttgttttacatattgaagaagcccataaactcccagtaaaacattttactaatccatattgtaacatctacctgaatagtgtccaagtagcaaaaactcatgcaagggaagggcaaaacccagtatggtcagaagagtttgtctttgatgatcttcctcctgacatcaatagatttgaaataactcttagtaataaaacaaagaaaagcaaagatcctgatatcttatttatgcgctgccagttgagccgattacagaaagggcatgccacagatgaatggtttctgctcagctcccatataccattaaaaggtattgaaccagggtccctgcgtgttcgagcacgatactctatggaaaaaatcatgccagaagaagagtacagtgaatttaaagagctatcgcaaaggactcagtagccaagcttacacatgtagnggggggggnga

SEQ ID NO: 358694 - DNA, 4516 bp, Homo sapiens
  misc_feature (4440)..(4440): n is a, c, g, or t
  misc_feature (4442)..(4442): n is a, c, g, or t
  misc_feature (4444)..(4444): n is a, c, g, or t
  misc_feature (4449)..(4449): n is a, c, g, or t
  misc_feature (4456)..(4456): n is a, c, g, or t
  misc_feature (4463)..(4463): n is a, c, g, or t
  misc_feature (4466)..(4466): n is a, c, g, or t
  misc_feature (4468)..(4468): n is a, c, g, or t
  misc_feature (4471)..(4471): n is a, c, g, or t
  misc_feature (4474)..(4475): n is a, c, g, or t
  misc_feature (4478)..(4479): n is a, c, g, or t
  misc_feature (4488)..(4488): n is a, c, g, or t
  misc_feature (4494)..(4494): n is a, c, g, or t
  misc_feature (4497)..(4497): n is a, c, g, or t
  misc_feature (4501)..(4501): n is a, c, g, or t
aggcagctggggagcctgggctgtggccctaggagggggcgcggcggcgggctctctccttttgttgttgtttcctcagcctggggagctgaaggggagacgcgtctgggtggggctgctcggagcccgggcctggtggcccctggggctcccgggcgggcagggtagggcagagtagagcgggcttcaacatgatggcggccgaggccggcagtgaggagggcggcccggtaacagccggagctggaggaggcggcgcggcagcgggctccagtgcctatcccgcagtgtgtcgggtgaagatacccgcggccctgcctgtggcagccgccccctatcctgggctggtggagaccggagtggctggaactctgggtggcggagccgctttggggtcagagttcctaggagccgggtctgtggcaggggcactggggggagctggactgacagggggaggtactgctgctggcgtagctggtgctgctgctggcgtggccggtgctgctgttgctggacctagtggagacatggctctcaccaaactgcccacttcgttgcttgctgagactctcgggccaggcggcggttttccccctctgccccctcccccttacctgccccctttgggggcgggcctcgggacagtggacgaaggtgactctctggatggaccagaatacgaggaggaagaggtggccataccgttgaccgctcctccaactaaccagtaagttaagactgctgttcaggaatttgggaagctggctccagaaaagaagtggaaatgaaggggtggtatcacggaaaacttgacagaacgatagcagaagaacgcctcaggcaggcagggaagtctggcagttatcttataagagagagtgatcggaggccagggtcctttgtactttcatttcttagccagatgaatgttgtcaaccattttaggattattgctatgtgtggagattactacattggtggaagacgtttttcttcactgtcagacctaataggttattacagtcatgtttcttgtttgcttaaaggagaaaaattactttacccagttgcaccaccagagccagtagaagatagaaggcgtgtacgagctattctaccttacacaaaagtaccagacactgatgaaataagtttcttaaaaggagatatgttcattgttcataatgaattagaagatggatggatgtgggttacaaatttaagaacagatgaacaaggccttattgttgaagacctagtagaagaggtgggccgggaagaagatccacatgaaggaaaaatatggttccatgggaagatttccaaacaggaagcttataatttactaatgacagttggtcaagtctgcagttttcttgtgaggccctcagataatactcctggcgattattcactttatttccggaccaatgaaaatattcagcgatttaaaatatgtccaacgccaaacaatcagtttatgatgggaggccggtattataacagcattggggacatcatagatcactatcgaaaagaacagattgttgaaggatattatcttaaggaacctgtaccaatgcaggatcaagaacaagtactcaatgacacagtggatggcaaggaaatctataataccatccgtcgtaaaacaaaggatgccttttataaaaacattgttaagaaaggttatcttctgaaaaagggcaaaggaaaacgttggaaaaatttatattttatcttagagggtagtgatgcccaacttatttattttgaaagcgaaaaacgagctaccaaaccaaaaggattaatagatctcagtgtatgttctgtctatgtcgttcatgatagtctctttggcaggccaaactgttttcagatagtagttcagcactttagtgaagaacattacatcttttactttgcaggagaaactccagaacaagcagaggattggatgaaaggtctgcaggcattttgcaatttacggaaaagtagtccagggacatccaataaacgccttcgtcaggtcagcagccttgttttacatattgaagaagcccataaactcccagtaaaacattttactaatccatattgtaacatctacctgaatagtgtccaagtagcaaaaactcatgcaagggaagggcaaaacccagtatggtcagaagagtttgtctttgatgatcttcctcctgacatcaatagatttgaaataactcttagtaataaaacaaagaaaagcaaagatcctgatatcttatttatgcgctgccagttgagccgattacagaaagggcatgccacagatgaatggtttctgctcagctcccatataccattaaaaggtattgaaccagggtccctgcgtgttcgagcacgatactctatggaaaaaatcatgccagaagaagagtacagtgaatttaaagagcttatactgcaaaaggaacttcatgtagtctatgctttatcacatgtatgtggacaagaccgaacactactggccagcatcctactgaggatttttcttcacgaaaagcttgaatcgttgttgttatgcacactaaatgacagagaaataagcatggaagatgaagccactaccctatttcgagccacaacacttgcaagcaccttgatggagcagtatatgaaagccactgctacacagtttgttcatcatgctttgaaagactctattttaaagataatggaaagcaagcagtcttgtgagttaagtccatcaaagttagaaaaaaatgaagatgtgaacactaatttaacacacctattgaacatactttcagagcttgtggagaaaatattcatggcttcagaaatacttccaccgacattgagatatatttatgggtgtttacagaaatctgttcagcataagtggcctacaaataccaccatgagaacaagagttgttagtggttttgtttttcttcgactcatctgtcctgccatcctgaatccacggatgttcaatatcatctcagattctccatctcctattgctgcaagaacactgatattagtggctaaatctgtgcagaacttagcaaatcttgtggaatttggagctaaggagccctacatggaaggtgtcaatccattcatcaaaagcaacaaacatcgtatgatcatgtttttagatgaacttgggaatgtacctgaacttccggacactacagagcattctagaacggacctgtcccgtgatttagcagcattgcatgagatttgcgtggctcattcagatgaacttcgaacgctcagtaatgagcgtggtgcacagcagcacgtattgaaaaagcttctggctataacagaactgcttcaacaaaaacaaaaccagtatacaaaaaccaatgatgtcaggtagcagccttcgccccagtgttctgcatggattcagcatgtccaacatggtaattcacttcagtttaatgtctcctttgctcttgccaaaaaatagcacacttttccacattccagtgatgtgtgagctatgcaaacaaaatccaagattctgctggtgaataactatgccagcaaccttgtaagctatctgtgcaggatatttgcactatttccacatggaatcaatctttaacaacctctgagccttggtgtacagaccacctttcacaaaacgaaatgctatgactgtatcttgatatctcgaactttcaaaatatattttcagtacacccagttgccaaagttttgctgtctcttagagaaagaactatgaaatcaactgacaagaaacacattcttattgacaattgtgtataactggattgcagactgttcttactgtaactacttcctgattaggaatatgaccatttgactgttcaatgattatttgtatttacagtttccagagtttgtcattataataggaacaatctttgctgtatacttttaaaaaatactctgctatttctcttgctggaactgttgaaagaaaatatatagaatgatctattgctcatcagctttattttttaaacatacgacttattttgttgaaattgtcaaagactgtatttagatctcataatgctttgttaaatgtttacaagtaaatagtttgaattcagtaaatattattggttgttgtattgatcaatgcatgttacccattcaaccattttatagactaccaatttcttttatgttaactagaatgcttttgttaaaagttatttgttcattatttgtgctacccctttgattatgcagacaacctcatcagctgcctaacttatccatctttgaacttctgactacttgttgtatctgctggatatttagttcaactgtatagttttatttacttctgtatgtgtatttttgtgaagtattcacaaaggttaagttaaaataaaaccaagggatatcttgcataatccnancnccacncacaccnccccccnccncnccnccnnccnnccccccccncccccncanccanccccccttaaacccc

SEQ ID NO: 358695 - DNA, 3393 bp, Homo sapiens
gccggccccatggtcgagagaaataggacaggtgtagatattactgaccagaagttactgctgcaaaatttctgctctctatttttatgtattaaagctggtaagatacaccagagagatagcagacaagcaatgtggatggttgtgaatcataaaccagaaaatttgaaagaaattatcttaaaaaaaaaacaagttcctggtgaaaatttacatatgtttatgactttgaatgcactttgtaataatactacttaacatcttttcttttttatttgataattagggaaaaactaacagcttaattcttacagttggtcaagtctgcagttttcttgtgaggccctcagataatactcctggcgattattcactttatttccggaccaatgaaaatattcagcgatttaaaatatgtccaacgccaaacaatcagtttatgatgggaggccggtattataacagcattggggacatcatagatcactatcgaaaagaacagattgttgaaggatattatcttaaggaacctgtaccaatgcaggatcaagaacaagtactcaatgacacagtggatggcaaggaaatctataataccatccgtcgtaaaacaaaggatgccttttataaaaacattgttaagaaaggttatcttctgaaaaagggcaaaggaaaacgttggaaaaatttatattttatcttagagggtagtgatgcccaacttatttattttgaaagcgaaaaacgagctaccaaaccaaaaggattaatagatctcagtgtatgttctgtctatgtcgttcatgatagtctctttggcaggccaaactgttttcagatagtagttcagcactttagtgaagaacattacatcttttactttgcaggagaaactccagaacaagcagaggattggatgaaaggtctgcaggcattttgcaatttacggaaaagtagtccagggacatccaataaacgccttcgtcaggtcagcagccttgttttacatattgaagaagcccataaactcccagtaaaacattttactaatccatattgtaacatctacctgaatagtgtccaagtagcaaaaactcatgcaagggaagggcaaaacccagtatggtcagaagagtttgtctttgatgatcttcctcctgacatcaatagatttgaaataactcttagtaataaaacaaagaaaagcaaagatcctgatatcttatttatgcgctgccagttgagccgattacagaaagggcatgccacagatgaatggtttctgctcagctcccatataccattaaaaggtattgaaccagggtccctgcgtgttcgagcacgatactctatggaaaaaatcatgccagaagaagagtacagtgaatttaaagagcttatactgcaaaaggaacttcatgtagtctatgctttatcacatgtatgtggacaagaccgaacactactggccagcatcctactgaggatttttcttcacgaaaagcttgaatcgttgttgttatgcacactaaatgacagagaaataagcatggaagatgaagccactaccctatttcgagccacaacacttgcaagcaccttgatggagcagtatatgaaagccactgctacacagtttgttcatcatgctttgaaagactctattttaaagataatggaaagcaagcagtcttgtgagttaagtccatcaaagttagaaaaaaatgaagatgtgaacactaatttaacacacctattgaacatactttcagagcttgtggagaaaatattcatggcttcagaaatacttccaccgacattgagatatatttatgggtgtttacagaaatctgttcagcataagtggcctacaaataccaccatgagaacaagagttgttagtggttttgtttttcttcgactcatctgtcctgccatcctgaatccacggatgttcaatatcatctcagattctccatctcctattgctgcaagaacactgatattagtggctaaatctgtgcagaacttagcaaatcttgtggaatttggagctaaggagccctacatggaaggtgtcaatccattcatcaaaagcaacaaacatcgtatgatcatgtttttagatgaacttgggaatgtacctgaacttccggacactacagagcattctagaacggacctgtcccgtgatttagcagcattgcatgagatttgcgtggctcattcagatgaacttcgaacgctcagtaatgagcgtggtgcacagcagcacgtattgaaaaagcttctggctataacagaactgcttcaacaaaaacaaaaccagtatacaaaaaccaatgatgtcaggtagcagccttcgccccagtgttctgcatggattcagcatgtccaacatggtaattcacttcagtttaatgtctcctttgctcttgccaaaaaatagcacacttttccacattccagtgatgtgtgagctatgcaaacaaaatccaagattctgctggtgaataactatgccagcaaccttgtaagctatctgtgcaggatatttgcactatttccacatggaatcaatctttaacaacctctgagccttggtgtacagaccacctttcacaaaacgaaatgctatgactgtatcttgatatctcgaactttcaaaatatattttcagtacacccagttgccaaagttttgctgtctcttagagaaagaactatgaaatcaactgacaagaaacacattcttattgacaattgtgtataactggattgcagactgttcttactgtaactacttcctgattaggaatatgaccatttgactgttcaatgattatttgtatttacagtttccagagtttgtcattataataggaacaatctttgctgtatacttttaaaaaatactctgctatttctcttgctggaactgttgaaagaaaatatatagaatgatctattgctcatcagctttattttttaaacatacgacttattttgttgaaattgtcaaagactgtatttagatctcataatgctttgttaaatgtttacaagtaaatagtttgaattcagtaaatattattggttgttgtattgatcaatgcatgttacccattcaaccattttatagactaccaatttcttttatgttaactagaatgcttttgttaaaagttatttgttcattatttgtgctacccctttgattatgcagacaacctcatcagctgcctaacttatccatctttgaacttctgactacttgttgtatctgctggatatttagttcaactgtatagttttatttacttctgtatgtgtatttttgtgaagtattcacaaaggttaagttaaaataaaaccaagggatatcttgcataat

SEQ ID NO: 358696 - DNA, 3158 bp, Homo sapiens
tgaggaactccttatggcacatggcacattcataatattgatattttacagatttacctcaatttgacataacgacattttggggaattgtgggtgggggtgtgctttataaagtggaagaattttttccttaagactgttaaagaattattccaaaacaagaattctgacaatttcatcatgatgaaatctctgaagatatagttaaggtattctcagcatttactctgtgattaaaacaagtaatataacaaaaggcatttttgtacagatttgttataggcattttctcattatgtaagaattggcatattacataagctttggaataaaaattgattgattcatatttttagaaacactaattttaataatatgtaggatttcacaattgtttggctaagagaaaacaatttttttttttaaacaggcaaaggaaaacgttggaaaaatttatattttatcttagagggtagtgatgcccaacttatttattttgaaagcgaaaaacgagctaccaaaccaaaaggattaatagatctcagtgtatgttctgtctatgtcgttcatgatagtctctttggcaggccaaactgttttcagatagtagttcagcactttagtgaagaacattacatcttttactttgcaggagaaactccagaacaagcagaggattggatgaaaggtctgcaggcattttgcaatttacggaaaagtagtccagggacatccaataaacgccttcgtcaggtcagcagccttgttttacatattgaagaagcccataaactcccagtaaaacattttactaatccatattgtaacatctacctgaatagtgtccaagtagcaaaaactcatgcaagggaagggcaaaacccagtatggtcagaagagtttgtctttgatgatcttcctcctgacatcaatagatttgaaataactcttagtaataaaacaaagaaaagcaaagatcctgatatcttatttatgcgctgccagttgagccgattacagaaagggcatgccacagatgaatggtttctgctcagctcccatataccattaaaaggtattgaaccagggtccctgcgtgttcgagcacgatactctatggaaaaaatcatgccagaagaagagtacagtgaatttaaagagcttatactgcaaaaggaacttcatgtagtctatgctttatcacatgtatgtggacaagaccgaacactactggccagcatcctactgaggatttttcttcacgaaaagcttgaatcgttgttgttatgcacactaaatgacagagaaataagcatggaagatgaagccactaccctatttcgagccacaacacttgcaagcaccttgatggagcagtatatgaaagccactgctacacagtttgttcatcatgctttgaaagactctattttaaagataatggaaagcaagcagtcttgtgagttaagtccatcaaagttagaaaaaaatgaagatgtgaacactaatttaacacacctattgaacatactttcagagcttgtggagaaaatattcatggcttcagaaatacttccaccgacattgagatatatttatgggtgtttacagaaatctgttcagcataagtggcctacaaataccaccatgagaacaagagttgttagtggttttgtttttcttcgactcatctgtcctgccatcctgaatccacggatgttcaatatcatctcagattctccatctcctattgctgcaagaacactgatattagtggctaaatctgtgcagaacttagcaaatcttgtggaatttggagctaaggagccctacatggaaggtgtcaatccattcatcaaaagcaacaaacatcgtatgatcatgtttttagatgaacttgggaatgtacctgaacttccggacactacagagcattctagaacggacctgtcccgtgatttagcagcattgcatgagatttgcgtggctcattcagatgaacttcgaacgctcagtaatgagcgtggtgcacagcagcacgtattgaaaaagcttctggctataacagaactgcttcaacaaaaacaaaaccagtatacaaaaaccaatgatgtcaggtagcagccttcgccccagtgttctgcatggattcagcatgtccaacatggtaattcacttcagtttaatgtctcctttgctcttgccaaaaaatagcacacttttccacattccagtgatgtgtgagctatgcaaacaaaatccaagattctgctggtgaataactatgccagcaaccttgtaagctatctgtgcaggatatttgcactatttccacatggaatcaatctttaacaacctctgagccttggtgtacagaccacctttcacaaaacgaaatgctatgactgtatcttgatatctcgaactttcaaaatatattttcagtacacccagttgccaaagttttgctgtctcttagagaaagaactatgaaatcaactgacaagaaacacattcttattgacaattgtgtataactggattgcagactgttcttactgtaactacttcctgattaggaatatgaccatttgactgttcaatgattatttgtatttacagtttccagagtttgtcattataataggaacaatctttgctgtatacttttaaaaaatactctgctatttctcttgctggaactgttgaaagaaaatatatagaatgatctattgctcatcagctttattttttaaacatacgacttattttgttgaaattgtcaaagactgtatttagatctcataatgctttgttaaatgtttacaagtaaatagtttgaattcagtaaatattattggttgttgtattgatcaatgcatgttacccattcaaccattttatagactaccaatttcttttatgttaactagaatgcttttgttaaaagttatttgttcattatttgtgctacccctttgattatgcagacaacctcatcagctgcctaacttatccatctttgaacttctgactacttgttgtatctgctggatatttagttcaactgtatagttttatttacttctgtatgtgtatttttgtgaagtattcacaaaggttaagttaaaataaaaccaagggatatcttgcataat

SEQ ID NO: 358697 - DNA, 2710 bp, Homo sapiens
gatctggtacaatggagtattatttctttaagaattataattttatgttaattatttattgtgagtgttttggaagctggtataaatattttgctactttttattaagcttcctaataatttttgtttttattttaaaggccaaactgttttcagatagtagttcagcactttagtgaagaacattacatcttttactttgcaggagaaactccagaacaagcagaggattggatgaaaggtctgcaggcattttgcaatttacggaaaagtagtccagggacatccaataaacgccttcgtcaggtcagcagccttgttttacatattgaagaagcccataaactcccagtaaaacattttactaatccatattgtaacatctacctgaatagtgtccaagtagcaaaaactcatgcaagggaagggcaaaacccagtatggtcagaagagtttgtctttgatgatcttcctcctgacatcaatagatttgaaataactcttagtaataaaacaaagaaaagcaaagatcctgatatcttatttatgcgctgccagttgagccgattacagaaagggcatgccacagatgaatggtttctgctcagctcccatataccattaaaaggtattgaaccagggtccctgcgtgttcgagcacgatactctatggaaaaaatcatgccagaagaagagtacagtgaatttaaagagcttatactgcaaaaggaacttcatgtagtctatgctttatcacatgtatgtggacaagaccgaacactactggccagcatcctactgaggatttttcttcacgaaaagcttgaatcgttgttgttatgcacactaaatgacagagaaataagcatggaagatgaagccactaccctatttcgagccacaacacttgcaagcaccttgatggagcagtatatgaaagccactgctacacagtttgttcatcatgctttgaaagactctattttaaagataatggaaagcaagcagtcttgtgagttaagtccatcaaagttagaaaaaaatgaagatgtgaacactaatttaacacacctattgaacatactttcagagcttgtggagaaaatattcatggcttcagaaatacttccaccgacattgagatatatttatgggtgtttacagaaatctgttcagcataagtggcctacaaataccaccatgagaacaagagttgttagtggttttgtttttcttcgactcatctgtcctgccatcctgaatccacggatgttcaatatcatctcagattctccatctcctattgctgcaagaacactgatattagtggctaaatctgtgcagaacttagcaaatcttgtggaatttggagctaaggagccctacatggaaggtgtcaatccattcatcaaaagcaacaaacatcgtatgatcatgtttttagatgaacttgggaatgtacctgaacttccggacactacagagcattctagaacggacctgtcccgtgatttagcagcattgcatgagatttgcgtggctcattcagatgaacttcgaacgctcagtaatgagcgtggtgcacagcagcacgtattgaaaaagcttctggctataacagaactgcttcaacaaaaacaaaaccagtatacaaaaaccaatgatgtcaggtagcagccttcgccccagtgttctgcatggattcagcatgtccaacatggtaattcacttcagtttaatgtctcctttgctcttgccaaaaaatagcacacttttccacattccagtgatgtgtgagctatgcaaacaaaatccaagattctgctggtgaataactatgccagcaaccttgtaagctatctgtgcaggatatttgcactatttccacatggaatcaatctttaacaacctctgagccttggtgtacagaccacctttcacaaaacgaaatgctatgactgtatcttgatatctcgaactttcaaaatatattttcagtacacccagttgccaaagttttgctgtctcttagagaaagaactatgaaatcaactgacaagaaacacattcttattgacaattgtgtataactggattgcagactgttcttactgtaactacttcctgattaggaatatgaccatttgactgttcaatgattatttgtatttacagtttccagagtttgtcattataataggaacaatctttgctgtatacttttaaaaaatactctgctatttctcttgctggaactgttgaaagaaaatatatagaatgatctattgctcatcagctttattttttaaacatacgacttattttgttgaaattgtcaaagactgtatttagatctcataatgctttgttaaatgtttacaagtaaatagtttgaattcagtaaatattattggttgttgtattgatcaatgcatgttacccattcaaccattttatagactaccaatttcttttatgttaactagaatgcttttgttaaaagttatttgttcattatttgtgctacccctttgattatgcagacaacctcatcagctgcctaacttatccatctttgaacttctgactacttgttgtatctgctggatatttagttcaactgtatagttttatttacttctgtatgtgtatttttgtgaagtattcacaaaggttaagttaaaataaaaccaagggatatcttgcataat

SEQ ID NO: 358698 - DNA, 2586 bp, Homo sapiens
gtcggtaccgataaactattacagcataaactattcagcttcctacactattaagtttaccacagcataaactattcaagcagagtgctgtttttctttgcaggattggatgaaaggtctgcaggcattttgcaatttacggaaaagtagtccagggacatccaataaacgccttcgtcaggtcagcagccttgttttacatattgaagaagcccataaactcccagtaaaacattttactaatccatattgtaacatctacctgaatagtgtccaagtagcaaaaactcatgcaagggaagggcaaaacccagtatggtcagaagagtttgtctttgatgatcttcctcctgacatcaatagatttgaaataactcttagtaataaaacaaagaaaagcaaagatcctgatatcttatttatgcgctgccagttgagccgattacagaaagggcatgccacagatgaatggtttctgctcagctcccatataccattaaaaggtattgaaccagggtccctgcgtgttcgagcacgatactctatggaaaaaatcatgccagaagaagagtacagtgaatttaaagagcttatactgcaaaaggaacttcatgtagtctatgctttatcacatgtatgtggacaagaccgaacactactggccagcatcctactgaggatttttcttcacgaaaagcttgaatcgttgttgttatgcacactaaatgacagagaaataagcatggaagatgaagccactaccctatttcgagccacaacacttgcaagcaccttgatggagcagtatatgaaagccactgctacacagtttgttcatcatgctttgaaagactctattttaaagataatggaaagcaagcagtcttgtgagttaagtccatcaaagttagaaaaaaatgaagatgtgaacactaatttaacacacctattgaacatactttcagagcttgtggagaaaatattcatggcttcagaaatacttccaccgacattgagatatatttatgggtgtttacagaaatctgttcagcataagtggcctacaaataccaccatgagaacaagagttgttagtggttttgtttttcttcgactcatctgtcctgccatcctgaatccacggatgttcaatatcatctcagattctccatctcctattgctgcaagaacactgatattagtggctaaatctgtgcagaacttagcaaatcttgtggaatttggagctaaggagccctacatggaaggtgtcaatccattcatcaaaagcaacaaacatcgtatgatcatgtttttagatgaacttgggaatgtacctgaacttccggacactacagagcattctagaacggacctgtcccgtgatttagcagcattgcatgagatttgcgtggctcattcagatgaacttcgaacgctcagtaatgagcgtggtgcacagcagcacgtattgaaaaagcttctggctataacagaactgcttcaacaaaaacaaaaccagtatacaaaaaccaatgatgtcaggtagcagccttcgccccagtgttctgcatggattcagcatgtccaacatggtaattcacttcagtttaatgtctcctttgctcttgccaaaaaatagcacacttttccacattccagtgatgtgtgagctatgcaaacaaaatccaagattctgctggtgaataactatgccagcaaccttgtaagctatctgtgcaggatatttgcactatttccacatggaatcaatctttaacaacctctgagccttggtgtacagaccacctttcacaaaacgaaatgctatgactgtatcttgatatctcgaactttcaaaatatattttcagtacacccagttgccaaagttttgctgtctcttagagaaagaactatgaaatcaactgacaagaaacacattcttattgacaattgtgtataactggattgcagactgttcttactgtaactacttcctgattaggaatatgaccatttgactgttcaatgattatttgtatttacagtttccagagtttgtcattataataggaacaatctttgctgtatacttttaaaaaatactctgctatttctcttgctggaactgttgaaagaaaatatatagaatgatctattgctcatcagctttattttttaaacatacgacttattttgttgaaattgtcaaagactgtatttagatctcataatgctttgttaaatgtttacaagtaaatagtttgaattcagtaaatattattggttgttgtattgatcaatgcatgttacccattcaaccattttatagactaccaatttcttttatgttaactagaatgcttttgttaaaagttatttgttcattatttgtgctacccctttgattatgcagacaacctcatcagctgcctaacttatccatctttgaacttctgactacttgttgtatctgctggatatttagttcaactgtatagttttatttacttctgtatgtgtatttttgtgaagtattcacaaaggttaagttaaaataaaaccaagggatatcttgcataat

SEQ ID NO: 358699 - DNA, 4304 bp, Homo sapiens
aggcagctggggagcctgggctgtggccctaggagggggcgcggcggcgggctctctccttttgttgttgtttcctcagcctggggagctgaaggggagacgcgtctgggtggggctgctcggagcccgggcctggtggcccctggggctcccgggcgggcagggtagggcagagtagagcgggcttcaacatgatggcggccgaggccggcagtgaggagggcggcccggtaacagccggagctggaggaggcggcgcggcagcgggctccagtgcctatcccgcagtgtgtcgggtgaagatacccgcggccctgcctgtggcagccgccccctatcctgggctggtggagaccggagtggctggaactctgggtggcggagccgctttggggtcagagttcctaggagccgggtctgtggcaggggcactggggggagctggactgacagggggaggtactgctgctggcgtagctggtgctgctgctggcgtggccggtgctgctgttgctggacctagtggagacatggctctcaccaaactgcccacttcgttgcttgctgagactctcgggccaggcggcggttttccccctctgccccctcccccttacctgccccctttgggggcgggcctcgggacagtggacgaaggtgactctctggatggaccagaatacgaggaggaagaggtggccataccgttgaccgctcctccaactaaccagtggtatcacggaaaacttgacagaacgatagcagaagaacgcctcaggcaggcagggaagtctggcagttatcttataagagagagtgatcggaggccagggtcctttgtactttcatttcttagccagatgaatgttgtcaaccattttaggattattgctatgtgtggagattactacattggtggaagacgtttttcttcactgtcagacctaataggttattacagtcatgtttcttgtttgcttaaaggagaaaaattactttacccagttgcaccaccagagccagtagaagatagaaggcgtgtacgagctattctaccttacacaaaagtaccagacactgatgaaataagtttcttaaaaggagatatgttcattgttcataatgaattagaagatggatggatgtgggttacaaatttaagaacagatgaacaaggccttattgttgaagacctagtagaagaggtgggccgggaagaagatccacatgaaggaaaaatatggttccatgggaagatttccaaacaggaagcttataatttactaatgacagttggtcaagtctgcagttttcttgtgaggccctcagataatactcctggcgattattcactttatttccggaccaatgaaaatattcagcgatttaaaatatgtccaacgccaaacaatcagtttatgatgggaggccggtattataacagcattggggacatcatagatcactatcgaaaagaacagattgttgaaggatattatcttaaggaacctgtaccaatgcaggatcaagaacaagtactcaatgacacagtggatggcaaggaaatctataataccatccgtcgtaaaacaaaggatgccttttataaaaacattgttaagaaaggttatcttctgaaaaagggcaaaggaaaacgttggaaaaatttatattttatcttagagggtagtgatgcccaacttatttattttgaaagcgaaaaacgagctaccaaaccaaaaggattaatagatctcagtgtatgttctgtctatgtcgttcatgatagtctctttggcaggccaaactgttttcagatagtagttcagcactttagtgaagaacattacatcttttactttgcaggagaaactccagaacaagcagaggattggatgaaaggtctgcaggcattttgcaatttacggaaaagtagtccagggacatccaataaacgccttcgtcaggtcagcagccttgttttacatattgaagaagcccataaactcccagtaaaacattttactaatccatattgtaacatctacctgaatagtgtccaagtagcaaaaactcatgcaagggaagggcaaaacccagtatggtcagaagagtttgtctttgatgatcttcctcctgacatcaatagatttgaaataactcttagtaataaaacaaagaaaagcaaagatcctgatatcttatttatgcgctgccagttgagccgattacagaaagggcatgccacagatgaatggtttctgctcagctcccatataccattaaaaggtattgaaccagggtccctgcgtgttcgagcacgatactctatggaaaaaatcatgccagaagaagagtacagtgaatttaaagagcttatactgcaaaaggaacttcatgtagtctatgctttatcacatgtatgtggacaagaccgaacactactggccagcatcctactgaggatttttcttcacgaaaagcttgaatcgttgttgttatgcacactaaatgacagagaaataagcatggaagatgaagccactaccctatttcgagccacaacacttgcaagcaccttgatggagcagtatatgaaagccactgctacacagtttgttcatcatgctttgaaagactctattttaaagataatggaaagcaagcagtcttgtgagttaagtccatcaaagttagaaaaaaatgaagatgtgaacactaatttaacacacctattgaacatactttcagagcttgtggagaaaatattcatggcttcagaaatacttccaccgacattgagatatatttatgggtgtttacagaaatctgttcagcataagtggcctacaaataccaccatgagaacaagagttgttagattctccatctcctattgctgcaagaacactgatattagtggctaaatctgtgcagaacttagcaaatcttgtggaatttggagctaaggagccctacatggaaggtgtcaatccattcatcaaaagcaacaaacatcgtatgatcatgtttttagatgaacttgggaatgtacctgaacttccggacactacagagcattctagaacggacctgtcccgtgatttagcagcattgcatgagatttgcgtggctcattcagatgaacttcgaacgctcagtaatgagcgtggtgcacagcagcacgtattgaaaaagcttctggctataacagaactgcttcaacaaaaacaaaaccagtatacaaaaaccaatgatgtcaggtagcagccttcgccccagtgttctgcatggattcagcatgtccaacatggtaattcacttcagtttaatgtctcctttgctcttgccaaaaaatagcacacttttccacattccagtgatgtgtgagctatgcaaacaaaatccaagattctgctggtgaataactatgccagcaaccttgtaagctatctgtgcaggatatttgcactatttccacatggaatcaatctttaacaacctctgagccttggtgtacagaccacctttcacaaaacgaaatgctatgactgtatcttgatatctcgaactttcaaaatatattttcagtacacccagttgccaaagttttgctgtctcttagagaaagaactatgaaatcaactgacaagaaacacattcttattgacaattgtgtataactggattgcagactgttcttactgtaactacttcctgattaggaatatgaccatttgactgttcaatgattatttgtatttacagtttccagagtttgtcattataataggaacaatctttgctgtatacttttaaaaaatactctgctatttctcttgctggaactgttgaaagaaaatatatagaatgatctattgctcatcagctttattttttaaacatacgacttattttgttgaaattgtcaaagactgtatttagatctcataatgctttgttaaatgtttacaagtaaatagtttgaattcagtaaatattattggttgttgtattgatcaatgcatgttacccattcaaccattttatagactaccaatttcttttatgttaactagaatgcttttgttaaaagttatttgttcattatttgtgctacccctttgattatgcagacaacctcatcagctgcctaacttatccatctttgaacttctgactacttgttgtatctgctggatatttagttcaactgtatagttttatttacttctgtatgtgtatttttgtgaagtattcacaaaggttaagttaaaataaaaccaagggatatcttgcataat

SEQ ID NO: 358700 - DNA, 2314 bp, Homo sapiens
tattgaatttgtgatgttactgaaaactcctttaatgaaaagcatttaacaccatagggaagactgaacaccaggaaaatttacttgcatgactaattatcgtgttctctttttaaacaataattgcttgtttttcttcccaagtatttatgcgctgccagttgagccgattacagaaagggcatgccacagatgaatggtttctgctcagctcccatataccattaaaaggtattgaaccagggtccctgcgtgttcgagcacgatactctatggaaaaaatcatgccagaagaagagtacagtgaatttaaagagcttatactgcaaaaggaacttcatgtagtctatgctttatcacatgtatgtggacaagaccgaacactactggccagcatcctactgaggatttttcttcacgaaaagcttgaatcgttgttgttatgcacactaaatgacagagaaataagcatggaagatgaagccactaccctatttcgagccacaacacttgcaagcaccttgatggagcagtatatgaaagccactgctacacagtttgttcatcatgctttgaaagactctattttaaagataatggaaagcaagcagtcttgtgagttaagtccatcaaagttagaaaaaaatgaagatgtgaacactaatttaacacacctattgaacatactttcagagcttgtggagaaaatattcatggcttcagaaatacttccaccgacattgagatatatttatgggtgtttacagaaatctgttcagcataagtggcctacaaataccaccatgagaacaagagttgttagtggttttgtttttcttcgactcatctgtcctgccatcctgaatccacggatgttcaatatcatctcagattctccatctcctattgctgcaagaacactgatattagtggctaaatctgtgcagaacttagcaaatcttgtggaatttggagctaaggagccctacatggaaggtgtcaatccattcatcaaaagcaacaaacatcgtatgatcatgtttttagatgaacttgggaatgtacctgaacttccggacactacagagcattctagaacggacctgtcccgtgatttagcagcattgcatgagatttgcgtggctcattcagatgaacttcgaacgctcagtaatgagcgtggtgcacagcagcacgtattgaaaaagcttctggctataacagaactgcttcaacaaaaacaaaaccagtatacaaaaaccaatgatgtcaggtagcagccttcgccccagtgttctgcatggattcagcatgtccaacatggtaattcacttcagtttaatgtctcctttgctcttgccaaaaaatagcacacttttccacattccagtgatgtgtgagctatgcaaacaaaatccaagattctgctggtgaataactatgccagcaaccttgtaagctatctgtgcaggatatttgcactatttccacatggaatcaatctttaacaacctctgagccttggtgtacagaccacctttcacaaaacgaaatgctatgactgtatcttgatatctcgaactttcaaaatatattttcagtacacccagttgccaaagttttgctgtctcttagagaaagaactatgaaatcaactgacaagaaacacattcttattgacaattgtgtataactggattgcagactgttcttactgtaactacttcctgattaggaatatgaccatttgactgttcaatgattatttgtatttacagtttccagagtttgtcattataataggaacaatctttgctgtatacttttaaaaaatactctgctatttctcttgctggaactgttgaaagaaaatatatagaatgatctattgctcatcagctttattttttaaacatacgacttattttgttgaaattgtcaaagactgtatttagatctcataatgctttgttaaatgtttacaagtaaatagtttgaattcagtaaatattattggttgttgtattgatcaatgcatgttacccattcaaccattttatagactaccaatttcttttatgttaactagaatgcttttgttaaaagttatttgttcattatttgtgctacccctttgattatgcagacaacctcatcagctgcctaacttatccatctttgaacttctgactacttgttgtatctgctggatatttagttcaactgtatagttttatttacttctgtatgtgtatttttgtgaagtattcacaaaggttaagttaaaataaaaccaagggatatcttgcataat

SEQ ID NO: 358701 - DNA, 3240 bp, Homo sapiens
aggcagctggggagcctgggctgtggccctaggagggggcgcggcggcgggctctctccttttgttgttgtttcctcagcctggggagctgaaggggagacgcgtctgggtggggctgctcggagcccgggcctggtggcccctggggctcccgggcgggcagggtagggcagagtagagcgggcttcaacatgatggcggccgaggccggcagtgaggagggcggcccggtaacagccggagctggaggaggcggcgcggcagcgggctccagtgcctatcccgcagtgtgtcgggtgaagatacccgcggccctgcctgtggcagccgccccctatcctgggctggtggagaccggagtggctggaactctgggtggcggagccgctttggggtcagagttcctaggagccgggtctgtggcaggggcactggggggagctggactgacagggggaggtactgctgctggcgtagctggtgctgctgctggcgtggccggtgctgctgttgctggacctagtggagacatggctctcaccaaactgcccacttcgttgcttgctgagactctcgggccaggcggcggttttccccctctgccccctcccccttacctgccccctttgggggcgggcctcgggacagtggacgaaggtgactctctggatggaccagaatacgaggaggaagaggtggccataccgttgaccgctcctccaactaaccagtggtatcacggaaaacttgacagaacgatagcagaagaacgcctcaggcaggcagggaagtctggcagttatcttataagagagagtgatcggaggccagggtcctttgtactttcatttcttagccagatgaatgttgtcaaccattttaggattattgctatgtgtggagattactacattggtggaagacgtttttcttcactgtcagacctaataggttattacagtcatgtttcttgtttgcttaaaggagaaaaattactttacccagttgcaccaccagagccagtagaagatagaaggcgtgtacgagctattctaccttacacaaaagtaccagacactgatgaaataagtttcttaaaaggagatatgttcattgttcataatgaattagaagatggatggatgtgggttacaaatttaagaacagatgaacaaggccttattgttgaagacctagtagaagaggtgggccgggaagaagatccacatgaaggaaaaatatggttccatgggaagatttccaaacaggaagcttataatttactaatgacagttggtcaagtctgcagttttcttgtgaggccctcagataatactcctggcgattattcactttatttccggaccaatgaaaatattcagcgatttaaaatatgtccaacgccaaacaatcagtttatgatgggaggccggtattataacagcattggggacatcatagatcactatcgaaaagaacagattgttgaaggatattatcttaaggaacctgtaccaatgcaggatcaagaacaagtactcaatgacacagtggatggcaaggaaatctataataccatccgtcgtaaaacaaaggatgccttttataaaaacattgttaagaaaggttatcttctgaaaaagggcaaaggaaaacgttggaaaaatttatattttatcttagagggtagtgatgcccaacttatttattttgaaagcgaaaaacgagctaccaaaccaaaaggattaatagatctcagtgtatgttctgtctatgtcgttcatgatagtctctttggcaggccaaactgttttcagatagtagttcagcactttagtgaagaacactgatattagtggctaaatctgtgcagaacttagcaaatcttgtggaatttggagctaaggagccctacatggaaggtgtcaatccattcatcaaaagcaacaaacatcgtatgatcatgtttttagatgaacttgggaatgtacctgaacttccggacactacagagcattctagaacggacctgtcccgtgatttagcagcattgcatgagatttgcgtggctcattcagatgaacttcgaacgctcagtaatgagcgtggtgcacagcagcacgtattgaaaaagcttctggctataacagaactgcttcaacaaaaacaaaaccagtatacaaaaaccaatgatgtcaggtagcagccttcgccccagtgttctgcatggattcagcatgtccaacatggtaattcacttcagtttaatgtctcctttgctcttgccaaaaaatagcacacttttccacattccagtgatgtgtgagctatgcaaacaaaatccaagattctgctggtgaataactatgccagcaaccttgtaagctatctgtgcaggatatttgcactatttccacatggaatcaatctttaacaacctctgagccttggtgtacagaccacctttcacaaaacgaaatgctatgactgtatcttgatatctcgaactttcaaaatatattttcagtacacccagttgccaaagttttgctgtctcttagagaaagaactatgaaatcaactgacaagaaacacattcttattgacaattgtgtataactggattgcagactgttcttactgtaactacttcctgattaggaatatgaccatttgactgttcaatgattatttgtatttacagtttccagagtttgtcattataataggaacaatctttgctgtatacttttaaaaaatactctgctatttctcttgctggaactgttgaaagaaaatatatagaatgatctattgctcatcagctttattttttaaacatacgacttattttgttgaaattgtcaaagactgtatttagatctcataatgctttgttaaatgtttacaagtaaatagtttgaattcagtaaatattattggttgttgtattgatcaatgcatgttacccattcaaccattttatagactaccaatttcttttatgttaactagaatgcttttgttaaaagttatttgttcattatttgtgctacccctttgattatgcagacaacctcatcagctgcctaacttatccatctttgaacttctgactacttgttgtatctgctggatatttagttcaactgtatagttttatttacttctgtatgtgtatttttgtgaagtattcacaaaggttaagttaaaataaaaccaagggatatcttgcataat

SEQ ID NO: 358702 - DNA, 1474 bp, Homo sapiens
agttgagacagtctgtgctgtaatcccgaagttaatcgagcaccgtacgatggaattggtgtcaactccaatgctagtcaaaatgcatctcaacaatcagttatgatcatgttgggagatgacctgggtaatgtactctgacctgttcggcaccctacataggatacgacaagggacctggtcccgctcgagtagtatcagcagttgcgatgagcattccgtgtgcgctcatgtcagatgcacactatcgaacatcagctacagtaaattgcagcgtgtgttagccaagcatggtgtttggcaccagctacttggctaataacatgaaagatgcttcaggctgagaggacaaatagcagtgataccccaagagacgcgacatggaaatggttgacgagtgaggacaacgccgcatgtactgtgccgccagatcgttgtcatcgcactagtgcacttcagtcgaatgtcacaatagcataggtcaagttctacttcagtttaatgtctcctttgctcttgccaaaaaatagcacacttttccacattccagtgatgtgtgagctatgcaaacaaaatccaagattctgctggtgaataactatgccagcaaccttgtaagctatctgtgcaggatatttgcactatttccacatggaatcaatctttaacaacctctgagccttggtgtacagaccacctttcacaaaacgaaatgctatgactgtatcttgatatctcgaactttcaaaatatattttcagtacacccagttgccaaagttttgctgtctcttagagaaagaactatgaaatcaactgacaagaaacacattcttattgacaattgtgtataactggattgcagactgttcttactgtaactacttcctgattaggaatatgaccatttgactgttcaatgattatttgtatttacagtttccagagtttgtcattataataggaacaatctttgctgtatacttttaaaaaatactctgctatttctcttgctggaactgttgaaagaaaatatatagaatgatctattgctcatcagctttattttttaaacatacgacttattttgttgaaattgtcaaagactgtatttagatctcataatgctttgttaaatgtttacaagtaaatagtttgaattcagtaaatattattggttgttgtattgatcaatgcatgttacccattcaaccattttatagactaccaatttcttttatgttaactagaatgcttttgttaaaagttatttgttcattatttgtgctacccctttgattatgcagacaacctcatcagctgcctaacttatccatctttgaacttctgactacttgttgtatctgctggatatttagttcaactgtatagttttatttacttctgtatgtgtatttttgtgaagtattcacaaaggttaagttaaaataaaaccaagggatatcttgcataat

SEQ ID NO: 358703 - DNA, 3431 bp, Homo sapiens
aggcagctggggagcctgggctgtggccctaggagggggcgcggcggcgggctctctccttttgttgttgtttcctcagcctggggagctgaaggggagacgcgtctgggtggggctgctcggagcccgggcctggtggcccctggggctcccgggcgggcagggtagggcagagtagagcgggcttcaacatgatggcggccgaggccggcagtgaggagggcggcccggtaacagccggagctggaggaggcggcgcggcagcgggctccagtgcctatcccgcagtgtgtcgggtgaagatacccgcggccctgcctgtggcagccgccccctatcctgggctggtggagaccggagtggctggaactctgggtggcggagccgctttggggtcagagttcctaggagccgggtctgtggcaggggcactggggggagctggactgacagggggaggtactgctgctggcgtagctggtgctgctgctggcgtggccggtgctgctgttgctggacctagtggagacatggctctcaccaaactgcccacttcgttgcttgctgagactctcgggccaggcggcggttttccccctctgccccctcccccttacctgccccctttgggggcgggcctcgggacagtggacgaaggtgactctctggatggaccagaatacgaggaggaagaggtggccataccgttgaccgctcctccaactaaccagtggtatcacggaaaacttgacagaacgatagcagaagaacgcctcaggcaggcagggaagtctggcagttatcttataagagagagtgatcggaggccagggtcctttgtactttcatttcttagccagatgaatgttgtcaaccattttaggattattgctatgtgtggagattactacattggtggaagacgtttttcttcactgtcagacctaataggttattacagtcatgtttcttgtttgcttaaaggagaaaaattactttacccagttgcaccaccagagccagtagaagatagaaggcgtgtacgagctattctaccttacacaaaagtaccagacactgatgaaataagtttcttaaaaggagatatgttcattgttcataatgaattagaagatggatggatgtgggttacaaatttaagaacagatgaacaaggccttattgttgaagacctagtagaagaggtgggccgggaagaagatccacatgaaggaaaaatatggttccatgggaagatttccaaacaggaagcttataatttactaatgacagttggtcaagtctgcagttttcttgtgaggccctcagataatactcctggcgattattcactttatttccggaccaatgaaaatattcagcgatttaaaatatgtccaacgccaaacaatcagtttatgatgggaggccggtattataacagcattggggacatcatagatcactatcgaaaagaacagattgttgaaggatattatcttaaggaacctgtaccaatgcaggatcaagaacaagtactcaatgacacagtggatggcaaggaaatctataataccatccgtcgtaaaacaaaggatgccttttataaaaacattgttaagaaaggttatcttctgaaaaagggcaaaggaaaacgttggaaaaatttatattttatcttagagggtagtgatgcccaacttatttattttgaaagcgaaaaacgagctaccaaaccaaaaggattaatagatctcagtgtatgttctgtctatgtcgttcatgatagtctctttggcaggccaaactgttttcagatagtagttcagcactttagtgaagaacattacatcttttactttgcaggagaaactccagaacaagcagaggattggatgaaaggtctgcaggcattttgcaatttacggaaaagtagtccagggacatccaataaacgccttcgtcaggtcagcagccttgttttacatattgaagaagcccataaactcccagtaaaacattttactaatccatattgtaacatctacctgaatagtgtccaagtagcaaaaactcatgcaagggaagggcaaaacccagtatggtcagaagagtttgtctttgatgatcttcctcctgacatcaatagatttgaaataactcttagtaataaaacaaagaaaagcaaagatcctgatatcttatttatgcgctgccagttgagccgattacagaaagggcatgccacagatgaatggtttctgctcagctcccatataccattaaaaggtattgaaccagggtccctgcgtgttcgagcacgatactctatggaaaaaatcatgccagaagaagagtacagtgaatttaaagagcttatactgcaaaaggaacttcatgtagtctatgctttatcacatgtatgtggacaagaccgaacactactggccagcatcctactgaggatttttcttcacgaaaagcttgaatcgttgttgttatgcacactaaatgacagagaaataagcatggaagatgaagccactaccctatttcgagccacaacacttgcaagcaccttgatggagcagtatatgaaagccactgctacacagtttgttcatcatgctttgaaagactctattttaaagataatggaaagcaagcagtcttgtgagttaagtccatcaaagttagaaaaaaatgaagatgtgaacactaatttaacacacctattgaacatactttcagagcttgtggagaaaatattcatggcttcagaaatacttccaccgtaagtggtgaaattttcatttgacaagaaattgtgtatctatgtcttcagaaatttctatttctaaaacgtgaaagcttttctgttgtcctaatattattatactctgaaaaagtcatggttaatctttatgagatgaattgtatttaaagaaaatagctgtcttaataaaaccacccattattttcgtacaagccaatatgtctggtttgtactgtagtagcttggggagtgaatagaggtttatagtttcagatttgagattgtaaaagatatcttgtctatccatttagtctatacttgatagactaatcactctgttaatatgcttgtcggcctccagtattagtgaactcacttgttcaggtagaagttaacttaagtctaaatcttgctccccagaatttgcagctggttggttctctatatctgaaagtaaatgtcaggaagttgactgaataaattgatgataaacttagtggataaagttttccttaccccttgctaaatgcctcattacctgtggcaaaatacttttttgggtaaaaggccagttttattgaactgtggtatatttgggtaaattaagcttttggctgctaggagatcagtgttttcacttgctttctgtgttgag

SEQ ID NO: 358704 - DNA, 1550 bp, Homo sapiens
aggcagctggggagcctgggctgtggccctaggagggggcgcggcggcgggctctctccttttgttgttgtttcctcagcctggggagctgaaggggagacgcgtctgggtggggctgctcggagcccgggcctggtggcccctggggctcccgggcgggcagggtagggcagagtagagcgggcttcaacatgatggcggccgaggccggcagtgaggagggcggcccggtaacagccggagctggaggaggcggcgcggcagcgggctccagtgcctatcccgcagtgtgtcgggtgaagatacccgcggccctgcctgtggcagccgccccctatcctgggctggtggagaccggagtggctggaactctgggtggcggagccgctttggggtcagagttcctaggagccgggtctgtggcaggggcactggggggagctggactgacagggggaggtactgctgctggcgtagctggtgctgctgctggcgtggccggtgctgctgttgctggacctagtggagacatggctctcaccaaactgcccacttcgttgcttgctgagactctcgggccaggcggcggttttccccctctgccccctcccccttacctgccccctttgggggcgggcctcgggacagtggacgaaggtgactctctggatggaccagaatacgaggaggaagaggtggccataccgttgaccgctcctccaactaaccagtggtatcacggaaaacttgacagaacgatagcagaagaacgcctcaggcaggcagggaagtctggcagttatcttataagagagagtgatcggaggccagggtcctttgtactttcatttcttagccagatgaatgttgtcaaccattttaggattattgctatgtgtggagattactacattggtggaagacgtttttcttcactgtcagacctaataggttattacagtcatgtttcttgtttgcttaaaggagaaaaattactttacccagttgcaccaccagagccagtagaagatagaaggcgtgtacgagctattctaccttacacaaaagtaccagacactgatgaaataaggtattttataatctattctcatgtataggcatttgaaagagctagacttcgaagatttattactcttggactaggaagcttttgaaatttgaagaaatggcatacagcaaggtgaaagagcttttgatattgggtctgttggtcctgtatctctgggttggcttatttgttcagactgtggttttggatcagggtggcctcagtgaatatgataggagaaatagttaggttttattccactgtctctcacaaagtaaggagagttctgcttcaatctatatgctatgtaaatttttgttaccatgtgacatttatgccacagctataaaggataagcttctactttatgtaatgggtgaataattttaaaccttaggaatgttatagaactatgcaacatgttagtttgtggttttatttctatataattatataatttgataatcagattatctgtgtc

SEQ ID NO: 358705 - DNA, 1142 bp, Homo sapiens
ggatggttggcttctggcattaggtgatcccctgggtccttgcaactccagcctgattgctctgccctcaatttcccttttattacaggaatttaaagcttctttagcgtcttcgaatgaagcaaactctataaatgcataccctttagatttgccattttggttctggggtactttcttggtgtaacgaactaatagcgcattctggaatttgtactctccaagctgctcaaaaagctcacaattttgtttgattaaattctgaggctcttccgtcgcagagtttcgccatggcccggggccccaagaagcacttaaagcgtgttgcagcgccgaagcattggatgcttgacaaactaacgggtgtatttgcacctcgtccatcgacaggtccccacaagctgagggaatgtcttcctctgatcgtcttcctcaggaatagactcaagtatgcgttgactggagatgaggtaaagaagatatgtatgcaacgtttcatcaaaattgatggcaaggttcgagtggatgtcacataccctgctggattcatggatgtcatcagcatcgagaagacaggtgaacatttccgcctggtctatgacaccaagggccgttttgctgttcaccgcatcacagtggaagaggcaaagtacaagttgtgcaaagtgaggaagattactgtgggagtgaagggaatccctcacctggtgactcatgatgctcgaaccatccgctacccagatcctgtcatcaaggtgaacgatactgtgcagattgatttagggactggcaagataatcaactttatcaaatttgatacaggcaatttgtgtatggtgattggtggagccaacctcggtcgtgttggtgtgatcaccaacagggaaagacatcctggttcttttgatgtggtgcatgtgaaggatgccaatggcaacagctttgccacgaggctttccaacatttttgtcattggcaatggcaataaaccttggatttccctgcccaggggaaagggcattcgacttactgttgctgaagagagagataagaggctggccaccaaacagagcagtggctaaattgcagtagcagcatatctttttttctttgcacaaataaacagtgaattctcgtttctt

SEQ ID NO: 358706 - DNA, 1191 bp, Homo sapiens
  misc_feature (966)..(966): n is a, c, g, or t
ggctaggtagggctggtgtgtaatcggcaccgaggcagagtttcgccatggcccggggccccaagaagcacttaaagcgtgttgcagcgccgaagcattggatgcttgacaaactaacgggtgtatttgcacctcgtccatcgacaggtccccacaagctgagggaatgtcttcctctgatcgtcttcctcaggaatagactcaagtatgcgttgactggagatgaggtaaagaagatatgtatgcaacgtttcatcaaaattgatggcaaggttcgagtggatgtcacataccctgctggattcatggatgtcatcagcatcgagaagacaggtgaacatttccgcctggtctatgacaccaagggccgttttgctgttcaccgcatcacagtggaagaggcaaagtacaagttgtgcaaagtgaggaagattactgtgggagtgaagggaatccctcacctggtgactcatgatgctcgaaccatccgctacccagatcctgtcatcaaggtgaacgatactgtgcagattgatttagggactggcaagataatcaactttatcaaatttgatacaggcaatttgtgtatggtgattggtggagccaacctcggtcgtgttggtgtgatcaccaacagggaaagacatcctggttcttttgatgtggtgcatgtgaaggatgccaatggcaacagctttgccacgaggctttccaacatttttgtcattggcaatggcaataaaccttggatttccctgcccaggggaaagggcattcgacttactgttgctgaagagagagataagaggctggccaccaaacagagcagtggctaaattgcagtagcagcatatctttttttctttgcacaaataaacagtgaattctcgtttcttggccaataacggtgcagttttccgttaacacaacaacgaaaaacccctacggggctcatatattcgngggcggcaaagaaagcgctccatgaaagttgcacatcggtcgtacatatgtgtccgggcacccgttcttgttccaaggggagaatatacagcgccccatagagagcgcataatttggaacggtcgcggatataaggagttgaaacagcaccatcgttagtagtagccattgtgcacatggcgcgtatcactcatagagatctacctgagccgacagcaatataca

SEQ ID NO: 358707 - DNA, 432 bp, Homo sapiens
ttatgcccggcgtgcaagaggaccccatcgcgaatcaccatcaaggtgaacgatactgtgcagattgatttagggactggcaagataatcaactttatcaaatttgatacaggcaatttgtgtatggtgattggtggagccaacctcggtcgtgttggtgtgatcaccaacagggaaagacatcctggttcttttgatgtggtgcatgtgaaggatgccaatggcaacagctttgccacgaggctttccaacatttttgtcattggcaatggcaataaaccttggatttccctgcccaggggaaagggcattcgacttactgttgctgaagagagagataagaggctggccaccaaacagagcagtggctaaattgcagtagcagcatatctttttttctttgcacaaataaacagtgaattctcgtttctt

SEQ ID NO: 358708 - DNA, 976 bp, Homo sapiens
cccacaggttttcagcggtggagtttgggatctgagcttggagcccatttgtttctggcagttccgctcatattttccacttgaagacatcgcctcccttccttccaagctgggagaccagaagtcaacaacaggagggtggagaggccgggtctcacaatccgcttggctggggagtccactgaggttcttgcatcctgaagcaaaccatggagagctggtggggacttccctgtcttgcgttcctgtgttttctaatgcacgcccgaggtcaaagagactttgatttggcagatgcccttgatgaccctgaacccaccaagaagccaaactcagctttgtccagtggctgtagcggtcccgttgctgcggtgagctggctgcgttgatgggcggtaagtggcctagctggtgctccattcttgagtgtgtggctttcgtacagtcatccctgtacaacctgttgtccagttgcacttcgctgcagagtaccgaagcgggatctgcgggaagcaaactgcaattcttcggcagcatcttcgccttccgacgaggtcgatacttataattcgggtatttctctctgtgcatggcctgtaatttctgtgcctcctggaagaatggccatttttcggcttcagtaagcattttccactggtatcccagctgcttgctgatctctgagtttcgcattctgggattctctagagccatcttgcgcctctgatcgcgagaccacacgatgaatgcgttcatgggtcgcttcactctatcctggacgttgcctttactgttttctcccgtttcacactgatacttagagttacagctttcagtgcaaaggaaggaagagcttctccggagagcgggaatattctcttgcacagctggactgtaatcatcgctgttgaatacgcttaacatagcagaagcatatgattgcattgtcaaaaacaaggagagtgcgacaaaattg

SEQ ID NO: 358709 - DNA, 364 bp, Homo sapiens
ccctgtcttgcgttcctgtgttttctaatgcacgcccgaggtcaaagagactttgatttggcagatgcccttgatgaccctgaacccaccaagaagccaaactcaggtgagtgtctcttcagctaggaaaaactgaggcaacgtccttgaactgatgcttacggaggggatggttgaggatgttttacagaactgtggggtatatgaaagagatgcaacaactgtaccagatagcagatattgaaagcaaaatgtggtgattagggaaatgcaaatcacaaccacagtgaagcaccacttcgtccccactgagatggctaaaatctaaaatggaaaataacaagtgttggcaaggatgtgatga

SEQ ID NO: 358710 - DNA, 389 bp, Homo sapiens
tatgtgcagctcagcagtgaggagtgggagggactgtgagaggcagataacctctcaggagacatgtataaggaagtgtttattttgttttagattttgttgggtggtggtctgttagctggctattaatgtgaaggaaggtatgaggcatgtgtgttttggtgggatgttgtttttctctcctccctttctttctgtacttacttttatctcctcttctattgcagggcaataaaccttggatttccctgcccaggggaaagggcattcgacttactgttgctgaagagagagataagaggctggccaccaaacagagcagtggctaaattgcagtagcagcatatctttttttctttgcacaaataaacagtgaattctcgtttctt

SEQ ID NO: 358711 - DNA, 320 bp, Homo sapiens
ccctgtcttgcgttcctgtgttttctaatgcacgcccgaggtcaaagagactttgatttggcagatgcccttgatgaccctgaacccaccaagaagccaaactcagctttgtccagtggctgtagcggtcccgttgctgcggtgagctggctgcgttgatgggcgagttacagctttcagtgcaaaggaaggaagagcttctccggagagcgggaatattctcttgcacagctggactgtaatcatcgctgttgaatacgcttaacatagcagaagcatatgattgcattgtcaaaaacaaggagagtgcgacaaaattg

SEQ ID NO: 358712 - DNA, 255 bp, Homo sapiens
  misc_feature (18)..(18): n is a, c, g, or t
cgcggccgcgcgactggntgcgagaagacgtacgagggtgtgaaggatgccaatggcaacagcgccacgaggctccaacatgtcattggcaatggcaataaaccttggatttccctgcccaggggaaagggcattcgacttactgttgctgaagagagagataagaggctggccaccaaacagagcagtggctaaattgcagtagcagcatatctttttttctttgcacaaataaacagtgaattctcgtttctt

SEQ ID NO: 358713 - DNA, 1939 bp, Homo sapiens
  misc_feature (723)..(723): n is a, c, g, or t
cccacaggttttcagcggtggagtttgggatctgagcttggagcccatttgtttctggcagttccgctcatattttccacttgaagacatcgcctcccttccttccaagctgggagaccagaagtcaacaacaggagggtggagaggccgggtctcacaatccgcttggctggggagtccactgaggttcttgcatcctgaagcaaaccatggagagctggtggggacttccctgtcttgcgttcctgtgttttctaatgcacgcccgaggtcaaagagactttgatttggcagatgcccttgatgaccctgaacccaccaagaagccaaactcaggttcaaggggtacgtgggcaagctggttacatagaagtttacgaagcccctcatatcgtgatggaatgcagccctccggaagaatgccctgaaaatgataagcaggacagatcatgggtttccatgcctgttgcatgaatcactgcatttttagaaaaggttttacgacatggacagagctgtgcagccatcatcacgagctaatccaaagcaaggtattcgacttaaaattcaaatgccatgaaacctatccttcaatgtttacgtacagacgattttagtacttcccaaacctatgaaattggccccaatcctgaacaaggaatgatttgtctctgaaacaaatcatgattttgcaatcacagcatgtcacagtcacaaggaacntataggttatttctcacgattggcatttttttttaaggctcctaaatcgtgctgtttcaggacttttgctaaatattttgaaggtcggcgaaagataagtttaagagtgtaaactgcgtcctcccagctcagccaacttgacggggggtaggcacaacaaaaagtctgcggcataactgacacctgtaaatcagtatcagaaactgaaaatgctaagaaattcagttccaggatatgaactctacagcggaagaataagaaaccggaactaaacttctcactcatctgacttcctgcggtttacgacaacagactttggttgcaccggaaaagaacagattctcttccgtcgcagagtttcgccatggcccggggccccaagaagcacttaaagcgtgttgcagcgccgaagcattggatgcttgacaaactaacgggtgtatttgcacctcgtccatcgacaggtccccacaagctgagggaatgtcttcctctgatcgtcttcctcaggaatagactcaagtatgcgttgactggagatgaggtaaagaagatatgtatgcaacgtttcatcaaaattgatggcaaggttcgagtggatgtcacataccctgctggattcatggatgtcatcagcatcgagaagacaggtgaacatttccgcctggtctatgacaccaagggccgttttgctgttcaccgcatcacagtggaagaggcaaagtacaagttgtgcaaagtgaggaagattactgtgggagtgaagggaatccctcacctggtgactcatgatgctcgaaccatccgctacccagatcctgtcatcaaggtgaacgatactgtgcagattgatttagggactggcaagataatcaactttatcaaatttgatacaggcaatttgtgtatggtgattggtggagccaacctcggtcgtgttggtgtgatcaccaacagggaaagacatcctggttcttttgatgtggtgcatgtgaaggatgccaatggcaacagctttgccacgaggctttccaacatttttgtcattggcaatggcaataaaccttggatttccctgcccaggggaaagggcattcgacttactgttgctgaagagagagataagaggctggccaccaaacagagcagtggctaaattgcagtagcagcatatctttttttctttgcacaaataaacagtgaattctcgtttctt

SEQ ID NO: 358714 - DNA, 1097 bp, Homo sapiens
ccctgtcttgcgttcctgtgttttctaatgcacgcccgaggtcaaagagactttgatttggcagatgcccttgatgaccctgaacccaccaagaagccaaactcagttccaggatatgaactctacagcggaagaataagaaaccggaactaaacttctcactcatctgacttcctgcggtttacgacaacagactttggttgcaccggaaaagaacagattctcttccgtcgcagagtttcgccatggcccggggccccaagaagcacttaaagcgtgttgcagcgccgaagcattggatgcttgacaaactaacgggtgtatttgcacctcgtccatcgacaggtccccacaagctgagggaatgtcttcctctgatcgtcttcctcaggaatagactcaagtatgcgttgactggagatgaggtaaagaagatatgtatgcaacgtttcatcaaaattgatggcaaggttcgagtggatgtcacataccctgctggattcatggatgtcatcagcatcgagaagacaggtgaacatttccgcctggtctatgacaccaagggccgttttgctgttcaccgcatcacagtggaagaggcaaagtacaagttgtgcaaagtgaggaagattactgtgggagtgaagggaatccctcacctggtgactcatgatgctcgaaccatccgctacccagatcctgtcatcaaggtgaacgatactgtgcagattgatttagggactggcaagataatcaactttatcaaatttgatacaggcaatttgtgtatggtgattggtggagccaacctcggtcgtgttggtgtgatcaccaacagggaaagacatcctggttcttttgatgtggtgcatgtgaaggatgccaatggcaacagctttgccacgaggctttccaacatttttgtcattggcaatggcaataaaccttggatttccctgcccaggggaaagggcattcgacttactgttgctgaagagagagataagaggctggccaccaaacagagcagtggctaaattgcagtagcagcatatctttttttctttgcacaaataaacagtgaattctcgtttctt

SEQ ID NO: 358715 - DNA, 2171 bp, Homo sapiens
  misc_feature (723)..(723): n is a, c, g, or t
cccacaggttttcagcggtggagtttgggatctgagcttggagcccatttgtttctggcagttccgctcatattttccacttgaagacatcgcctcccttccttccaagctgggagaccagaagtcaacaacaggagggtggagaggccgggtctcacaatccgcttggctggggagtccactgaggttcttgcatcctgaagcaaaccatggagagctggtggggacttccctgtcttgcgttcctgtgttttctaatgcacgcccgaggtcaaagagactttgatttggcagatgcccttgatgaccctgaacccaccaagaagccaaactcaggttcaaggggtacgtgggcaagctggttacatagaagtttacgaagcccctcatatcgtgatggaatgcagccctccggaagaatgccctgaaaatgataagcaggacagatcatgggtttccatgcctgttgcatgaatcactgcatttttagaaaaggttttacgacatggacagagctgtgcagccatcatcacgagctaatccaaagcaaggtattcgacttaaaattcaaatgccatgaaacctatccttcaatgtttacgtacagacgattttagtacttcccaaacctatgaaattggccccaatcctgaacaaggaatgatttgtctctgaaacaaatcatgattttgcaatcacagcatgtcacagtcacaaggaacntataggttatttctcacgattggcatttttttttaaggctcctaaatcgtgctgtttcaggacttttgctaaatattttgaaggtcggcgaaagataagtttaagagtgtaaactgcgtcctcccagctcagccaacttgacggggggtaggcacaacaaaaagtctgcggcataactgacacctgtaaatcagtatcagaaactgaaaatgctaagaaattcagttccaggatatgaactctacagcggaagaataagaaaccggaactaaacttctcactcatctgacttcctgcggtttacgacaacagactttggttgcaccggaaaagaacagattctcttccgtcgcagagtttcgccatggcccggggccccaagaagcacttaaagcgtgttgcagcgccgaagcattggatgcttgacaaactaacgggtgtatttgcacctcgtccatcgacaggtccccacaagctgagggaatgtcttcctctgatcgtcttcctcaggaatagactcaagtatgcgttgactggagatgaggtaaagaagatatgtatgcaacgtttcatcaaaattgatggcaaggttcgagtggatgtcacataccctgctggattcatggatgtcatcagcatcgagaagacaggtgaacatttccgcctggtctatgacaccaagggccgttttgctgttcaccgcatcacagtggaagaggcaaagtacaagttgtgcaaagtgaggaagattactgtgggagtgaagggaatccctcacctggtgactcatgatgctcgaaccatccgctacccagatcctgtcatcaaggtgaacgatactgtgcagattgatttagggactggcaagataatcaactttatcaaatttgatacaggcaatttgtgtatggtgattggtggagccaacctcggtcgtgttggtgtgatcaccaacagggaaagacatcctggttcttttgatgtggtgcatgtgaaggatgccaatggcaacagctttgccacgaggctttccaacatttttgtcattggcaatggcaataaaccttggatttccctgcccaggggaaagggcattcgacttactgttgctgaagagagagataagaggctggccaccaaacagagcagtggctaaattgcagtagcagcatatctttttttctttgcacaaataaacagtgaattctcgtttcttaaaaaaacagaaaaaaaaaaaaaaaatttttgcgccgctggcgcaaaaaaattttctaaaaccattcttttggggcccggcaccagtgttagtgaacatggccaaactgtcccagaaatctgggctgcctaggtgtgggtttccccattaaaaagccgggaccgaggtttggaccacccagggctcggggctaccggttcaacagggccaaggtctaccccccgcggggggt

SEQ ID NO: 358716 - DNA, 2303 bp, Homo sapiens
  misc_feature (723)..(723): n is a, c, g, or t
  misc_feature (2303)..(2303): n is a, c, g, or t
cccacaggttttcagcggtggagtttgggatctgagcttggagcccatttgtttctggcagttccgctcatattttccacttgaagacatcgcctcccttccttccaagctgggagaccagaagtcaacaacaggagggtggagaggccgggtctcacaatccgcttggctggggagtccactgaggttcttgcatcctgaagcaaaccatggagagctggtggggacttccctgtcttgcgttcctgtgttttctaatgcacgcccgaggtcaaagagactttgatttggcagatgcccttgatgaccctgaacccaccaagaagccaaactcaggttcaaggggtacgtgggcaagctggttacatagaagtttacgaagcccctcatatcgtgatggaatgcagccctccggaagaatgccctgaaaatgataagcaggacagatcatgggtttccatgcctgttgcatgaatcactgcatttttagaaaaggttttacgacatggacagagctgtgcagccatcatcacgagctaatccaaagcaaggtattcgacttaaaattcaaatgccatgaaacctatccttcaatgtttacgtacagacgattttagtacttcccaaacctatgaaattggccccaatcctgaacaaggaatgatttgtctctgaaacaaatcatgattttgcaatcacagcatgtcacagtcacaaggaacntataggttatttctcacgattggcatttttttttaaggctcctaaatcgtgctgtttcaggacttttgctaaatattttgaaggtcggcgaaagataagtttaagagtgtaaactgcgtcctcccagctcagccaacttgacggggggtaggcacaacaaaaagtctgcggcataactgacacctgtaaatcagtatcagaaactgaaaatgctaagaaattcagttccaggatatgaactctacagcggaagaataagaaaccggaactaaacttctcactcatctgacttcctgcggtttacgacaacagactttggttgcaccggaaaagaacagattctcttccgtcgcagagtttcgccatggcccggggccccaagaagcacttaaagcgtgttgcagcgccgaagcattggatgcttgacaaactaacgggtgtatttgcacctcgtccatcgacaggtccccacaagctgagggaatgtcttcctctgatcgtcttcctcaggaatagactcaagtatgcgttgactggagatgaggtaaagaagatatgtatgcaacgtttcatcaaaattgatggcaaggttcgagtggatgtcacataccctgctggattcatggatgtcatcagcatcgagaagacaggtgaacatttccgcctggtctatgacaccaagggccgttttgctgttcaccgcatcacagtggaagaggcaaagtacaagttgtgcaaagtgaggaagattactgtgggagtgaagggaatccctcacctggtgactcatgatgctcgaaccatccgctacccagatcctgtcatcaaggtgaacgatactgtgcagattgatttagggactggcaagataatcaactttatcaaatttgatacaggcaatttgtgtatggtgattggtggagccaacctcggtcgtgttggtgtgatcaccaacagggaaagacatcctggttcttttgatgtggtgcatgtgaaggatgccaatggcaacagctttgccacgaggctttccaacatttttgtcattggcaatggcaataaaccttggatttccctgcccaggggaaagggcattcgacttactgttgctgaagagagagataagaggctggccaccaaacagagcagtggctaaattgcagtagcagcatatctttttttctttgcacaaataaacagtgaattctcgtttcttaaaagaaaaaccaaacaaacaacaacaacacaccagcaacccaccatcaacagaaaaagggggggggcgccaaagaaaaacaacccagggggcagccaacagatgagagcgtacacaggcgtgtgagaacaagagcgggccaccaaaagagggcgctactaacagaacaggccgcggcggcgaaacacaccacgaagcgagcggcacaacagcgcgccgcagccacctgcggaagacacccgccatgagcggggggccacagacggcacacacccccagagaagaagctcagcggaaatacaaacaccgcgaagtgcacacaccacaacatcgtcggaaaggtacggaatgctaatatagagcn

SEQ ID NO: 358717 - DNA, 2231 bp, Homo sapiens
  misc_feature (723)..(723): n is a, c, g, or t
  misc_feature (2006)..(2006): n is a, c, g, or t
cccacaggttttcagcggtggagtttgggatctgagcttggagcccatttgtttctggcagttccgctcatattttccacttgaagacatcgcctcccttccttccaagctgggagaccagaagtcaacaacaggagggtggagaggccgggtctcacaatccgcttggctggggagtccactgaggttcttgcatcctgaagcaaaccatggagagctggtggggacttccctgtcttgcgttcctgtgttttctaatgcacgcccgaggtcaaagagactttgatttggcagatgcccttgatgaccctgaacccaccaagaagccaaactcaggttcaaggggtacgtgggcaagctggttacatagaagtttacgaagcccctcatatcgtgatggaatgcagccctccggaagaatgccctgaaaatgataagcaggacagatcatgggtttccatgcctgttgcatgaatcactgcatttttagaaaaggttttacgacatggacagagctgtgcagccatcatcacgagctaatccaaagcaaggtattcgacttaaaattcaaatgccatgaaacctatccttcaatgtttacgtacagacgattttagtacttcccaaacctatgaaattggccccaatcctgaacaaggaatgatttgtctctgaaacaaatcatgattttgcaatcacagcatgtcacagtcacaaggaacntataggttatttctcacgattggcatttttttttaaggctcctaaatcgtgctgtttcaggacttttgctaaatattttgaaggtcggcgaaagataagtttaagagtgtaaactgcgtcctcccagctcagccaacttgacggggggtaggcacaacaaaaagtctgcggcataactgacacctgtaaatcagtatcagaaactgaaaatgctaagaaattcagttccaggatatgaactctacagcggaagaataagaaaccggaactaaacttctcactcatctgacttcctgcggtttacgacaacagactttggttgcaccggaaaagaacagattctcttccgtcgcagagtttcgccatggcccggggccccaagaagcacttaaagcgtgttgcagcgccgaagcattggatgcttgacaaactaacgggtgtatttgcacctcgtccatcgacaggtccccacaagctgagggaatgtcttcctctgatcgtcttcctcaggaatagactcaagtatgcgttgactggagatgaggtaaagaagatatgtatgcaacgtttcatcaaaattgatggcaaggttcgagtggatgtcacataccctgctggattcatggatgtcatcagcatcgagaagacaggtgaacatttccgcctggtctatgacaccaagggccgttttgctgttcaccgcatcacagtggaagaggcaaagtacaagttgtgcaaagtgaggaagattactgtgggagtgaagggaatccctcacctggtgactcatgatgctcgaaccatccgctacccagatcctgtcatcaaggtgaacgatactgtgcagattgatttagggactggcaagataatcaactttatcaaatttgatacaggcaatttgtgtatggtgattggtggagccaacctcggtcgtgttggtgtgatcaccaacagggaaagacatcctggttcttttgatgtggtgcatgtgaaggatgccaatggcaacagctttgccacgaggctttccaacatttttgtcattggcaatggcaataaaccttggatttccctgcccaggggaaagggcattcgacttactgttgctgaagagagagataagaggctggccaccaaacagagcagtggctaaattgcagtagcagcatatctttttttctttgcacaaataaacagtgaattctcgtttcttggccaataacggtgcagttttccgttaacacaacaacgaaaaacccctacggggctcatatattcgngggcggcaaagaaagcgctccatgaaagttgcacatcggtcgtacatatgtgtccgggcacccgttcttgttccaaggggagaatatacagcgccccatagagagcgcataatttggaacggtcgcggatataaggagttgaaacagcaccatcgttagtagtagccattgtgcacatggcgcgtatcactcatagagatctacctgagccgacagcaatataca

SEQ ID NO: 358718 - DNA, 903 bp, Homo sapiens
gcactgtggacgctctcttgacggatgctagggagacccgccaagttttcaaaggcccggggccccaagaagcacttaaagcgtgttgcagcgccgaagcattggatgcttgacaaactaacgggtgtatttgcacctcgtccatcgacaggtccccacaagctgagggaatgtcttcctctgatcgtcttcctcaggaatagactcaagtatgcgttgactggagatgaggtaaagaagatatgtatgcaacgtttcatcaaaattgatggcaaggttcgagtggatgtcacataccctgctggattcatggatgtcatcagcatcgagaagacaggtgaacatttccgcctggtctatgacaccaagggccgttttgctgttcaccgcatcacagtggaagaggcaaagtacaagttgtgcaaagtgaggaagattactgtgggagtgaagggaatccctcacctggtgactcatgatgctcgaaccatccgctacccagatcctgtcatcaaggtgaacgatactgtgcagattgatttagggactggcaagataatcaactttatcaaatttgatacaggcaatttgtgtatggtgattggtggagccaacctcggtcgtgttggtgtgatcaccaacagggaaagacatcctggttcttttgatgtggtgcatgtgaaggatgccaatggcaacagctttgccacgaggctttccaacatttttgtcattggcaatggcaataaaccttggatttccctgcccaggggaaagggcattcgacttactgttgctgaagagagagataagaggctggccaccaaacagagcagtggctaaattgcagtagcagcatatctttttttctttgcacaaataaacagtgaattctcgtttctt

SEQ ID NO: 358719 - DNA, 1959 bp, Homo sapiens
  misc_feature (723)..(723): n is a, c, g, or t
cccacaggttttcagcggtggagtttgggatctgagcttggagcccatttgtttctggcagttccgctcatattttccacttgaagacatcgcctcccttccttccaagctgggagaccagaagtcaacaacaggagggtggagaggccgggtctcacaatccgcttggctggggagtccactgaggttcttgcatcctgaagcaaaccatggagagctggtggggacttccctgtcttgcgttcctgtgttttctaatgcacgcccgaggtcaaagagactttgatttggcagatgcccttgatgaccctgaacccaccaagaagccaaactcaggttcaaggggtacgtgggcaagctggttacatagaagtttacgaagcccctcatatcgtgatggaatgcagccctccggaagaatgccctgaaaatgataagcaggacagatcatgggtttccatgcctgttgcatgaatcactgcatttttagaaaaggttttacgacatggacagagctgtgcagccatcatcacgagctaatccaaagcaaggtattcgacttaaaattcaaatgccatgaaacctatccttcaatgtttacgtacagacgattttagtacttcccaaacctatgaaattggccccaatcctgaacaaggaatgatttgtctctgaaacaaatcatgattttgcaatcacagcatgtcacagtcacaaggaacntataggttatttctcacgattggcatttttttttaaggctcctaaatcgtgctgtttcaggacttttgctaaatattttgaaggtcggcgaaagataagtttaagagtgtaaactgcgtcctcccagctcagccaacttgacggggggtaggcacaacaaaaagtctgcggcataactgacacctgtaaatcagtatcagaaactgaaaatgctaagaaattcagttccaggatatgaactctacagcggaagaataagaaaccggaactaaacttctcactcatctgacttcctgcggtttacgacaacagactttggttgcaccggaaaagaacagattctcttccgtcgcagagtttcgccatggcccggggccccaagaagcacttaaagcgtgttgcagcgccgaagcattggatgcttgacaaactaacgggtgtatttgcacctcgtccatcgacaggtccccacaagctgagggaatgtcttcctctgatcgtcttcctcaggaatagactcaagtatgcgttgactggagatgaggtaaagaagatatgtatgcaacgtttcatcaaaattgatggcaaggttcgagtggatgtcacataccctgctggattcatggatgtcatcagcatcgagaagacaggtgaacatttccgcctggtctatgacaccaagggccgttttgctgttcaccgcatcacagtggaagaggcaaagtacaagttgtgcaaagtgaggaagattactgtgggagtgaagggaatccctcacctggtgactcatgatgctcgaaccatccgctacccagatcctgtcatcaaggtgaacgatactgtgcagattgatttagggactggcaagataatcaactttatcaaatttgatacaggcaatttgtgtatggtgattggtggagccaacctcggtcgtgttggtgtgatcaccaacagggaaagacatcctggttcttttgatgtggtgcatgtgaaggatgccaatggcaacagctttgccacgaggctttccaacatttttgtcattggcaatggcaataaaccttggatttccctgcccaggggaaagggcattcgacttactgttgctgaagagagagataagaggctggccaccaaacagagcagtggctccggtgatgtgttgcactaccctcctcattacgcacaaataacaatgacctccgctgtgtggtttaaccccggccccatata

SEQ ID NO: 358720 - DNA, 1884 bp, Homo sapiens
  misc_feature (723)..(723): n is a, c, g, or t
cccacaggttttcagcggtggagtttgggatctgagcttggagcccatttgtttctggcagttccgctcatattttccacttgaagacatcgcctcccttccttccaagctgggagaccagaagtcaacaacaggagggtggagaggccgggtctcacaatccgcttggctggggagtccactgaggttcttgcatcctgaagcaaaccatggagagctggtggggacttccctgtcttgcgttcctgtgttttctaatgcacgcccgaggtcaaagagactttgatttggcagatgcccttgatgaccctgaacccaccaagaagccaaactcaggttcaaggggtacgtgggcaagctggttacatagaagtttacgaagcccctcatatcgtgatggaatgcagccctccggaagaatgccctgaaaatgataagcaggacagatcatgggtttccatgcctgttgcatgaatcactgcatttttagaaaaggttttacgacatggacagagctgtgcagccatcatcacgagctaatccaaagcaaggtattcgacttaaaattcaaatgccatgaaacctatccttcaatgtttacgtacagacgattttagtacttcccaaacctatgaaattggccccaatcctgaacaaggaatgatttgtctctgaaacaaatcatgattttgcaatcacagcatgtcacagtcacaaggaacntataggttatttctcacgattggcatttttttttaaggctcctaaatcgtgctgtttcaggacttttgctaaatattttgaaggtcggcgaaagataagtttaagagtgtaaactgcgtcctcccagctcagccaacttgacggggggtaggcacaacaaaaagtctgcggcataactgacacctgtaaatcagtatcagaaactgaaaatgctaagaaattcagttccaggatatgaactctacagcggaagaataagaaaccggaactaaacttctcactcatctgacttcctgcggtttacgacaacagactttggttgcaccggaaaagaacagattctcttccgtcgcagagtttcgccatggcccggggccccaagaagcacttaaagcgtgttgcagcgccgaagcattggatgcttgacaaactaacgggtgtatttgcacctcgtccatcgacaggtccccacaagctgagggaatgtcttcctctgatcgtcttcctcaggaatagactcaagtatgcgttgactggagatgaggtaaagaagatatgtatgcaacgtttcatgtcatcagcatcgagaagacaggtgaacatttccgcctggtctatgacaccaagggccgttttgctgttcaccgcatcacagtggaagaggcaaagtacaagttgtgcaaagtgaggaagattactgtgggagtgaagggaatccctcacctggtgactcatgatgctcgaaccatccgctacccagatcctgtcatcaaggtgaacgatactgtgcagattgatttagggactggcaagataatcaactttatcaaatttgatacaggcaatttgtgtatggtgattggtggagccaacctcggtcgtgttggtgtgatcaccaacagggaaagacatcctggttcttttgatgtggtgcatgtgaaggatgccaatggcaacagctttgccacgaggctttccaacatttttgtcattggcaatggcaataaaccttggatttccctgcccaggggaaagggcattcgacttactgttgctgaagagagagataagaggctggccaccaaacagagcagtggctaaattgcagtagcagcatatctttttttctttgcacaaataaacagtgaattctcgtttctt

SEQ ID NO: 358721 - DNA, 696 bp, Homo sapiens
ccctgtcttgcgttcctgtgttttctaatgcacgcccgaggtcaaagagactttgatttggcagatgcccttgatgaccctgaacccaccaagaagccaaactcagatgtcatcagcatcgagaagacaggtgaacatttccgcctggtctatgacaccaagggccgttttgctgttcaccgcatcacagtggaagaggcaaagtacaagttgtgcaaagtgaggaagattactgtgggagtgaagggaatccctcacctggtgactcatgatgctcgaaccatccgctacccagatcctgtcatcaaggtgaacgatactgtgcagattgatttagggactggcaagataatcaactttatcaaatttgatacaggcaatttgtgtatggtgattggtggagccaacctcggtcgtgttggtgtgatcaccaacagggaaagacatcctggttcttttgatgtggtgcatgtgaaggatgccaatggcaacagctttgccacgaggctttccaacatttttgtcattggcaatggcaataaaccttggatttccctgcccaggggaaagggcattcgacttactgttgctgaagagagagataagaggctggccaccaaacagagcagtggctaaattgcagtagcagcatatctttttttctttgcacaaataaacagtgaattctcgtttctt

SEQ ID NO: 358722 - DNA, 1085 bp, Homo sapiens
cccgagtaggtgggattacaggcatgtgccaccacccgggctaattttgtatttttggtagagacggggtttctccatgttggtcaggctggtcttgaactcccgacctcaggtgatctgcctgctttggcctcccaaagtattgagattacaggcatgagccaccgcacccggcaaaagccacatgttcttagcagttcttagtagtggtagagttaagtttgtctctggggctctttgttaccaccgctccagagttgcccattgaggactatcaattggaaatatgtccctgaggaattttagcctgtgataaaggaccagaggttagttcagctgagcactcttccagcagccaccagagggttctgaaacagattcccccttggcaaggtttcccaaatgtctaaattactaaatcagtatgggagatcatcagctctgtgactggttaatatagtttttcccaagagcactccttctctgaccgaggaaatgctggaaatcgatgggataagtaatgtctgggtgactgctttaggctggctttgtgtttacatattgaattgattttccttgctgtgtttatagtatacaagttgtgcaaagtgaggaagattactgtgggagtgaagggaatccctcacctggtgactcatgatgctcgaaccatccgctacccagatcctgtcatcaaggtgaacgatactgtgcagattgatttagggactggcaagataatcaactttatcaaatttgatacaggcaatttgtgtatggtgattggtggagccaacctcggtcgtgttggtgtgatcaccaacagggaaagacatcctggttcttttgatgtggtgcatgtgaaggatgccaatggcaacagctttgccacgaggctttccaacatttttgtcattggcaatggcaataaaccttggatttccctgcccaggggaaagggcattcgacttactgttgctgaagagagagataagaggctggccaccaaacagagcagtggctaaattgcagtagcagcatatctttttttctttgcacaaataaacagtgaattctcgtttctt

SEQ ID NO: 358723 - DNA, 1139 bp, Homo sapiens
cccgagtaggtgggattacaggcatgtgccaccacccgggctaattttgtatttttggtagagacggggtttctccatgttggtcaggctggtcttgaactcccgacctcaggtgatctgcctgctttggcctcccaaagtattgagattacaggcatgagccaccgcacccggcaaaagccacatgttcttagcagttcttagtagtggtagagttaagtttgtctctggggctctttgttaccaccgctccagagttgcccattgaggactatcaattggaaatatgtccctgaggaaaaaatgatataccagttgattgtgtgttaccactcagatacacaggcaacaggcttttagcctgtgataaaggaccagaggttagttcagctgagcactcttccagcagccaccagagggttctgaaacagattcccccttggcaaggtttcccaaatgtctaaattactaaatcagtatgggagatcatcagctctgtgactggttaatatagtttttcccaagagcactccttctctgaccgaggaaatgctggaaatcgatgggataagtaatgtctgggtgactgctttaggctggctttgtgtttacatattgaattgattttccttgctgtgtttatagtatacaagttgtgcaaagtgaggaagattactgtgggagtgaagggaatccctcacctggtgactcatgatgctcgaaccatccgctacccagatcctgtcatcaaggtgaacgatactgtgcagattgatttagggactggcaagataatcaactttatcaaatttgatacaggcaatttgtgtatggtgattggtggagccaacctcggtcgtgttggtgtgatcaccaacagggaaagacatcctggttcttttgatgtggtgcatgtgaaggatgccaatggcaacagctttgccacgaggctttccaacatttttgtcattggcaatggcaataaaccttggatttccctgcccaggggaaagggcattcgacttactgttgctgaagagagagataagaggctggccaccaaacagagcagtggctaaattgcagtagcagcatatctttttttctttgcacaaataaacagtgaattctcgtttctt

SEQ ID NO: 358724 - DNA, 513 bp, Homo sapiens
tgattcacgaggaccgaaccgtacaagttgtgcaaagtgaggaagattactgtgggagtgaagggaatccctcacctggtgactcatgatgctcgaaccatccgctacccagatcctgtcatcaaggtgaacgatactgtgcagattgatttagggactggcaagataatcaactttatcaaatttgatacaggcaatttgtgtatggtgattggtggagccaacctcggtcgtgttggtgtgatcaccaacagggaaagacatcctggttcttttgatgtggtgcatgtgaaggatgccaatggcaacagctttgccacgaggctttccaacatttttgtcattggcaatggcaataaaccttggatttccctgcccaggggaaagggcattcgacttactgttgctgaagagagagataagaggctggccaccaaacagagcagtggctaaattgcagtagcagcatatctttttttctttgcacaaataaacagtgaattctcgtttctt

SEQ ID NO: 358725 - DNA, 2031 bp, Homo sapiens
  misc_feature (723)..(723): n is a, c, g, or t
cccacaggttttcagcggtggagtttgggatctgagcttggagcccatttgtttctggcagttccgctcatattttccacttgaagacatcgcctcccttccttccaagctgggagaccagaagtcaacaacaggagggtggagaggccgggtctcacaatccgcttggctggggagtccactgaggttcttgcatcctgaagcaaaccatggagagctggtggggacttccctgtcttgcgttcctgtgttttctaatgcacgcccgaggtcaaagagactttgatttggcagatgcccttgatgaccctgaacccaccaagaagccaaactcaggttcaaggggtacgtgggcaagctggttacatagaagtttacgaagcccctcatatcgtgatggaatgcagccctccggaagaatgccctgaaaatgataagcaggacagatcatgggtttccatgcctgttgcatgaatcactgcatttttagaaaaggttttacgacatggacagagctgtgcagccatcatcacgagctaatccaaagcaaggtattcgacttaaaattcaaatgccatgaaacctatccttcaatgtttacgtacagacgattttagtacttcccaaacctatgaaattggccccaatcctgaacaaggaatgatttgtctctgaaacaaatcatgattttgcaatcacagcatgtcacagtcacaaggaacntataggttatttctcacgattggcatttttttttaaggctcctaaatcgtgctgtttcaggacttttgctaaatattttgaaggtcggcgaaagataagtttaagagtgtaaactgcgtcctcccagctcagccaacttgacggggggtaggcacaacaaaaagtctgcggcataactgacacctgtaaatcagtatcagaaactgaaaatgctaagaaattcagttccaggatatgaactctacagcggaagaataagaaaccggaactaaacttctcactcatctgacttcctgcggtttacgacaacagactttggttgcaccggaaaagaacagattctcttccgtcgcagagtttcgccatggcccggggccccaagaagcacttaaagcgtgttgcagcgccgaagcattggatgcttgacaaactaacgggtgtatttgcacctcgtccatcgacaggtccccacaagctgagggaatgtcttcctctgatcgtcttcctcaggaatagactcaagtatgcgttgactggagatgaggtaaagaagatatgtatgcaacgtttcatcaaaattgatggcaaggttcgagtggatgtcacataccctgctggattcatggatgtcatcagcatcgagaagacaggtgaacatttccgcctggtctatgacaccaagggccgttttgctgttcaccgcatcacagtggaagaggcaaagtacaagttgtgcaaagtgaggaagattactgtgggagtgaagggaatccctcacctggtgactcatgatgctcgaaccatccgctacccagatcctgtcatcaaggtgaacgatactgtgcagattgatttagggactggcaagataatcaactttatcaaatttgatacaggctgtaaaaacaaaaacaagccaaacaagccagcaagcaaacaagaagaagaaaacaacaacaacacaaaccttgaaatagacttgtcagatgtaaatatttcttttctagggaaatagaaggtgtacagtggagttttctggaggctacatgacatgtgataagaaaacagactgaaaaagggaatacatctataaagagaaaattgctatcactgtttttggttgggaaaaacatttgtatgagataaacatgttattcttttcataatcagacattcttctcacaagtgttggttctctaccattcctcaaaggtgataattttttgaaatatgttattgtggattcatgattttggatatatccaatgggtttaagtgcattgcaataaaatggtattttgatactca

SEQ ID NO: 358726 - DNA, 117 bp, Homo sapiens
tatacccttttgtgatcagatgtcatcagcatcgagaagacaggtgaacatttccgcctggtctatgacaccaagggccgttttgctgttcaccgcatcacagtggaagaggcaaag

SEQ ID NO: 358727 - DNA, 1509 bp, Homo sapiens
cccacaggttttcagcggtggagtttgggatctgagcttggagcccatttgtttctggcagttccgctcatattttccacttgaagacatcgcctcccttccttccaagctgggagaccagaagtcaacaacaggagggtggagaggccgggtctcacaatccgcttggctggggagtccactgaggttcttgcatcctgaagcaaaccatggagagctggtggggacttccctgtcttgcgttcctgtgttttctaatgcacgcccgaggtcaaagagactttgatttggcagatgcccttgatgaccctgaacccaccaagaagccaaactcaggtcttgttgccttcgttccccggtactactgaatcgtccagtttaagagggataaagtggcgtcgcacaggagcgaggatggagagcggcgactaggcggctatggagaggtacagcgtccagttgcgcccagccacactgcaggacgccgcccccgccacactacacctgataccctgcggcccaccacggtgtggcgcttcatcacgcctgccatccgccagggccccgagggactcttaagtgtagtttcggggccgcagtctacggggcgacgaggtggcagtgccgtccggcctcgtgggatacgtgatggtgactgaacaggaggaggtgtcgatggggaagccagacccctggcggggttccgggagtgacaaccaagaagaggaacctctggagcgggactttgaccgcttcctcggaaccactaccagcttcagccgcttcaccctgtagggcatggggcttcaccctgtggggcaccctgtggggcttccttggcccggaagccaaactgcgtggggccttaacttggcccagcctcgcggcaacgattcacgcgcaggtgcccaaggacacagaaccagagcttgaaattcaaagccgcgaaccctttacagcagtaaaccagctccttactttgtagccactggttccatcaccccagtaaaggagttcttcacagcacacattcacaaaagataaagtggtgaattttatattcttatatacatatgtccaaccatctatatgtttttaagaaggcaaaaaagacctcccagatgcatatattacaggacggggtgtgtgaggagactcacttgggggtggcagtcaacaaaatttaaataaagacacgagattttattatttttctgtctacagctcctaggatagtgtgtgacatgtagtaggttctcagtatacttctctggtacttaaattaatgaaatgtgtaaacatgcctctgggttcagaaaaacaaactcaaccacttaaaaaaaaaaaaaggaaaaaagtgttggttctcctgtaaagtaataaacctacatgcaaaaataaggatgcagggggaggccgagagcattaaatttgcctctataatatcatatcaacacattttaatctctcaaccagggctaataattcactcactgtctccaggggact

SEQ ID NO: 358728 - DNA, 366 bp, Homo sapiens
cccacaggttttcagcggtggagtttgggatctgagcttggagcccatttgtttctggcagttccgctcatattttccacttgaagacatcgcctcccttccttccaagctgggagaccagaagtcaacaacaggagggtggagaggccgggtctcacaatccgcttggctggggagtccactgaggttcttgcatcctgaagcaaaccatggagagctggtggggacttccctgtcttgcgttcctgtgttttctaatgcacgcccgaggtcaaagagactttgatttggcagatgcccttgatgaccctgaacccaccaagaagccaaactcagatatctacccaaagccaaaaccaccttact

SEQ ID NO: 358729 - DNA, 1153 bp, Homo sapiens
ccctgtcttgcgttcctgtgttttctaatgcacgcccgaggtcaaagagactttgatttggcagatgcccttgatgaccctgaacccaccaagaagccaaactcaggttttacgacatggacagagctgtgcagccatcatcacgagctaatccaaagcaagttccaggatatgaactctacagcggaagaataagaaaccggaactaaacttctcactcatctgacttcctgcggtttacgacaacagactttggttgcaccggaaaagaacagattctcttccgtcgcagagtttcgccatggcccggggccccaagaagcacttaaagcgtgttgcagcgccgaagcattggatgcttgacaaactaacgggtgtatttgcacctcgtccatcgacaggtccccacaagctgagggaatgtcttcctctgatcgtcttcctcaggaatagactcaagtatgcgttgactggagatgaggtaaagaagatatgtatgcaacgtttcatcaaaattgatggcaaggttcgagtggatgtcacataccctgctggattcatggatgtcatcagcatcgagaagacaggtgaacatttccgcctggtctatgacaccaagggccgttttgctgttcaccgcatcacagtggaagaggcaaagtacaagttgtgcaaagtgaggaagattactgtgggagtgaagggaatccctcacctggtgactcatgatgctcgaaccatccgctacccagatcctgtcatcaaggtgaacgatactgtgcagattgatttagggactggcaagataatcaactttatcaaatttgatacaggcaatttgtgtatggtgattggtggagccaacctcggtcgtgttggtgtgatcaccaacagggaaagacatcctggttcttttgatgtggtgcatgtgaaggatgccaatggcaacagctttgccacgaggctttccaacatttttgtcattggcaatggcaataaaccttggatttccctgcccaggggaaagggcattcgacttactgttgctgaagagagagataagaggctggccaccaaacagagcagtggctaaattgcagtagcagcatatctttttttctttgcacaaataaacagtgaattctcgtttctt

SEQ ID NO: 358730 - DNA, 1999 bp, Homo sapiens
  misc_feature (723)..(723): n is a, c, g, or t
  misc_feature (1951)..(1951): n is a, c, g, or t
  misc_feature (1956)..(1956): n is a, c, g, or t
cccacaggttttcagcggtggagtttgggatctgagcttggagcccatttgtttctggcagttccgctcatattttccacttgaagacatcgcctcccttccttccaagctgggagaccagaagtcaacaacaggagggtggagaggccgggtctcacaatccgcttggctggggagtccactgaggttcttgcatcctgaagcaaaccatggagagctggtggggacttccctgtcttgcgttcctgtgttttctaatgcacgcccgaggtcaaagagactttgatttggcagatgcccttgatgaccctgaacccaccaagaagccaaactcaggttcaaggggtacgtgggcaagctggttacatagaagtttacgaagcccctcatatcgtgatggaatgcagccctccggaagaatgccctgaaaatgataagcaggacagatcatgggtttccatgcctgttgcatgaatcactgcatttttagaaaaggttttacgacatggacagagctgtgcagccatcatcacgagctaatccaaagcaaggtattcgacttaaaattcaaatgccatgaaacctatccttcaatgtttacgtacagacgattttagtacttcccaaacctatgaaattggccccaatcctgaacaaggaatgatttgtctctgaaacaaatcatgattttgcaatcacagcatgtcacagtcacaaggaacntataggttatttctcacgattggcatttttttttaaggctcctaaatcgtgctgtttcaggacttttgctaaatattttgaaggtcggcgaaagataagtttaagagtgtaaactgcgtcctcccagctcagccaacttgacggggggtaggcacaacaaaaagtctgcggcataactgacacctgtaaatcagtatcagaaactgaaaatgctaagaaattcagttccaggatatgaactctacagcggaagaataagaaaccggaactaaacttctcactcatctgacttcctgcggtttacgacaacagactttggttgcaccggaaaagaacagattctcttccgtcgcagagtttcgccatggcccggggccccaagaagcacttaaagcgtgttgcagcgccgaagcattggatgcttgacaaactaacgggtgtatttgcacctcgtccatcgacaggtccccacaagctgagggaatgtcttcctctgatcgtcttcctcaggaatagactcaagtatgcgttgactggagatgaggtaaagaagatatgtatgcaacgtttcatcaaaattgatggcaaggttcgagtggatgtcacataccctgctggattcatggatgtcatcagcatcgagaagacaggtgaacatttccgcctggtctatgacaccaagggccgttttgctgttcaccgcatcacagtggaagaggcaaagtacaagttgtgcaaagtgaggaagattactgtgggagtgaagggaatccctcacctggtgactcatgatgctcgaaccatccgctacccagatcctgtcatcaaggtgaacgatactgtgcagattgatttagggactggcaagataatcaactttatcaaatttgatacaggcaatttgtgtatggtgattggtggagccaacctcggtcgtgttggtgtgatcaccaacagggaaagacatcctggttcttttgatgtggtgcatgtgaaggatgccaatggcaacagctttgccacgaggctttccaacatttttgtcattggcaatggcaataaaccttggatttccctgcccaggggaaagggcattcgacttactgttgctgaagagagagataagaggctggccaccaaacagagcagtggctaaattgcagtagcagcatatctttttttctttgcacaaataaacagtgaattctcgtttcttcaacaaaaaaanaacanaaaacaaagggggcgcaagtataccggggcacacacaccactt

SEQ ID NO: 358731 - DNA, 1963 bp, Homo sapiens
  misc_feature (723)..(723): n is a, c, g, or t
cccacaggttttcagcggtggagtttgggatctgagcttggagcccatttgtttctggcagttccgctcatattttccacttgaagacatcgcctcccttccttccaagctgggagaccagaagtcaacaacaggagggtggagaggccgggtctcacaatccgcttggctggggagtccactgaggttcttgcatcctgaagcaaaccatggagagctggtggggacttccctgtcttgcgttcctgtgttttctaatgcacgcccgaggtcaaagagactttgatttggcagatgcccttgatgaccctgaacccaccaagaagccaaactcaggttcaaggggtacgtgggcaagctggttacatagaagtttacgaagcccctcatatcgtgatggaatgcagccctccggaagaatgccctgaaaatgataagcaggacagatcatgggtttccatgcctgttgcatgaatcactgcatttttagaaaaggttttacgacatggacagagctgtgcagccatcatcacgagctaatccaaagcaaggtattcgacttaaaattcaaatgccatgaaacctatccttcaatgtttacgtacagacgattttagtacttcccaaacctatgaaattggccccaatcctgaacaaggaatgatttgtctctgaaacaaatcatgattttgcaatcacagcatgtcacagtcacaaggaacntataggttatttctcacgattggcatttttttttaaggctcctaaatcgtgctgtttcaggacttttgctaaatattttgaaggtcggcgaaagataagtttaagagtgtaaactgcgtcctcccagctcagccaacttgacggggggtaggcacaacaaaaagtctgcggcataactgacacctgtaaatcagtatcagaaactgaaaatgctaagaaattcagttccaggatatgaactctacagcggaagaataagaaaccggaactaaacttctcactcatctgacttcctgcggtttacgacaacagactttggttgcaccggaaaagaacagattctcttccgtcgcagagtttcgccatggcccggggccccaagaagcacttaaagcgtgttgcagcgccgaagcattggatgcttgacaaactaacgggtgtatttgcacctcgtccatcgacaggtccccacaagctgagggaatgtcttcctctgatcgtcttcctcaggaatagactcaagtatgcgttgactggagatgaggtaaagaagatatgtatgcaacgtttcatcaaaattgatggcaaggttcgagtggatgtcacataccctgctggattcatggatgtcatcagcatcgagaagacaggtgaacatttccgcctggtctatgacaccaagggccgttttgctgttcaccgcatcacagtggaagaggcaaagtacaagttgtgcaaagtgaggaagattactgtgggagtgaagggaatccctcacctggtgactcatgatgctcgaaccatccgctacccagatcctgtcatcaaggtgaacgatactgtgcagattgatttagggactggcaagataatcaactttatcaaatttgatacaggcaatttgtgtatggtgattggtggagccaacctcggtcgtgttggtgtgatcaccaacagggaaagacatcctggttcttttgatgtggtgcatgtgaaggatgccaatggcaacagctttgccacgaggctttccaacatttttgtcattggcaatggcaataaaccttggatttccctgcccaggggaaagggcattcgacttactgttgctgaagagagagataagaggctggccaccaaacagagcagtggctaaattgcagtagcagcatatctttttttctttgcacaaataaacagtgaattctcgtttcttaaaaaaaaaaatatcaacataacc

SEQ ID NO: 358732 - DNA, 2000 bp, Homo sapiens
  misc_feature (723)..(723): n is a, c, g, or t
cccacaggttttcagcggtggagtttgggatctgagcttggagcccatttgtttctggcagttccgctcatattttccacttgaagacatcgcctcccttccttccaagctgggagaccagaagtcaacaacaggagggtggagaggccgggtctcacaatccgcttggctggggagtccactgaggttcttgcatcctgaagcaaaccatggagagctggtggggacttccctgtcttgcgttcctgtgttttctaatgcacgcccgaggtcaaagagactttgatttggcagatgcccttgatgaccctgaacccaccaagaagccaaactcaggttcaaggggtacgtgggcaagctggttacatagaagtttacgaagcccctcatatcgtgatggaatgcagccctccggaagaatgccctgaaaatgataagcaggacagatcatgggtttccatgcctgttgcatgaatcactgcatttttagaaaaggttttacgacatggacagagctgtgcagccatcatcacgagctaatccaaagcaaggtattcgacttaaaattcaaatgccatgaaacctatccttcaatgtttacgtacagacgattttagtacttcccaaacctatgaaattggccccaatcctgaacaaggaatgatttgtctctgaaacaaatcatgattttgcaatcacagcatgtcacagtcacaaggaacntataggttatttctcacgattggcatttttttttaaggctcctaaatcgtgctgtttcaggacttttgctaaatattttgaaggtcggcgaaagataagtttaagagtgtaaactgcgtcctcccagctcagccaacttgacggggggtaggcacaacaaaaagtctgcggcataactgacacctgtaaatcagtatcagaaactgaaaatgctaagaaattcagttccaggatatgaactctacagcggaagaataagaaaccggaactaaacttctcactcatctgacttcctgcggtttacgacaacagactttggttgcaccggaaaagaacagattctcttccgtcgcagagtttcgccatggcccggggccccaagaagcacttaaagcgtgttgcagcgccgaagcattggatgcttgacaaactaacgggtgtatttgcacctcgtccatcgacaggtccccacaagctgagggaatgtcttcctctgatcgtcttcctcaggaatagactcaagtatgcgttgactggagatgaggtaaagaagatatgtatgcaacgtttcatcaaaattgatggcaaggttcgagtggatgtcacataccctgctggattcatggatgtcatcagcatcgagaagacaggtgaacatttccgcctggtctatgacaccaagggccgttttgctgttcaccgcatcacagtggaagaggcaaagtacaagttgtgcaaagtgaggaagattactgtgggagtgaagggaatccctcacctggtgactcatgatgctcgaaccatccgctacccagatcctgtcatcaaggtgaacgatactgtgcagattgatttagggactggcaagataatcaactttatcaaatttgatacaggcaatttgtgtatggtgattggtggagccaacctcggtcgtgttggtgtgatcaccaacagggaaagacatcctggttcttttgatgtggtgcatgtgaaggatgccaatggcaacagctttgccacgaggctttccaacatttttgtcattggcaatggcaataaaccttggatttccctgcccaggggaaagggcattcgacttactgttgctgaagagagagataagaggctggccaccaaacagagcagtggctaaattgcagtagcagcatatctttttttctttgcacaaataaacagtgaattctcgtttcttaaaaaaaaaaacaaacaaagggggggggctaaagtttccccggggggccaatttaggtaca

SEQ ID NO: 358733 - DNA, 2200 bp, Homo sapiens
  misc_feature (723)..(723): n is a, c, g, or t
cccacaggttttcagcggtggagtttgggatctgagcttggagcccatttgtttctggcagttccgctcatattttccacttgaagacatcgcctcccttccttccaagctgggagaccagaagtcaacaacaggagggtggagaggccgggtctcacaatccgcttggctggggagtccactgaggttcttgcatcctgaagcaaaccatggagagctggtggggacttccctgtcttgcgttcctgtgttttctaatgcacgcccgaggtcaaagagactttgatttggcagatgcccttgatgaccctgaacccaccaagaagccaaactcaggttcaaggggtacgtgggcaagctggttacatagaagtttacgaagcccctcatatcgtgatggaatgcagccctccggaagaatgccctgaaaatgataagcaggacagatcatgggtttccatgcctgttgcatgaatcactgcatttttagaaaaggttttacgacatggacagagctgtgcagccatcatcacgagctaatccaaagcaaggtattcgacttaaaattcaaatgccatgaaacctatccttcaatgtttacgtacagacgattttagtacttcccaaacctatgaaattggccccaatcctgaacaaggaatgatttgtctctgaaacaaatcatgattttgcaatcacagcatgtcacagtcacaaggaacntataggttatttctcacgattggcatttttttttaaggctcctaaatcgtgctgtttcaggacttttgctaaatattttgaaggtcggcgaaagataagtttaagagtgtaaactgcgtcctcccagctcagccaacttgacggggggtaggcacaacaaaaagtctgcggcataactgacacctgtaaatcagtatcagaaactgaaaatgctaagaaattcagttccaggatatgaactctacagcggaagaataagaaaccggaactaaacttctcactcatctgacttcctgcggtttacgacaacagactttggttgcaccggaaaagaacagattctcttccgtcgcagagtttcgccatggcccggggccccaagaagcacttaaagcgtgttgcagcgccgaagcattggatgcttgacaaactaacgggtgtatttgcacctcgtccatcgacaggtccccacaagctgagggaatgtcttcctctgatcgtcttcctcaggaatagactcaagtatgcgttgactggagatgaggtaaagaagatatgtatgcaacgtttcatcaaaattgatggcaaggttcgagtggatgtcacataccctgctggattcatggatgtcatcagcatcgagaagacaggtgaacatttccgcctggtctatgacaccaagggccgttttgctgttcaccgcatcacagtggaagaggcaaagtacaagttgtgcaaagtgaggaagattactgtgggagtgaagggaatccctcacctggtgactcatgatgctcgaaccatccgctacccagatcctgtcatcaaggtgaacgatactgtgcagattgatttagggactggcaagataatcaactttatcaaatttgatacaggcaatttgtgtatggtgattggtggagccaacctcggtcgtgttggtgtgatcaccaacagggaaagacatcctggttcttttgatgtggtgcatgtgaaggatgccaatggcaacagctttgccacgaggctttccaacatttttgtcattggcaatggcaataaaccttggatttccctgcccaggggaaagggcattcgacttactgttgctgaagagagagataagaggctggccaccaaacagagcagtggctaaattgcagtagcagcatatctttttttctttgcacaaataaacagtgaattctcgtttctttcgtttcttaatgtgttttttcccccttgtggataatagtagggtttgaatttgctcatgattttggcactgtcttaagatctctaggaataccacctatacttcctctgaccctccagtaaataaacctttgcttccctcatacatgttacccacaccatctctgtgggcagagtgatggagtagcattccaaaacgaagtacaaaaaacgtatgacatttcagaaaggacggcattcttttgtggaagctatgggagat

SEQ ID NO: 358734 - DNA, 899 bp, Homo sapiens
ggctaggtagggctggtgtgtaatcggcaccgaggcagagtttcgccatggcccggggccccaagaagcacttaaagcgtgttgcagcgccgaagcattggatgcttgacaaactaacgggtgtatttgcacctcgtccatcgacaggtccccacaagctgagggaatgtcttcctctgatcgtcttcctcaggaatagactcaagtatgcgttgactggagatgaggtaaagaagatatgtatgcaacgtttcatcaaaattgatggcaaggttcgagtggatgtcacataccctgctggattcatggatgtcatcagcatcgagaagacaggtgaacatttccgcctggtctatgacaccaagggccgttttgctgttcaccgcatcacagtggaagaggcaaagtacaagttgtgcaaagtgaggaagattactgtgggagtgaagggaatccctcacctggtgactcatgatgctcgaaccatccgctacccagatcctgtcatcaaggtgaacgatactgtgcagattgatttagggactggcaagataatcaactttatcaaatttgatacaggcaatttgtgtatggtgattggtggagccaacctcggtcgtgttggtgtgatcaccaacagggaaagacatcctggttcttttgatgtggtgcatgtgaaggatgccaatggcaacagctttgccacgaggctttccaacatttttgtcattggcaatggcaataaaccttggatttccctgcccaggggaaagggcattcgacttactgttgctgaagagagagataagaggctggccaccaaacagagcagtggctaaattgcagtagcagcatatctttttttctttgcacaaataaacagtgaattctcgtttctt

SEQ ID NO: 358735 - DNA, 797 bp, Homo sapiens
gtgtccttttcaggcccggggccccaagaagcacttaaagcgtgttgcagcgccgaagcattggatgcttgacaaactaacgggtgtatttgaatagactcaagtatgcgttgactggagatgaggtaaagaagatatgtatgcaacgtttcatcaaaattgatggcaaggttcgagtggatgtcacataccctgctggattcatggatgtcatcagcatcgagaagacaggtgaacatttccgcctggtctatgacaccaagggccgttttgctgttcaccgcatcacagtggaagaggcaaagtacaagttgtgcaaagtgaggaagattactgtgggagtgaagggaatccctcacctggtgactcatgatgctcgaaccatccgctacccagatcctgtcatcaaggtgaacgatactgtgcagattgatttagggactggcaagataatcaactttatcaaatttgatacaggcaatttgtgtatggtgattggtggagccaacctcggtcgtgttggtgtgatcaccaacagggaaagacatcctggttcttttgatgtggtgcatgtgaaggatgccaatggcaacagctttgccacgaggctttccaacatttttgtcattggcaatggcaataaaccttggatttccctgcccaggggaaagggcattcgacttactgttgctgaagagagagataagaggctggccaccaaacagagcagtggctaaattgcagtagcagcatatctttttttctttgcacaaataaacagtgaattctcgtttctt

SEQ ID NO: 358736 - DNA, 1843 bp, Homo sapiens
  misc_feature (723)..(723): n is a, c, g, or t
cccacaggttttcagcggtggagtttgggatctgagcttggagcccatttgtttctggcagttccgctcatattttccacttgaagacatcgcctcccttccttccaagctgggagaccagaagtcaacaacaggagggtggagaggccgggtctcacaatccgcttggctggggagtccactgaggttcttgcatcctgaagcaaaccatggagagctggtggggacttccctgtcttgcgttcctgtgttttctaatgcacgcccgaggtcaaagagactttgatttggcagatgcccttgatgaccctgaacccaccaagaagccaaactcaggttcaaggggtacgtgggcaagctggttacatagaagtttacgaagcccctcatatcgtgatggaatgcagccctccggaagaatgccctgaaaatgataagcaggacagatcatgggtttccatgcctgttgcatgaatcactgcatttttagaaaaggttttacgacatggacagagctgtgcagccatcatcacgagctaatccaaagcaaggtattcgacttaaaattcaaatgccatgaaacctatccttcaatgtttacgtacagacgattttagtacttcccaaacctatgaaattggccccaatcctgaacaaggaatgatttgtctctgaaacaaatcatgattttgcaatcacagcatgtcacagtcacaaggaacntataggttatttctcacgattggcatttttttttaaggctcctaaatcgtgctgtttcaggacttttgctaaatattttgaaggtcggcgaaagataagtttaagagtgtaaactgcgtcctcccagctcagccaacttgacggggggtaggcacaacaaaaagtctgcggcataactgacacctgtaaatcagtatcagaaactgaaaatgctaagaaattcagttccaggatatgaactctacagcggaagaataagaaaccggaactaaacttctcactcatctgacttcctgcggtttacgacaacagactttggttgcaccggaaaagaacagattctcttccgtcgcagagtttcgccatggcccggggccccaagaagcacttaaagcgtgttgcagcgccgaagcattggatgcttgacaaactaacgggtgtatttgcacctcgtccatcgacaggtccccacaagctgagggaatgtcttcctctgatcgtcttcctcaggaatagactcaagtatgcgttgactggagatgaggtaaagaagatatgtatgcaacgtttcatcaaaattgatggcaaggttcgagtggatgtcacataccctgctggattcatggatgtcatcagcatcgagaagacaggtgaacatttccgcctggtctatgacaccaagggccgttttgctgttcaccgcatcacagtggaagaggcaaagtacaagttgtgcaaagtgaggaagattactgtgggagtgaagggaatccctcacctggtgactcatgatgctcgaaccatccgctacccagatcctgtcatcaaggtgaacgatactgtgcagattgatttagggactggcaagataatcaactttatcaaatttgatacaggcaatttgtgtatggtgattggtggagccaacctcggtcgtgttggtgtgatcaccaacagggaaagacatcctggttcttttgatgtggtgcatgtgaaggatgccaatggcaacagctttgccacgaggctttccaacatttttgtcattggcaattgttaaggttcacagagtgcagcaagctctctatttagagcctctgagaagaaacaagattagatc

SEQ ID NO: 358737 - DNA, 1857 bp, Homo sapiens
  misc_feature (723)..(723): n is a, c, g, or t
cccacaggttttcagcggtggagtttgggatctgagcttggagcccatttgtttctggcagttccgctcatattttccacttgaagacatcgcctcccttccttccaagctgggagaccagaagtcaacaacaggagggtggagaggccgggtctcacaatccgcttggctggggagtccactgaggttcttgcatcctgaagcaaaccatggagagctggtggggacttccctgtcttgcgttcctgtgttttctaatgcacgcccgaggtcaaagagactttgatttggcagatgcccttgatgaccctgaacccaccaagaagccaaactcaggttcaaggggtacgtgggcaagctggttacatagaagtttacgaagcccctcatatcgtgatggaatgcagccctccggaagaatgccctgaaaatgataagcaggacagatcatgggtttccatgcctgttgcatgaatcactgcatttttagaaaaggttttacgacatggacagagctgtgcagccatcatcacgagctaatccaaagcaaggtattcgacttaaaattcaaatgccatgaaacctatccttcaatgtttacgtacagacgattttagtacttcccaaacctatgaaattggccccaatcctgaacaaggaatgatttgtctctgaaacaaatcatgattttgcaatcacagcatgtcacagtcacaaggaacntataggttatttctcacgattggcatttttttttaaggctcctaaatcgtgctgtttcaggacttttgctaaatattttgaaggtcggcgaaagataagtttaagagtgtaaactgcgtcctcccagctcagccaacttgacggggggtaggcacaacaaaaagtctgcggcataactgacacctgtaaatcagtatcagaaactgaaaatgctaagaaattcagttccaggatatgaactctacagcggaagaataagaaaccggaactaaacttctcactcatctgacttcctgcggtttacgacaacagactttggttgcaccggaaaagaacagattctcttccgtcgcagagtttcgccatggcccggggccccaagaagcacttaaagcgtgttgcagcgccgaagcattggatgcttgacaaactaacgggtgtatttgcacctcgtccatcgacaggtccccacaagctgagggaatgtcttcctctgatcgtcttcctcaggaatagactcaagtatgcgttgactggagatgaggtaaagaagatatgtatgcaacgtttcatcaaaattgatggcaaggttcgagtggatgtcacataccctgctggattcatggatgtcatcagcatcgagaagacaggtgaacatttccgcctggtctatgacaccaagggccgttttgctgttcaccgcatcacagtggaagaggcaaagtacaagttgtgcaaagtgaggaagattactgtgggagtgaagggaatccctcacctggtgactcatgatgctcgaaccatccgctacccagatcctgtcatcaaggtgaacgatactgtgcagattgatttagggactggcaagataatcaacttagacatcctggttcttttgatgtggtgcatgtgaaggatgccaatggcaacagctttgccacgaggctttccaacatttttgtcattggcaatggcaataaaccttggatttccctgcccaggggaaagggcattcgacttactgttgctgaagagagagataagaggctggccaccaaacagagcagtggctaaattgcagtagcagcatatctttttttctttgcacaaataaacagtgaattctcgtttctt

SEQ ID NO: 358738 - DNA, 1060 bp, Homo sapiens
ggatggttggcttctggcattaggtgatcccctgggtccttgcaactccagcctgattgctctgccctcaatttcccttttattacaggaatttaaagcttctttagcgtcttcgaatgaagcaaactctataaatgcataccctttagatttgccattttggttctggggtactttcttggtgtaacgaactaatagcgcattctggaatttgtactctccaagctgctcaaaaagctcacaattttgtttgattaaattctgaggctcttccgtcgcagagtttcgccatggcccggggccccaagaagcacttaaagcgtgttgcagcgccgaagcattggatgcttgacaaactaacgggtgtatttgcacctcgtccatcgacaggtccccacaagctgagggaatgtcttcctctgatcgtcttcctcaggaatagactcaagtatgcgttgactggagatgaggtaaagaagatatgtatgcaacgtttcatcaaaattgatggcaaggttcgagtggatgtcacataccctgctggattcatggatgtcatcagcatcgagaagacaggtgaacatttccgcctggtctatgacaccaagggccgttttgctgttcaccgcatcacagtggaagaggcaaagtacaagttgtgcaaagtgaggaagattactgtgggagtgaagggaatccctcacctggtgactcatgatgctcgaaccatccgctacccagatcctgtcatcaaggtgaacgatactgtgcagattgatttagggactggcaagataatcaacttagacatcctggttcttttgatgtggtgcatgtgaaggatgccaatggcaacagctttgccacgaggctttccaacatttttgtcattggcaatggcaataaaccttggatttccctgcccaggggaaagggcattcgacttactgttgctgaagagagagataagaggctggccaccaaacagagcagtggctaaattgcagtagcagcatatctttttttctttgcacaaataaacagtgaattctcgtttctt

SEQ ID NO: 358739 - DNA, 462 bp, Homo sapiens
aaatggctagaaatgctatttattgccctatgataagtgaaatagcaaatcactcttgattcttaaaatttcatattaaaattagctagttcctacatgcatgcgtgcacaagtatatgcagacacacacacaaatcagtaatctatgtgaactagatactaatactaaattactatttaaattgggtccagaaagatgctgttttgaaaagaacactaaaaatatttcattagcgttttcttgataacaaataggaaaatatatgtttacaccctgaataaattcagctgtgggtggatttttgtttttcaaaatgattttgttagtttgaatgaaacctaaatataacattcaagtcaattcttttaacatttttctttataacagaatatgaaaaacgctgtcttaaagtgttgtaacttttctgaattttcaataaaatattttgcttgcaaaaaaat

SEQ ID NO: 358740 - DNA, 409 bp, Homo sapiens
gcattactctcattacttaagtctcaaatgctacctccttagagatgccttcctggatcacctcctctaaaaaacaaaccaaagcaagcccaaacctggcccttaactccagtcactctctgtactatcacctggtttgtggccttcatagtgccttcccccaatctgatattatcttgtttgtctgtttcttaattattttctatctccctcccctactaaaatgaaagctcgttttagtaaagtcatctggttgcttaataaacaaatttctattcagcagcttctgtgagctgagccctggagatacaggagaactcaggacagagcccctgcccttaaggtgcttatggaatgtggagtgtcacagtgtccatcaggtgatcaaacaataaagcataacagcaaa

SEQ ID NO: 358741 - DNA, 375 bp, Homo sapiens
agagccagccagacatgaggagggcacggggtctcatgcctccacccactctgctgtccagcccttctccctcaactcgccccagccatttcatccattcattccttctcaaagatttgagaatctgttcaggagagggaaacaggcatgccctgatgaacagacactcacggacacatggatgcacaaacacccgggggatgcacgatcacacaaacccacgcagtgatgaatgtgcacatacagcagcttctgtgagctgagccctggagatacaggagaactcaggacagagcccctgcccttaaggtgcttatggaatgtggagtgtcacagtgtccatcaggtgatcaaacaataaagcataacagcaaa

SEQ ID NO: 358742 - DNA, 541 bp, Homo sapiens
cggggagggtccgaagtggggccagctccctggagtcaggcatgtctgtctcaagctgcccctgtcccttgctgaatgggaacccccaccagctgcctcgggagcccgtgtccttacactctattcggatctgctccagctccgtcacctcagcaatggactccttcaggtcctccacgaacttctgcatctcgtccgagcccagggcacagaaatgcagcacctgcttcttctccctcaactcgccccagccatttcatccattcattccttctcaaagatttgagaatctgttcaggagagggaaacaggcatgccctgatgaacagacactcacggacacatggatgcacaaacacccgggggatgcacgatcacacaaacccacgcagtgatgaatgtgcacatacagcagcttctgtgagctgagccctggagatacaggagaactcaggacagagcccctgcccttaaggtgcttatggaatgtggagtgtcacagtgtccatcaggtgatcaaacaataaagcataacagcaaa

SEQ ID NO: 358743 - DNA, 1992 bp, Homo sapiens
gctcagctccaggggtcattttccggttagccttcggggtgtccgcgtgagaattggctatatcctggagcgagtgctgggaggtgctagtccgccgcgccttattcgagaggtgtcagggctgggagactaggatgtcggacacgtggagctctatccaggcccacaagaagcagctggactctctgcgggagaggctgcagcggaggcggaagcaggactcggggcacttggatctacggaatccagaggcagcattgtctccaaccttccgtagtgacagcccagtgcctactgcacccacctctggtggccctaagcccagcacagcttcagcagttcctgaattagctacagatcctgagttagagaagaagttgctacaccacctctctgatctggccttaacattgcccactgatgctgtgtccatctgtcttgccatctccacgccagatgctcctgccactcaagatggggtagaaagcctcctgcagaagtttgcagctcaggagttgattgaggtaaagcgaggtctcctacaagatgatgcacatcctactcttgtaacctatgctgaccattccaagctctctgccatgatgggtgctgtggcagaaaagaagggccctggggaggtagcagggactgtcacagggcagaagcggcgtgcagaacaggactcgactacagtagctgcctttgccagttcgttagtctctggtctgaactcttcagcatcggaaccagcaaaggagccagccaagaaatcaaggaaacatgctgcctcagatgttgatctggagatagagagccttctgaaccaacagtccactaaggaacaacagagcaagaaggtcagtcaggagatcctagagctattaaatactacaacagccaaggaacaatccattgttgaaaaatttcgctctcgaggtcgggcccaagtgcaagaattctgtgactatggaaccaaggaggagtgcatgaaagccagtgatgctgatcgaccctgtcgcaagctgcacttcagacgaattatcaataaacacactgatgagtctttaggtgactgctctttccttaatacatgtttccacatggatacctgcaagtatgttcactatgaaattgatgcttgcatggattctgaggcccctggcagcaaagaccacacgccaagccaggagcttgctcttacacagagtgtcggaggtgattccagtgcagaccgactcttcccacctcagtggatctgttgtgatatccgctacctggacgtcagtatcttgggcaagtttgcagttgtgatggctgacccaccctgggatattcacatggaactgccctatgggaccctgacagatgatgagatgcgcaggctcaacatacccgtactacaggatgatggctttctcttcctctgggtcacaggcagggccatggagttggggagagaatgtctaaatctctgggggtatgaacgggtagatgaaattatttgggtgaagacaaatcaactgcaacgcatcattcggacaggccgtacaggtcactggttgaaccatgggaaggaacactgcttggttggtgtcaaaggaaatccccaaggcttcaaccagggtctggattgtgatgtgatcgtagctgaggttcgttccaccagtcataaaccagatgaaatctatggcatgattgaaagactatctcctggcactcgcaagattgagttatttggacgaccacacaatgtgcaacccaactggatcacccttggaaaccaactggatgggatccacctactagacccagatgtggttgcacggttcaagcaaaggtacccagatggtatcatctctaaacctaagaatttatagaagcacttccttacagagctaagaatccatagccatggctctgtaagctaaacctgaagagtgatatttgtacaatagctttcttctttatttaaataaacatttgtattgtagt

SEQ ID NO: 358744 - DNA, 412 bp, Homo sapiens
ctagctcggcacccgatatgtattttttatttcctaggttcgttccaccagtcataaaccagatgaaatctatggcatgattgaaagactatctcctggcactcgcaagattgagttatttggacgaccacacaatgtgcaacccaactggatcacccttggaaaccaactggatgggatccacctactagacccagatgtggttgcacggttcaagcaaaggtacccagatggtatcatctctaaacctaagaatttatagaagcacttccttacagagctaagaatccatagccatggctctgtaagctaaacctgaagagtgatatttgtacaatagctttcttctttatttaaataaacatttgtattgtagtaaataaaaaatacatatcgggtacgagctgcacga

SEQ ID NO: 358745 - DNA, 2355 bp, Homo sapiens
gctcagctccaggggtcattttccggttagccttcggggtgtccgcgtgagaattggctatatcctggagcgagtgctgggaggtgctagtccgccgcgccttattcgagaggtgtcagggctgggagactaggatgtcggacacgtggagctctatccaggcccacaagaagcagctggactctctgcgggagaggctgcagcggaggcggaagcaggactcggggcacttggatctacggaatccagaggcagcattgtctccaaccttccgtagtgacagcccagtgcctactgcacccacctctggtggccctaagcccagcacagcttcagcagttcctgaattagctacagatcctgagttagagaagaagttgctacaccacctctctgatctggccttaacattgcccactgatgctgtgtccatctgtcttgccatctccacgccagatgctcctgccactcaagatggggtagaaagcctcctgcagaagtttgcagctcaggagttgattgaggtaaagcgaggtctcctacaagatgatgcacatcctactcttgtaacctatgctgaccattccaagctctctgccatgatgggtgctgtggcagaaaagaagggccctggggaggtagcagggactgtcacagggcagaagcggcgtgcagaacaggactcgactacagtagctgcctttgccagttcgttagtctctggtctgaactcttcagcatcggaaccagcaaaggagccagccaagaaatcaaggaaacatgctgcctcagatgttgatctggagatagagagccttctgaaccaacagtccactaaggaacaacagagcaagaaggtcagtcaggagatcctagagctattaaatactacaacagccaaggaacaatccattgttgaaaaatttcgctctcgaggtcgggcccaagtgcaagaattctgtgactatggaaccaaggaggagtgcatgaaagccagtgatgctgatcgaccctgtcgcaagctgcacttcagacgaattatcaataaacacactgatgagtctttaggtgactgctctttccttaatacatgtttccacatggatacctgcaagtatgttcactatgaaattgatgcttgcatggattctgaggcccctggcagcaaagaccacacgccaagccaggagcttgctcttacacagagtgtcggaggtgattccagtgcagaccgactcttcccacctcagtggatctgttgtgatatccgctacctggacgtcagtatcttgggcaagtttgcagttgtgatggctgacccaccctgggatattcacatggaactgccctatgggaccctgacagatgatgagatgcgcaggctcaacatacccgtactacaggatgatggctttctcttcctctgggtcacaggcagggccatggagttggggagagaatgtctaaatctctgggggtatgaacgggtagatgaaattatttgggtgaagacaaatcaactgcaacgcatcattcggacaggccgtacaggtcactggttgaaccatgggaaggaacactgcttggttggtgtcaaaggaaatccccaaggcttcaaccagggtctggattgtgatgtgatcgtagctgaggttcgttccaccagtcataaaccagatgaaatctatggcatgattgaaagactatctcctggcactcgcaagattgagttatttggacgaccacacaatgtgcaacccaactggatcacccttggaaaccaactggatgggatccacctactagacccagatgtggttgcacggttcaagcaaaggtacccagatggtatcatctctaaacctaagaatttatagaagcacttccttacagagctaagaatccatagccatggctctgtaagctaaacctgaagagtgatatttgtacaatagctttcttctttatttaaataaacatttgtattgtagttgggattctgaagtccattctggctctgctacttaacagtgtataatcttgtgcaactcatctctcagtattatatgtgaaatgggagtattacctcattgggttgctgtgaaggttcaaactaaatgagtgcatgggaaacattaaaatgatcattataggctaggcacagtggctcacacctgtaatccgagcactttgggaagccgaggtaggagggtaactgtagcccaggagttcaagatctcctgcctcagcctccccgagtagctgggactataggcgcgtgccaccatgcccggctaattttttgtatttttagtagagtcggggtttcactatgttggccaggctggtctcaaa

SEQ ID NO: 358746 - DNA, 2590 bp, Homo sapiens
gctcagctccaggggtcattttccggttagccttcggggtgtccgcgtgagaattggctatatcctggagcgagtgctgggaggtgctagtccgccgcgccttattcgagaggtgtcagggctgggagactaggatgtcggacacgtggagctctatccaggcccacaagaagcagctggactctctgcgggagaggctgcagcggaggcggaagcaggactcggggcacttggatctacggaatccagaggcagcattgtctccaaccttccgtagtgacagcccagtgcctactgcacccacctctggtggccctaagcccagcacagcttcagcagttcctgaattagctacagatcctgagttagagaagaagttgctacaccacctctctgatctggccttaacattgcccactgatgctgtgtccatctgtcttgccatctccacgccagatgctcctgccactcaagatggggtagaaagcctcctgcagaagtttgcagctcaggagttgattgaggtaaagcgaggtctcctacaagatgatgcacatcctactcttgtaacctatgctgaccattccaagctctctgccatgatgggtgctgtggcagaaaagaagggccctggggaggtagcagggactgtcacagggcagaagcggcgtgcagaacaggactcgactacagtagctgcctttgccagttcgttagtctctggtctgaactcttcagcatcggaaccagcaaaggagccagccaagaaatcaaggaaacatgctgcctcagatgttgatctggagatagagagccttctgaaccaacagtccactaaggaacaacagagcaagaaggtcagtcaggagatcctagagctattaaatactacaacagccaaggaacaatccattgttgaaaaatttcgctctcgaggtcgggcccaagtgcaagaattctgtgactatggaaccaaggaggagtgcatgaaagccagtgatgctgatcgaccctgtcgcaagctgcacttcaggtctcttggaagggaatgaggtgggatgggtttgtcagaagcagccattccttttcagcatattccttccagtcattggggttctgtctgtaatcttatttagtttatggtttgtgtaagtcctccagaccctgaaggtgtactttcagaagtgcattgtgtgggaagaatacaggctgtactcccaaataactgagattttttttttaaaagctccctccctcttagaatagcaaagtatgtctgtctctgagccacagtgaaagttaaagtactctgaaaggaggataatcttaggagaaaaggaacctaaactcttaggtcagtgttttattctgttctacccaagtctcctgcactgcttgccttccagtggtaaaacaggaaaccaagtctttactcagagaggaattacaattgttctgtagtatgaattatggatttccatgctacctgcctcccttaaaactcttgaaggaagctctaatgatagaattaggggagggtaataaaatagacattttgaaatcatttggaatttgaactgttggatctacatctggagcaccatcttgattctccctttttattttcccagacgaattatcaataaacacactgatgagtctttaggtgactgctctttccttaatacatgtttccacatggatacctgcaagtatgttcactatgaaattgatgcttgcatggattctgaggcccctggcagcaaagaccacacgccaagccaggagcttgctcttacacagagtgtcggaggtgattccagtgcagaccgactcttcccacctcagtggatctgttgtgatatccgctacctggacgtcagtatcttgggcaagtttgcagttgtgatggctgacccaccctgggatattcacatggaactgccctatgggaccctgacagatgatgagatgcgcaggctcaacatacccgtactacaggatgatggctttctcttcctctgggtcacaggcagggccatggagttggggagagaatgtctaaatctctgggggtatgaacgggtagatgaaattatttgggtgaagacaaatcaactgcaacgcatcattcggacaggccgtacaggtcactggttgaaccatgggaaggaacactgcttggttggtgtcaaaggaaatccccaaggcttcaaccagggtctggattgtgatgtgatcgtagctgaggttcgttccaccagtcataaaccagatgaaatctatggcatgattgaaagactatctcctggcactcgcaagattgagttatttggacgaccacacaatgtgcaacccaactggatcacccttggaaaccaactggatgggatccacctactagacccagatgtggttgcacggttcaagcaaaggtacccagatggtatcatctctaaacctaagaatttatagaagcacttccttacagagctaagaatccatagccatggctctgtaagctaaacctgaagagtgatatttgtacaatagctttcttctttatttaaataaacatttgtattgtagt

SEQ ID NO: 358747 - DNA, 2280 bp, Homo sapiens
gctcagctccaggggtcattttccggttagccttcggggtgtccgcgtgagaattggctatatcctggagcgagtgctgggaggtgctagtccgccgcgccttattcgagaggtgtcagggctgggagactaggatgtcggacacgtggagctctatccaggcccacaagaagcagctggactctctgcgggagaggctgcagcggaggcggaagcaggactcggggcacttggatctacggaatccagaggcagcattgtctccaaccttccgtagtgacagcccagtgcctactgcacccacctctggtggccctaagcccagcacagcttcagcagttcctgaattagctacagatcctgagttagagaagaagttgctacaccacctctctgatctggccttaacattgcccactgatgctgtgtccatctgtcttgccatctccacgccagatgctcctgccactcaagatggggtagaaagcctcctgcagaagtttgcagctcaggagttgattgaggtaaagcgaggtctcctacaagatgatgcacatcctactcttgtaacctatgctgaccattccaagctctctgccatgatgggtgctgtggcagaaaagaagggccctggggaggtagcagggactgtcacagggcagaagcggcgtgcagaacaggactcgactacagtagctgcctttgccagttcgttagtctctggtctgaactcttcagcatcggaaccagcaaaggagccagccaagaaatcaaggaaacatgctgcctcagatgttgatctggagatagagagccttctgaaccaacagtccactaaggaacaacagagcaagaaggtcagtcaggagatcctagagctattaaatactacaacagccaaggaacaatccattgttgaaaaatttcgctctcgaggtcgggcccaagtgcaagaattctgtgactatggaaccaaggaggagtgcatgaaagccagtgatgctgatcgaccctgtcgcaagctgcacttcagacgaattatcaataaacacactgatgagtctttaggtgactgctctttccttaatacatgtttccacatggatacctgcaagtatgttcactatgaaattgatgcttgcatggattctgaggcccctggcagcaaagaccacacgccaagccaggagcttgctcttacacagagtgtcggaggtgattccagtgcagaccgactcttcccacctcagtggatctgttgtgatatccgctacctggacgtcagtatcttgggcaagtttgcagttgtgatggctgacccaccctgggatattcacatggaactgccctatgggaccctgacagatgatgagatgcgcaggctcaacatacccgtactacaggatgatggctttctcttcctctgggtcacaggcagggccatggagttggggagagaatgtctaaatctctgggggtatgaacgggtagatgaaattatttgggtgaagacaaatcaactgcaacgcatcattcggacaggccgtacaggtcactggttgaaccatgggaaggaacactgcttggtgagcagcagtggggcccaattcaataggtggagcacaaagaagaatcatttgatttcttactgagaaaaagttcaaaggtgtggtttcataaggtaatctgttatctgtggtgagcaggttggtgtcaaaggaaatccccaaggcttcaaccagggtctggattgtgatgtgatcgtagctgaggtatgtgcttcccaggcctccaaagcttccacatttttgttggtatcagttattcatgttgggtgtattctcatcccagatttttctcatttagatcataaacataatagaaagggctagaattgcaatcttgtgtaacttaaaaagcagctagtttttatttcctaggttcgttccaccagtcataaaccagatgaaatctatggcatgattgaaagactatctcctggcactcgcaagattgagttatttggacgaccacacaatgtgcaacccaactggatcacccttggaaaccaactggatgggatccacctactagacccagatgtggttgcacggttcaagcaaaggtacccagatggtatcatctctaaacctaagaatttatagaagcacttccttacagagctaagaatccatagccatggctctgtaagctaaacctgaagagtgatatttgtacaatagctttcttctttatttaaataaacatttgtattgtagt

SEQ ID NO: 358748 - DNA, 3367 bp, Homo sapiens
gctcagctccaggggtcattttccggttagccttcggggtgtccgcgtgagaattggctatatcctggagcgagtgctgggaggtgctagtccgccgcgccttattcgagaggtgtcagggctgggagactaggatgtcggacacgtggagctctatccaggcccacaagaagcagctggactctctgcgggagaggctgcagcggaggcggaagcaggactcggggcacttggatctacggaatccagaggcagcattgtctccaaccttccgtagtgacagcccagtgcctactgcacccacctctggtggccctaagcccagcacagcttcagcagttcctgaattagctacagatcctgagttagagaagaagttgctacaccacctctctgatctggccttaacattgcccactgatgctgtgtccatctgtcttgccatctccacgccagatgctcctgccactcaagatggggtagaaagcctcctgcagaagtttgcagctcaggagttgattgaggtaaagcgaggtctcctacaagatgatgcacatcctactcttgtaacctatgctgaccattccaagctctctgccatgatgggtgctgtggcagaaaagaagggccctggggaggtagcagggactgtcacagggcagaagcggcgtgcagaacaggactcgactacagtagctgcctttgccagttcgttagtctctggtctgaactcttcagcatcggaaccagcaaaggagccagccaagaaatcaaggaaacatgctgcctcagatgttgatctggagatagagagccttctgaaccaacagtccactaaggaacaacagagcaagaaggtcagtcaggagatcctagagctattaaatactacaacagccaaggaacaatccattgttgaaaaatttcgctctcgaggtcgggcccaagtgcaagaattctgtgactatggaaccaaggaggagtgcatgaaagccagtgatgctgatcgaccctgtcgcaagctgcacttcagacgaattatcaataaacacactgatgagtctttaggtgactgctctttccttaatacatgtttccacatggatacctgcaagtatgttcactatgaaattgatgcttgcatggattctgaggcccctggcagcaaagaccacacgccaagccaggagcttgctcttacacagagtgtcggaggtgattccagtgcagaccgactcttcccacctcagtggatctgttgtgatatccgctacctggacgtcagtatcttgggcaagtttgcagttgtgatggctgacccaccctgggatattcacatggaactgccctatgggaccctgacagatgatgagatgcgcaggctcaacatacccgtactacaggatgatggctttctcttcctctgggtcacaggcagggccatggagttggggagagaatgtctaaatctctgggggtatgaacgggtagatgaaattatttgggtgaagacaaatcaactgcaacgcatcattcggacaggccgtacaggtcactggttgaaccatgggaaggaacactgcttggtgagcagcagtggggcccaattcaataggtggagcacaaagaagaatcatttgatttcttactgagaaaaagttcaaaggtgtggtttcataaggtaatctgttatctgtggtgagcaggttggtgtcaaaggaaatccccaaggcttcaaccagggtctggattgtgatgtgatcgtagctgaggtatgtgcttcccaggcctccaaagcttccacatttttgttggtatcagttattcatgttgggtgtattctcatcccagatttttctcatttagatcataaacataatagaaagggctagaattgcaatcttgtgtaacttaaaaagcagctagtttttatttcctaggttcgttccaccagtcataaaccagatgaaatctatggcatgattgaaagactatctcctggcactcgcaagattgagttatttggacgaccacacaatgtgcaacccaactggtaaggtgaccagagaacaggctagtcctcaaggggctattatttatgattaaggacagaacttagtagagcttcacattgttttacactagtccataaatgagcttcacaggattcataagccacttaagcttgtatttaaactgttttatgagattctacaaatattcattagaaactcaacaggttctaggacccaaaagcactgctccctagggtttctactctcttcacaacccaaggatcttcctcagccattctgtgatgtattgaatctgccccctggtggttacgaagttatctatttaatctgtcaataattacatctttcaccccttaacagagcttaaaacacatgctgctagcattttgcttatccaaagaatactccctggtagcaactctgtgaagcaggcctggctaagcattagttactaaccctcagataatacagatccagtctattttaacaccagaatctatgccaattctgaactagtaattctaccatatactattctaatgttaagctctttttagaattggcatatttgatatgatgataggcagtcttcatttggtatgcattttttaacaatattaaaccctctaattccaggatttctggtttgcccctccttttacactgtttcaggatcacccttggaaaccaactggatgggatccacctactagacccagatgtggttgcacggttcaagcaaaggtacccagatggtatcatctctaaacctaagaatttatagaagcacttccttacagagctaagaatccatagccatggctctgtaagctaaacctgaagagtgatatttgtacaatagctttcttctttatttaaataaacatttgtattgtagttgggattctgaagtccattctggctctgctacttaacagtgtataatcttgtgcaactcatctctcagtattatatgtgaaatgggagtattacctcattgggttgctgtgaaggttcaaactaaatgagtgcatgggaaacattaaaatgatcattataggctaggcacagtggctcacacctgtaatccgagcactttgggaagccgaggtaggagggtaactgtagcccaggagttcaagactagactgggcaacatagtgagaccccatctctactgctaccctccaaaaccattaaaaaaacaggaatgcaggctgggtgcggtggctcatgcctgtaatcccagcactttgggaggtcaaggcgggcggatcatgaggtcaggagttcgagaccagcctggccaacatggtgaaaccctgtctcta

SEQ ID NO: 358749 - DNA, 2443 bp, Homo sapiens
gctcagctccaggggtcattttccggttagccttcggggtgtccgcgtgagaattggctatatcctggagcgagtgctgggaggtgctagtccgccgcgccttattcgagaggtgtcagggctgggagactaggatgtcggacacgtggagctctatccaggcccacaagaagcagctggactctctgcgggagaggctgcagcggaggcggaagcaggactcggggcacttggatctacggaatccagaggcagcattgtctccaaccttccgtagtgacagcccagtgcctactgcacccacctctggtggccctaagcccagcacagcttcagcagttcctgaattagctacagatcctgagttagagaagaagttgctacaccacctctctgatctggccttaacattgcccactgatgctgtgtccatctgtcttgccatctccacgccagatgctcctgccactcaagatggggtagaaagcctcctgcagaagtttgcagctcaggagttgattgaggtaaagcgaggtctcctacaagatgatgcacatcctactcttgtaacctatgctgaccattccaagctctctgccatgatgggtgctgtggcagaaaagaagggccctggggaggtagcagggactgtcacagggcagaagcggcgtgcagaacaggactcgactacagtagctgcctttgccagttcgttagtctctggtctgaactcttcagcatcggaaccagcaaaggagccagccaagaaatcaaggaaacatgctgcctcagatgttgatctggagatagagagccttctgaaccaacagtccactaaggaacaacagagcaagaaggtcagtcaggagatcctagagctattaaatactacaacagccaaggaacaatccattgttgaaaaatttcgctctcgaggtcgggcccaagtgcaagaattctgtgactatggaaccaaggaggagtgcatgaaagccagtgatgctgatcgaccctgtcgcaagctgcacttcagacgaattatcaataaacacactgatgagtctttaggtgactgctctttccttaatacatgtttccacatggatacctgcaagtatgttcactatgaaattgatgcttgcatggattctgaggcccctggcagcaaagaccacacgccaagccaggagcttgctcttacacagagtgtcggaggtgattccagtgcagaccgactcttcccacctcagtggatctgttgtgatatccgctacctggacgtcagtatcttgggcaagtttgcagttgtgatggctgacccaccctgggatattcacatggaactgccctatgggaccctgacagatgatgagatgcgcaggctcaacatacccgtactacaggatgatggctttctcttcctctgggtcacaggcagggccatggagttggggagagaatgtctaaatctctgggggtaagtagtggttgtgttgctttcttttgagggtaatactgttacagtgagatacatgttctcttctcccagactattctgtgattccttgcttctataaatggtactacccctaaactgtaaaagtttggctaaaattctagttcttttttatgccccacaggtatgaacgggtagatgaaattatttgggtgaagacaaatcaactgcaacgcatcattcggacaggccgtacaggtcactggttgaaccatgggaaggaacactgcttggtgagcagcagtggggcccaattcaataggtggagcacaaagaagaatcatttgatttcttactgagaaaaagttcaaaggtgtggtttcataaggtaatctgttatctgtggtgagcaggttggtgtcaaaggaaatccccaaggcttcaaccagggtctggattgtgatgtgatcgtagctgaggtatgtgcttcccaggcctccaaagcttccacatttttgttggtatcagttattcatgttgggtgtattctcatcccagatttttctcatttagatcataaacataatagaaagggctagaattgcaatcttgtgtaacttaaaaagcagctagtttttatttcctaggttcgttccaccagtcataaaccagatgaaatctatggcatgattgaaagactatctcctggcactcgcaagattgagttatttggacgaccacacaatgtgcaacccaactggatcacccttggaaaccaactggatgggatccacctactagacccagatgtggttgcacggttcaagcaaaggtacccagatggtatcatctctaaacctaagaatttatagaagcacttccttacagagctaagaatccatagccatggctctgtaagctaaacctgaagagtgatatttgtacaatagctttcttctttatttaaataaacatttgtattgtagt

SEQ ID NO: 358750 - DNA, 2101 bp, Homo sapiens
gctcagctccaggggtcattttccggttagccttcggggtgtccgcgtgagaattggctatatcctggagcgagtgctgggaggtgctagtccgccgcgccttattcgagaggtgtcagggctgggagactaggatgtcggacacgtggagctctatccaggcccacaagaagcagctggactctctgcgggagaggctgcagcggaggcggaagcaggactcggggcacttggatctacggaatccagaggcagcattgtctccaaccttccgtagtgacagcccagtgcctactgcacccacctctggtggccctaagcccagcacagcttcagcagttcctgaattagctacagatcctgagttagagaagaagttgctacaccacctctctgatctggccttaacattgcccactgatgctgtgtccatctgtcttgccatctccacgccagatgctcctgccactcaagatggggtagaaagcctcctgcagaagtttgcagctcaggagttgattgaggtaaagcgaggtctcctacaagatgatgcacatcctactcttgtaacctatgctgaccattccaagctctctgccatgatgggtgctgtggcagaaaagaagggccctggggaggtagcagggactgtcacagggcagaagcggcgtgcagaacaggactcgactacagtagctgcctttgccagttcgttagtctctggtctgaactcttcagcatcggaaccagcaaaggagccagccaagaaatcaaggaaacatgctgcctcagatgttgatctggagatagagagccttctgaaccaacagtccactaaggaacaacagagcaagaaggtcagtcaggagatcctagagctattaaatactacaacagccaaggaacaatccattgttgaaaaatttcgctctcgaggtcgggcccaagtgcaagaattctgtgactatggaaccaaggaggagtgcatgaaagccagtgatgctgatcgaccctgtcgcaagctgcacttcagacgaattatcaataaacacactgatgagtctttaggtgactgctctttccttaatacatgtttccacatggatacctgcaagtatgttcactatgaaattgatgcttgcatggattctgaggcccctggcagcaaagaccacacgccaagccaggagcttgctcttacacagagtgtcggaggtgattccagtgcagaccgactcttcccacctcagtggatctgttgtgatatccgctacctggacgtcagtatcttgggcaagtttgcagttgtgatggctgacccaccctgggatattcacatggaactgccctatgggaccctgacagatgatgagatgcgcaggctcaacatacccgtactacaggatgatggctttctcttcctctgggtcacaggcagggccatggagttggggagagaatgtctaaatctctgggggtatgaacgggtagatgaaattatttgggtgaagacaaatcaactgcaacgcatcattcggacaggccgtacaggtcactggttgaaccatgggaaggaacactgcttggtgagcagcagtggggcccaattcaataggtggagcacaaagaagaatcatttgatttcttactgagaaaaagttcaaaggtgtggtttcataaggtaatctgttatctgtggtgagcaggttggtgtcaaaggaaatccccaaggcttcaaccagggtctggattgtgatgtgatcgtagctgaggtatgtgcttcccaggcctccaaagcttccacatttttgttggtatcagttattcatgttgggtgtattctcatcccagatttttctcatttagatcataaacataatagaaagggctagaattgcaatcttgtgtaacttaaaaagcagctagtttttatttcctaggttcgttccaccagtcataaaccagatgaaatctatggcatgattgaaagactatctcctggcactcgcaagattgagttatttggacgaccacacaatgtgcaacccaactggtaaggtgaccagagaacaggctagtcaagtgaagcagtgggagtggc

SEQ ID NO: 358751 - DNA, 1590 bp, Homo sapiens
gctcagctccaggggtcattttccggttagccttcggggtgtccgcgtgagaattggctatatcctggagcgagtgctgggaggtgctagtccgccgcgccttattcgagaggtgtcagggctgggagactaggatgtcggacacgtggagctctatccaggcccacaagaagcagctggactctctgcgggagaggctgcagcggaggcggaagcaggactcggggcacttggatctacggaatccagaggcagcattgtctccaaccttccgtagtgacagcccagtgcctactgcacccacctctggtggccctaagcccagcacagcttcagcagttcctgaattagctacagatcctgagttagagaagaagttgctacaccacctctctgatctggccttaacattgcccactgatgctgtgtccatctgtcttgccatctccacgccagatgctcctgccactcaagatggggtagaaagcctcctgcagaagtttgcagctcaggagttgattgaggtaaagcgaggtctcctacaagatgatgcacatcctactcttgtaacctatgctgaccattccaagctctctgccatgatgggtgctgtggcagaaaagaagggccctggggaggtagcagggactgtcacagggcagaagcggcgtgcagaacaggactcgactacagtagctgcctttgccagttcgttagtctctggtctgaactcttcagcatcggaaccagcaaaggagccagccaagaaatcaaggaaacatgctgcctcagatgttgatctggagatagagagccttctgaaccaacagtccactaaggaacaacagagcaagaaggtcagtcaggagatcctagagctattaaatactacaacagccaaggaacaatccattgttgaaaaatttcgctctcgaggtcgggcccaagtgcaagaattctgtgactatggaaccaaggaggagtgcatgaaagccagtgatgctgatcgaccctgtcgcaagctgcacttcagacgaattatcaataaacacactgatgagtctttaggtgactgctctttccttaatacatgtttccacatggatacctgcaagtatgttcactatgaaattgatgcttgcatggattctgaggcccctggcagcaaagaccacacgccaagccaggagcttgctcttacacagagtgtcggaggtgattccagtgcagaccgactcttcccacctcagtggatctgttgtgatatccgctacctggacgtcagtatcttgggcaagtttgcagttgtgatggctgacccaccctgggatattcacatggaactgccctatgggaccctgacagatgatgagatgcgcaggctcaacatacccgtactacaggatgatggctttctcttcctctgggtcacaggcaggtaatgcaattcagttacgtaggtatggacagatacagtacaattgaggcctgagctgggaggatcacttgagcctgggagttcagtgggagaaacagtgagttatgattacacacctacactctggcctgggtacaacaggatccatctct

SEQ ID NO: 358752 - DNA, 2266 bp, Homo sapiens
ttcagcaaagtattaagatttttgtgtttgtgagtgttataggtaacactgttggcccccaacattgtcattttgtacactttgttgatcagtggcctgaattcattaaaattcacactacatgcctcaaaaagaatattggatcccagcctaggttgttgagtatattcctgtcctttattaaaatgtaggttgatagaaaggtggtagggatatttaaatctatcatgctaatttactttctttgtatcacagcaaggatagggaattaggaaaagattactcactcaatagagaaaaggtagatagaaaatccagtattatcttgacaaagcagtgaatgttttagtatgattgaggataggtaatctagtgctaaagttggtcacagaatttcctgcacaaaatgaaagatctgtgtatgggaatgctagagaatttgacttctcagaaatatatagaccaacagtggttgccttttttcattttcacttctcttcattcttagatctacggaatccagaggcagcattgtctccaaccttccgtagtgacagcccagtgcctactgcacccacctctggtggccctaagcccagcacagcttcagcagttcctgaattagctacagatcctgagttagagaagaagttgctacaccacctctctgatctggccttaacattgcccactgatgctgtgtccatctgtcttgccatctccacgccagatgctcctgccactcaagatggggtagaaagcctcctgcagaagtttgcagctcaggagttgattgaggtaaagcgaggtctcctacaagatgatgcacatcctactcttgtaacctatgctgaccattccaagctctctgccatgatgggtgctgtggcagaaaagaagggccctggggaggtagcagggactgtcacagggcagaagcggcgtgcagaacaggactcgactacagtagctgcctttgccagttcgttagtctctggtctgaactcttcagcatcggaaccagcaaaggagccagccaagaaatcaaggaaacatgctgcctcagatgttgatctggagatagagagccttctgaaccaacagtccactaaggaacaacagagcaagaaggtcagtcaggagatcctagagctattaaatactacaacagccaaggaacaatccattgttgaaaaatttcgctctcgaggtcgggcccaagtgcaagaattctgtgactatggaaccaaggaggagtgcatgaaagccagtgatgctgatcgaccctgtcgcaagctgcacttcagacgaattatcaataaacacactgatgagtctttaggtgactgctctttccttaatacatgtttccacatggatacctgcaagtatgttcactatgaaattgatgcttgcatggattctgaggcccctggcagcaaagaccacacgccaagccaggagcttgctcttacacagagtgtcggaggtgattccagtgcagaccgactcttcccacctcagtggatctgttgtgatatccgctacctggacgtcagtatcttgggcaagtttgcagttgtgatggctgacccaccctgggatattcacatggaactgccctatgggaccctgacagatgatgagatgcgcaggctcaacatacccgtactacaggatgatggctttctcttcctctgggtcacaggcagggccatggagttggggagagaatgtctaaatctctgggggtatgaacgggtagatgaaattatttgggtgaagacaaatcaactgcaacgcatcattcggacaggccgtacaggtcactggttgaaccatgggaaggaacactgcttggttggtgtcaaaggaaatccccaaggcttcaaccagggtctggattgtgatgtgatcgtagctgaggttcgttccaccagtcataaaccagatgaaatctatggcatgattgaaagactatctcctggcactcgcaagattgagttatttggacgaccacacaatgtgcaacccaactggatcacccttggaaaccaactggatgggatccacctactagacccagatgtggttgcacggttcaagcaaaggtacccagatggtatcatctctaaacctaagaatttatagaagcacttccttacagagctaagaatccatagccatggctctgtaagctaaacctgaagagtgatatttgtacaatagctttcttctttatttaaataaacatttgtattgtagt

SEQ ID NO: 358753 - DNA, 2002 bp, Homo sapiens
gctcagctccaggggtcattttccggttagccttcggggtgtccgcgtgagaattggctatatcctggagcgagtgctgggaggtgctagtccgccgcgccttattcgagaggtgtcagggctgggagactaggatgtcggacacgtggagctctatccaggcccacaagaagcagctggactctctgcgggagaggctgcagcggaggcggaagcaggactcggggcacttggatctacggaatccagaggcagcattgtctccaaccttccgtagtgacagcccagtgcctactgcacccacctctggtggccctaagcccagcacagcttcagcagttcctgaattagctacagatcctgagttagagaagaagttgctacaccacctctctgatctggccttaacattgcccactgatgctgtgtccatctgtcttgccatctccacgccagatgctcctgccactcaagatggggtagaaagcctcctgcagaagtttgcagctcaggagttgattgaggtaaagcgaggtctcctacaagatgatgcacatcctactcttgtaacctatgctgaccattccaagctctctgccatgatgggtgctgtggcagaaaagaagggccctggggaggtagcagggactgtcacagggcagaagcggcgtgcagaacaggactcgactacagtagctgcctttgccagttcgttagtctctggtctgaactcttcagcatcggaaccagcaaaggagccagccaagaaatcaaggaaacatgctgcctcagatgttgatctggagatagagagccttctgaaccaacagtccactaaggaacaacagagcaagaaggtaggggtcatgtgaaaatactctcacaatatgctcttaattatagctttgtttgacagggatttacccctagggcaaggaactgtttacagcagtggttctcaactggggatgattccctactgcccaactcccaggggatctggtaatgtccggagacatttttattgtcacacatgggggagtgctattggcatctagtgggggtagaggccagggatgttgtcaaacatcctacagtgcatagtgggacaaacccccacaacaaacagttgtctgtcccaaagtgtcaacaatgccaatgtcgacaaattcttatttagataatctgtcactgaatctgaaagaattggatcaagagaagaggaatccaaatatatagaaatatagggagatgaatggagaggaatactagaccaattatggaaattgactaaataatgtgaattggttctgagtataagtattggcctgacatgagttcttatctgtttggtacttctagtgcgtgagtttgaacaagttaattaacttctcttgagccttagtcttctcatctgtaacatgaagataataccagcgtatcctgccttatagaattgaatagactctgagctaaaaagtaaagtgtttagcactatactttttagttcagcacccagtaaatatgttttttgtagaaggaatgccttcctggggaggggatgttaacataatgcttagcggtaggaaccaggcctcttccattttaatttcatcccaaatgcatatttgtgaggaaggactgaacccctaacaaatctcttatctgaaggctccaattttccaatattaagttagctaatttaggtctaggcacaatggctcattcctgtaatctcaacactttgggaggccaaggcgtgaggatcacctgaggcgaggagttcaagactggcctgggcaacatagaccctatccctatagaaagtaaagtaattaaaacattagctggcatggtgtcacgcacctatattcccagctacaattgaaggctgagctgggaggatcacttgagcctgggagttcagtgggagaaacagtgagttatgattacacaactacactctggcctgggtgacagcaagatcccatctcttaaaaaa

SEQ ID NO: 358754 - DNA, 1699 bp, Homo sapiens
gctcagctccaggggtcattttccggttagccttcggggtgtccgcgtgagaattggctatatcctggagcgagtgctgggaggtgctagtccgccgcgccttattcgagaggtgtcagggctgggagactaggatgtcggacacgtggagctctatccaggcccacaagaagcagctggactctctgcgggagaggctgcagcggaggcggaagcaggactcggggcacttggatctacggaatccagaggcagcattgtctccaaccttccgtagtgacagcccagtgcctactgcacccacctctggtggccctaagcccagcacagcttcagcagttcctgaattagctacagatcctgagttagagaagaagttgctacaccacctctctgatctggccttaacattgcccactgatgctgtgtccatctgtcttgccatctccacgccagatgctcctgccactcaagatggggtagaaagcctcctgcagaagtttgcagctcaggagttgattgagcatcggaaccagcaaaggagccagccaagaaatcaaggaaacatgctgcctcagatgttgatctggagatagagagccttctgaaccaacagtccactaaggaacaacagagcaagaaggtcgggcccaagtgcaagaattctgtgactatggaaccaaggaggagtgcatgaaagccagtgatgctgatcgaccctgtcgcaagctgcacttcagacgaattatcaataaacacactgatgagtctttaggtgactgctctttccttaatacatgtttccacatggatacctgcaagtatgttcactatgaaattgatgcttgcatggattctgaggcccctggcagcaaagaccacacgccaagccaggagcttgctcttacacagagtgtcggaggtgattccagtgcagaccgactcttcccacctcagtggatctgttgtgatatccgctacctggacgtcagtatcttgggcaagtttgcagttgtgatggctgacccaccctgggatattcacatggaactgccctatgggaccctgacagatgatgagatgcgcaggctcaacatacccgtactacaggatgatggctttctcttcctctgggtcacaggcagggccatggagttggggagagaatgtctaaatctctgggggtatgaacgggtagatgaaattatttgggtgaagacaaatcaactgcaacgcatcattcggacaggccgtacaggtcactggttgaaccatgggaaggaacactgcttggttggtgtcaaaggaaatccccaaggcttcaaccagggtctggattgtgatgtgatcgtagctgaggttcgttccaccagtcataaaccagatgaaatctatggcatgattgaaagactatctcctggcactcgcaagattgagttatttggacgaccacacaatgtgcaacccaactggatcacccttggaaaccaactggatgggatccacctactagacccagatgtggttgcacggttcaagcaaaggtacccagatggtatcatctctaaacctaagaatttatagaagcacttccttacagagctaagaatccatagccatggctctgtaagctaaacctgaagagtgatatttgtacaatagctttcttctttatttaaataaacatttgtattgtagt

SEQ ID NO: 358755 - DNA, 1831 bp, Homo sapiens
tcttagaagacattaatgtcaaaaagaatttgcggagttggtctaagagccaatttgatctataagacattttaagtccaaggctacttctgtcacaggtcagtcaggagatcctagagctattaaatactacaacagccaaggaacaatccattgttgaaaaatttcgctctcgaggtcgggcccaagtgcaagaattctgtgactatggaaccaaggaggagtgcatgaaagccagtgatgctgatcgaccctgtcgcaagctgcacttcaggtctcttggaagggaatgaggtgggatgggtttgtcagaagcagccattccttttcagcatattccttccagtcattggggttctgtctgtaatcttatttagtttatggtttgtgtaagtcctccagaccctgaaggtgtactttcagaagtgcattgtgtgggaagaatacaggctgtactcccaaataactgagattttttttttaaaagctccctccctcttagaatagcaaagtatgtctgtctctgagccacagtgaaagttaaagtactctgaaaggaggataatcttaggagaaaaggaacctaaactcttaggtcagtgttttattctgttctacccaagtctcctgcactgcttgccttccagtggtaaaacaggaaaccaagtctttactcagagaggaattacaattgttctgtagtatgaattatggatttccatgctacctgcctcccttaaaactcttgaaggaagctctaatgatagaattaggggagggtaataaaatagacattttgaaatcatttggaatttgaactgttggatctacatctggagcaccatcttgattctccctttttattttcccagacgaattatcaataaacacactgatgagtctttaggtgactgctctttccttaatacatgtttccacatggatacctgcaagtatgttcactatgaaattgatgcttgcatggattctgaggcccctggcagcaaagaccacacgccaagccaggagcttgctcttacacagagtgtcggaggtgattccagtgcagaccgactcttcccacctcagtggatctgttgtgatatccgctacctggacgtcagtatcttgggcaagtttgcagttgtgatggctgacccaccctgggatattcacatggaactgccctatgggaccctgacagatgatgagatgcgcaggctcaacatacccgtactacaggatgatggctttctcttcctctgggtcacaggcagggccatggagttggggagagaatgtctaaatctctgggggtatgaacgggtagatgaaattatttgggtgaagacaaatcaactgcaacgcatcattcggacaggccgtacaggtcactggttgaaccatgggaaggaacactgcttggttggtgtcaaaggaaatccccaaggcttcaaccagggtctggattgtgatgtgatcgtagctgaggttcgttccaccagtcataaaccagatgaaatctatggcatgattgaaagactatctcctggcactcgcaagattgagttatttggacgaccacacaatgtgcaacccaactggatcacccttggaaaccaactggatgggatccacctactagacccagatgtggttgcacggttcaagcaaaggtacccagatggtatcatctctaaacctaagaatttatagaagcacttccttacagagctaagaatccatagccatggctctgtaagctaaacctgaagagtgatatttgtacaatagctttcttctttatttaaataaacatttgtattgtagt

SEQ ID NO: 358756 - DNA, 1270 bp, Homo sapiens
tctactgagtcctaatgcctgtttacaatgcaaattttaccccgaatatatatttaactctacatttgttctttgagaaaggtaaggttgttgagcatagttttatcttttcgttcttagatccaccatgcttttggtggtgtgcatgtaaatgttcactgagcgtctactgaaaaagtgtttatagtgtttttaacacatcacatattttgaagggaaaaaaaatatgggcatacaaatagttgtttaactcatttctttctagggccatggagttggggagagaatgtctaaatctctgggggtaagtagtggttgtgttgctttcttttgagggtaatactgttacagtgagatacatgttctcttctcccagactattctgtgattccttgcttctataaatggtactacccctaaactgtaaaagtttggctaaaattctagttcttttttatgccccacaggtatgaacgggtagatgaaattatttgggtgaagacaaatcaactgcaacgcatcattcggacaggccgtacaggtcactggttgaaccatgggaaggaacactgcttggtgagcagcagtggggcccaattcaataggtggagcacaaagaagaatcatttgatttcttactgagaaaaagttcaaaggtgtggtttcataaggtaatctgttatctgtggtgagcaggttggtgtcaaaggaaatccccaaggcttcaaccagggtctggattgtgatgtgatcgtagctgaggtatgtgcttcccaggcctccaaagcttccacatttttgttggtatcagttattcatgttgggtgtattctcatcccagatttttctcatttagatcataaacataatagaaagggctagaattgcaatcttgtgtaacttaaaaagcagctagtttttatttcctaggttcgttccaccagtcataaaccagatgaaatctatggcatgattgaaagactatctcctggcactcgcaagattgagttatttggacgaccacacaatgtgcaacccaactggatcacccttggaaaccaactggatgggatccacctactagacccagatgtggttgcacggttcaagcaaaggtacccagatggtatcatctctaaacctaagaatttatagaagcacttccttacagagctaagaatccatagccatggctctgtaagctaaacctgaagagtgatatttgtacaatagctttcttctttatttaaataaacatttgtattgtagt

SEQ ID NO: 358757 - DNA, 1219 bp, Homo sapiens
tctactgagtcctaatgcctgtttacaatgcaaattttaccccgaatatatatttaactctacatttgttctttgagaaaggtaaggttgttgagcatagttttatcttttcgttcttagatccaccatgcttttggtggtgtgcatgtaaatgttcactgagcgtctactgaaaaagtgtttatagtgtttttaacacatcacatattttgaagggaaaaaaaatatgggcatacaaatagttgtttaactcatttctttctagggccatggagttggggagagaatgtctaaatctctgggggtaagtagtggttgtgttgctttcttttgagggtaatactgttacagtgagatacatgttctcttctcccagactattctgtgattccttgcttctataaatggtactacccctaaactgtaaaagtttggctaaaattctagttcttttttatgccccacaggtatgaacgggtagatgaaattatttgggtgaagacaaatcaactgcaacgcatcattcggacaggccgtacaggtcactggttgaaccatgggaaggaacactgcttggtgagcagcagtggggcccaattcaataggtggagcacaaagaagaatcatttgatttcttactgagaagttggtgtcaaaggaaatccccaaggcttcaaccagggtctggattgtgatgtgatcgtagctgaggtatgtgcttcccaggcctccaaagcttccacatttttgttggtatcagttattcatgttgggtgtattctcatcccagatttttctcatttagatcataaacataatagaaagggctagaattgcaatcttgtgtaacttaaaaagcagctagtttttatttcctaggttcgttccaccagtcataaaccagatgaaatctatggcatgattgaaagactatctcctggcactcgcaagattgagttatttggacgaccacacaatgtgcaacccaactggatcacccttggaaaccaactggatgggatccacctactagacccagatgtggttgcacggttcaagcaaaggtacccagatggtatcatctctaaacctaagaatttatagaagcacttccttacagagctaagaatccatagccatggctctgtaagctaaacctgaagagtgatatttgtacaatagctttcttctttatttaaataaacatttgtattgtagt

SEQ ID NO: 358758 - DNA, 2424 bp, Homo sapiens
gctcagctccaggggtcattttccggttagccttcggggtgtccgcgtgagaattggctatatcctggagcgagtgctgggaggtgctagtccgccgcgccttattcgagaggtgtcagggctgggagactaggatgtcggacacgtggagctctatccaggcccacaagaagcagctggactctctgcgggagaggctgcagcggaggcggaagcaggactcggggcacttggatctacggaatccagaggcagcattgtctccaaccttccgtagtgacagcccagtgcctactgcacccacctctggtggccctaagcccagcacagcttcagcagttcctgaattagctacagatcctgagttagagaagaagttgctacaccacctctctgatctggccttaacattgcccactgatgctgtgtccatctgtcttgccatctccacgccagatgctcctgccactcaagatggggtagaaagcctcctgcagaagtttgcagctcaggagttgattgaggtaaagcgaggtctcctacaagatgatgcacatcctactcttgtaacctatgctgaccattccaagctctctgccatgatgggtgctgtggcagaaaagaagggccctggggaggtagcagggactgtcacagggcagaagcggcgtgcagaacaggactcgactacagtagctgcctttgccagttcgttagtctctggtctgaactcttcagcatcggaaccagcaaaggagccagccaagaaatcaaggaaacatgctgcctcagatgttgatctggagatagagagccttctgaaccaacagtccactaaggaacaacagagcaagaaggtcagtcaggagatcctagagctattaaatactacaacagccaaggaacaatccattgttgaaaaatttcgctctcgaggtcgggcccaagtgcaagaattctgtgactatggaaccaaggaggagtgcatgaaagccagtgatgctgatcgaccctgtcgcaagctgcacttcagacgaattatcaataaacacactgatgagtctttaggtgactgctctttccttaatacatgtttccacatggatacctgcaagtatgttcactatgaaattgatgcttgcatggattctgaggcccctggcagcaaagaccacacgccaagccaggagcttgctcttacacagagtgtcggaggtgattccagtgcagaccgactcttcccacctcagtggatctgttgtgatatccgctacctggacgtcagtatcttgggcaagtttgcagttgtgatggctgacccaccctgggatattcacatggaactgccctatgggaccctgacagatgatgagatgcgcaggctcaacatacccgtactacaggatgatggctttctcttcctctgggtcacaggcagggccatggagttggggagagaatgtctaaatctctgggggtatgaacgggtagatgaaattatttgggtgaagacaaatcaactgcaacgcatcattcggacaggccgtacaggtcactggttgaaccatgggaaggaacactgcttggttggtgtcaaaggaaatccccaaggcttcaaccagggtctggattgtgatgtgatcgtagctgaggttcgttccaccagtcataaaccagatgaaatctatggcatgattgaaagactatctcctggcactcgcaagattgagttatttggacgaccacacaatgtgcaacccaactggatcacccttggaaaccaactggatgggatccacctactagacccagatgtggttgcacggttcaagcaaaggtacccagatggtatcatctctaaacctaagaatttatagaagcacttccttacagagctaagaatccatagccatggctctgtaagctaaacctgaagagtgatatttgtacaatagctttcttctttatttaaataaacatttgtattgtagttgggattctgaagtccattctggctctgctacttaacagtgtataatcttgtgcaactcatctctcagtattatatgtgaaatgggagtattacctcattgggttgctgtgaaggttcaaactaaatgagtgcatgggaaacattaaaatgatcattataggctaggcacagtggctcacacctgtaatccgagcactttgggaagccgaggtaggagggtaactgtagcccaggagttcaagactagactgggcaacatagtgagaccccatctctactgctaccctccaaaaccattaaaaaaacaggaatgcaggctgggtgcggtggctcatgcctgtaatcccagcactttgggaggtcaaggcgggcggatcatgaggtcaggagttcgagaccagcctggccaacatggtgaaaccctgtctcta

SEQ ID NO: 358759 - DNA, 2712 bp, Homo sapiens
gctcagctccaggggtcattttccggttagccttcggggtgtccgcgtgagaattggctatatcctggagcgagtgctgggaggtgctagtccgccgcgccttattcgagaggtgtcagggctgggagactaggatgtcggacacgtggagctctatccaggcccacaagaagcagctggactctctgcgggagaggctgcagcggaggcggaagcaggactcggggcacttggatctacggaatccagaggcagcattgtctccaaccttccgtagtgacagcccagtgcctactgcacccacctctggtggccctaagcccagcacagcttcagcagttcctgaattagctacagatcctgagttagagaagaagttgctacaccacctctctgatctggccttaacattgcccactgatgctgtgtccatctgtcttgccatctccacgccagatgctcctgccactcaagatggggtagaaagcctcctgcagaagtttgcagctcaggagttgattgaggtaaagcgaggtctcctacaagatgatgcacatcctactcttgtaacctatgctgaccattccaagctctctgccatgatgggtgctgtggcagaaaagaagggccctggggaggtagcagggactgtcacagggcagaagcggcgtgcagaacaggactcgactacagtagctgcctttgccagttcgttagtctctggtctgaactcttcagcatcggaaccagcaaaggagccagccaagaaatcaaggaaacatgctgcctcagatgttgatctggagatagagagccttctgaaccaacagtccactaaggaacaacagagcaagaaggtcagtcaggagatcctagagctattaaatactacaacagccaaggaacaatccattgttgaaaaatttcgctctcgaggtcgggcccaagtgcaagaattctgtgactatggaaccaaggaggagtgcatgaaagccagtgatgctgatcgaccctgtcgcaagctgcacttcagacgaattatcaataaacacactgatgagtctttaggtgactgctctttccttaatacatgtttccacatggatacctgcaagtatgttcactatgaaattgatgcttgcatggattctgaggcccctggcagcaaagaccacacgccaagccaggagcttgctcttacacagagtgtcggaggtgattccagtgcagaccgactcttcccacctcagtggatctgttgtgatatccgctacctggacgtcagtatcttgggcaagtttgcagttgtgatggctgacccaccctgggatattcacatggaactgccctatgggaccctgacagatgatgagatgcgcaggctcaacatacccgtactacaggatgatggctttctcttcctctgggtcacaggcagggccatggagttggggagagaatgtctaaatctctgggggtatgaacgggtagatgaaattatttgggtgaagacaaatcaactgcaacgcatcattcggacaggccgtacaggtcactggttgaaccatgggaaggaacactgcttggtgagcagcagtggggcccaattcaataggtggagcacaaagaagaatcatttgatttcttactgagaaaaagttcaaaggtgtggtttcataaggtaatctgttatctgtggtgagcaggttggtgtcaaaggaaatccccaaggcttcaaccagggtctggattgtgatgtgatcgtagctgaggtatgtgcttcccaggcctccaaagcttccacatttttgttggtatcagttattcatgttgggtgtattctcatcccagatttttctcatttagatcataaacataatagaaagggctagaattgcaatcttgtgtaacttaaaaagcagctagtttttatttcctaggttcgttccaccagtcataaaccagatgaaatctatggcatgattgaaagactatctcctggcactcgcaagattgagttatttggacgaccacacaatgtgcaacccaactggatcacccttggaaaccaactggatgggatccacctactagacccagatgtggttgcacggttcaagcaaaggtacccagatggtatcatctctaaacctaagaatttatagaagcacttccttacagagctaagaatccatagccatggctctgtaagctaaacctgaagagtgatatttgtacaatagctttcttctttatttaaataaacatttgtattgtagttgggattctgaagtccattctggctctgctacttaacagtgtataatcttgtgcaactcatctctcagtattatatgtgaaatgggagtattacctcattgggttgctgtgaaggttcaaactaaatgagtgcatgggaaacattaaaatgatcattataggctaggcacagtggctcacacctgtaatccgagcactttgggaagccgaggtaggagggtaactgtagcccaggagttcaagactagactgggcaacatagtgagaccccatctctactgctaccctccaaaaccattaaaaaaacaggaatgcaggctgggtgcggtggctcatgcctgtaatcccagcactttgggaggtcaaggcgggcggatcatgaggtcaggagttcgagaccagcctggccaacatggtgaaaccctgtctcta

SEQ ID NO: 358760 - DNA, 2878 bp, Homo sapiens
gctcagctccaggggtcattttccggttagccttcggggtgtccgcgtgagaattggctatatcctggagcgagtgctgggaggtgctagtccgccgcgccttattcgagaggtgtcagggctgggagactaggatgtcggacacgtggagctctatccaggcccacaagaagcagctggactctctgcgggagaggctgcagcggaggcggaagcaggactcggggcacttggatctacggaatccagaggcagcattgtctccaaccttccgtagtgacagcccagtgcctactgcacccacctctggtggccctaagcccagcacagcttcagcagttcctgaattagctacagatcctgagttagagaagaagttgctacaccacctctctgatctggccttaacattgcccactgatgctgtgtccatctgtcttgccatctccacgccagatgctcctgccactcaagatggggtagaaagcctcctgcagaagtttgcagctcaggagttgattgaggtaaagcgaggtctcctacaagatgatgcacatcctactcttgtaacctatgctgaccattccaagctctctgccatgatgggtgctgtggcagaaaagaagggccctggggaggtagcagggactgtcacagggcagaagcggcgtgcagaacaggactcgactacagtagctgcctttgccagttcgttagtctctggtctgaactcttcagcatcggaaccagcaaaggagccagccaagaaatcaaggaaacatgctgcctcagatgttgatctggagatagagagccttctgaaccaacagtccactaaggaacaacagagcaagaaggtcagtcaggagatcctagagctattaaatactacaacagccaaggaacaatccattgttgaaaaatttcgctctcgaggtcgggcccaagtgcaagaattctgtgactatggaaccaaggaggagtgcatgaaagccagtgatgctgatcgaccctgtcgcaagctgcacttcaggtctcttggaagggaatgaggtgggatgggtttgtcagaagcagccattccttttcagcatattccttccagtcattggggttctgtctgtaatcttatttagtttatggtttgtgtaagtcctccagaccctgaaggtgtactttcagaagtgcattgtgtgggaagaatacaggctgtactcccaaataactgagattttttttttaaaagctccctccctcttagaatagcaaagtatgtctgtctctgagccacagtgaaagttaaagtactctgaaaggaggataatcttaggagaaaaggaacctaaactcttaggtcagtgttttattctgttctacccaagtctcctgcactgcttgccttccagtggtaaaacaggaaaccaagtctttactcagagaggaattacaattgttctgtagtatgaattatggatttccatgctacctgcctcccttaaaactcttgaaggaagctctaatgatagaattaggggagggtaataaaatagacattttgaaatcatttggaatttgaactgttggatctacatctggagcaccatcttgattctccctttttattttcccagacgaattatcaataaacacactgatgagtctttaggtgactgctctttccttaatacatgtttccacatggatacctgcaagtatgttcactatgaaattgatgcttgcatggattctgaggcccctggcagcaaagaccacacgccaagccaggagcttgctcttacacagagtgtcggaggtgattccagtgcagaccgactcttcccacctcagtggatctgttgtgatatccgctacctggacgtcagtatcttgggcaagtttgcagttgtgatggctgacccaccctgggatattcacatggaactgccctatgggaccctgacagatgatgagatgcgcaggctcaacatacccgtactacaggatgatggctttctcttcctctgggtcacaggcagggccatggagttggggagagaatgtctaaatctctgggggtatgaacgggtagatgaaattatttgggtgaagacaaatcaactgcaacgcatcattcggacaggccgtacaggtcactggttgaaccatgggaaggaacactgcttggtgagcagcagtggggcccaattcaataggtggagcacaaagaagaatcatttgatttcttactgagaaaaagttcaaaggtgtggtttcataaggtaatctgttatctgtggtgagcaggttggtgtcaaaggaaatccccaaggcttcaaccagggtctggattgtgatgtgatcgtagctgaggtatgtgcttcccaggcctccaaagcttccacatttttgttggtatcagttattcatgttgggtgtattctcatcccagatttttctcatttagatcataaacataatagaaagggctagaattgcaatcttgtgtaacttaaaaagcagctagtttttatttcctaggttcgttccaccagtcataaaccagatgaaatctatggcatgattgaaagactatctcctggcactcgcaagattgagttatttggacgaccacacaatgtgcaacccaactggatcacccttggaaaccaactggatgggatccacctactagacccagatgtggttgcacggttcaagcaaaggtacccagatggtatcatctctaaacctaagaatttatagaagcacttccttacagagctaagaatccatagccatggctctgtaagctaaacctgaagagtgatatttgtacaatagctttcttctttatttaaataaacatttgtattgtagt

SEQ ID NO: 358761 - DNA, 1913 bp, Homo sapiens
gctcagctccaggggtcattttccggttagccttcggggtgtccgcgtgagaattggctatatcctggagcgagtgctgggaggtgctagtccgccgcgccttattcgagaggtgtcagggctgggagactaggatgtcggacacgtggagctctatccaggcccacaagaagcagctggactctctgcgggagaggctgcagcggaggcggaagcaggactcggggcacttggatctacggaatccagaggcagcattgtctccaaccttccgtagtgacagcccagtgcctactgcacccacctctggtggccctaagcccagcacagcttcagcagttcctgaattagctacagatcctgagttagagaagaagttgctacaccacctctctgatctggccttaacattgcccactgatgctgtgtccatctgtcttgccatctccacgccagatgctcctgccactcaagatggggtagaaagcctcctgcagaagtttgcagctcaggagttgattgaggtaaagcgaggtctcctacaagatgatgcacatcctactcttgtaacctatgctgaccattccaagctctctgccatgatgggtgctgtggcagaaaagaagggccctggggaggtagcagggactgtcacagggcagaagcggcgtgcagaacaggactcgactacagtagctgcctttgccagttcgttagtctctggtctgaactcttcagcatcggaaccagcaaaggagccagccaagaaatcaaggaaacatgctgcctcagatgttgatctggagatagagagccttctgaaccaacagtccactaaggaacaacagagcaagaaggtcgggcccaagtgcaagaattctgtgactatggaaccaaggaggagtgcatgaaagccagtgatgctgatcgaccctgtcgcaagctgcacttcagacgaattatcaataaacacactgatgagtctttaggtgactgctctttccttaatacatgtttccacatggatacctgcaagtatgttcactatgaaattgatgcttgcatggattctgaggcccctggcagcaaagaccacacgccaagccaggagcttgctcttacacagagtgtcggaggtgattccagtgcagaccgactcttcccacctcagtggatctgttgtgatatccgctacctggacgtcagtatcttgggcaagtttgcagttgtgatggctgacccaccctgggatattcacatggaactgccctatgggaccctgacagatgatgagatgcgcaggctcaacatacccgtactacaggatgatggctttctcttcctctgggtcacaggcagggccatggagttggggagagaatgtctaaatctctgggggtatgaacgggtagatgaaattatttgggtgaagacaaatcaactgcaacgcatcattcggacaggccgtacaggtcactggttgaaccatgggaaggaacactgcttggttggtgtcaaaggaaatccccaaggcttcaaccagggtctggattgtgatgtgatcgtagctgaggttcgttccaccagtcataaaccagatgaaatctatggcatgattgaaagactatctcctggcactcgcaagattgagttatttggacgaccacacaatgtgcaacccaactggatcacccttggaaaccaactggatgggatccacctactagacccagatgtggttgcacggttcaagcaaaggtacccagatggtatcatctctaaacctaagaatttatagaagcacttccttacagagctaagaatccatagccatggctctgtaagctaaacctgaagagtgatatttgtacaatagctttcttctttatttaaataaacatttgtattgtagt

SEQ ID NO: 358762 - DNA, 2078 bp, Homo sapiens
gctcagctccaggggtcattttccggttagccttcggggtgtccgcgtgagaattggctatatcctggagcgagtgctgggaggtgctagtccgccgcgccttattcgagaggtgtcagggctgggagactaggatgtcggacacgtggagctctatccaggcccacaagaagcagctggactctctgcgggagaggctgcagcggaggcggaagcaggactcggggcacttggatctacggaatccagaggcagcattgtctccaaccttccgtagtgacagcccagtgcctactgcacccacctctggtggccctaagcccagcacagcttcagcagttcctgaattagctacagatcctgagttagagaagaagttgctacaccacctctctgatctggccttaacattgcccactgatgctgtgtccatctgtcttgccatctccacggtaatgacctgacagagttaggatttaccacttattttcagttcacggtcagtgtcttattgcccatacctcccctcgttctctagccagatgctcctgccactcaagatggggtagaaagcctcctgcagaagtttgcagctcaggagttgattgaggtaaagcgaggtctcctacaagatgatgcacatcctactcttgtaacctatgctgaccattccaagctctctgccatgatgggtgctgtggcagaaaagaagggccctggggaggtagcagggactgtcacagggcagaagcggcgtgcagaacaggactcgactacagtagctgcctttgccagttcgttagtctctggtctgaactcttcagcatcggaaccagcaaaggagccagccaagaaatcaaggaaacatgctgcctcagatgttgatctggagatagagagccttctgaaccaacagtccactaaggaacaacagagcaagaaggtcagtcaggagatcctagagctattaaatactacaacagccaaggaacaatccattgttgaaaaatttcgctctcgaggtcgggcccaagtgcaagaattctgtgactatggaaccaaggaggagtgcatgaaagccagtgatgctgatcgaccctgtcgcaagctgcacttcagacgaattatcaataaacacactgatgagtctttaggtgactgctctttccttaatacatgtttccacatggatacctgcaagtatgttcactatgaaattgatgcttgcatggattctgaggcccctggcagcaaagaccacacgccaagccaggagcttgctcttacacagagtgtcggaggtgattccagtgcagaccgactcttcccacctcagtggatctgttgtgatatccgctacctggacgtcagtatcttgggcaagtttgcagttgtgatggctgacccaccctgggatattcacatggaactgccctatgggaccctgacagatgatgagatgcgcaggctcaacatacccgtactacaggatgatggctttctcttcctctgggtcacaggcagggccatggagttggggagagaatgtctaaatctctgggggtatgaacgggtagatgaaattatttgggtgaagacaaatcaactgcaacgcatcattcggacaggccgtacaggtcactggttgaaccatgggaaggaacactgcttggttggtgtcaaaggaaatccccaaggcttcaaccagggtctggattgtgatgtgatcgtagctgaggttcgttccaccagtcataaaccagatgaaatctatggcatgattgaaagactatctcctggcactcgcaagattgagttatttggacgaccacacaatgtgcaacccaactggatcacccttggaaaccaactggatgggatccacctactagacccagatgtggttgcacggttcaagcaaaggtacccagatggtatcatctctaaacctaagaatttatagaagcacttccttacagagctaagaatccatagccatggctctgtaagctaaacctgaagagtgatatttgtacaatagctttcttctttatttaaataaacatttgtattgtagt

SEQ ID NO: 358763 - DNA, 1778 bp, Homo sapiens
gctcagctccaggggtcattttccggttagccttcggggtgtccgcgtgagaattggctatatcctggagcgagtgctgggaggtgctagtccgccgcgccttattcgagaggtgtcagggctgggagactaggatgtcggacacgtggagctctatccaggcccacaagaagcagctggactctctgcgggagaggctgcagcggaggcggaagcaggactcggggcacttggatctacggaatccagaggcagcattgtctccaaccttccgtagtgacagcccagtgcctactgcacccacctctggtggccctaagcccagcacagcttcagcagttcctgaattagctacagatcctgagttagagaagaagttgctacaccacctctctgatctggccttaacattgcccactgatgctgtgtccatctgtcttgccatctccacgccagatgctcctgccactcaagatggggtagaaagcctcctgcagaagtttgcagctcaggagttgattgagcatcggaaccagcaaaggagccagccaagaaatcaaggaaacatgctgcctcagatgttgatctggagatagagagccttctgaaccaacagtccactaaggaacaacagagcaagaaggtcagtcaggagatcctagagctattaaatactacaacagccaaggaacaatccattgttgaaaaatttcgctctcgaggtcgggcccaagtgcaagaattctgtgactatggaaccaaggaggagtgcatgaaagccagtgatgctgatcgaccctgtcgcaagctgcacttcagacgaattatcaataaacacactgatgagtctttaggtgactgctctttccttaatacatgtttccacatggatacctgcaagtatgttcactatgaaattgatgcttgcatggattctgaggcccctggcagcaaagaccacacgccaagccaggagcttgctcttacacagagtgtcggaggtgattccagtgcagaccgactcttcccacctcagtggatctgttgtgatatccgctacctggacgtcagtatcttgggcaagtttgcagttgtgatggctgacccaccctgggatattcacatggaactgccctatgggaccctgacagatgatgagatgcgcaggctcaacatacccgtactacaggatgatggctttctcttcctctgggtcacaggcagggccatggagttggggagagaatgtctaaatctctgggggtatgaacgggtagatgaaattatttgggtgaagacaaatcaactgcaacgcatcattcggacaggccgtacaggtcactggttgaaccatgggaaggaacactgcttggttggtgtcaaaggaaatccccaaggcttcaaccagggtctggattgtgatgtgatcgtagctgaggttcgttccaccagtcataaaccagatgaaatctatggcatgattgaaagactatctcctggcactcgcaagattgagttatttggacgaccacacaatgtgcaacccaactggatcacccttggaaaccaactggatgggatccacctactagacccagatgtggttgcacggttcaagcaaaggtacccagatggtatcatctctaaacctaagaatttatagaagcacttccttacagagctaagaatccatagccatggctctgtaagctaaacctgaagagtgatatttgtacaatagctttcttctttatttaaataaacatttgtattgtagt

SEQ ID NO: 358764 - DNA, 444 bp, Homo sapiens
gctcagctccaggggtcattttccggttagccttcggggtgtccgcgtgagaattggctatatcctggagcgagtgctgggaggtgctagtccgccgcgccttattcgagaggtgtcagggctgggagactaggatgtcggacacgtggagctctatccaggcccacaagaagcagctggactctctgcgggagaggctgcagcggaggcggaagcaggactcggggcacttggcagcagacgttcgcccttctgcaagtagttcgcggttcctcctcacgctgggcctcggttcttccagctcacttttaccggacggacgcttgagccccaccctcgtccgccttgcccactcctcttcagactgcgaggacgtcgcctttgtgaggctgctcagccccctatcccgcgaagcagcaagaacccctttttgttgctgctttg

SEQ ID NO: 358765 - DNA, 2252 bp, Homo sapiens
agggagggtgtgacgctggtatctgtgtgaactcgggcttgtgatgctgagcttggttcatctgctttctcctcccttttcctccccactccttcccaccagcgccacagcaacatcctcagagtctgagcgaactgcgcccagcgcgggcacggagcctcccaccgccagcaacctgcggccccggagaaggcagcgagcgcagtgacagcgcctcaccgccaccagctcctggaccaccatggccaagaaccgcagggacagaaacagttggggtggattttcggaaaagacatatgaatggagctcagaagaggaggagccagtgaaaaaggcaggaccagtccaagtcctcattgtcaaagatgaccattcctttgagttagatgaaactgcattaaatcggatccttctctcggaggctgtcagagacaaggaggttgttgctgtatctgttgctggagcatttagaaaaggaaaatcattcctgatggacttcatgttgagatacatgtacaaccaggaatcagttgattgggttggagactacaatgaaccattgactggtttttcatggagaggtggatctgaacgagagaccacaggaattcagatatggagtgaaatcttccttatcaataaacctgatggtaaaaaggttgcagtgttattgatggatactcagggaacctttgatagtcagtcaactttgagagattcagccacagtatttgcccttagcacaatgatcagctcaatacaggtatataacttatcccaaaatgtccaggaggatgatcttcagcacctccagcttttcactgagtatggcagactggcaatggaggaaacattcctgaagccatttcagagtctgatatttcttgttcgagactggagtttcccatacgaattttcatatggagccgatggtggtgccaaattcttggaaaaacgcctcaaggtctcagggaaccagcatgaagaactacagaacgtcagaaaacacatccattcctgtttcaccaacatttcctgttttctgctacctcatcctggcttaaaagtagctaccaatccaaactttgatggaaaattgaaagaaatagatgatgaattcatcaaaaacttgaaaatactgattccttggctacttagtcccgagagcctagatattaaagagatcaatgggaataaaatcacctgccggggtctggtggagtacttcaaggcttatataaagatctatcaaggtgaagaattaccacatcccaaatccatgttacaggccacagcagaagctaacaatttagcagccgtggcaactgccaaggacacatacaacaaaaaaatggaagagatttgtggtggtgacaaaccatttctggccccaaatgacttgcagaccaaacacctgcaacttaaggaagaatctgtgaagctattccgaggggtgaagaagatgggtggggaagaatttagccggcgttacctgcagcagttggagagtgaaatagatgaactttacatccaatatatcaagcacaatgatagcaaaaatatcttccatgcagctcgtaccccagccacactgtttgtagtcatctttatcacatatgtgattgctggtgtgactggattcattggtttggacatcatagctagcctatgcaatatgataatgggactgacccttatcaccctgtgcacttgggcatatatccggtactctggagaataccgagagctgggagctgtaatagaccaggtggctgcagctctgtgggaccagggaagtacaaatgaggctttgtacaagctttacagtgcagcagcaacccacagacatctgtatcatcaagctttccctacaccaaagtcggaatctactgaacaatcagaaaagaaaaaaatgtaatgcaaattttaagaaatacaggtgcatgaccaattgtcaattaaatattcagttttatgtctccatgcaaacattcaaagtgcttccatcagaacggagtaaaatactaaacacctctgaagactgcaaactggattagttcttttacttcagtgtttaataagcagatgtatgtatgcatggttatactattttgttaacatgtacaatttcctgatttttcttcaaaaatgctgttataaagtatttgtctatttatgataacagtacacgtgttctgcttgaatttactaaattctactactgggttataattaaatcatgtgatattcca

SEQ ID NO: 358766 - DNA, 3348 bp, Homo sapiens
tgccgtcgccgccgccgccactcagccgctgcacggcgcgtcctctcgggggcggcggaggcgcgtacagtcgccgccgccgccgccgccgcaccacgttccccacccggggctgcgtcaccgggagacacgttcccagccagcatgggtcggcgcccagcggcccgcccgagcactccggccgcagaaccagagtgccgccctgaggcctgctgagaacacaacaccctcccgaccgcgccaccgcgcccccctagccgggcgcgtccttgcagggcctgggctgtctccctcccactctcagaaataaggcacacgcctgggcattcgtgggccaacgggccttggctaaaccgtccccacatttgtcagcgccacagcaacatcctcagagtctgagcgaactgcgcccagcgcgggcacggagcctcccaccgccagcaacctgcggccccggagaaggcagcgagcgcagtgacagcgcctcaccgccaccagctcctggaccaccatggccaagaaccgcagggacagaaacagttggggtggattttcggaaaagacatatgaatggagctcagaagaggaggagccagtgaaaaaggcaggaccagtccaagtcctcattgtcaaagatgaccattcctttgagttagatgaaactgcattaaatcggatccttctctcggaggctgtcagagacaaggaggttgttgctgtatctgttgctggagcatttagaaaaggaaaatcattcctgatggacttcatgttgagatacatgtacaaccaggaatcagttgattgggttggagactacaatgaaccattgactggtttttcatggagaggtggatctgaacgagagaccacaggaattcagatatggagtgaaatcttccttatcaataaacctgatggtaaaaaggttgcagtgttattgatggatactcagggaacctttgatagtcagtcaactttgagagattcagccacagtatttgcccttagcacaatgatcagctcaatacaggtatataacttatcccaaaatgtccaggaggatgatcttcagcacctccagcttttcactgagtatggcagactggcaatggaggaaacattcctgaagccatttcagagtctgatatttcttgttcgagactggagtttcccatacgaattttcatatggagccgatggtggtgccaaattcttggaaaaacgcctcaaggtctcagggaaccagcatgaagaactacagaacgtcagaaaacacatccattcctgtttcaccaacatttcctgttttctgctacctcatcctggcttaaaagtagctaccaatccaaactttgatggaaaattgaaagaaatagatgatgaattcatcaaaaacttgaaaatactgattccttggctacttagtcccgagagcctagatattaaagagatcaatgggaataaaatcacctgccggggtctggtggagtacttcaaggcttatataaagatctatcaaggtgaagaattaccacatcccaaatccatgttacaggccacagcagaagctaacaatttagcagccgtggcaactgccaaggacacatacaacaaaaaaatggaagagatttgtggtggtgacaaaccatttctggccccaaatgacttgcagaccaaacacctgcaacttaaggaagaatctgtgaagctattccgaggggtgaagaagatgggtggggaagaatttagccggcgttacctgcagcagttggagagtgaaatagatgaactttacatccaatatatcaagcacaatgatagcaaaaatatcttccatgcagctcgtaccccagccacactgtttgtagtcatctttatcacatatgtgattgctggtgtgactggattcattggtttggacatcatagctagcctatgcaatatgataatgggactgacccttatcaccctgtgcacttgggcatatatccggtactctggagaataccgagagctgggagctgtaatagaccaggtggctgcagctctgtgggaccagggaagtacaaatgaggctttgtacaagctttacagtgcagcagcaacccacagacatctgtatcatcaagctttccctacaccaaagtcggaatctactgaacaatcagaaaagaaaaaaatgtaatgcaaattttaagaaatacaggtgcatgaccaattgtcaattaaatattcagttttatgtctccatgcaaacattcaaagtgcttccatcagaacggagtaaaatactaaacacctctgaagactgcaaactggattagttcttttacttcagtgtttaataagcagatgtatgtatgcatggttatactattttgttaacatgtacaatttcctgatttttcttcaaaaatgctgttataaagtatttgtctatttatgataacagtacacgtgttctgcttgaatttactaaattctactactgggttataattaaatcatgtgatattccacgtttggatatgctcatttaatttctacagaaaaaattttaaattatttcacattagccatttgttaaaacacagcatcataactcagcaggctggatttaatctgtatcatcttatatatatcacaatcttatttttaagcacattttagagttccttagttgctttatcaaaaaccagatattgcttttacatggtttaatagaatataaacctcttgataaaaaatgcacaaaaaatcactttgtatatgtgagtttcactgcattgtatattttttcatttggtacacaaagaatgtattcttcataggtttattcttttaatatgtgaactattattaaagtttactctggttcctaagattaaaaacaaatgcttactgaatttgaaaatgagaggtgctgatatagaatgatgaaggtttatctctttttttagactcaagatgcattttatttaatgttgacatcagtacaaacttaagtttctattttacaaaacatgctaattcctttaggtaacttctagttcttaatgactaaaatctctagtggagtttcactgaacagacttcttagaggaagaaggaaagtgtgttaatgaaaaaagtaatacttatctaggaggtccaaaacagagaaacttctaaagactgtcacagaaatggctacaccataattaagtagcgatataaagtaagaagtgacaggaaagaacaattaagatagaggagtgtgggagttcataagatatatatactgacatcttagaaaagtctgatcacaagttcagcaaattatcttttcccagtgataaaattcca

SEQ ID NO: 358767 - DNA, 1196 bp, Homo sapiens
  misc_feature (11)..(11): n is a, c, g, or t
atcgagctcgntccgtagctcgatcaactttgatggaaaattgaaagaaatagatgatgaattcatcaaaaacttgaaaatactgattccttggctacttagtcccgagagcctagatattaaagagatcaatgggaataaaatcacctgccggggtctggtggagtacttcaaggcttatataaagatctatcaaggtgaagaattaccacatcccaaatccatgttacaggccacagcagaagctaacaatttagcagccgtggcaactgccaaggacacatacaacaaaaaaatggaagagatttgtggtggtgacaaaccatttctggccccaaatgacttgcagaccaaacacctgcaacttaaggaagaatctgtgaagctattccgaggggtgaagaagatgggtggggaagaatttagccggcgttacctgcagcagttggagagtgaaatagatgaactttacatccaatatatcaagcacaatgatagcaaaaatatcttccatgcagctcgtaccccagccacactgtttgtagtcatctttatcacatatgtgattgctggtgtgactggattcattggtttggacatcatagctagcctatgcaatatgataatgggactgacccttatcaccctgtgcacttgggcatatatccggtactctggagaataccgagagctgggagctgtaatagaccaggtggctgcagctctgtgggaccagggaagtacaaatgaggctttgtacaagctttacagtgcagcagcaacccacagacatctgtatcatcaagctttccctacaccaaagtcggaatctactgaacaatcagaaaagaaaaaaatgtaatgcaaattttaagaaatacaggtgcatgaccaattgtcaattaaatattcagttttatgtctccatgcaaacattcaaagtgcttccatcagaacggagtaaaatactaaacacctctgaagactgcaaactggattagttcttttacttcagtgtttaataagcagatgtatgtatgcatggttatactattttgttaacatgtacaatttcctgatttttcttcaaaaatgctgttataaagtatttgtctatttatgataacagtacacgtgttctgcttgaatttactaaattctactactgggttataattaaatcatgtgatattcca

SEQ ID NO: 358768 - DNA, 2522 bp, Homo sapiens
tgccgtcgccgccgccgccactcagccgctgcacggcgcgtcctctcgggggcggcggaggcgcgtacagtcgccgccgccgccgccgccgcaccacgttccccacccggggctgcgtcaccgggagacacgttcccagccagcatgggtcggcgcccagcggcccgcccgagcactccggccgcagaaccagagtgccgccctgaggcctgctgagaacacaacaccctcccgaccgcgccaccgcgcccccctagccgggcgcgtccttgcagggcctgggctgtctccctcccactctcagaaataaggcacacgcctgggcattcgtgggccaacgggccttggctaaaccgtccccacatttgtcagcgccacagcaacatcctcagagtctgagcgaactgcgcccagcgcgggcacggagcctcccaccgccagcaacctgcggccccggagaaggcagcgagcgcagtgacagcgcctcaccgccaccagctcctggaccaccatggccaagaaccgcagggacagaaacagttggggtggattttcggaaaagacatatgaatggagctcagaagaggaggagccagtgaaaaaggcaggaccagtccaagtcctcattgtcaaagatgaccattcctttgagttagatgaaactgcattaaatcggatccttctctcggaggctgtcagagacaaggaggttgttgctgtatctgttgctggagcatttagaaaaggaaaatcattcctgatggacttcatgttgagatacatgtacaaccaggaatcagttgattgggttggagactacaatgaaccattgactggtttttcatggagaggtggatctgaacgagagaccacaggaattcagatatggagtgaaatcttccttatcaataaacctgatggtaaaaaggttgcagtgttattgatggatactcagggaacctttgatagtcagtcaactttgagagattcagccacagtatttgcccttagcacaatgatcagctcaatacaggtatataacttatcccaaaatgtccaggaggatgatcttcagcacctccagcttttcactgagtatggcagactggcaatggaggaaacattcctgaagccatttcagagtctgatatttcttgttcgagactggagtttcccatacgaattttcatatggagccgatggtggtgccaaattcttggaaaaacgcctcaaggtctcagggaaccagcatgaagaactacagaacgtcagaaaacacatccattcctgtttcaccaacatttcctgttttctgctacctcatcctggcttaaaagtagctaccaatccaaactttgatggaaaattgaaagaaatagatgatgaattcatcaaaaacttgaaaatactgattccttggctacttagtcccgagagcctagatattaaagagatcaatgggaataaaatcacctgccggggtctggtggagtacttcaaggcttatataaagatctatcaaggtgaagaattaccacatcccaaatccatgttacaggccacagcagaagctaacaatttagcagccgtggcaactgccaaggacacatacaacaaaaaaatggaagagatttgtggtggtgacaaaccatttctggccccaaatgacttgcagaccaaacacctgcaacttaaggaagaatctgtgaagctattccgaggggtgaagaagatgggtggggaagaatttagccggcgttacctgcagcagttggagagtgaaatagatgaactttacatccaatatatcaagcacaatgatagcaaaaatatcttccatgcagctcgtaccccagccacactgtttgtagtcatctttatcacatatgtgattgctggtgtgactggattcattggtttggacatcatagctagcctatgcaatatgataatgggactgacccttatcaccctgtgcacttgggcatatatccggtactctggagaataccgagagctgggagctgtaatagaccaggtggctgcagctctgtgggaccagggaagtacaaatgaggctttgtacaagctttacagtgcagcagcaacccacagacatctgtatcatcaagctttccctacaccaaagtcggaatctactgaacaatcagaaaagaaaaaaatgtaatgcaaattttaagaaatacaggtgcatgaccaattgtcaattaaatattcagttttatgtctccatgcaaacattcaaagtgcttccatcagaacggagtaaaatactaaacacctctgaagactgcaaactggattagttcttttacttcagtgtttaataagcagatgtatgtatgcatggttatactattttgttaacatgtacaatttcctgatttttcttcaaaaatgctgttataaagtatttgtctatttatgataacagtacacgtgttctgcttgaatttactaaattctactactgggttataattaaatcatgtgatattcca

SEQ ID NO: 358769 - DNA, 2394 bp, Homo sapiens
tgccgtcgccgccgccgccactcagccgctgcacggcgcgtcctctcgggggcggcggaggcgcgtacagtcgccgccgccgccgccgccgcaccacgttccccacccggggctgcgtcaccgggagacacgttcccagccagcatgggtcggcgcccagcggcccgcccgagcactccggccgcagaaccagagtgccgccctgaggcctgctgagaacacaacaccctcccgaccgcgccaccgcgcccccctagccgggcgcgtccttgcagggcctgggctgtctccctcccactctcagaaataaggcacacgcctgggcattcgtgggccaacgggccttggctaaaccgtccccacatttgtcagcgccacagcaacatcctcagagtctgagcgaactgcgcccagcgcgggcacggagcctcccaccgccagcaacctgcggccccggagaaggcagcgagcgcagtgacagcgcctcaccgccaccagctcctggaccaccatggccaagaaccgcagggacagaaacagttggggtggattttcggaaaagacatatgaatggagctcagaagaggaggagccagtgaaaaaggcaggaccagtccaagtcctcattgtcaaagatgaccattcctttgagttagatgaaactgcattaaatcggatccttctctcggaggctgtcagagacaaggaggttgttgctgtatctgttgctggagcatttagaaaaggaaaatcattcctgatggacttcatgttgagatacatgtacaaccaggaatcagttgattgggttggagactacaatgaaccattgactggtttttcatggagaggtggatctgaacgagagaccacaggaattcagatatggagtgaaatcttccttatcaataaacctgatggtaaaaaggttgcagtgttattgatggatactcagggaacctttgatagtcagtcaactttgagagattcagccacagtatttgcccttagcacaatgatcagctcaatacaggtatataacttatcccaaaatgtccaggaggatgatcttcagcacctccagcttttcactgagtatggcagactggcaatggaggaaacattcctgaagccatttcagagtctgatatttcttgttcgagactggagtttcccatacgaattttcatatggagccgatggtggtgccaaattcttggaaaaacgcctcaaggtctcagggaaccagcatgaagaactacagaacgtcagaaaacacatccattcctgtttcaccaacatttcctgttttctgctacctcatcctggcttaaaagtagctaccaatccaaactttgatggaaaattgaaaggcttatataaagatctatcaaggtgaagaattaccacatcccaaatccatgttacaggccacagcagaagctaacaatttagcagccgtggcaactgccaaggacacatacaacaaaaaaatggaagagatttgtggtggtgacaaaccatttctggccccaaatgacttgcagaccaaacacctgcaacttaaggaagaatctgtgaagctattccgaggggtgaagaagatgggtggggaagaatttagccggcgttacctgcagcagttggagagtgaaatagatgaactttacatccaatatatcaagcacaatgatagcaaaaatatcttccatgcagctcgtaccccagccacactgtttgtagtcatctttatcacatatgtgattgctggtgtgactggattcattggtttggacatcatagctagcctatgcaatatgataatgggactgacccttatcaccctgtgcacttgggcatatatccggtactctggagaataccgagagctgggagctgtaatagaccaggtggctgcagctctgtgggaccagggaagtacaaatgaggctttgtacaagctttacagtgcagcagcaacccacagacatctgtatcatcaagctttccctacaccaaagtcggaatctactgaacaatcagaaaagaaaaaaatgtaatgcaaattttaagaaatacaggtgcatgaccaattgtcaattaaatattcagttttatgtctccatgcaaacattcaaagtgcttccatcagaacggagtaaaatactaaacacctctgaagactgcaaactggattagttcttttacttcagtgtttaataagcagatgtatgtatgcatggttatactattttgttaacatgtacaatttcctgatttttcttcaaaaatgctgttataaagtatttgtctatttatgataacagtacacgtgttctgcttgaatttactaaattctactactgggttataattaaatcatgtgatattcca

SEQ ID NO: 358770 - DNA, 1211 bp, Homo sapiens
tgccgtcgccgccgccgccactcagccgctgcacggcgcgtcctctcgggggcggcggaggcgcgtacagtcgccgccgccgccgccgccgcaccacgttccccacccggggctgcgtcaccgggagacacgttcccagccagcatgggtcggcgcccagcggcccgcccgagcactccggccgcagaaccagagtgccgccctgaggcctgctgagaacacaacaccctcccgaccgcgccaccgcgcccccctagccgggcgcgtccttgcagggcctgggctgtctccctcccactctcagaaataaggcacacgcctgggcattcgtgggccaacgggccttggctaaaccgtccccacatttgtcagcgccacagcaacatcctcagagtctgagcgaactgcgcccagcgcgggcacggagcctcccaccgccagcaacctgcggccccggagaaggcagcgagcgcagtgacagcgcctcaccgccaccagctcctggaccaccatggccaagaaccgcagggacagaaacagttggggtggattttcggaaaagacatatgaatggagctcagaagaggaggagccagtgaaaaaggcaggaccagtccaagtcctcattgtcaaagatgaccattcctttgagttagatgaaactgcattaaatcggatccttctctcggaggctgtcagagacaaggaggttgttgctgtatctgttgctggagcatttagaaaaggaaaatcattcctgatggacttcatgttgagatacatgtacaaccaggaatcagttgattgggttggagactacaatgaaccattgactggtttttcatggagaggtggatctgaacgagagaccacaggaattcagatatggagtgaaatcttccttatcaataaacctgatggtaaaaaggttgcagtgttattgatggatactcagggaacctttgatagtcagtcaactttgagagattcagccacagtatttgcccttagcacaatgatcagctcaatacaggtatgaaataagcccattttgatgatgtttctttaactaaaaattatgagtatatgtgtttctacatacatgttataattagataaacaacagaaattgggaatcatatatattgtttgactcaattagcatacgagttctcgtgatttctgtgagagtggaattgtttttgttactg

SEQ ID NO: 358771 - DNA, 845 bp, Homo sapiens
cccacagttattcaagctccgcgttttgggatcatacatcttccaagatgaccttacatcatctaccaggttaataaaccagttttgttaagatccctacactcagcaccatgctttaaaaacctttaaacctaccaacctataaacggaaaaaaaaaacagtaagctgaatagctcaatgacaagtgatatgacagcttaagatatattctaaaacgagtggcaagcaacctactttgaggcatgttttgggggactggccttatgaaaaaggtgagaatttgattttgttcttcagctgaagcctaggactgtgaacagggtggttatatacctttcattccagcagcagttgccagcctactgtgtacaggcactagagccccatgctgagcaggttgagcacacagtgctgctgcttggagtatctgcgtggatatgcctgagaagcatgggtctgatggttattctgggacataaaggagacagaccagaggcaaagaggccagtgaggactgctctgtgcagttgtccaggcctgaagaaggtggcggtgatttgaatcagaagaggtggcattctcttcattaggaggatatggataatcaagacctaacaaattgggctccgaaagataccttcgtcatggggaagagtgaatggagagaagataatataaaatgccaaacgtatataaattgaaaggggaaaattgagagaacttgcgatccatggtcttggtcttccataaaggggaactgggacatccactggagcagagcacaggtataagcgtgcatgtcagggatttgggagactgactgtagtgtagtggatgggctaag

SEQ ID NO: 358772 - DNA, 534 bp, Homo sapiens
aacgctatctggggaagagtgaatggagagaagataatataaaatgccaaacgtatatcaatgaaaggggaaaagtgagagaacttgcgatccatggtctggtcttccataaaggggaactgggacatccactggagcagagcacaggtataagcgtgcatgtcagggattggggagactgactggcacgcttatacctgaggactgctctgtgcagttgtccaggcctgaagaaggtggcggtgatttgaatcagaagaggtggcattctcttcattaggaggatatggataatcaagacctaacaaattgggctccgaaagataccttcgtcatggggaagagtgaatggagagaagataatataaaatgccaaacgtatataaattgaaaggggaaaattgagagaacttgcgatccatggtcttggtcttccataaaggggaactgggacatccactggagcagagcacaggtataagcgtgcatgtcagggatttgggagactgactgtagtgtagtggatgggctaag

SEQ ID NO: 358773 - DNA, 4281 bp, Homo sapiens
atagtgttcaatagaaactaggggattttggtttaggctcttttgcagtcgttgagggggaggtgacggaggcgtcagggaaggtgggaggacggaaaaggaaattaaaagctcttgggaactgaattgtggtaacggaaccttaggaggctgggttggaaatcgagtaggaaggaagagaggatgctccgttgggacacgtgaccagaagttaggggctgcagcggcgctggctttaggtgaacgacgtggtgaggagtgggtttcgggcatgagaagtcacagggccgtttcctagtctctcttcacttctttgggtcttctcagagaaagaaggctgccgtgggtaggctgggggcggagactatcgggaagagaaaattacttttcccactgaaacacacccaagtatatgcccagccttcatgaaagtgaacagagaaacgaagcgcctttatgtgggtggccttagccaggacatttctgaggcagacctacaaaatcagttcagcagatttggagaagtttcggatgtggagatcatcacacggaaagatgaccaaggaaacccacagaaagtttttgcatatatcaacatcagtgtagcagaagcggacctgaaaaaatgtatgtctgttttaaataaaacaaaatggaaaggtggaacattacaaattcaactagcaaaagaaagctttctgcacagattggcccaagagagagaagcagcaaaagctaagaaagaagaatcaacaacaggtaacgccaacttgttagaaaagacaggaggagtggatttccatatgaaagctgtgccagggacagaagtgccagggcataagaattgggttgtgagcaaatttggaagagtcttacctgttcttcaccttaaaaatcaacataaacgtaaaatcatcaaatatgatccctcaaaatactgccacaacctgaagaagataggggaggatttctcaaacaccattcctatatccagcctgacttgggaattagaaggagggaatgaccctatgagtaagaaacggcgaggagagttctctgactttcatggccctcccaagaagataataaaagtgcagaaggatgagagttccactgggtctctggccatgagtacaaggcccaggagggtaatagagagaccacccttaacacagcaacaggctgcacaaaaaagaacttgtgattccattactccttctaaatcatctcctgtacctgtttctgatactcagaaacttaaaaatctaccttttaagacttctggcttggaaactgccaagaagagaaacagcatttctgatgatgatactgattctgaagatgaattgagaatgatgattgcgaaagaggaaaacttacagagaactacacaaccctcaataaatgaatctgaaagtgatccttttgaagttgtaagggatgatttcaaatcaggcgttcacaaactgcattctttaataggtttaggtatcaaaaatcgtgtctcttgccatgatagtgatgatgatattatgagaaatgatcgtgagtatgactcaggagatacagatgaaattattgcgatgaaaaaaaatgttgctaaggtcaaaaacagtacagaattttcacaaatggaaaaatctacgaagaaaacttctttcaaaaatagagaaaactgtgagctttctgatcactgtattaaactacaaaaaagaaaaagcaatgtagagtcagccctcagtcatggattaaagtctcttaatcgtaaatctccctctcactccagtagcagtgaagatgctgattctgcatcagaattagctgactctgaaggaggtgaggagtataatgccatgatgaaaaactgccttcgtgtgaatctcactttagctgatttggaacaattggctggcagtgatctgaaggttccaaatgaagatactaagagtgatggaccagaaaccaccacccaatgcaagtttgacagaggctccaagagccccaagactcccactggcctccgcagaggccgacagtgtattcgtcctgcggagattgtggcttccctgttagaaggagaggagaacacctgtggcaaacagaaaccaaaggaaaacaatttaaagccaaaatttcaggctttcaagggagtaggctgtctatatgaaaaggagtcaatgaaaaaatccttgaaagacagtgttgcctctaacaataaagatcagaattccatgaaacatgaggatcccagtatcatatccatggaagatgggtccccatatgttaatggctcattaggtgaagtgactccatgccaacatgcaaagaaggcgaatggcccaaactatattcagcctcaaaaaagacagaccacttttgaaagccaggatcgcaaggcagtgtcccctagcagttctgaaaagagaagtaagaatcctatttctaggccattagaaggtaagaagtccttaagtcttagtgcaaagactcacaacataggctttgacaaagacagctgccatagtaccacaaagacagaagcttcacaggaagagcggtctgattcaagcggcctcacatctctcaagaaatcaccaaaggtctcatccaaggacactcgggaaatcaaaactgatttctcactttctattagtaattcgtcagatgtgagtgctaaagataagcatgctgaagacaatgagaagcgtttggcagccttggaagcgaggcaaaaagcaaaagaagtgcagaagaagctggtgcataatgctctggcaaatttggatggtcatccagaggataagccaacgcacatcatcttcggttctgacagtgaatgtgaaacagaggagacatcgactcaggagcagagccatccaggagaggaatgggtgaaagagtctatgggtaaaacatcagggaagctgtttgatagcagtgatgatgacgaatctgattctgaagatgacagtaataggttcaaaattaaacctcagtttgagggcagagctggacagaagctcatggatttacagtcgcactttggcaccgatgacagattccgcatggactctcgatttctagaaactgacagtgaagaggaacaggaagaggtaaatgaaaagaaaactgctgaggaagaagagcttgctgaagaaaaaaagaaagccctgaatgttgtacaaagtgttttgcaaatcaacttaagcaattctacaaacagaggatcagtagctgctaagaaatttaaggacatcatacattatgatccaacgaagcaagaccatgccacttacgaaagaaaaagagatgataagccaaaagaaagtaaagcaaaacgaaaaaagaaaagggaggaagctgagaaactacctgaggtgtctaaagaaatgtattataatattgctatggatctgaaagaaatattccaaactacaaaatataccagtgaaaaggaagagggcacaccctggaatgaggactgtggtaaagagaaacctgaggaaatccaggaccctgcagctctgaccagtgacgctgagcagcccagcgggttcacgttctctttttttgattcagacactaaagacataaaggaagagacctacagagttgaaacagtgaaacctggaaagattgtctggcaggaagaccctcgtttacaagacagcagttcagaagaggaagatgttactgaagaaacagatcacagaaactccagtcctggagaagcatcattacttgagaaagagaccactagatttttctttttctctaagaatgatgaacgacttcaaggttctgacttattctggagaggagtaggaagtaatatgagcaggaactcttgggaggccagaacaaccaacctgcgtatggattgtcgaaagaaacataaagacgcaaaaaggaaaatgaaaccaaaataataaatgtcagctggttttgatactgaatgtgaacaaggctcacctaaggaaactgacccagaaaacagttttagctgacaaagaagaaatttcagagtgaaggaattttaaaaatctggctgacggaatatcattctggttgccatctttttctgtggaactcctctgcatttcttcctaagtaattacttcaaaaattaaattcaacttcttataaaggaagaacaagatagtccttgaaaatactttttgtatataatctctttgccctctatcctgagtaactaatggacatcttctcatgcaaggtttacatgaagcctttttaaataaatgagtcaaagcacttgta

SEQ ID NO: 358774 - DNA, 4344 bp, Homo sapiens
gctggggtgggtaggttgggggtggagacaattaggaagaggtaggctagctctttttatcttttagtgcgttacatcctgtttctgtcagactttgttaaagacagtaaatgaatgtatgagtgagtcaaggaaaaacatctaaaaacatgaatacataaaattaagagggatagagtgtaatattatggccatttggaggaaaaaaactctgtctgtacctgtgtctatatgggtatggggttgctgttccaaagtgcattcatgaaagatgtggatgtagggcttgggcaaaacctcgaagactaaaatttggaagtaatacaataggaagtgaaatacagatccaggagacggatttgatacagaaggttcagaggaagtagttgttttgttagattttagaagaactaagggaaagaactcttctctgtatacagaaaattacttttcccactgaaacacacccaagtatatgcccagccttcatgaaagtgaacagagaaacgaagcgcctttatgtgggtggccttagccaggacatttctgaggcagacctacaaaatcagttcagcagatttggagaagtttcggatgtggagatcatcacacggaaagatgaccaaggaaacccacagaaagtttttgcatatatcaacatcagtgtagcagaagcggacctgaaaaaatgtatgtctgttttaaataaaacaaaatggaaaggtggaacattacaaattcaactagcaaaagaaagctttctgcacagattggcccaagagagagaagcagcaaaagctaagaaagaagaatcaacaacaggtaacgccaacttgttagaaaagacaggaggagtggatttccatatgaaagctgtgccagggacagaagtgccagggcataagaattgggttgtgagcaaatttggaagagtcttacctgttcttcaccttaaaaatcaacataaacgtaaaatcatcaaatatgatccctcaaaatactgccacaacctgaagaagataggggaggatttctcaaacaccattcctatatccagcctgacttgggaattagaaggagggaatgaccctatgagtaagaaacggcgaggagagttctctgactttcatggccctcccaagaagataataaaagtgcagaaggatgagagttccactgggtctctggccatgagtacaaggcccaggagggtaatagagagaccacccttaacacagcaacaggctgcacaaaaaagaacttgtgattccattactccttctaaatcatctcctgtacctgtttctgatactcagaaacttaaaaatctaccttttaagacttctggcttggaaactgccaagaagagaaacagcatttctgatgatgatactgattctgaagatgaattgagaatgatgattgcgaaagaggaaaacttacagagaactacacaaccctcaataaatgaatctgaaagtgatccttttgaagttgtaagggatgatttcaaatcaggcgttcacaaactgcattctttaataggtttaggtatcaaaaatcgtgtctcttgccatgatagtgatgatgatattatgagaaatgatcgtgagtatgactcaggagatacagatgaaattattgcgatgaaaaaaaatgttgctaaggtcaaaaacagtacagaattttcacaaatggaaaaatctacgaagaaaacttctttcaaaaatagagaaaactgtgagctttctgatcactgtattaaactacaaaaaagaaaaagcaatgtagagtcagccctcagtcatggattaaagtctcttaatcgtaaatctccctctcactccagtagcagtgaagatgctgattctgcatcagaattagctgactctgaaggaggtgaggagtataatgccatgatgaaaaactgccttcgtgtgaatctcactttagctgatttggaacaattggctggcagtgatctgaaggttccaaatgaagatactaagagtgatggaccagaaaccaccacccaatgcaagtttgacagaggctccaagagccccaagactcccactggcctccgcagaggccgacagtgtattcgtcctgcggagattgtggcttccctgttagaaggagaggagaacacctgtggcaaacagaaaccaaaggaaaacaatttaaagccaaaatttcaggctttcaagggagtaggctgtctatatgaaaaggagtcaatgaaaaaatccttgaaagacagtgttgcctctaacaataaagatcagaattccatgaaacatgaggatcccagtatcatatccatggaagatgggtccccatatgttaatggctcattaggtgaagtgactccatgccaacatgcaaagaaggcgaatggcccaaactatattcagcctcaaaaaagacagaccacttttgaaagccaggatcgcaaggcagtgtcccctagcagttctgaaaagagaagtaagaatcctatttctaggccattagaaggtaagaagtccttaagtcttagtgcaaagactcacaacataggctttgacaaagacagctgccatagtaccacaaagacagaagcttcacaggaagagcggtctgattcaagcggcctcacatctctcaagaaatcaccaaaggtctcatccaaggacactcgggaaatcaaaactgatttctcactttctattagtaattcgtcagatgtgagtgctaaagataagcatgctgaagacaatgagaagcgtttggcagccttggaagcgaggcaaaaagcaaaagaagtgcagaagaagctggtgcataatgctctggcaaatttggatggtcatccagaggataagccaacgcacatcatcttcggttctgacagtgaatgtgaaacagaggagacatcgactcaggagcagagccatccaggagaggaatgggtgaaagagtctatgggtaaaacatcagggaagctgtttgatagcagtgatgatgacgaatctgattctgaagatgacagtaataggttcaaaattaaacctcagtttgagggcagagctggacagaagctcatggatttacagtcgcactttggcaccgatgacagattccgcatggactctcgatttctagaaactgacagtgaagaggaacaggaagaggtaaatgaaaagaaaactgctgaggaagaagagcttgctgaagaaaaaaagaaagccctgaatgttgtacaaagtgttttgcaaatcaacttaagcaattctacaaacagaggatcagtagctgctaagaaatttaaggacatcatacattatgatccaacgaagcaagaccatgccacttacgaaagaaaaagagatgataagccaaaagaaagtaaagcaaaacgaaaaaagaaaagggaggaagctgagaaactacctgaggtgtctaaagaaatgtattataatattgctatggatctgaaagaaatattccaaactacaaaatataccagtgaaaaggaagagggcacaccctggaatgaggactgtggtaaagagaaacctgaggaaatccaggaccctgcagctctgaccagtgacgctgagcagcccagcgggttcacgttctctttttttgattcagacactaaagacataaaggaagagacctacagagttgaaacagtgaaacctggaaagattgtctggcaggaagaccctcgtttacaagacagcagttcagaagaggaagatgttactgaagaaacagatcacagaaactccagtcctggagaagcatcattacttgagaaagagaccactagatttttctttttctctaagaatgatgaacgacttcaaggttctgacttattctggagaggagtaggaagtaatatgagcaggaactcttgggaggccagaacaaccaacctgcgtatggattgtcgaaagaaacataaagacgcaaaaaggaaaatgaaaccaaaataataaatgtcagctggttttgatactgaatgtgaacaaggctcacctaaggaaactgacccagaaaacagttttagctgacaaagaagaaatttcagagtgaaggaattttaaaaatctggctgacggaatatcattctggttgccatctttttctgtggaactcctctgcatttcttcctaagtaattacttcaaaaattaaattcaacttcttataaaggaagaacaagatagtccttgaaaatactttttgtatataatctctttgccctctatcctgagtaactaatggacatcttctcatgcaaggtttacatgaagcctttttaaataaatgagtcaaagcacttgta

SEQ ID NO: 358775 - DNA, 4828 bp, Homo sapiens
atagtgttcaatagaaactaggggattttggtttaggctcttttgcagtcgttgagggggaggtgacggaggcgtcagggaaggtgggaggacggaaaaggaaattaaaagctcttgggaactgaattgtggtaacggaaccttaggaggctgggttggaaatcgagtaggaaggaagagaggatgctccgttgggacacgtgaccagaagttaggggctgcagcggcgctggctttaggtgaacgacgtggtgaggagtgggtttcgggcatgagaagtcacagggccgtttcctagtctctcttcacttctttgggtcttctcagagaaagaaggctgccgtgggtaggctgggggcggagactatcgggaagagaaaattacttttcccactgaaacacacccaagtatatgcccagccttcatgaaagtgaacagagaaacgaagcgcctttatgtgggtggccttagccaggacatttctgaggcagacctacaaaatcagttcagcagatttggagaagtttcggatgtggagatcatcacacggaaagatgaccaaggaaacccacagaaagtttttgcatatatcaacatcagtgtagcagaagcggacctgaaaaaatgtatgtctgttttaaataaaacaaaatggaaaggtggaacattacaaattcaactagcaaaagaaagctttctgcacagattggcccaagagagagaagcagcaaaagctaagaaagaagaatcaacaacaggtaacgccaacttgttagaaaagacaggaggagtggatttccatatgaaagctgtgccagggacagaagtgccagggcataagaattgggttgtgagcaaatttggaagagtcttacctgttcttcaccttaaaaatcaacataaacgtaaaatcatcaaatatgatccctcaaaatactgccacaacctgaagaagataggggaggatttctcaaacaccattcctatatccagcctgacttgggaattagaaggagggaatgaccctatgagtaagaaacggcgaggagagttctctgactttcatggccctcccaagaagataataaaagtgcagaaggatgagagttccactgggtctctggccatgagtacaaggcccaggagggtaatagagagaccacccttaacacagcaacaggctgcacaaaaaagaacttgtgattccattactccttctaaatcatctcctgtacctgtttctgatactcagaaacttaaaaatctaccttttaagacttctggcttggaaactgccaagaagagaaacagcatttctgatgatgatactgattctgaagatgaattgagaatgatgattgcgaaagaggaaaacttacagagaactacacaaccctcaataaatgaatctgaaagtgatccttttgaagttgtaagggatgatttcaaatcaggcgttcacaaactgcattctttaataggtttaggtatcaaaaatcgtgtctcttgccatgatagtgatgatgatattatgagaaatgatcgtgagtatgactcaggagatacagatgaaattattgcgatgaaaaaaaatgttgctaaggtcaaaaacagtacagaattttcacaaatggaaaaatctacgaagaaaacttctttcaaaaatagagaaaactgtgagctttctgatcactgtattaaactacaaaaaagaaaaagcaatgtagagtcagccctcagtcatggattaaagtctcttaatcgtaaatctccctctcactccagtagcagtgaagatgctgattctgcatcagaattagctgactctgaaggaggtgaggagtataatgccatgatgaaaaactgccttcgtgtgaatctcactttagctgatttggaacaattggctggcagtgatctgaaggttccaaatgaagatactaagagtgatggaccagaaaccaccacccaatgcaagtttgacagaggctccaagagccccaagactcccactggcctccgcagaggccgacagtgtattcgtcctgcggagattgtggcttccctgttagaaggagaggagaacacctgtggcaaacagaaaccaaaggaaaacaatttaaagccaaaatttcaggctttcaagggagtaggctgtctatatgaaaaggagtcaatgaaaaaatccttgaaagacagtgttgcctctaacaataaagatcagaattccatgaaacatgaggatcccagtatcatatccatggaagatgggtccccatatgttaatggctcattaggtgaagtgactccatgccaacatgcaaagaaggcgaatggcccaaactatattcagcctcaaaaaagacagaccacttttgaaagccaggatcgcaaggcagtgtcccctagcagttctgaaaagagaagtaagaatcctatttctaggccattagaaggtaagaagtccttaagtcttagtgcaaagactcacaacataggctttgacaaagacagctgccatagtaccacaaagacagaagcttcacaggaagagcggtctgattcaagcggcctcacatctctcaagaaatcaccaaaggtctcatccaaggacactcgggaaatcaaaactgatttctcactttctattagtaattcgtcagatgtgagtgctaaagataagcatgctgaagacaatgagaagcgtttggcagccttggaagcgaggcaaaaagcaaaagaagtgcagaagaagctggtgcataatgctctggcaaatttggatggtcatccagaggataagccaacgcacatcatcttcggttctgacagtgaatgtgaaacagaggagacatcgactcaggagcagagccatccaggagaggaatgggtgaaagagtctatgggtaaaacatcagggaagctgtttgatagcagtgatgatgacgaatctgattctgaagatgacagtaataggttcaaaattaaacctcagtttgagggcagagctggacagaagctcatggatttacagtcgcactttggcaccgatgacagattccgcatggactctcgatttctagaaactgacagtgaagaggaacaggaagaggtaaatgaaaagaaaactgctgaggaagaagagcttgctgaagaaaaaaagaaagccctgaatgttgtacaaagtgttttgcaaatcaacttaagcaattctacaaacagaggatcagtagctgctaagaaatttaaggacatcatacattatgatccaacgaagcaagaccatgccacttacgaaagaaaaagagatgataagccaaaagaaagtaaagcaaaacgaaaaaagaaaagggaggaagctgagaaactacctgaggtgtctaaagaaatgtattataatattgctatggatctgaaagaaatattccaaactacaaaatataccagtgaaaaggaagagggcacaccctggaatgaggactgtggtaaagagaaacctgaggaaatccaggaccctgcagctctgaccagtgacgctgagcagcccagcgggttcacgttctctttttttgattcagacactaaagacataaaggaagagacctacagagttgaaacagtgaaacctggaaagattgtctggcaggaagaccctcgtttacaagacagcagttcagaagaggaagatgttactgaagaaacagatcacagaaactccagtcctggagaagcatcattacttgagaaagagaccactagatttttctttttctctaagaatgatgaacgacttcaaggtcagtccatttttttcatcaaattacatacatagaacaggtaataatacagctacagtaattcacatccaggaattttgaccgttggtaatgtcatgtggtttaaccccatttgttcacactgatgaatgttaacttgtaaagctgtcaaggtctgagagctccccactcaccactttctttgcccgctcattctcatcaacaaagggttgttttgttccaagggcttccttagatgttagacatataaaacccctaagttttagtgccataaattccatgtgaaaactcaggctgttggggagctcatttcttaaagcctagcataaacaaagttacataatagtaaatgatatatataaacagtaaaagcaatattatatttttcatttggaaagaaaaaatactaatttttgaaaataggtagaaactgagggaaaagaatgatcttaactggtattcgagaccttgataatgccaacacttagaatattaccaattttagtagtagtttgctgcctcatctttcttctttttcccctaataggttctgacttattctggagaggagtaggaagtaatatgagcaggaactcttgggaggccagaacaaccaacctgcgtatggattgtcgaaagaaacataaagacgcaaaaaggaaaatgaaaccaaaataataaatgtcagctggttttgatactgaatgtgaacaaggctcacctaaggaaactgacccagaaaacagttttagctgacaaagaagaaatttcagagtgaaggaattttaaaaatctggctgacggaatatcattctggttgccatctttttctgtggaactcctctgcatttcttcctaagtaattacttcaaaaattaaattcaacttcttataaaggaagaacaagatagtccttgaaaatactttttgtatataatctctttgccctctatcctgagtaactaatggacatcttctcatgcaaggtttacatgaagcctttttaaataaatgagtcaaagcacttgta

SEQ ID NO: 358776 - DNA, 3591 bp, Homo sapiens
atagtgttcaatagaaactaggggattttggtttaggctcttttgcagtcgttgagggggaggtgacggaggcgtcagggaaggtgggaggacggaaaaggaaattaaaagctcttgggaactgaattgtggtaacggaaccttaggaggctgggttggaaatcgagtaggaaggaagagaggatgctccgttgggacacgtgaccagaagttaggggctgcagcggcgctggctttaggtgaacgacgtggtgaggagtgggtttcgggcatgagaagtcacagggccgtttcctagtctctcttcacttctttgggtcttctcagagaaagaaggctgccgtgggtaggctgggggcggagactatcgggaagagaaaattacttttcccactgaaacacacccaagtatatgcccagccttcatgaaagtgaacagagaaacgaagcgcctttatgtgggtggccttagccaggacatttctgaggcagacctacaaaatcagttcagcagatttggagaagtttcggatgtggagatcatcacacggaaagatgaccaaggaaacccacagaaagtttttgcatatatcaacatcagtgtagcagaagcggacctgaaaaaatgtatgtctgttttaaataaaacaaaatggaaaggtggaacattacaaattcaactagcaaaagaaagctttctgcacagattggcccaagagagagaagcagcaaaagctaagaaagaagaatcaacaacaggtaacgccaacttgttagaaaagacaggaggagtggatttccatatgaaagctgtgccagggacagaagtgccagggcataagaattgggttgtgagcaaatttggaagagtcttacctgttcttcaccttaaaaatcaacataaacgtaaaatcatcaaatatgatccctcaaaatactgccacaacctgaagaagataggggaggatttctcaaacaccattcctatatccagcctgacttgggaattagaaggagggaatgaccctatgagtaagaaacggcgaggagagttctctgactttcatggccctcccaagaagataataaaagtgcagaaggatgagagttccactgggtctctggccatgagtacaaggcccaggagggtaatagagagaccacccttaacacagcaacaggctgcacaaaaaagaacttgtgattccattactccttctaaatcatctcctgtacctgtttctgatactcagaaacttaaaaatctaccttttaagacttctggcttggaaactgccaagaagagaaacagcatttctgatgatgatactgattctgaagatgaattgagaatgatgattgcgaaagaggaaaacttacagagaactacacaaccctcaataaatgaatctgaaagtgatccttttgaagttgtaagggatgatttcaaatcaggcgttcacaaactgcattctttaataggtttaggtatcaaaaatcgtgtctcttgccatgatagtgatgatgatattatgagaaatgatcgtgagtatgactcaggagatacagatgaaattattgcgatgaaaaaaaatgttgctaaggtcaaaaacagtacagaattttcacaaatggaaaaatctacgaagaaaacttctttcaaaaatagagaaaactgtgagctttctgatcactgtattaaactacaaaaaagaaaaagcaatgtagagtcagccctcagtcatggattaaagtctcttaatcgtaaatctccctctcactccagtagcagtgaagatgctgattctgcatcagaattagctgactctgaaggaggtgaggagtataatgccatgatgaaaaactgccttcgtgtgaatctcactttagctgatttggaacaattggctggcagtgatctgaaggttccaaatgaagatactaagagtgatggaccagaaaccaccacccaatgcaagtttgacagaggctccaagagccccaagactcccactggcctccgcagaggccgacagtgtattcgtcctgcggagattgtggcttccctgttagaaggagaggagaacacctgtggcaaacagaaaccaaaggaaaacaatttaaagccaaaatttcaggctttcaagggagtaggctgtctatatgaaaaggagtcaatgaaaaaatccttgaaagacagtgttgcctctaacaataaagatcagaattccatgaaacatgaggatcccagtatcatatccatggaagatgggtccccatatgttaatggctcattaggtgaagtgactccatgccaacatgcaaagaaggcgaatggcccaaactatattcagcctcaaaaaagacagaccacttttgaaagccaggatcgcaaggcagtgtcccctagcagttctgaaaagagaagtaagaatcctatttctaggccattagaaggtaagaagtccttaagtcttagtgcaaagactcacaacataggctttgacaaagacagctgccatagtaccacaaagacagaagcttcacaggaagagcggtctgattcaagcggcctcacatctctcaagaaatcaccaaaggtctcatccaaggacactcgggaaatcaaaactgatttctcactttctattagtaattcgtcagatgtgagtgctaaagataagcatgctgaagacaatgagaagcgtttggcagccttggaagcgaggcaaaaagcaaaagaagtgcagaagaagctggtgcataatgctctggcaaatttggatggtcatccagaggataagccaacgcacatcatcttcggttctgacagtgaatgtgaaacagaggagacatcgactcaggagcagagccatccaggagaggaatgggtgaaagagtctatgggtaaaacatcagggaagctgtttgatagcagtgatgatgacgaatctgattctgaagatgacagtaataggttcaaaattaaacctcagtttgagggcagagctggacagaagctcatggatttacagtcgcactttggcaccgatgacagattccgcatggactctcgatttctagaaactgacagtgaagaggaacaggaagaggtaaatgaaaagaaaactgctgaggaagaagagcttgctgaagaaaaaaagaaagccctgaatgttgtacaaagtgttttgcaaatcaacttaagcaattctacaaacagaggatcagtagctgctaagaaatttaaggacatcatacattatgatccaacgaagcaagaccatgccacttacgaaagaaaaagagatgataagccaaaagaaagtaaagcaaaacgaaaaaagaaaagggaggaagctgagaaactacctgaggtgtctaaagaaatgtattataatattgctatggatctgaaagaaatattccaaactacaaaatataccagtgaaaaggaagagggcacaccctggaatgaggactgtggtaaagagaaacctgaggaaatccaggaccctgcagctctgccctcaaactgaggtttaattttgacctatactgtcatcttcagatcagattgtcatcatcagg

SEQ ID NO: 358777 - DNA, 2991 bp, Homo sapiens
atagtgttcaatagaaactaggggattttggtttaggctcttttgcagtcgttgagggggaggtgacggaggcgtcagggaaggtgggaggacggaaaaggaaattaaaagctcttgggaactgaattgtggtaacggaaccttaggaggctgggttggaaatcgagtaggaaggaagagaggatgctccgttgggacacgtgaccagaagttaggggctgcagcggcgctggctttaggtgaacgacgtggtgaggagtgggtttcgggcatgagaagtcacagggccgtttcctagtctctcttcacttctttgggtcttctcagagaaagaaggctgccgtgggtaggctgggggcggagactatcgggaagagaaaattacttttcccactgaaacacacccaagtatatgcccagccttcatgaaagtgaacagagaaacgaagcgcctttatgtgggtggccttagccaggacatttctgaggcagacctacaaaatcagttcagcagatttggagaagtttcggatgtggagatcatcacacggaaagatgaccaaggaaacccacagaaagtttttgcatatatcaacatcagtgtagcagaagcggacctgaaaaaatgtatgtctgttttaaataaaacaaaatggaaaggtggaacattacaaattcaactagcaaaagaaagctttctgcacagattggcccaagagagagaagcagcaaaagctaagaaagaagaatcaacaacaggtaacgccaacttgttagaaaagacaggaggagtggatttccatatgaaagctgtgccagggacagaagtgccagggcataagaattgggttgtgagcaaatttggaagagtcttacctgttcttcaccttaaaaatcaacataaacgtaaaatcatcaaatatgatccctcaaaatactgccacaacctgaagaagataggggaggatttctcaaacaccattcctatatccagcctgacttgggaattagaaggagggaatgaccctatgagtaagaaacggcgaggagagttctctgactttcatggccctcccaagaagataataaaagtgcagaaggatgagagttccactgggtctctggccatgagtacaaggcccaggagggtaatagagagaccacccttaacacagcaacaggctgcacaaaaaagaacttgtgattccattactccttctaaatcatctcctgtacctgtttctgatactcagaaacttaaaaatctaccttttaagacttctggcttggaaactgccaagaagagaaacagcatttctgatgatgatactgattctgaagatgaattgagaatgatgattgcgaaagaggaaaacttacagagaactacacaaccctcaataaatgaatctgaaagtgatccttttgaagttgtaagggatgatttcaaatcaggcgttcacaaactgcattctttaataggtttaggtatcaaaaatcgtgtctcttgccatgatagtgatgatgatattatgagaaatgatcgtgagtatgactcaggagatacagatgaaattattgcgatgaaaaaaaatgttgctaaggtcaaaaacagtacagaattttcacaaatggaaaaatctacgaagaaaacttctttcaaaaatagagaaaactgtgagctttctgatcactgtattaaactacaaaaaagaaaaagcaatgtagagtcagccctcagtcatggattaaagtctcttaatcgtaaatctccctctcactccagtagcagtgaagatgctgattctgcatcagaattagctgactctgaaggaggtgaggagtataatgccatgatgaaaaactgccttcgtgtgaatctcactttagctgatttggaacaattggctggcagtgatctgaaggttccaaatgaagatactaagagtgatggaccagaaaccaccacccaatgcaagtttgacagaggctccaagagccccaagactcccactggcctccgcagaggccgacagtgtattcgtcctgcggagattgtggcttccctgttagaaggagaggagaacacctgtggcaaacagaaaccaaaggaaaacaatttaaagccaaaatttcaggctttcaagggagtaggctgtctatatgaaaaggagtcaatgaaaaaatccttgaaagacagtgttgcctctaacaataaagatcagaattccatgaaacatgaggatcccagtatcatatccatggaagatgggtccccatatgttaatggctcattaggtgaagtgactccatgccaacatgcaaagaaggcgaatggcccaaactatattcagcctcaaaaaagacagaccacttttgaaagccaggatcgcaaggcagtgtcccctagcagttctgaaaagagaagtaagaatcctatttctaggccattagaaggtaagaagtccttaagtcttagtgcaaagactcacaacataggctttgacaaagacagctgccatagtaccacaaagacagaagcttcacaggaagagcggtctgattcaagcggcctcacatctctcaagaaatcaccaaaggtctcatccaaggacactcgggaaatcaaaactgatttctcactttctattagtaattcgtcagatgtgagtgctaaagataagcatgctgaagacaatgagaagcgtttggcagccttggaagcgaggcaaaaagcaaaagaagtgcagaagaagctggtgcataatgctctggcaaatttggatggtcatccagaggataagccaacgcacatcatcttcggttctgacagtgaatgtgaaacagaggagacatcgactcaggagcagagccatccaggagaggaatgggtgaaaagtctatgggtaaaacatcagggaagccaacagggtcagagctcccgtcggggctcagcggaaacgaatctgactcgtatagaccgctctaccg

SEQ ID NO: 358778 - DNA, 1500 bp, Homo sapiens
ttaactaacaaagtatctggaacagttgacacataaatgaagtgtggatgcatgaatgtgaaacagaggagacatcgactcaggagcagagccatccaggagaggaatgggtgaaagagtctatgggtaaaacatcagggaagctgtttgatagcagtgatgatgacgaatctgattctgaagatgacagtaataggttcaaaattaaacctcagtttgagggcagagctggacagaagctcatggatttacagtcgcactttggcaccgatgacagattccgcatggactctcgatttctagaaactgacagtgaagaggaacaggaagaggtaaatgaaaagaaaactgctgaggaagaagagcttgctgaagaaaaaaagaaagccctgaatgttgtacaaagtgttttgcaaatcaacttaagcaattctacaaacagaggatcagtagctgctaagaaatttaaggacatcatacattatgatccaacgaagcaagaccatgccacttacgaaagaaaaagagatgataagccaaaagaaagtaaagcaaaacgaaaaaagaaaagggaggaagctgagaaactacctgaggtgtctaaagaaatgtattataatattgctatggatctgaaagaaatattccaaactacaaaatataccagtgaaaaggaagagggcacaccctggaatgaggactgtggtaaagagaaacctgaggaaatccaggaccctgcagctctgaccagtgacgctgagcagcccagcgggttcacgttctctttttttgattcagacactaaagacataaaggaagagacctacagagttgaaacagtgaaacctggaaagattgtctggcaggaagaccctcgtttacaagacagcagttcagaagaggaagatgttactgaagaaacagatcacagaaactccagtcctggagaagcatcattacttgagaaagagaccactagatttttctttttctctaagaatgatgaacgacttcaaggttctgacttattctggagaggagtaggaagtaatatgagcaggaactcttgggaggccagaacaaccaacctgcgtatggattgtcgaaagaaacataaagacgcaaaaaggaaaatgaaaccaaaataataaatgtcagctggttttgatactgaatgtgaacaaggctcacctaaggaaactgacccagaaaacagttttagctgacaaagaagaaatttcagagtgaaggaattttaaaaatctggctgacggaatatcattctggttgccatctttttctgtggaactcctctgcatttcttcctaagtaattacttcaaaaattaaattcaacttcttataaaggaagaacaagatagtccttgaaaatactttttgtatataatctctttgccctctatcctgagtaactaatggacatcttctcatgcaaggtttacatgaagcctttttaaataaatgagtcaaagcacttgta

SEQ ID NO: 358779 - DNA, 1216 bp, Homo sapiens
aaacacaagaatgaacagaacctggagactaaccttcatttagaagaggtaaatgaaaagaaaactgctgaggaagaagagcttgctgaagaaaaaaagaaagccctgaatgttgtacaaagtgttttgcaaatcaacttaagcaattctacaaacagaggatcagtagctgctaagaaatttaaggacatcatacattatgatccaacgaagcaagaccatgccacttacgaaagaaaaagagatgataagccaaaagaaagtaaagcaaaacgaaaaaagaaaagggaggaagctgagaaactacctgaggtgtctaaagaaatgtattataatattgctatggatctgaaagaaatattccaaactacaaaatataccagtgaaaaggaagagggcacaccctggaatgaggactgtggtaaagagaaacctgaggaaatccaggaccctgcagctctgaccagtgacgctgagcagcccagcgggttcacgttctctttttttgattcagacactaaagacataaaggaagagacctacagagttgaaacagtgaaacctggaaagattgtctggcaggaagaccctcgtttacaagacagcagttcagaagaggaagatgttactgaagaaacagatcacagaaactccagtcctggagaagcatcattacttgagaaagagaccactagatttttctttttctctaagaatgatgaacgacttcaaggttctgacttattctggagaggagtaggaagtaatatgagcaggaactcttgggaggccagaacaaccaacctgcgtatggattgtcgaaagaaacataaagacgcaaaaaggaaaatgaaaccaaaataataaatgtcagctggttttgatactgaatgtgaacaaggctcacctaaggaaactgacccagaaaacagttttagctgacaaagaagaaatttcagagtgaaggaattttaaaaatctggctgacggaatatcattctggttgccatctttttctgtggaactcctctgcatttcttcctaagtaattacttcaaaaattaaattcaacttcttataaaggaagaacaagatagtccttgaaaatactttttgtatataatctctttgccctctatcctgagtaactaatggacatcttctcatgcaaggtttacatgaagcctttttaaataaatgagtcaaagcacttgta

SEQ ID NO: 358780 - DNA, 522 bp, Homo sapiens
atcctagaggatcccccgccatttacaactatctacttttggctctgcgatgatggagaggagtaggaagtaatatgagcaggaactcttgggaggccagaacaaccaacctgcgtatggattgtcgaaagaaacataaagacgcaaaaaggaaaatgaaaccaaaataataaatgtcagctggttttgatactgaatgtgaacaaggctcacctaaggaaactgacccagaaaacagttttagctgacaaagaagaaatttcagagtgaaggaattttaaaaatctggctgacggaatatcattctggttgccatctttttctgtggaactcctctgcatttcttcctaagtaattacttcaaaaattaaattcaacttcttataaaggaagaacaagatagtccttgaaaatactttttgtatataatctctttgccctctatcctgagtaactaatggacatcttctcatgcaaggtttacatgaagcctttttaaataaatgagtcaaagcacttgta

SEQ ID NO: 358781 - DNA, 1192 bp, Homo sapiens
atagtgttcaatagaaactaggggattttggtttaggctcttttgcagtcgttgagggggaggtgacggaggcgtcagggaaggtgggaggacggaaaaggaaattaaaagctcttgggaactgaattgtggtaacggaaccttaggaggctgggttggaaatcgagtaggaaggaagagaggatgctccgttgggacacgtgaccagaagttaggggctgcagcggcgctggctttaggtgaacgacgtgaaaattacttttcccactgaaacacacccaagtatatgcccagccttcatgaaagtgaacagagaaacgaagcgcctttatgtgggtggccttagccaggacatttctgaggcagacctacaaaatcagttcagcagatttggagaagtttcggatgtggagatcatcacacggaaagatgaccaaggaaacccacagaaagtttttgcatatatcaacatcagtgtagcagaagcggacctgaaaaaatccatttttcacgttatccagagggacagcagtgatgaagagaattccagtatcgtataactcagcaggtttaggtccattccatttggcatcagcagacatggtagcactttactggtatgtctgttttaaataaaacaaaatggaaaggtggaacattacaaattcaactagcaaaagaaagctttctgcacagcagttgccagcctactgtgtacaggcactagagccccatgctgagcaggttgagcacacagtgctgctgcttggagtatctgcgtggatatgcctgagaagcatgggtctgatggttattctgggacataaaggagacagaccagaggcaaagaggccagtgaggactgctctgtgcagttgtccaggcctgaagaaggtggcggtgatttgaatcagaagaggtggcattctcttcattaggaggatatggataatcaagacctaacaaattgggctccgaaagataccttcgtcatggggaagagtgaatggagagaagataatataaaatgccaaacgtatataaattgaaaggggaaaattgagagaacttgcgatccatggtcttggtcttccataaaggggaactgggacatccactggagcagagcacaggtataagcgtgcatgtcagggatttgggagactgactgtagtgtagtggatgggctaag

SEQ ID NO: 358782 - DNA, 385 bp, Homo sapiens
gctttcgatggcctccctaggatggtcatccagaggataagccaacgcacatcatcttcggttctgacagtgaatgtgaaacagaggagacatcgactcaggagcagagccatccaggagaggaatgggtgaaagtaagaagttcaggatgtctctgtggacattcatctacttctgcagatccacaccacaaacaactggcaatctcaacataaaaccctcctgagagccccaatgagacccagggcttgccaggtcacctcatattgagactacaggggtcttggagatttttatatatgaacctatattctccacaacatctgcagcatgacatcaatattagtgaaacgctacaaaaactgttcttgcatgtaataactac

SEQ ID NO: 358783 - DNA, 502 bp, Homo sapiens
cgaggcgggtggatcacctgaggtcaggagttcaagaccagcctggctaaagtggtgaaaccccgtctctactaaaaatacaaaaattagctggttgtggtcatgggctcctgtaatcccagctacttgggaggctgaggcaggagaatcacttgaacctgggaggcggaggttgcagtgagcctacattgtgccattgcactccagcctgggcaacaggagtgaaactcttgtctcaaacaaaaaaaaaggaaaaaaaaaaaagaatatacaggtagaatgaccaggagagttgataagcttgttccagaccaatgaaatgtaacaagaacagatatattctaaaacgagtggcaagcaacctactttgaggcatgttttgggggactggccttatgaaaaaggtgagaatttgattttgttcttcagctgaagcctaggactgtgaacagggtggttatatacctttcattccagcagcagttgccagcctactgtgtac

SEQ ID NO: 358784 - DNA, 4155 bp, Homo sapiens
atagtgttcaatagaaactaggggattttggtttaggctcttttgcagtcgttgagggggaggtgacggaggcgtcagggaaggtgggaggacggaaaaggaaattaaaagctcttgggaactgaattgtggtaacggaaccttaggaggctgggttggaaatcgagtaggaaggaagagaggatgctccgttgggacacgtgaccagaagttaggggctgcagcggcgctggctttaggtgaacgacgtgaaaattacttttcccactgaaacacacccaagtatatgcccagccttcatgaaagtgaacagagaaacgaagcgcctttatgtgggtggccttagccaggacatttctgaggcagacctacaaaatcagttcagcagatttggagaagtttcggatgtggagatcatcacacggaaagatgaccaaggaaacccacagaaagtttttgcatatatcaacatcagtgtagcagaagcggacctgaaaaaatgtatgtctgttttaaataaaacaaaatggaaaggtggaacattacaaattcaactagcaaaagaaagctttctgcacagattggcccaagagagagaagcagcaaaagctaagaaagaagaatcaacaacaggtaacgccaacttgttagaaaagacaggaggagtggatttccatatgaaagctgtgccagggacagaagtgccagggcataagaattgggttgtgagcaaatttggaagagtcttacctgttcttcaccttaaaaatcaacataaacgtaaaatcatcaaatatgatccctcaaaatactgccacaacctgaagaagataggggaggatttctcaaacaccattcctatatccagcctgacttgggaattagaaggagggaatgaccctatgagtaagaaacggcgaggagagttctctgactttcatggccctcccaagaagataataaaagtgcagaaggatgagagttccactgggtctctggccatgagtacaaggcccaggagggtaatagagagaccacccttaacacagcaacaggctgcacaaaaaagaacttgtgattccattactccttctaaatcatctcctgtacctgtttctgatactcagaaacttaaaaatctaccttttaagacttctggcttggaaactgccaagaagagaaacagcatttctgatgatgatactgattctgaagatgaattgagaatgatgattgcgaaagaggaaaacttacagagaactacacaaccctcaataaatgaatctgaaagtgatccttttgaagttgtaagggatgatttcaaatcaggcgttcacaaactgcattctttaataggtttaggtatcaaaaatcgtgtctcttgccatgatagtgatgatgatattatgagaaatgatcgtgagtatgactcaggagatacagatgaaattattgcgatgaaaaaaaatgttgctaaggtcaaaaacagtacagaattttcacaaatggaaaaatctacgaagaaaacttctttcaaaaatagagaaaactgtgagctttctgatcactgtattaaactacaaaaaagaaaaagcaatgtagagtcagccctcagtcatggattaaagtctcttaatcgtaaatctccctctcactccagtagcagtgaagatgctgattctgcatcagaattagctgactctgaaggaggtgaggagtataatgccatgatgaaaaactgccttcgtgtgaatctcactttagctgatttggaacaattggctggcagtgatctgaaggttccaaatgaagatactaagagtgatggaccagaaaccaccacccaatgcaagtttgacagaggctccaagagccccaagactcccactggcctccgcagaggccgacagtgtattcgtcctgcggagattgtggcttccctgttagaaggagaggagaacacctgtggcaaacagaaaccaaaggaaaacaatttaaagccaaaatttcaggctttcaagggagtaggctgtctatatgaaaaggagtcaatgaaaaaatccttgaaagacagtgttgcctctaacaataaagatcagaattccatgaaacatgaggatcccagtatcatatccatggaagatgggtccccatatgttaatggctcattaggtgaagtgactccatgccaacatgcaaagaaggcgaatggcccaaactatattcagcctcaaaaaagacagaccacttttgaaagccaggatcgcaaggcagtgtcccctagcagttctgaaaagagaagtaagaatcctatttctaggccattagaaggtaagaagtccttaagtcttagtgcaaagactcacaacataggctttgacaaagacagctgccatagtaccacaaagacagaagcttcacaggaagagcggtctgattcaagcggcctcacatctctcaagaaatcaccaaaggtctcatccaaggacactcgggaaatcaaaactgatttctcactttctattagtaattcgtcagatgtgagtgctaaagataagcatgctgaagacaatgagaagcgtttggcagccttggaagcgaggcaaaaagcaaaagaagtgcagaagaagctggtgcataatgctctggcaaatttggatggtcatccagaggataagccaacgcacatcatcttcggttctgacagtgaatgtgaaacagaggagacatcgactcaggagcagagccatccaggagaggaatgggtgaaagagtctatgggtaaaacatcagggaagctgtttgatagcagtgatgatgacgaatctgattctgaagatgacagtaataggttcaaaattaaacctcagtttgagggcagagctggacagaagctcatggatttacagtcgcactttggcaccgatgacagattccgcatggactctcgatttctagaaactgacagtgaagaggaacaggaagaggtaaatgaaaagaaaactgctgaggaagaagagcttgctgaagaaaaaaagaaagccctgaatgttgtacaaagtgttttgcaaatcaacttaagcaattctacaaacagaggatcagtagctgctaagaaatttaaggacatcatacattatgatccaacgaagcaagaccatgccacttacgaaagaaaaagagatgataagccaaaagaaagtaaagcaaaacgaaaaaagaaaagggaggaagctgagaaactacctgaggtgtctaaagaaatgtattataatattgctatggatctgaaagaaatattccaaactacaaaatataccagtgaaaaggaagagggcacaccctggaatgaggactgtggtaaagagaaacctgaggaaatccaggaccctgcagctctgaccagtgacgctgagcagcccagcgggttcacgttctctttttttgattcagacactaaagacataaaggaagagacctacagagttgaaacagtgaaacctggaaagattgtctggcaggaagaccctcgtttacaagacagcagttcagaagaggaagatgttactgaagaaacagatcacagaaactccagtcctggagaagcatcattacttgagaaagagaccactagatttttctttttctctaagaatgatgaacgacttcaaggttctgacttattctggagaggagtaggaagtaatatgagcaggaactcttgggaggccagaacaaccaacctgcgtatggattgtcgaaagaaacataaagacgcaaaaaggaaaatgaaaccaaaataataaatgtcagctggttttgatactgaatgtgaacaaggctcacctaaggaaactgacccagaaaacagttttagctgacaaagaagaaatttcagagtgaaggaattttaaaaatctggctgacggaatatcattctggttgccatctttttctgtggaactcctctgcatttcttcctaagtaattacttcaaaaattaaattcaacttcttataaaggaagaacaagatagtccttgaaaatactttttgtatataatctctttgccctctatcctgagtaactaatggacatcttctcatgcaaggtttacatgaagcctttttaaataaatgagtcaaagcacttgta

SEQ ID NO: 358785 - DNA, 4412 bp, Homo sapiens
atagtgttcaatagaaactaggggattttggtttaggctcttttgcagtcgttgagggggaggtgacggaggcgtcagggaaggtgggaggacggaaaaggaaattaaaagctcttgggaactgaattgtggtaacggaaccttaggaggctgggttggaaatcgagtaggaaggaagagaggatgctccgttgggacacgtgaccagaagttaggggctgcagcggcgctggctttaggtgaacgacgtggtgaggagtgggtttcgggcatgagaagtcacagggccgtttcctagtctctcttcacttctttgggtcttctcagagaaagaaggctgccgtgggtaggctgggggcggagactatcgggaagagaaaattacttttcccactgaaacacacccaagtatatgcccagccttcatgaaagtgaacagagaaacgaagcgcctttatgtgggtggccttagccaggacatttctgaggcagacctacaaaatcagttcagcagatttggagaagtttcggatgtggagatcatcacacggaaagatgaccaaggaaacccacagaaagtttttgcatatatcaacatcagtgtagcagaagcggacctgaaaaaatgtatgtctgttttaaataaaacaaaatggaaaggtggaacattacaaattcaactagcaaaagaaagctttctgcacagattggcccaagagagagaagcagcaaaagctaagaaagaagaatcaacaacaggtaacgccaacttgttagaaaagacaggaggagtggatttccatatgaaagctgtgccagggacagaagtgccagggcataagaattgggttgtgagcaaatttggaagagtcttacctgttcttcaccttaaaaatcaacataaacgtaaaatcatcaaatatgatccctcaaaatactgccacaacctgaagaagataggggaggatttctcaaacaccattcctatatccagcctgacttgggaattagaaggagggaatgaccctatgagtaagaaacggcgaggagagttctctgactttcatggccctcccaagaagataataaaagtgcagaaggatgagagttccactgggtctctggccatgagtacaaggcccaggagggtaatagagagaccacccttaacacagcaacaggctgcacaaaaaagaacttgtgattccattactccttctaaatcatctcctgtacctgtttctgatactcagaaacttaaaaatctaccttttaagacttctggcttggaaactgccaagaagagaaacagcatttctgatgatgatactgattctgaagatgaattgagaatgatgattgcgaaagaggaaaacttacagagaactacacaaccctcaataaatgaatctgaaagtgatccttttgaagttgtaagggatgatttcaaatcaggcgttcacaaactgcattctttaataggtttaggtatcaaaaatcgtgtctcttgccatgatagtgatgatgatattatgagaaatgatcgtgagtatgactcaggagatacagatgaaattattgcgatgaaaaaaaatgttgctaaggtcaaaaacagtacagaattttcacaaatggaaaaatctacgaagaaaacttctttcaaaaatagagaaaactgtgagctttctgatcactgtattaaactacaaaaaagaaaaagcaatgtagagtcagccctcagtcatggattaaagtctcttaatcgtaaatctccctctcactccagtagcagtgaagatgctgattctgcatcagaattagctgactctgaaggaggtgaggagtataatgccatgatgaaaaactgccttcgtgtgaatctcactttagctgatttggaacaattggctggcagtgatctgaaggttccaaatgaagatactaagagtgatggaccagaaaccaccacccaatgcaagtttgacagaggctccaagagccccaagactcccactggcctccgcagaggccgacagtgtattcgtcctgcggagattgtggcttccctgttagaaggagaggagaacacctgtggcaaacagaaaccaaaggaaaacaatttaaagccaaaatttcaggctttcaagggagtaggctgtctatatgaaaaggagtcaatgaaaaaatccttgaaagacagtgttgcctctaacaataaagatcagaattccatgaaacatgaggatcccagtatcatatccatggaagatgggtccccatatgttaatggctcattaggtgaagtgactccatgccaacatgcaaagaaggcgaatggcccaaactatattcagcctcaaaaaagacagaccacttttgaaagccaggatcgcaaggcagtgtcccctagcagttctgaaaagagaagtaagaatcctatttctaggccattagaaggtaagaagtccttaagtcttagtgcaaagactcacaacataggctttgacaaagacagctgccatagtaccacaaagacagaagcttcacaggaagagcggtctgattcaagcggcctcacatctctcaagaaatcaccaaaggtctcatccaaggacactcgggaaatcaaaactgatttctcactttctattagtaattcgtcagatgtgagtgctaaagataagcatgctgaagacaatgagaagcgtttggcagccttggaagcgaggcaaaaagcaaaagaagtgcagaagaagctggtgcataatgctctggcaaatttggatggtcatccagaggataagccaacgcacatcatcttcggttctgacagtgaatgtgaaacagaggagacatcgactcaggagcagagccatccaggagaggaatgggtgaaagagtctatgggtaaaacatcagggaagctgtttgatagcagtgatgatgacgaatctgattctgaagatgacagtaataggttcaaaattaaacctcagtttgagggcagagctggacagaagctcatggatttacagtcgcactttggcaccgatgacagattccgcatggactctcgatttctagaaactgacagtgaagaggaacaggaagaggtaaatgaaaagaaaactgctgaggaagaagagcttgctgaagaaaaaaagaaagccctgaatgttgtacaaagtgttttgcaaatcaacttaagcaattctacaaacagaggatcagtagctgctaagaaatttaaggacatcatacattatgatccaacgaagcaagaccatgccacttacgaaagaaaaagagatgataagccaaaagaaagtaaagcaaaacgaaaaaagaaaagggaggaagctgagaaactacctgaggtgtctaaagaaatgtattataatattgctatggatctgaaagaaatattccaaactacaaaatataccagtgaaaaggaagagggcacaccctggaatgaggactgtggtaaagagaaacctgaggaaatccaggaccctgcagctctgaccagtgacgctgagcagcccagcgggttcacgttctctttttttgattcagacactaaagacataaaggaagagacctacagagttgaaacagtgaaacctggaaagattgtctggcaggaagaccctcgtttacaagacagcagttcagaagaggaagatgttactgaagaaacagatcacagaaactccagtcctggagaagcatcattacttgagaaagagaccactagatttttctttttctctaagaatgatgaacgacttcaaggttctgacttattctggagaggagtaggaagtaatatgagcaggaactcttgggaggccagaacaaccaacctgcgtatggattgtcgaaagaaacataaagacgcaaaaaggaaaatgaaaccaaaataataaatgtcagctggttttgatactgaatgtgaacaaggctcacctaaggaaactgacccagaaaacagttttagctgacaaagaagaaatttcagagtgaaggaattttaaaaatctggctgacggaatatcattctggttgccatctttttctgtggaactcctctgcatttcttcctaagtaattacttcaaaaattaaattcaacttcttataaaggaagaacaagatagtccttgaaaatactttttgtatataatctctttgccctctatcctgagtaactaatggacatcttctcatgcaaggtttacatgaagcctttttaaataaatgagtcaaagcacttgtattttccagcctaggctttgtgtgaattataggctatttgaaattttatttctgattatgtcaaatacaccttccattttgtcatttttgtttaaactgataaattacaagtcaacattgagttttatactt

SEQ ID NO: 358786 - DNA, 4167 bp, Homo sapiens
atagtgttcaatagaaactaggggattttggtttaggctcttttgcagtcgttgagggggaggtgacggaggcgtcagggaaggtgggaggacggaaaaggaaattaaaagctcttgggaactgaattgtggtaacggaaccttaggaggctgggttggaaatcgagtaggaaggaagagaggatgctccgttgggacacgtgaccagaagttaggggctgcagcggcgctggctttaggtgaacgacgtggtgaggagtgggtttcgggcatgagaagtcacagggccgtttcctagtctctcttcacttctttgggtcttctcagagaaagaaggctgccgtgggtaggctgggggcggagactatcgggaagagaaaattacttttcccactgaaacacacccaagtatatgcccagccttcatgaaagtgaacagagaaacgaagcgcctttatgtgggtggccttagccaggacatttctgaggcagacctacaaaatcagttcagcagatttggagaagtttcggatgtggagatcatcacacggaaagatgaccaaggaaacccacagaaagtttttgcatatatcaacatcagtgtagcagaagcggacctgaaaaaatgtatgtctgttttaaataaaacaaaatggaaaggtggaacattacaaattcaactagcaaaagaaagctttctgcacagattggcccaagagagagaagcagcaaaagctaagaaagaagaatcaacaacaggtaacgccaacttgttagaaaagacaggaggagtggatttccatatgaaagctgtgccagggacagaagtgccagggcataagaattgggttgtgagcaaatttggaagagtcttacctgttcttcaccttaaaaatcaacataaacgtaaaatcatcaaatatgatccctcaaaatactgccacaacctgaagaagataggggaggatttctcaaacaccattcctatatccagcctgacttgggaattagaaggagggaatgaccctatgagtaagaaacggcgaggagagttctctgactttcatggccctcccaagaagataataaaagtgcagaaggatgagagttccactgggtctctggccatgagtacaaggcccaggagggtaatagagagaccacccttaacacagcaacaggctgcacaaaaaagaacttgtgattccattactccttctaaatcatctcctgtacctgtttctgatactcagaaacttaaaaatctaccttttaagacttctggcttggaaactgccaagaagagaaacagcatttctgatgatgatactgattctgaagatgaattgagaatgatgattgcgaaagaggaaaacttacagagaactacacaaccctcaataaatgaatctgaaagtgatccttttgaagttgtaagggatgatttcaaatcaggcgttcacaaactgcattctttaataggtttaggtatcaaaaatcgtgtctcttgccatgatagtgatgatgatattatgagaaatgatcgtgagtatgactcaggagatacagatgaaattattgcgatgaaaaaaaatgttgctaaggtcaaaaacagtacagaattttcacaaatggaaaaatctacgaagaaaacttctttcaaaaatagagaaaactgtgagctttctgatcactgtattaaactacaaaaaagaaaaagcaatgtagagtcagccctcagtcatggattaaagtctcttaatcgtaaatctccctctcactccagtagcagtgaagatgctgattctgcatcagaattagctgactctgaaggaggtgaggagtataatgccatgatgaaaaactgccttcgtgtgaatctcactttagctgatttggaacaattggctggcagtgatctgaaggttccaaatgaagatactaagagtgatggaccagaaaccaccacccaatgcaagtttgacagaggctccaagagccccaagactcccactggcctccgcagaggccgacagtgtattcgtcctgcggagattgtggcttccctgttagaaggagaggagaacacctgtggcaaacagaaaccaaaggaaaacaatttaaagccaaaatttcaggctttcaagggagtaggctgtctatatgaaaaggagtcaatgaaaaaatccttgaaagacagtgttgcctctaacaataaagatcagaattccatgaaacatgaggatcccagtatcatatccatggaagatgggtccccatatgttaatggctcattaggtgaagtgactccatgccaacatgcaaagaaggcgaatggcccaaactatattcagcctcaaaaaagacagaccacttttgaaagccaggatcgcaaggcagtgtcccctagcagttctgaaaagagaagtaagaatcctatttctaggccattagaaggtaagaagtccttaagtcttagtgcaaagactcacaacataggctttgacaaagacagctgccatagtaccacaaagacagaagcttcacaggaagagcggtctgattcaagcggcctcacatctctcaagaaatcaccaaaggtctcatccaaggacactcgggaaatcaaaactgatttctcactttctattagtaattcgtcagatgtgagtgctaaagataagcatgctgaagacaatgagaagcgtttggcagccttggaagcgaggcaaaaagcaaaagaagtgcagaagaagctggtgcataatgctctggcaaatttggagtctatgggtaaaacatcagggaagctgtttgatagcagtgatgatgacgaatctgattctgaagatgacagtaataggttcaaaattaaacctcagtttgagggcagagctggacagaagctcatggatttacagtcgcactttggcaccgatgacagattccgcatggactctcgatttctagaaactgacagtgaagaggaacaggaagaggtaaatgaaaagaaaactgctgaggaagaagagcttgctgaagaaaaaaagaaagccctgaatgttgtacaaagtgttttgcaaatcaacttaagcaattctacaaacagaggatcagtagctgctaagaaatttaaggacatcatacattatgatccaacgaagcaagaccatgccacttacgaaagaaaaagagatgataagccaaaagaaagtaaagcaaaacgaaaaaagaaaagggaggaagctgagaaactacctgaggtgtctaaagaaatgtattataatattgctatggatctgaaagaaatattccaaactacaaaatataccagtgaaaaggaagagggcacaccctggaatgaggactgtggtaaagagaaacctgaggaaatccaggaccctgcagctctgaccagtgacgctgagcagcccagcgggttcacgttctctttttttgattcagacactaaagacataaaggaagagacctacagagttgaaacagtgaaacctggaaagattgtctggcaggaagaccctcgtttacaagacagcagttcagaagaggaagatgttactgaagaaacagatcacagaaactccagtcctggagaagcatcattacttgagaaagagaccactagatttttctttttctctaagaatgatgaacgacttcaaggttctgacttattctggagaggagtaggaagtaatatgagcaggaactcttgggaggccagaacaaccaacctgcgtatggattgtcgaaagaaacataaagacgcaaaaaggaaaatgaaaccaaaataataaatgtcagctggttttgatactgaatgtgaacaaggctcacctaaggaaactgacccagaaaacagttttagctgacaaagaagaaatttcagagtgaaggaattttaaaaatctggctgacggaatatcattctggttgccatctttttctgtggaactcctctgcatttcttcctaagtaattacttcaaaaattaaattcaacttcttataaaggaagaacaagatagtccttgaaaatactttttgtatataatctctttgccctctatcctgagtaactaatggacatcttctcatgcaaggtttacatgaagcctttttaaataaatgagtcaaagcacttgta

SEQ ID NO: 358787 - DNA, 2841 bp, Homo sapiens
atagtgttcaatagaaactaggggattttggtttaggctcttttgcagtcgttgagggggaggtgacggaggcgtcagggaaggtgggaggacggaaaaggaaattaaaagctcttgggaactgaattgtggtaacggaaccttaggaggctgggttggaaatcgagtaggaaggaagagaggatgctccgttgggacacgtgaccagaagttaggggctgcagcggcgctggctttaggtgaacgacgtggtgaggagtgggtttcgggcatgagaagtcacagggccgtttcctagtctctcttcacttctttgggtcttctcagagaaagaaggctgccgtgggtaggctgggggcggagactatcgggaagagaaaattacttttcccactgaaacacacccaagtatatgcccagccttcatgaaagtgaacagagaaacgaagcgcctttatgtgggtggccttagccaggacatttctgaggcagacctacaaaatcagttcagcagatttggagaagtttcggatgtggagatcatcacacggaaagatgaccaaggaaacccacagaaagtttttgcatatatcaacatcagtgtagcagaagcggacctgaaaaaatgtatgtctgttttaaataaaacaaaatggaaaggtggaacattacaaattcaactagcaaaagaaagctttctgcacagattggcccaagagagagaagcagcaaaagctaagaaagaagaatcaacaacaggtaacgccaacttgttagaaaagacaggaggagtggatttccatatgaaagctgtgccagggacagaagtgccagggcataagaattgggttgtgagcaaatttggaagagtcttacctgttcttcaccttaaaaatcaacataaacgtaaaatcatcaaatatgatccctcaaaatactgccacaacctgaagaagataggggaggatttctcaaacaccattcctatatccagcctgacttgggaattagaaggagggaatgaccctatgagtaagaaacggcgaggagagttctctgactttcatggccctcccaagaagataataaaagtgcagaaggatgagagttccactgggtctctggccatgagtacaaggcccaggagggtaatagagagaccacccttaacacagcaacaggctgcacaaaaaagaacttgtgattccattactccttctaaatcatctcctgtacctgtttctgatactcagaaacttaaaaatctaccttttaagacttctggcttggaaactgccaagaagagaaacagcatttctgatgatgatactgattctgaagatgaattgagaatgatgattgcgaaagaggaaaacttacagagaactacacaaccctcaataaatgaatctgaaagtgatccttttgaagttgtaagggatgatttcaaatcaggcgttcacaaactgcattctttaataggtttaggtatcaaaaatcgtgtctcttgccatgatagtgatgatgatattatgagaaatgatcgtgagtatgactcaggagatacagatgaaattattgcgatgaaaaaaaatgttgctaaggtcaaaaacagtacagaattttcacaaatggaaaaatctacgaagaaaacttctttcaaaaatagagaaaactgtgagctttctgatcactgtattaaactacaaaaaagaaaaagcaatgtagagtcagccctcagtcatggattaaagtctcttaatcgtaaatctccctctcactccagtagcagtgaagatgctgattctgcatcagaattagctgactctgaaggaggtgaggagtataatgccatgatgaaaaactgccttcgtgtgaatctcactttagctgatttggaacaattggctggcagtgatctgaaggttccaaatgaagatactaagagtgatggaccagaaaccaccacccaatgcaagtttgacagaggctccaagagccccaagactcccactggcctccgcagaggccgacagtgtattcgtcctgcggagattgtggcttccctgttagaaggagaggagaacacctgtggcaaacagaaaccaaaggaaaacaatttaaagccaaaatttcaggctttcaagggagtaggctgtctatatgaaaaggagtcaatgaaaaaatccttgaaagacagtgttgcctctaacaataaagatcagaattccatgaaacatgaggatcccagtatcatatccatggaagatgggtccccatatgttaatggctcattaggtgaagtgactccatgccaacatgcaaagaaggcgaatggcccaaactatattcagcctcaaaaaagacagaccacttttgaaagccaggatcgcaaggcagtgtcccctagcagttctgaaaagagaagtaagaatcctatttctaggccattagaaggtaagaagtccttaagtcttagtgcaaagactcacaacataggctttgacaaagacagctgccatagtaccacaaagacagaagcttcacaggaagagcggtctgattcaagcggcctcacatctctcaagaaatcaccaaaggtctcatccaaggacactcgggaaatcaaaactgatttctcactttctattagtaattcgtcagatgtgagtgctaaagataagcatgctgaagacaatgagaagcgtttggcagccttggaagcgaggcaaaaagcaaaagaagtgcagaagaagctggtgcataatgctctggcaaatttgatggtcacccagaggataacccacaacatcatgttgcgatttacgcgttcggcacctc

SEQ ID NO: 358788 - DNA, 1534 bp, Homo sapiens
agtcaggaatttccacctgacctgccatttactcattcctggtagatgagtctgggttactggctttcaatgtgagggagaagattacgttatgaagggaaatactgcttgtttgcctctgctattaataaatgttgtgtttcttcacaggagtctatgggtaaaacatcagggaagctgtttgatagcagtgatgatgacgaatctgattctgaagatgacagtaataggttcaaaattaaacctcagtttgagggcagagctggacagaagctcatggatttacagtcgcactttggcaccgatgacagattccgcatggactctcgatttctagaaactgacagtgaagaggaacaggaagaggtaaatgaaaagaaaactgctgaggaagaagagcttgctgaagaaaaaaagaaagccctgaatgttgtacaaagtgttttgcaaatcaacttaagcaattctacaaacagaggatcagtagctgctaagaaatttaaggacatcatacattatgatccaacgaagcaagaccatgccacttacgaaagaaaaagagatgataagccaaaagaaagtaaagcaaaacgaaaaaagaaaagggaggaagctgagaaactacctgaggtgtctaaagaaatgtattataatattgctatggatctgaaagaaatattccaaactacaaaatataccagtgaaaaggaagagggcacaccctggaatgaggactgtggtaaagagaaacctgaggaaatccaggaccctgcagctctgaccagtgacgctgagcagcccagcgggttcacgttctctttttttgattcagacactaaagacataaaggaagagacctacagagttgaaacagtgaaacctggaaagattgtctggcaggaagaccctcgtttacaagacagcagttcagaagaggaagatgttactgaagaaacagatcacagaaactccagtcctggagaagcatcattacttgagaaagagaccactagatttttctttttctctaagaatgatgaacgacttcaaggttctgacttattctggagaggagtaggaagtaatatgagcaggaactcttgggaggccagaacaaccaacctgcgtatggattgtcgaaagaaacataaagacgcaaaaaggaaaatgaaaccaaaataataaatgtcagctggttttgatactgaatgtgaacaaggctcacctaaggaaactgacccagaaaacagttttagctgacaaagaagaaatttcagagtgaaggaattttaaaaatctggctgacggaatatcattctggttgccatctttttctgtggaactcctctgcatttcttcctaagtaattacttcaaaaattaaattcaacttcttataaaggaagaacaagatagtccttgaaaatactttttgtatataatctctttgccctctatcctgagtaactaatggacatcttctcatgcaaggtttacatgaagcctttttaaataaatgagtcaaagcacttgta

SEQ ID NO: 358789 - DNA, 1374 bp, Homo sapiens
tgactaatacagtggaaaagatcatgcagccataaaaaggaatcaagcatgacacatgctgtgacttggatgaaccttgaaaacattacgctgaaagaagccagacacagaagctcatggatttacagtcgcactttggcaccgatgacagattccgcatggactctcgatttctagaaactgacagtgaagaggaacaggaagaggtaaatgaaaagaaaactgctgaggaagaagagcttgctgaagaaaaaaagaaagccctgaatgttgtacaaagtgttttgcaaatcaacttaagcaattctacaaacagaggatcagtagctgctaagaaatttaaggacatcatacattatgatccaacgaagcaagaccatgccacttacgaaagaaaaagagatgataagccaaaagaaagtaaagcaaaacgaaaaaagaaaagggaggaagctgagaaactacctgaggtgtctaaagaaatgtattataatattgctatggatctgaaagaaatattccaaactacaaaatataccagtgaaaaggaagagggcacaccctggaatgaggactgtggtaaagagaaacctgaggaaatccaggaccctgcagctctgaccagtgacgctgagcagcccagcgggttcacgttctctttttttgattcagacactaaagacataaaggaagagacctacagagttgaaacagtgaaacctggaaagattgtctggcaggaagaccctcgtttacaagacagcagttcagaagaggaagatgttactgaagaaacagatcacagaaactccagtcctggagaagcatcattacttgagaaagagaccactagatttttctttttctctaagaatgatgaacgacttcaaggttctgacttattctggagaggagtaggaagtaatatgagcaggaactcttgggaggccagaacaaccaacctgcgtatggattgtcgaaagaaacataaagacgcaaaaaggaaaatgaaaccaaaataataaatgtcagctggttttgatactgaatgtgaacaaggctcacctaaggaaactgacccagaaaacagttttagctgacaaagaagaaatttcagagtgaaggaattttaaaaatctggctgacggaatatcattctggttgccatctttttctgtggaactcctctgcatttcttcctaagtaattacttcaaaaattaaattcaacttcttataaaggaagaacaagatagtccttgaaaatactttttgtatataatctctttgccctctatcctgagtaactaatggacatcttctcatgcaaggtttacatgaagcctttttaaataaatgagtcaaagcacttgta

SEQ ID NO: 358790 - DNA, 990 bp, Homo sapiens
ggaagcgcggggcgggccggacaatgagagtgtccgcctcctgagccaataaagctgtactggttttgaatcgcggcgcgtttcccgccgctggggtcaggggtcgaggttcgggtcgtggggcggagggaagagcgggcgggcgggaggcgccggcgccagacgcggagggaaggagctacgagtagccgccgagaggccgcggagccagcgacgaccgacccagccgagccgccgccgccgccgcgcccccatggcggccgccaaggacactcatgaggaccatgatacttccactgagaatacagacgagtccaaccatgaccctcagtttgagccaatagtttctcttcctgagcaagaaattaaaacactggaagaagatgaagaggaactttttaaaatgcgggcaaaactgttccgatttgcctctgagaacgatctcccagaatggaaggagcgaggcactggtgacgtcaagctcctgaagcacaaggagaaaggggccatccgcctcctcatgcggagggacaagaccctgaagatctgtgccaaccactacatcacgccgatgatggagctgaagcccaacgcaggtagcgaccgtgcctgggtctggaacacccacgctgacttcgccgacgagtgccccaagccagagctgctggccatccgcttcctgaatgctgagaatgcacagaaattcaaaacaaagtttgaagaatgcaggaaagagatcgaagagagagaaaagaaagcaggatcaggcaaaaatgatcatgccgaaaaagtggcggaaaagctagaagctctctcggtgaaggaggagaccaaggaggatgctgaggagaagcaataaatcgtcttattttattttcttttcctctctttcctttcctttttttaaaaaattttaccctgcccctctttttcggtttgtttttattctttcatttttacaagggacgttatataaagaactgaactcaa

SEQ ID NO: 358791 - DNA, 150 bp, Homo sapiens
gcggccgcctactactactactgctcgaattcaagcttctaacgatgtacggggtcatgaaaatgtactgtgctaactttcttttccatagtggaaacacttatttatagtcatcaaaaatagtgaataaaaaacacatttggaacctgg

SEQ ID NO: 358792 - DNA, 1528 bp, Homo sapiens
ggaagcgcggggcgggccggacaatgagagtgtccgcctcctgagccaataaagctgtactggttttgaatcgcggcgcgtttcccgccgctggggtcaggggtcgaggttcgggtcgtggggcggagggaagagcgggcgggcgggaggcgccggcgccagacgcggagggaaggagctacgagtagccgccgagaggccgcggagccagcgacgaccgacccagccgagccgccgccgccgccgcgcccccatggcggccgccaaggacactcatgaggaccatgatacttccactgagaatacagacgagtccaaccatgaccctcagtttgagccaatagtttctcttcctgagcaagaaattaaaacactggaagaagatgaagaggaactttttaaaatgcgggcaaaactgttccgatttgcctctgagaacgatctcccagaatggaaggagcgaggcactggtgacgtcaagctcctgaagcacaaggagaaaggggccatccgcctcctcatgcggagggacaagaccctgaagatctgtgccaaccactacatcacgccgatgatggagctgaagcccaacgcaggtagcgaccgtgcctgggtctggaacacccacgctgacttcgccgacgagtgccccaagccagagctgctggccatccgcttcctgaatgctgagaatgcacagaaattcaaaacaaagtttgaagaatgcaggaaagagatcgaagagagagaaaagaaagcaggatcaggcaaaaatgatcatgccgaaaaagtggcggaaaagctagaagctctctcggtgaaggaggagaccaaggaggatgctgaggagaagcaataaatcgtcttattttattttcttttcctctctttcctttcctttttttaaaaaattttaccctgcccctctttttcggtttgtttttattctttcatttttacaagggacgttatataaagaactgaactcaacattcaggttgttttttttttttgtttctaagtttttgccctattgaagatgacttcagaaaatccattccccagtcatgaaaatgtactgtgctaactttcttttccatagtggaaacacttatttatagtcatcaaaaatagtgaataaaaaacacatttggaacctggaaaaaaaaaaaacaaaaaacaacaaaacaaaacaaaacaaaacaaaaagaaacacacaacaaaaaagaaacagaaaagaagagaaaaaaaaaaaaaaagagaaagagagagagagagagagagagagagagcagaaagaaaaaaacaaaaaaaaaagaacagaagaaagaaaaagaaaaacaaacacacagagagaagaggaagagaagaagagaggagggggcgggagagaggagaggaggaacgagatgcacggagggagggcagagcgaggaggaggaagcagagcgaggggaggcacaacgcgaggggaagaggagagggagggagagaagaggggaaagagaggaacgatggaggagggaga

SEQ ID NO: 358793 - DNA, 1161 bp, Homo sapiens
ggaagcgcggggcgggccggacaatgagagtgtccgcctcctgagccaataaagctgtactggttttgaatcgcggcgcgtttcccgccgctggggtcaggggtcgaggttcgggtcgtggggcggagggaagagcgggcgggcgggaggcgccggcgccagacgcggagggaaggagctacgagtagccgccgagaggccgcggagccagcgacgaccgacccagccgagccgccgccgccgccgcgcccccatggcggccgccaaggacactcatgaggaccatgatacttccactgagaatacagacgagtccaaccatgaccctcagtttgagccaatagtttctcttcctgagcaagaaattaaaacactggaagaagatgaagaggaactttttaaaatgcgggcaaaactgttccgatttgcctctgagaacgatctcccagaatggaaggagcgaggcactggtgacgtcaagctcctgaagcacaaggagaaaggggccatccgcctcctcatgcggagggacaagaccctgaagatctgtgccaaccactacatcacgccgatgatggagctgaagcccaacgcaggtagcgaccgtgcctgggtctggaacacccacgctgacttcgccgacgagtgccccaagccagagctgctggccatccgcttcctgaatgctgagaatgcacagaaattcaaaacaaagtttgaagaatgcaggaaagagatcgaagagagagaaaagaaagcaggatcaggcaaaaatgatcatgccgaaaaagtggcggaaaagctagaagctctctcggtgaaggaggagaccaaggaggatgctgaggagaagcaataaatcgtcttattttattttcttttcctctctttcctttcctttttttaaaaaattttaccctgcccctctttttcggtttgtttttattctttcatttttacaagggacgttatataaagaactgaactcaacattcaggttgttttttttttttgtttctaagtttttgccctattgaagatgacttcagaaaatccattccccagtcatgaaaatgtactgtgctaactttcttttccatagtggaaacacttatttatagtcatcaaaaatagtgaataaaaaacacatttggaacctgg

SEQ ID NO: 358794 - DNA, 1357 bp, Homo sapiens
ggaagcgcggggcgggccggacaatgagagtgtccgcctcctgagccaataaagctgtactggttttgaatcgcggcgcgtttcccgccgctggggtcaggggtcgaggttcgggtcgtggggcggagggaagagcgggcgggcgggaggcgccggcgccagacgcggagggaaggagctacgagtagccgccgagaggccgcggagccagcgacgaccgacccagccgagccgccgccgccgccgcgcccccatggcggccgccaaggacactcatgaggaccatgatacttccactgagaatacagacgagtccaaccatgaccctcagtttgagccaatagtttctcttcctgagcaagaaattaaaacactggaagaagatgaagaggaactttttaaaatgcgggcaaaactgttccgatttgcctctgagaacgatctcccagaatggaaggagcgaggcactggtgacgtcaagctcctgaagcacaaggagaaaggggccatccgcctcctcatgcggagggacaagaccctgaagatctgtgccaaccactacatcacgccgatgatggagctgaagcccaacgcaggtagcgaccgtgcctgggtctggaacacccacgctgacttcgccgacgagtgccccaagccagagctgctggccatccgcttcctgaatgctgagaatgcacagaaattcaaaacaaagtttgaagaatgcaggaaagagatcgaagagagagaaaagaaagcaggatcaggcaaaaatgatcatgccgaaaaagtggcggaaaagctagaagctctctcggtgaaggaggagaccaaggaggatgctgaggagaagcaataaatcgtcttattttattttcttttcctctctttcctttcctttttttaaaaaattttaccctgcccctctttttcggtttgtttttattctttcatttttacaagggacgttatataaagaactgaactcaaaaaaaaaaaaaacaaaaaacaacaaaacaaaacaaaacaaaacaaaaagaaacacacaacaaaaaagaaacagaaaagaagagaaaaaaaaaaaaaaagagaaagagagagagagagagagagagagagagcagaaagaaaaaaacaaaaaaaaaagaacagaagaaagaaaaagaaaaacaaacacacagagagaagaggaagagaagaagagaggagggggcgggagagaggagaggaggaacgagatgcacggagggagggcagagcgaggaggaggaagcagagcgaggggaggcacaacgcgaggggaagaggagagggagggagagaagaggggaaagagaggaacgatggaggagggaga

SEQ ID NO: 358795 - DNA, 1254 bp, Homo sapiens
tctgctgggcctcggtggcgcggagtcggggcgcgtggggtttgggggctcgaggcctgcggagttggggcgtttgggggtgcaggctctgcagaggcctgggggctgcagggcccccgcgtgaccttggggtgggttggggagcggccgtcgccacgcgggacggccccagcctccaggaactggtgcgggcggcgggtttcctccggctcggcccacttggggctccccactagtacggtgcatttattctttccgtcgcccacgcagcacttcattcattcggttcttacgtctggaaccgccactggcctctgtggcagaagctcgcgttccagcgtggggcacaggtcctagatgcgccgacccaggcggcggctttgttggctgcggtgtctggttgagtgcgggccgctgcagagccgcagtgctgtggggaacagtgaagagcagcgaaaagcttatgttttcttttccagtttgagtctagtggtgaagtcttgggtctcttacggacttctgggtgaccaaggacactcatgaggaccatgatacttccactgagaatacagacgagtccaaccatgaccctcagtttgagccaatagtttctcttcctgagcaagaaattaaaacactggaagaagatgaagaggaactttttaaaatgcgggcaaaactgttccgatttgcctctgagaacgatctcccagaatggaaggagcgaggcactggtgacgtcaagctcctgaagcacaaggagaaaggggccatccgcctcctcatgcggagggacaagaccctgaagatctgtgccaaccactacatcacgccgatgatggagctgaagcccaacgcaggtagcgaccgtgcctgggtctggaacacccacgctgacttcgccgacgagtgccccaagccagagctgctggccatccgcttcctgaatgctgagaatgcacagaaattcaaaacaaagtttgaagaatgcaggaaagagatcgaagagagagaaaagaaagcaggatcaggcaaaaatgatcatgccgaaaaagtggcggaaaagctagaagctctctcggtgaaggaggagaccaaggaggatgctgaggagaagcaataaatcgtcttattttattttcttttcctctctttcctttcctttttttaaaaaattttaccctgcccctctttttcggtttgtttttattctttcatttttacaagggacgttatataaagaactgaactcaa

SEQ ID NO: 358796 - DNA, 886 bp, Homo sapiens
ggaagcgcggggcgggccggacaatgagagtgtccgcctcctgagccaataaagctgtactggttttgaatcgcggcgcgtttcccgccgctggggtcaggggtcgaggttcgggtcgtggggcggagggaagagcgggcgggcgggaggcgccggcgccagacgcggagggaaggagctacgagtagccgccgagaggccgcggagccagcgacgaccgacccagccgagccgccgccgccgccgcgcccccatggcggccgccaaggacactcatgaggaccatgatacttccactgagaatacagacgagtccaaccatgaccctcagtttgagccaatagtttctcttcctgagcaagaaattaaaacactggaagaagatgaagaggaactttttaaaatgcgggcaaaactgttccgatttgcctctgagaacgatctcccagaatggaaggagcgaggcactggtgacgtcaagctcctgaagcacaaggagaaaggggccatccgcctcctcatgcggagggacaagaccctgaagatctgtgccaaccactacatcacgccgatgatggagctgaagcccaacgcaggtagcgaccgtgcctgggtctggaacacccacgctgacttcgccgacgagtgccccaagccagagctgctggccatccgcttcctgaatgctgagaatgcacagaaattcaaaacaaagtttgaagaatgcaggaaagagatcgaagagagagaaaagaaagcaggatcaggcaaaaatgatcatgccgaaaaagtggcggaaaagctagaagctctctcggtgaaggaggagaccaagggggagtgcggagcgatttggtgcagagccggggaggcgtattggtgagcg

SEQ ID NO: 358797 - DNA, 1051 bp, Homo sapiens
tctgctgggcctcggtggcgcggagtcggggcgcgtggggtttgggggctcgaggcctgcggagttggggcgtttgggggtgcaggctctgcagaggcctgggggctgcagggcccccgcgtgaccttggggtgggttggggagcggccgtcgccacgcgggacggccccagcctccaggaactggtgcgggcggcgggtttcctccggctcggcccacttggggctccccactagtacggtgcatttattctttccgtcgcccacgcagcacttcattcattcggttcttacgtctggaaccgccactggcctctgtggcagaagctcgcgttccagcgtggggcacaggacactcatgaggaccatgatacttccactgagaatacagacgagtccaaccatgaccctcagtttgagccaatagtttctcttcctgagcaagaaattaaaacactggaagaagatgaagaggaactttttaaaatgcgggcaaaactgttccgatttgcctctgagaacgatctcccagaatggaaggagcgaggcactggtgacgtcaagctcctgaagcacaaggagaaaggggccatccgcctcctcatgcggagggacaagaccctgaagatctgtgccaaccactacatcacgccgatgatggagctgaagcccaacgcaggtagcgaccgtgcctgggtctggaacacccacgctgacttcgccgacgagtgccccaagccagagctgctggccatccgcttcctgaatgctgagaatgcacagaaattcaaaacaaagtttgaagaatgcaggaaagagatcgaagagagagaaaagaaagcaggatcaggcaaaaatgatcatgccgaaaaagtggcggaaaagctagaagctctctcggtgaaggaggagaccaaggaggatgctgaggagaagcaataaatcgtcttattttattttcttttcctctctttcctttcctttttttaaaaaattttaccctgcccctctttttccagtgttttaatttcttgctcaggaagagaaactat

SEQ ID NO: 358798 - DNA, 715 bp, Homo sapiens
aatcaatttccataacttgtaactgaaagagccctgacttatacttagggaagtctctctggtgaagtgatctttgagctgaaggggctgatttggggccaggagtgagggtaggggatggtgagggggagcgggcaaaactgttccgatttgcctctgagaacgatctcccagaatggaaggagcgaggcactggtgacgtcaagctcctgaagcacaaggagaaaggggccatccgcctcctcatgcggagggacaagaccctgaagatctgtgccaaccactacatcacgccgatgatggagctgaagcccaacgcaggtagcgaccgtgcctgggtctggaacacccacgctgacttcgccgacgagtgccccaagccagagctgctggccatccgcttcctgaatgctgagaatgcacagaaattcaaaacaaagtttgaagaatgcaggaaagagatcgaagagagagaaaagaaagcaggatcaggcaaaaatgatcatgccgaaaaagtggcggaaaagctagaagctctctcggtgaaggaggagaccaaggaggatgctgaggagaagcaataaatcgtcttattttattttcttttcctctctttcctttcctttttttaaaaaattttaccctgcccctctttttcggtttgtttttattctttcatttttacaagggacgttatataaagaactgaactcaa

SEQ ID NO: 358799 - DNA, 889 bp, Homo sapiens
ggaagcgcggggcgggccggacaatgagagtgtccgcctcctgagccaataaagctgtactggttttgaatcgcggcgcgtttcccgccgctggggtcaggggtcgaggttcgggtcgtggggcggagggaagagcgggcgggcgggaggcgccggcgccagacgcggagggaaggagctacgagtagccgccgagaggccgcggagccagcgacgaccgacccagccgagccgccgccgccgccgcgcccccatggcggccgccaaggacactcatgaggaccatgatacttccactgagaatacagacgagtccaaccatgaccctcagtttgagccaatagtttctcttcctgagcaagaaattaaaacactggaagaagatgaagaggaactttttaaaatgcgggcaaaactgttccgatttgcctctgagaacgatctcccagaatggaaggagcgaggcactggtgacgtcaagctcctgaagcacaaggagaaaggggccatccgcctcctcatgcggagggacaagaccctgaagatctgtgccaaccactacatcacgccgatgatggagctgaagcccaacgcaggtagcgaccgtgcctgggtctggaacacccacgctgacttcgccgacgagtgccccaagccagagctgctggccatccgcttcctgaatgctgagaatgcacagaaattcaaaacaaagtttgaagaatgcaggaaaggaggatgctgaggagaagcaataaatcgtcttattttattttcttttcctctctttcctttcctttttttaaaaaattttaccctgcccctctttttcggtttgtttttattctttcatttttacaagggacgttatataaagaactgaactcaa

SEQ ID NO: 358800 - DNA, 1936 bp, Homo sapiens
tctgctgggcctcggtggcgcggagtcggggcgcgtggggtttgggggctcgaggcctgcggagttggggcgtttgggggtgcaggctctgcagaggcctgggggctgcagggcccccgcgtgaccttggggtgggttggggagcggccgtcgccacgcgggacggccccagcctccaggaactggtgcgggcggcgggtttcctccggctcggcccacttggggctccccactagacactcatgaggaccatgatacttccactgagaatacagacgagtccaaccatgaccctcagtttgagccaatagtttctcttcctgagcaagaaattaaaacactggaagaagatgaagaggaactttttaaaatgcgggcaaaactgttccgatttgcctctgagaacgatctcccagaatggaaggagcgaggcactggtgacgtcaagctcctgaagcacaaggagaaaggggccatccgcctcctcatgcggagggacaagaccctgaagatctgtgccaaccactacatcacgccgatgatggagctgaagcccaacgcaggtagcgaccgtgcctgggtctggaacacccacgctgacttcgccgacgagtgccccaagccagagctgctggccatccgcttcctgaatgctgagaatgcacagaaattcaaaacaaagtttgaagaatgcaggaaagagatcgaagagagagaaaagaaaggtgacgtggtgccatgggttggggggcttctttgcagactcactctgcatctgactatacttccaggcgggtgctttttctgtctgccagataaacattccagggtgctgtggccgcctcacgtatccagagtgatgcagctccctggggacacaggtgcttcctggggagccctgagcacttgtcagtgttgctggcctcagtccaattgggcaggcattggagtccgggcactgcctggagctcaccagaaggtgctttatgatggtcctcggtttgtctctcagagggcttggtcacctctgccatgaggctggactgcagctgtggtggcaagtgaccagatgtcactgagcagcctgaccatggtctaggcagtgcttgagtgcatccacctggcttcctttcgtcactgaatttcaagaagacagactccaggaggcggcttggccaggcaggagtctgtcccgagggcgggcaagccgctgtgggtgggtgacggcacttgggaccagcctggcgagggccatgtgcttgaatgcaccgtgcttctgttttctcactgtgctgcttgtgtttttagcaggatcaggcaaaaatgatcatgccgaaaaagtggcggaaaagctagaagctctctcggtgaaggaggagaccaaggaggatgctgaggagaagcaataaatcgtcttattttattttcttttcctctctttcctttcctttttttaaaaaattttaccctgcccctctttttcggtttgtttttattctttcatttttacaagggacgttatataaagaactgaactcaacattcaggttgttttttttttttgtttctaagtttttgccctattgaagatgacttcagaaaatccattccccagtcatgaaaatgtactgtgctaactttcttttccatagtggaaacacttatttatagtcatcaaaaatagtgaataaaaaacacatttggaacctgggccagatggcaggactgtgtgtgtacaggcccctgcgctgtgagcgccgctcgcctaagcctcccgggtgtatgtccaggcctgtccgcagcacaggtgggtgctgcacctcacggtagcctgggttcctgggagagacgccctggtgtctgaggtcgtgcatgtatcttgctgtgggccttgaagctgaggtgtctgagctggcgctggtgagggagcctggcc

SEQ ID NO: 358801 - DNA, 1108 bp, Homo sapiens
ggaagcgcggggcgggccggacaatgagagtgtccgcctcctgagccaataaagctgtactggttttgaatcgcggcgcgtttcccgccgctggggtcaggggtcgaggttcgggtcgtggggcggagggaagagcgggcgggcgggaggcgccggcgccagacgcggagggaaggagctacgagtagccgccgagaggccgcggagccagcgacgaccgacccagccgagccgccgccgccgccgcgcccccatggcggccgccaaggacactcatgaggaccatgatacttccactgagaatacagacgagtccaaccatgaccctcagtttgagccaatagtttctcttcctgagcaagaaattaaaacactggaagaagatgaagaggaactttttaaaatgcgggcaaaactgttccgatttgcctctgagaacgatctcccagaatggaaggagcgaggcactggtgacgtcaagctcctgaagcacaaggagaaaggggccatccgcctcctcatgcggagggacaagaccctgaagatctgtgccaaccactacaacgtgcctctgaactcagagcaggcccgcagcgaagcttagagcacacgggggtgtggagtcagccagacgggccctgatgggaggacgcagcgcccaggctgggctcgggacgaggatcacgccgatgatggagctgaagcccaacgcaggtagcgaccgtgcctgggtctggaacacccacgctgacttcgccgacgagtgccccaagccagagctgctggccatccgcttcctgaatgctgagaatgcacagaaattcaaaacaaagtttgaagaatgcaggaaagagatcgaagagagagaaaagaaagcaggatcaggcaaaaatgatcatgccgaaaaagtggcggaaaagctagaagctctctcggtgaaggaggagaccaaggaggatgctgaggagaagcaataaatcgtcttattttattttcttttcctctctttcctttcctttttttaaaaaattttaccctgcccctctttttcggtttgtttttattctttcatttttacaagggacgttatataaagaactgaactcaa

SEQ ID NO: 358802 - DNA, 785 bp, Homo sapiens
ggaagcgcggggcgggccggacaatgagagtgtccgcctcctgagccaataaagctgtactggttttgaatcgcggcgcgtttcccgccgctggggtcaggggtcgaggttcgggtcgtggggcggagggaagagcgggcgggcgggaggcgccggcgccagacgcggagggaaggagctacgagtagccgccgagaggccgcggagccagcgacgaccgacccagccgagccgccgccgccgccgcgcccccatggcggccgccaaggacactcatgaggaccatgatacttccactgagaatacagacgagtccaaccatgaccctcagtttgagccaatagtttctcttcctgagcaagaaattaaaacactggaagaagatgaagaggaactttttaaaatgtaagtaggctgatgtcccagaaataggactctttaaggttgaggttacaacttttatgggtgtccaggttttggcctgacttttaatcagactgaggctgcttaaagaaagggcctaaagttggtgactaatcccatgtggaaatttaacccgttcctttcatgaatcttcaccagatgcccttgctgccctgcagccagttgcatgaagggcatcccatcttgctgctctgtccactggcatggcggccccactgcccttttttgccactggcttctgaggatccagggagtcccttggttgagcagggggttttaagtttttgcagcatagacttctttggcatcgtgaagcttataaatcccccacccggtgtctg

SEQ ID NO: 358803 - DNA, 1049 bp, Homo sapiens
tctgctgggcctcggtggcgcggagtcggggcgcgtggggtttgggggctcgaggcctgcggagttggggcgtttgggggtgcaggctctgcagaggcctgggggctgcagggcccccgcgtgaccttggggtgggttggggagcggccgtcgccacgcgggacggccccagcctccaggaactggtgcgggcggcgggtttcctccggctcggcccacttggggctccccactagtacggtgcatttattctttccgtcgcccacgcagcacttcattcattcggttcttacgtctggaaccgccactggcctctgtggcagaagctcgcgttccagcgtggggcacaggtcctagatgcgccgacccaggcggcggctttgttggctgcggtgtctggttgagtgcgggccgctgcagagccgcagtgctgtggggaacagtgaagagcagcgaaaagcttatgttttcttttccagtttgagtctagtggtgaagtcttgggtctcttacggacttctgggtgaccaaggacactcatgaggaccatgatacttccactgagaatacagacgagtccaaccatgaccctcagtttgagccaatagtttctcttcctgagcaagaaattaaaacactggaagaagatgaagaggaactttttaaaatgtaagtaggctgatgtcccagaaataggactctttaaggttgaggttacaacttttatgggtgtccaggttttggcctgacttttaatcagactgaggctgcttaaagaaagggcctaaagttggtgactaatcccatgtggaaatttaacccgttcctttcatgaatcttcaccagatgcccttgctgccctgcagccagttgcatgaagggcatcccatcttgctgctctgtccactggcatggcggccccactgcccttttttgccactggcttctgaggatccagggagtcccttggttgagcagggggttttaagtttttgcagcatagacttctttggcatcgtgaagcttataaatcccccacccggtgtctg

SEQ ID NO: 358804 - DNA, 315 bp, Homo sapiens
ggagggacaagaccctgaagatctgtgccaaccactacagtaggtggcatgaacgaccacctcgacagtccccagcagcttggcctgggacctttgggaagattcagggctgattgggaactggggagcgtgttatttcatggagtgcaagtttgtggtgtgtttgttgaatttaaaaccagaaatacgtttttcagacgtgcctctgaactcagagcaggcccgcagcgaagcttagagcacacgggggtgtggagtcagccagacgggccctgatgggaggacgcagcgcccaggctgggctcgggacgagga

SEQ ID NO: 358805 - DNA, 462 bp, Homo sapiens
ccaggcggcggctttgttggctgcggtgtctggttgagtgcgggccgctgcagagccgcagtgctgtggggaacagtgaagagcagcgaaaagcttatgttttcttttccagtttgagtctagtggtgaagtcttgggtctcttacggacttctgggtgaccaaggcatgtgttctggaagactcgaacctaaaatatgattattggtgctctcttatcctctaaattgggccaggatttcatgactttcaccggtacaatttatctagttattaacttagttttctgaactgtgaaaaaattgctggcagagctgtgaatccagtgtaaatactagcagtcctgtagcgacttttttcgttttactaagcaagagcacaactatttcctaattagtcaaaactgaaagagttacattttgctttaaagtaatatttcaaaatctatttcgacccatcattg

SEQ ID NO: 358806 - DNA, 1164 bp, Homo sapiens
aggccgggcagagccctggccaagaggggcgtcttgcgcccacactcacttggcaagtttctgcagcacctgctcgcactccagctgcttccgctcaagctgctcagcatagggcactgtccatagaggggtcaccacgtcggccactcgtgttactggtggctcactctcaccctcctgtcgcctcctcctggccatggggtcggccttgggccgggccaggcgcacactgagtgggcggcctttccagagggcaccatgcaaaacgcgcagggccttgtccctctctgcagcgctgcggaatgtcacaaaggcgcagggtggttgcccaaagagtttggttttgtggggctgcagaccaaagcggcccaggaagcgccggacgtcgctgaagctggcgtggcgaggcacgttctgcagctccagtttaaagatctcagaggacactcatgaggaccatgatacttccactgagaatacagacgagtccaaccatgaccctcagtttgagccaatagtttctcttcctgagcaagaaattaaaacactggaagaagatgaagaggaactttttaaaatgcgggcaaaactgttccgatttgcctctgagaacgatctcccagaatggaaggagcgaggcactggtgacgtcaagctcctgaagcacaaggagaaaggggccatccgcctcctcatgcggagggacaagaccctgaagatctgtgccaaccactacatcacgccgatgatggagctgaagcccaacgcaggtagcgaccgtgcctgggtctggaacacccacgctgacttcgccgacgagtgccccaagccagagctgctggccatccgcttcctgaatgctgagaatgcacagaaattcaaaacaaagtttgaagaatgcaggaaagagatcgaagagagagaaaagaaagcaggatcaggcaaaaatgatcatgccgaaaaagtggcggaaaagctagaagctctctcggtgaaggaggagaccaaggaggatgctgaggagaagcaataaatcgtcttattttattttcttttcctctctttcctttcctttttttaaaaaattttaccctgcccctctttttcggtttgtttttattctttcatttttacaagggacgttatataaagaactgaactcaa

SEQ ID NO: 358807 - DNA, 948 bp, Homo sapiens
ggaagcgcggggcgggccggacaatgagagtgtccgcctcctgagccaataaagctgtactggttttgaatcgcggcgcgtttcccgccgctggggtcaggggtcgaggttcgggtcgtggggcggagggaaggagctacgagtagccgccgagaggccgcggagccagcgacgaccgacccagccgagccgccgccgccgccgcgcccccatggcggccgccaaggacactcatgaggaccatgatacttccactgagaatacagacgagtccaaccatgaccctcagtttgagccaatagtttctcttcctgagcaagaaattaaaacactggaagaagatgaagaggaactttttaaaatgcgggcaaaactgttccgatttgcctctgagaacgatctcccagaatggaaggagcgaggcactggtgacgtcaagctcctgaagcacaaggagaaaggggccatccgcctcctcatgcggagggacaagaccctgaagatctgtgccaaccactacatcacgccgatgatggagctgaagcccaacgcaggtagcgaccgtgcctgggtctggaacacccacgctgacttcgccgacgagtgccccaagccagagctgctggccatccgcttcctgaatgctgagaatgcacagaaattcaaaacaaagtttgaagaatgcaggaaagagatcgaagagagagaaaagaaagcaggatcaggcaaaaatgatcatgccgaaaaagtggcggaaaagctagaagctctctcggtgaaggaggagaccaaggaggatgctgaggagaagcaataaatcgtcttattttattttcttttcctctctttcctttcctttttttaaaaaattttaccctgcccctctttttcggtttgtttttattctttcatttttacaagggacgttatataaagaactgaactcaa

SEQ ID NO: 358808 - DNA, 1386 bp, Homo sapiens
ggaagcgcggggcgggccggacaatgagagtgtccgcctcctgagccaataaagctgtactggttttgaatcgcggcgcgtttcccgccgctggggtcaggggtcgaggttcgggtcgtggggcggagggaagagcgggcgggcgggaggcgccggcgccagacgcggagggaaggagctacgagtagccgccgagaggccgcggagccagcgacgaccgacccagccgagccgccgccgccgccgcgcccccatggcggccgccaaggacactcatgaggaccatgatacttccactgagaatacagacgagtccaaccatgaccctcagtttgagccaatagtttctcttcctgagcaagaaattaaaacactggaagaagatgaagaggaactttttaaaatgcgggcaaaactgttccgatttgcctctgagaacgatctcccagaatggaaggagcgaggcactggtgacgtcaagctcctgaagcacaaggagaaaggggccatccgcctcctcatgcggagggacaagaccctgaagatctgtgccaaccactacatcacgccgatgatggagctgaagcccaacgcaggtagcgaccgtgcctgggtctggaacacccacgctgacttcgccgacgagtgccccaagccagagctgctggccatccgcttcctgaatgctgagaatgcacagaaattcaaaacaaagtttgaagaatgcaggaaagagatcgaagagagagaaaagaaagcaggatcaggcaaaaatgatcatgccgaaaaagtggcggaaaagctagaagctctctcggtgaaggaggagaccaaggaggatgctgaggagaagcaataaatcgtcttattttattttcttttcctctctttcctttcctttttttaaaaaattttaccctgcccctctttttcggtttgtttttattctttcatttttacaagggacgttatataaagaactgaactcaacattcaggttgttttttttttttgtttctaagtttttgccctattgaagatgacttcagaaaatccattccccagtcatgaaaatgtactgtgctaactttcttttccatagtggaaacacttatttatagtcatcaaaaatagtgaataaaaaacacatttggaacctgggccagatggcaggactgtgtgtgtacaggcccctgcgctgtgagcgccgctcgcctaagcctcccgggtgtatgtccaggcctgtccgcagcacaggtgggtgctgcacctcacggtagcctgggttcctgggagagacgccctggtgtctgaggtcgtgcatgtatcttgctgtgggccttgaagctgaggtgtctgagctggcgctggtgagggagcctggcc

SEQ ID NO: 358809 - DNA, 1072 bp, Homo sapiens
tctgctgggcctcggtggcgcggagtcggggcgcgtggggtttgggggctcgaggcctgcggagttggggcgtttgggggtgcaggctctgcagaggcctgggggctgcagggcccccgcgtgaccttggggtgggttggggagcggccgtcgccacgcgggacggccccagcctccaggaactggtgcgggcggcgggtttcctccggctcggcccacttggggctccccactagtacggtgcatttattctttccgtcgcccacgcagcacttcattcattcggttcttacgtctggaaccgccactggcctctgtggcagaagctcgcgttccagcgtggggcacaggacactcatgaggaccatgatacttccactgagaatacagacgagtccaaccatgaccctcagtttgagccaatagtttctcttcctgagcaagaaattaaaacactggaagaagatgaagaggaactttttaaaatgcgggcaaaactgttccgatttgcctctgagaacgatctcccagaatggaaggagcgaggcactggtgacgtcaagctcctgaagcacaaggagaaaggggccatccgcctcctcatgcggagggacaagaccctgaagatctgtgccaaccactacatcacgccgatgatggagctgaagcccaacgcaggtagcgaccgtgcctgggtctggaacacccacgctgacttcgccgacgagtgccccaagccagagctgctggccatccgcttcctgaatgctgagaatgcacagaaattcaaaacaaagtttgaagaatgcaggaaagagatcgaagagagagaaaagaaagcaggatcaggcaaaaatgatcatgccgaaaaagtggcggaaaagctagaagctctctcggtgaaggaggagaccaaggaggatgctgaggagaagcaataaatcgtcttattttattttcttttcctctctttcctttcctttttttaaaaaattttaccctgcccctctttttcggtttgtttttattctttcatttttacaagggacgttatataaagaactgaactcaa

SEQ ID NO: 358810 - DNA, 1969 bp, Homo sapiens
ggaagcgcggggcgggccggacaatgagagtgtccgcctcctgagccaataaagctgtactggttttgaatcgcggcgcgtttcccgccgctggggtcaggggtcgaggttcgggtcgtggggcggagggaagagcgggcgggcgggaggcgccggcgccagacgcggagggaaggagctacgagtagccgccgagaggccgcggagccagcgacgaccgacccagccgagccgccgccgccgccgcgcccccatggcggccgccaaggacactcatgaggaccatgatacttccactgagaatacagacgagtccaaccatgaccctcagtttgagccaatagtttctcttcctgagcaagaaattaaaacactggaagaagatgaagaggaactttttaaaatgcgggcaaaactgttccgatttgcctctgagaacgatctcccagaatggaaggagcgaggcactggtgacgtcaagctcctgaagcacaaggagaaaggggccatccgcctcctcatgcggagggacaagaccctgaagatctgtgccaaccactacatcacgccgatgatggagctgaagcccaacgcaggtagcgaccgtgcctgggtctggaacacccacgctgacttcgccgacgagtgccccaagccagagctgctggccatccgcttcctgaatgctgagaatgcacagaaattcaaaacaaagtttgaagaatgcaggaaagagatcgaagagagagaaaagaaaggtgacgtggtgccatgggttggggggcttctttgcagactcactctgcatctgactatacttccaggcgggtgctttttctgtctgccagataaacattccagggtgctgtggccgcctcacgtatccagagtgatgcagctccctggggacacaggtgcttcctggggagccctgagcacttgtcagtgttgctggcctcagtccaattgggcaggcattggagtccgggcactgcctggagctcaccagaaggtgctttatgatggtcctcggtttgtctctcagagggcttggtcacctctgccatgaggctggactgcagctgtggtggcaagtgaccagatgtcactgagcagcctgaccatggtctaggcagtgcttgagtgcatccacctggcttcctttcgtcactgaatttcaagaagacagactccaggaggcggcttggccaggcaggagtctgtcccgagggcgggcaagccgctgtgggtgggtgacggcacttgggaccagcctggcgagggccatgtgcttgaatgcaccgtgcttctgttttctcactgtgctgcttgtgtttttagcaggatcaggcaaaaatgatcatgccgaaaaagtggcggaaaagctagaagctctctcggtgaaggaggagaccaaggaggatgctgaggagaagcaataaatcgtcttattttattttcttttcctctctttcctttcctttttttaaaaaattttaccctgcccctctttttcggtttgtttttattctttcatttttacaagggacgttatataaagaactgaactcaacattcaggttgttttttttttttgtttctaagtttttgccctattgaagatgacttcagaaaatccattccccagtcatgaaaatgtactgtgctaactttcttttccatagtggaaacacttatttatagtcatcaaaaatagtgaataaaaaacacatttggaacctgggccagatggcaggactgtgtgtgtacaggcccctgcgctgtgagcgccgctcgcctaagcctcccgggtgtatgtccaggcctgtccgcagcacaggtgggtgctgcacctcacggtagcctgggttcctgggagagacgccctggtgtctgaggtcgtgcatgtatcttgctgtgggccttgaagctgaggtgtctgagctggcgctggtgagggagcctggcc

SEQ ID NO: 358811 - DNA, 1573 bp, Homo sapiens
ggaagcgcggggcgggccggacaatgagagtgtccgcctcctgagccaataaagctgtactggttttgaatcgcggcgcgtttcccgccgctggggtcaggggtcgaggttcgggtcgtggggcggagggaagagcgggcgggcgggaggcgccggcgccagacgcggagggaaggagctacgagtagccgccgagaggccgcggagccagcgacgaccgacccagccgagccgccgccgccgccgcgcccccatggcggccgccaaggacactcatgaggaccatgatacttccactgagaatacagacgagtccaaccatgaccctcagtttgagccaatagtttctcttcctgagcaagaaattaaaacactggaagaagatgaagaggaactttttaaaatgcgggcaaaactgttccgatttgcctctgagaacgatctcccagaatggaaggagcgaggcactggtgacgtcaagctcctgaagcacaaggagaaaggggccatccgcctcctcatgcggagggacaagaccctgaagatctgtgccaaccactacatcacgccgatgatggagctgaagcccaacgcaggtagcgaccgtgcctgggtctggaacacccacgctgacttcgccgacgagtgccccaagccagagctgctggccatccgcttcctgaatgctgagaatgcacagaaattcaaaacaaagtttgaagaatgcaggaaagagatcgaagagagagaaaagaaaggtgacgtggtgccatgggttggggggcttctttgcagactcactctgcatctgactatacttccaggcgggtgctttttctgtctgccagataaacattccagggtgctgtggccgcctcacgtatccagagtgatgcagctccctggggacacaggtgcttcctggggagccctgagcacttgtcagtgttgctggcctcagtccaattgggcaggcattggagtccgggcactgcctggagctcaccagaaggtgctttatgatggtcctcggtttgtctctcagagggcttggtcacctctgccatgaggctggactgcagctgtggtggcaagtgaccagatgtcactgagcagcctgaccatggtctaggcagtgcttgagtgcatccacctggcttcctttcgtcactgaatttcaagaagacagactccaggaggcggcttggccaggcaggagtctgtcccgagggcgggcaagccgctgtgggtgggtgacggcacttgggaccagcctggcgagggccatgtgcttgaatgcaccgtgcttctgttttctcactgtgctgcttgtgtttttagcaggatcaggcaaaaatgatcatgccgaaaaagtggcggaaaagctagaagctctctcggtgaaggaggagaccaaggaggatgctgaggagaagcaataaatcgtcttattttattttcttttcctctctttcctttcctttttttaaaaaattttaccctgcccctctttttcggtttgtttttattctttcatttttacaagggacgttatataaagaactgaactcaa

SEQ ID NO: 358812 - DNA, 1473 bp, Homo sapiens
ggaagcgcggggcgggccggacaatgagagtgtccgcctcctgagccaataaagctgtactggttttgaatcgcggcgcgtttcccgccgctggggtcaggggtcgaggttcgggtcgtggggcggagggaagagcgggcgggcgggaggcgccggcgccagacgcggagggaaggagctacgagtagccgccgagaggccgcggagccagcgacgaccgacccagccgagccgccgccgccgccgcgcccccatggcggccgccaaggacactcatgaggaccatgatacttccactgagaatacagacgagtccaaccatgaccctcagtttgagccaatagtttctcttcctgagcaagaaattaaaacactggaagaagatgaagaggaactttttaaaatcgaggcactggtgacgtcaagctcctgaagcacaaggagaaaggggccatccgcctcctcatgcggagggacaagaccctgaagatctgtgccaaccactacatcacgccgatgatggagctgaagcccaacgcaggtagcgaccgtgcctgggtctggaacacccacgctgacttcgccgacgagtgccccaagccagagctgctggccatccgcttcctgaatgctgagaatgcacagaaattcaaaacaaagtttgaagaatgcaggaaagagatcgaagagagagaaaagaaagcaggatcaggcaaaaatgatcatgccgaaaaagtggcggaaaagctagaagctctctcggtgaaggaggagaccaaggaggatgctgaggagaagcaataaatcgtcttattttattttcttttcctctctttcctttcctttttttaaaaaattttaccctgcccctctttttcggtttgtttttattctttcatttttacaagggacgttatataaagaactgaactcaacattcaggttgttttttttttttgtttctaagtttttgccctattgaagatgacttcagaaaatccattccccagtcatgaaaatgtactgtgctaactttcttttccatagtggaaacacttatttatagtcatcaaaaatagtgaataaaaaacacatttggaacctggaaaaaaaaaaaacaaaaaacaacaaaacaaaacaaaacaaaacaaaaagaaacacacaacaaaaaagaaacagaaaagaagagaaaaaaaaaaaaaaagagaaagagagagagagagagagagagagagagcagaaagaaaaaaacaaaaaaaaaagaacagaagaaagaaaaagaaaaacaaacacacagagagaagaggaagagaagaagagaggagggggcgggagagaggagaggaggaacgagatgcacggagggagggcagagcgaggaggaggaagcagagcgaggggaggcacaacgcgaggggaagaggagagggagggagagaagaggggaaagagaggaacgatggaggagggaga

SEQ ID NO: 358813 - DNA, 1646 bp, Homo sapiens
ggaagcgcggggcgggccggacaatgagagtgtccgcctcctgagccaataaagctgtactggttttgaatcgcggcgcgtttcccgccgctggggtcaggggtcgaggttcgggtcgtggggcggagggaagagcgggcgggcgggaggcgccggcgccagacgcggagggaaggagctacgagtagccgccgagaggccgcggagccagcgacgaccgacccagccgagccgccgccgccgccgcgcccccatggcggccgccaaggacactcatgaggaccatgatacttccactgagaatacagacgagtccaaccatgaccctcagtttgagccaatagtttctcttcctgagcaagaaattaaaacactggaagaagatgaagaggaactttttaaaatgcgggcaaaactgttccgatttgcctctgagaacgatctcccagaatggaaggagcgaggcactggtgacgtcaagctcctgaagcacaaggagaaaggggccatccgcctcctcatgcggagggacaagaccctgaagatctgtgccaaccactacaacgtgcctctgaactcagagcaggcccgcagcgaagcttagagcacacgggggtgtggagtcagccagacgggccctgatgggaggacgcagcgcccaggctgggctcgggacgaggatcacgccgatgatggagctgaagcccaacgcaggtagcgaccgtgcctgggtctggaacacccacgctgacttcgccgacgagtgccccaagccagagctgctggccatccgcttcctgaatgctgagaatgcacagaaattcaaaacaaagtttgaagaatgcaggaaagagatcgaagagagagaaaagaaagcaggatcaggcaaaaatgatcatgccgaaaaagtggcggaaaagctagaagctctctcggtgaaggaggagaccaaggaggatgctgaggagaagcaataaatcgtcttattttattttcttttcctctctttcctttcctttttttaaaaaattttaccctgcccctctttttcggtttgtttttattctttcatttttacaagggacgttatataaagaactgaactcaacattcaggttgttttttttttttgtttctaagtttttgccctattgaagatgacttcagaaaatccattccccagtcatgaaaatgtactgtgctaactttcttttccatagtggaaacacttatttatagtcatcaaaaatagtgaataaaaaacacatttggaacctggaaaaaaaaaaaacaaaaaacaacaaaacaaaacaaaacaaaacaaaaagaaacacacaacaaaaaagaaacagaaaagaagagaaaaaaaaaaaaaaagagaaagagagagagagagagagagagagagagcagaaagaaaaaaacaaaaaaaaaagaacagaagaaagaaaaagaaaaacaaacacacagagagaagaggaagagaagaagagaggagggggcgggagagaggagaggaggaacgagatgcacggagggagggcagagcgaggaggaggaagcagagcgaggggaggcacaacgcgaggggaagaggagagggagggagagaagaggggaaagagaggaacgatggaggagggaga

SEQ ID NO: 358814 - DNA, 1682 bp, Homo sapiens
ggaagcgcggggcgggccggacaatgagagtgtccgcctcctgagccaataaagctgtactggttttgaatcgcggcgcgtttcccgccgctggggtcaggggtcgaggttcgggtcgtggggcggagggaagagcgggcgggcgggaggcgccggcgccagacgcggagggaaggagctacgagtagccgccgagaggccgcggagccagcgacgaccgacccagccgagccgccgccgccgccgcgcccccatggcggccgccaaggacactcatgaggaccatgatacttccactgagaatacagacgagtccaaccatgaccctcagtttgagccaatagtttctcttcctgagcaagaaattaaaacactggaagaagatgaagaggaactttttaaaatgcgggcaaaactgttccgatttgcctctgagaacgatctcccagaatggaaggagcgaggcactggtgacgtcaagctcctgaagcacaaggagaaaggggccatccgcctcctcatgcggagggacaagaccctgaagatctgtgccaaccactacaacgtgcctctgaactcagagcaggcccgcagcgaagcttagagcacacgggggtgtggagtcagccagacgggccctgatgggaggacgcagcgcccaggctgggctcgggacgaggatcacgccgatgatggagctgaagcccaacgcaggtagcgaccgtgcctgggtctggaacacccacgctgacttcgccgacgagtgccccaagccagagctgctggccatccgcttcctgaatgctgagaatgcacagaaattcaaaacaaagtttgaagaatgcaggaaagagatcgaagagagagaaaagaaagcaggatcaggcaaaaatgatcatgccgaaaaagtggcggaaaagctagaagctctctcggtgaaggaggagaccaaggaggatgctgaggagaagcaataaatcgtcttattttattttcttttcctctctttcctttcctttttttaaaaaattttaccctgcccctctttttcggtttgtttttattctttcatttttacaagggacgttatataaagaactgaactcaaaaaaaaaaaaaacaaaaaacccgggggcctctaatggcgggggggggacaacacggggtcagtgaaagttggccagttggcaaagcgtgtgttcctgtgacccagctttctgggtcccagcggcgtcaactctgccgggttccctatagggaggcccgataaattcgaaaagccaggtacctgttagattcctgcacaacaccgggaatatcagcaaccacacacagagtctataaaaggggggtgatctaagacccatttggtgtaacaacatgtgttcgtcgtggcgaagtcttttctccatcgtcttctcttaatcattctctctcgtctacgatcgtcgctggtagtgtccatgtctcaatctctatgctccatcgactgtcaccatctagtaatatactaatattcagacaatatcaaatactctaacacactcaacgcataaaaaaaataagagacctgacccgacaactatcctatactactcgcccttccctcctccgatctcatcaacaatgggttccacaccctatcacaagacaacaccgttccaccaaacaacttgtaccgg

SEQ ID NO: 358815 - DNA, 199 bp, Homo sapiens
gtgtgcctcctagaacctagtgtacttttggttatactgtagaagaggcagcttcatcaagcttttagaaagcatgggaatggatgataaatcaaaggtagatacactgagagaagaggaatccgctggaggggaaccttgggatgtttctgcttttgcagctcatgcaacaacagatgagccagtgagagacaaaggc

SEQ ID NO: 358816 - DNA, 348 bp, Homo sapiens
atgagctaggatcgcaccactacactccaggcttggtgatagagcagcccgtatctcttaaaaaacaaacaaaaaaaagagcctgaaccttatcttcagagactaacttccctttaaggtgctaaaggtaatttatgagatcagtcaatcaagaaatatttatgaaattgagaatgagtccctctgtcaattgagtgcattctcctgttttcattcagtaaatatttactgagctcctccgcgtgccagatagaatttccagtaatgctttgcaaagaccatcgcactgcagtggatgagctgcagcaggcgctccacgcccactctcctcctgggcctgcactaggt

SEQ ID NO: 358817 - DNA, 381 bp, Homo sapiens
gatgtatttggtctttataggattgcttatggtaagtatcttcgttctttcaggctgctacaacaaatttccatagactgggtggattaagcaacaaaaatttttcctcacagttctggaggctgggaagttcaagatcaaggtaccagcaggtcctgtgtctggtgaggatctgctctctagtctggtgaggacctgccttctggtttgcagaaggttatattcttcttgtatccttaccagtgtagagcagagagaggaagcaagctctcatgtctctttttataagggcactgattacattcatgaaggctccaccctcatgacccaattacctccccaaagccctatctcctaaaaccataacattgagggttagga

SEQ ID NO: 358818 - DNA, 441 bp, Homo sapiens
aacattgcgtgaacacctaaataaaattcatttttaaaacaatatttactgatccagcactagaagctaagcctcctgatttctaacacagtatttatttttacttgcccctttcccccaaaataatattggctccttttctctctatacttccctaccctcccatgggatggagagatggaatgtgggaggcaaggccagtgtgagcactggctctgaggtttaggcctcgatattcaggagagtggtgtaggaggaagatgaaccactgggttttagacacatggaggcttagttcagggctttgggcctcccggttagtttgtttagtcttgttgatctaggaggagatcacaccagatgaaaggatacagttgactttggaggagggtgaagcagagctgggaaaagaatcagataagtcattagagacataaaaaa

SEQ ID NO: 358819 - DNA, 864 bp, Homo sapiens
gggagagtgacgtcacttggcccgcgcttagggccctcgcggggggcttgtgggtcctcctccccctcccactgacaactgccccaactgctcttcccgccccggtcacagtgaaaatgtagacggggtcgttgtccgtacgactgtgcgccaggctcggggaggggcgccctccgcgtgagcgcccccctgggaatattgaacataatcacctctcattccagactatgttaggtcttaatggtgggaggacgcccgagtgctcggcccgtttcaccccgaggaggaaggacactgggtcatgacgccatcagagggcgccagagcagggaccggacgcgagttggagatgttggactcgctgttggccttgggcggcctggtgctgcttcgggattccgtggagtgggaggggcgcagtctcttgaaggcgcttgtcaagaaatctgcactgtgtggggagcaagtgcatatcctgggctgtgaagtgagcgaggaagagtttcgtgaaggttttgactctgatatcaacaatcggctggtttaccatgacttcttcagagaccctctcaactggtcaaaaactgaggaggcctttcctggggggccgctgggagccttgagagccatgtgcaagaggacagatcctgttcctgtcaccattgctctcgattcactcagctggctgctacttcgccttccctgcaccacactctgccaggtcctgcatgctgtgagccatcaggactcttgtcctggtgagacccctccttcattgtttcccctcatacatctccctctgccaaggagtgtgccccttttcctttctaccctagaataaacatctgggttctccagtcagac

SEQ ID NO: 358820 - DNA, 1065 bp, Homo sapiens
tccggtggtgacgtgtattcgcttcaccgggactaagttcctcctgcgcggtctatggcggactatgttaggtcttaatggtgggaggacgcccgagtgctcggcccgtttcaccccgaggaggaaggacactgggtcatgacgccatcagagggcgccagagcagggaccggacgcgagttggagatgttggactcgctgttggccttgggcggcctggtgctgcttcgggattccgtggagtgggaggggcgcagtctcttgaaggcgcttgtcaagaaatctgcactgtgtggggagcaagtgcatatcctgggctgtgaagtgagcgaggaagagtttcgtgaaggttttgactctgatatcaacaatcggctggtttaccatgacttcttcagagaccctctcaactggtcaaaaactgaggaggcctttcctggggggccgctgggagccttgagagccatgtgcaagaggacagatcctgttcctgtcaccattgctctcgattcactcagctggctgctacttcgccttccctgcaccacactctgccaggtcctgcatgctgtgagccatcaggactcttgtcctggtgagacccctccttcattgtttcccctcatacatctccctctgccaaggagtgtgccccttttcctttctaccctagaataaacatctgggttctccagtcagaccttttttcatttttttgacttttttgtctgtttttttttttttttacttctccttaatgccatctaccatttgcttttttttctccaagttatttttttactcatttgtttcactcattcattcatttaacaaatcaatagtaaatatatacaatgtgtcaggtacaattctagataatggcaaaatacagactgactgtagctgggtccttgccttccaggagctcgaagtcccataaaagatggagataagtaaacaggcagttacaagatggtctgataaaggccatgatgatacaggcatgcacagggcaccttaaagaagggcactcttggccgggcgcggtggctcactcctgtaatc

SEQ ID NO: 358821 - DNA, 2368 bp, Homo sapiens
gggagagtgacgtcacttggcccgcgcttagggccctcgcggggggcttgtgggtcctcctccccctcccactgacaactgccccaactgctcttcccgccccggtcacagtgaaaatgtagacggggtcgttgtccgtacgactgtgcgccaggctcggggaggggcgccctccgcgtgagcgcccccctgggaatattgaacataatcacctctcattccagactatgttaggtcttaatggtgggaggacgcccgagtgctcggcccgtttcaccccgaggaggaaggacactgggtcatgacgccatcagagggcgccagagcagggaccggacgcgagttggagatgttggactcgctgttggccttgggcggcctggtgctgcttcgggattccgtggagtgggaggggcgcagtctcttgaaggcgcttgtcaagaaatctgcactgtgtggggagcaagtgcatatcctgggctgtgaagtgagcgaggaagagtttcgtgaaggttttgactctgatatcaacaatcggctggtttaccatgacttcttcagagaccctctcaactggtcaaaaactgaggaggcctttcctggggggccgctgggagccttgagagccatgtgcaagaggacagatcctgttcctgtcaccattgctctcgattcactcagctggctgctacttcgccttccctgcaccacactctgccaggtcctgcatgctgtgagccatcaggactcttgtcctggtgacagctcctcagtggggaaagtgagtgtgctgggcttgctacatgaagagcttcatggaccaggccctgtgggagctctcagcagccttgctcagactgaggtgaccctgggcggtaccatgggccaggcctcggcccacatcctgtgtcggaggccccgacagcgcccaactgaccagactcagtggttctccatccttccggacttcagcctggatctccaagaggggccctctgtagagtcccagccctactccgatcctcatatacccccggtatctaagaatgccaaggccagaacaaggaaatgtagtttagtatctggtcacgggagagaaaataaaagctgcagaggttgggggtggggtcagggattctagggatggggcagagtggcagcatcctttgtacctacaggtggtggatcccacaactcatttgacctttaaccttcacctgtccaagaaagagagagaagccagagatagcctgatcctgcccttccagttcagttctgaaaagtaaggttgggacctgggtacgtggatccctgagtagatcccagcatctgggccatggagaggttggggcaacaggttattgattaacctgactttatagggactgaagtccacctccagagacaagtccaagttcttgatccacccattccccctataatggcagaggacctttatgtctcttttctctcccttatacccttgggtcacagctccagttgtccccagagcaccctgggcctgggctgagccagaccagacccttgggaggtggccctatccctaggcagtggtgctaggaggacagaaggctatatgggcgtggcagaggctggttaacaagggcttagtacacgcttgctgttctgtgcccagtatgtgggcggatgacgcaagactacaagatccttgccctcaagctgctaggaacttacggttttattaggagagcagtacaagggtatctatcccagtaccaaatggtgcttcagctctaacatggaggtcagagaaagggacttggaccaataaaatgacatggaggcctaacaggttgcctgaatgagagtcacagtcacctggaagaaagtatccagacccaacctgttagctaccctcaccagcaccaaatcttcccttctcagacagcaggctctcctgcggcctaggccagggcaggctaccagccacatcttctatgagccagatgcttatgatgacctggaccaagaagacccagatgacgacctggatatttgactggccagatttgattagattgtaattggagggggcgcgggaagactttgggcccagaaccatctttctattgtttgtgttagccttaccctgtccctgccccaccttggttccccttgtctatggagccccgccttgtgagccaggaagcagcgtctcatcaggacagaaggtaggatgaagacatggggtaatgtgagagagtagaacacccccgtacctaataaaaatctttatttttttattaaaaaaaaagttttaaaaaaaaaggggggggctaaaaaaccccaggggccagttagcgttccgtttttgccagggcctagt

SEQ ID NO: 358822 - DNA, 2330 bp, Homo sapiens
gggagagtgacgtcacttggcccgcgcttagggccctcgcggggggcttgtgggtcctcctccccctcccactgacaactgccccaactgctcttcccgccccggtcacagtgaaaatgtagacggggtcgttgtccgtacgactgtgcgccaggctcggggaggggcgccctccgcgtgagcgcccccctgggaatattgaacataatcacctctcattccagactatgttaggtcttaatggtgggaggacgcccgagtgctcggcccgtttcaccccgaggaggaaggacactgggtcatgacgccatcagagggcgccagagcagggaccggacgcgagttggagatgttggactcgctgttggccttgggcggcctggtgctgcttcgggattccgtggagtgggaggggcgcagtctcttgaaggcgcttgtcaagaaatctgcactgtgtggggagcaagtgcatatcctgggctgtgaagtgagcgaggaagagtttcgtgaaggttttgactctgatatcaacaatcggctggtttaccatgacttcttcagagaccctctcaactggtcaaaaactgaggaggcctttcctggggggccgctgggagccttgagagccatgtgcaagaggacagatcctgttcctgtcaccattgctctcgattcactcagctggctgctacttcgccttccctgcaccacactctgccaggtcctgcatgctgtgagccatcaggactcttgtcctggtgacagctcctcagtggggaaagtgagtgtgctgggcttgctacatgaagagcttcatggaccaggccctgtgggagctctcagcagccttgctcagactgaggtgaccctgggcggtaccatgggccaggcctcggcccacatcctgtgtcggaggccccgacagcgcccaactgaccagactcagtggttctccatccttccggacttcagcctggatctccaagaggggccctctgtagagtcccagccctactccgatcctcatatacccccggtatctaagaatgccaaggccagaacaaggaaatgtagtttagtatctggtcacgggagagaaaataaaagctgcagaggttgggggtggggtcagggattctagggatggggcagagtggcagcatcctttgtacctacaggtggtggatcccacaactcatttgacctttaaccttcacctgtccaagaaagagagagaagccagagatagcctgatcctgcccttccagttcagttctgaaaagtaaggttgggacctgggtacgtggatccctgagtagatcccagcatctgggccatggagaggttggggcaacaggttattgattaacctgactttatagggactgaagtccacctccagagacaagtccaagttcttgatccacccattccccctataatggcagaggacctttatgtctcttttctctcccttatacccttgggtcacagctccagttgtccccagagcaccctgggcctgggctgagccagaccagacccttgggaggtggccctatccctaggcagtggtgctaggaggacagaaggctatatgggcgtggcagaggctggttaacaagggcttagtacacgcttgctgttctgtgcccagtatgtgggcggatgacgcaagactacaagatccttgccctcaagctgctaggaacttacggttttattaggagagcagtacaagggtatctatcccagtaccaaatggtgcttcagctctaacatggaggtcagagaaagggacttggaccaataaaatgacatggaggcctaacaggttgcctgaatgagagtcacagtcacctggaagaaagtatccagacccaacctgttagctaccctcaccagcaccaaatcttcccttctcagacagcaggctctcctgcggcctaggccagggcaggctaccagccacatcttctatgagccagatgcttatgatgacctggaccaagaagacccagatgacgacctggatatttgactggccagatttgattagattgtaattggagggggcgcgggaagactttgggcccagaaccatctttctattgtttgtgttagccttaccctgtccctgccccaccttggttccccttgtctatggagccccgccttgtgagccaggaagcagcgtctcatcaggacagaaggtaggatgaagacatggggtaatgtgagagagtagaacacccccgtacctaataaaaatctttatttttttttttttttttctttctttttcttttcttttcttttttttttttttt

SEQ ID NO: 358823 - DNA, 1495 bp, Homo sapiens
gggagagtgacgtcacttggcccgcgcttagggccctcgcggggggcttgtgggtcctcctccccctcccactgacaactgccccaactgctcttcccgccccggtcacagtgaaaatgtagacggggtcgttgtccgtacgactgtgcgccaggctcggggaggggcgccctccgcgtgagcgcccccctgggaatattgaacataatcacctctcattccagactatgttaggtcttaatggtgggaggacgcccgagtgctcggcccgtttcaccccgaggaggaaggacactgggtcatgacgccatcagagggcgccagagcagggaccggacgcgagttggagatgttggactcgctgttggccttgggcggcctggtgctgcttcgggattccgtggagtgggaggggcgcagtctcttgaaggcgcttgtcaagaaatctgcactgtgtggggagcaagtgcatatcctgggctgtgaagtgagcgaggaagagtttcgtgaaggttttgactctgatatcaacaatcggctggtttaccatgacttcttcagagaccctctcaactggtcaaaaactgaggaggcctttcctggggggccgctgggagccttgagagccatgtgcaagaggacagatcctgttcctgtcaccattgctctcgattcactcagctggctgctacttcgccttccctgcaccacactctgccaggtcctgcatgctgtgagccatcaggactcttgtcctggtgacagctcctcagtggggaaagtgagtgtgctgggcttgctacatgaagagcttcatggaccaggccctgtgggagctctcagcagccttgctcagactgaggtgaccctgggcggtaccatgggccaggcctcggcccacatcctgtgtcggaggccccgacagcgcccaactgaccagactcagtggttctccatccttccggacttcagcctggatctccaagaggggccctctgtagagtcccagccctactccgatcctcatatacccccggtggatcccacaactcatttgacctttaaccttcacctgtccaagaaagagagagaagccagagatagcctgatcctgcccttccagttcagttctgaaaaacagcaggctctcctgcggcctaggccagggcaggctaccagccacatcttctatgagccagatgcttatgatgacctggaccaagaagacccagatgacgacctggatatttgactggccagatttgattagattgtaattggagggggcgcgggaagactttgggcccagaaccatctttctattgtttgtgttagccttaccctgtccctgccccaccttggttccccttgtctatggagccccgccttgtgagccaggaagcagcgtctcatcaggacagaaggtaggatgaagacatggggtaatgtgagagagtagaacacccccgtacctaataaaaatctttattttttt

SEQ ID NO: 358824 - DNA, 1497 bp, Homo sapiens
gggagagtgacgtcacttggcccgcgcttagggccctcgcggggggcttgtgggtcctcctccccctcccactgacaactgccccaactgctcttcccgccccggtcacagtgaaaatgtagacggggtcgttgtccgtacgactgtgcgccaggctcggggaggggcgccctccgcgtgagcgcccccctgggaatattgaacataatcacctctcattccagactatgttaggtcttaatggtgggaggacgcccgagtgctcggcccgtttcaccccgaggaggaaggacactgggtcatgacgccatcagagggcgccagagcagggaccggacgcgagttggagatgttggactcgctgttggccttgggcggcctggtgctgcttcgggattccgtggagtgggaggggcgcagtctcttgaaggcgcttgtcaagaaatctgcactgtgtggggagcaagtgcatatcctgggctgtgaagtgagcgaggaagagtttcgtgaaggttttgactctgatatcaacaatcggctggtttaccatgacttcttcagagaccctctcaactggtcaaaaactgaggaggcctttcctggggggccgctgggagccttgagagccatgtgcaagaggacagatcctgttcctgtcaccattgctctcgattcactcagctggctgctacttcgccttccctgcaccacactctgccaggtcctgcatgctgtgagccatcaggactcttgtcctggtgacagctcctcagtggggaaagtgagtgtgctgggcttgctacatgaagagcttcatggaccaggccctgtgggagctctcagcagccttgctcagactgaggtgaccctgggcggtaccatgggccaggcctcggcccacatcctgtgtcggaggccccgacagcgcccaactgaccagactcagtggttctccatccttccggacttcagcctggatctccaagaggggccctctgtagagtcccagccctactccgatcctcatatacccccggtatctaagaatgccaaggccagaacaaggaaatgtagtttagtatctggtcacgggagagaaaataaaagctgcagaggttgggggtggggtcagggattctagggatggggcagagtggcagcatcctttgtacctacaggtgccacatcttctatgagccagatgcttatgatgacctggaccaagaagacccagatgacgacctggatatttgactggccagatttgattagattgtaattggagggggcgcgggaagactttgggcccagaaccatctttctattgtttgtgttagccttaccctgtccctgccccaccttggttccccttgtctatggagccccgccttgtgagccaggaagcagcgtctcatcaggacagaaggtaggatgaagacatggggtaatgtgagagagtagaacacccccgtacctaataaaaatctttattttttt

SEQ ID NO: 358825 - DNA, 1394 bp, Homo sapiens
gggagagtgacgtcacttggcccgcgcttagggccctcgcggggggcttgtgggtcctcctccccctcccactgacaactgccccaactgctcttcccgccccggtcacagtgaaaatgtagacggggtcgttgtccgtacgactgtgcgccaggctcggggaggggcgccctccgcgtgagcgcccccctgggaatattgaacataatcacctctcattccagactatgttaggtcttaatggtgggaggacgcccgagtgctcggcccgtttcaccccgaggaggaaggacactgggtcatgacgccatcagagggcgccagagcagggaccggacgcgagttggagatgttggactcgctgttggccttgggcggcctggtgctgcttcgggattccgtggagtgggaggggcgcagtctcttgaaggcgcttgtcaagaaatctgcactgtgtggggagcaagtgcatatcctgggctgtgaagtgagcgaggaagagtttcgtgaaggttttgactctgatatcaacaatcggctggtttaccatgacttcttcagagaccctctcaactggtcaaaaactgaggaggcctttcctggggggccgctgggagccttgagagccatgtgcaagaggacagatcctgttcctgtcaccattgctctcgattcactcagctggctgctacttcgccttccctgcaccacactctgccaggtcctgcatgctgtgagccatcaggactcttgtcctggtgacagctcctcagtggggaaagtgagtgtgctgggcttgctacatgaagagcttcatggaccaggccctgtgggagctctcagcagccttgctcagactgaggtgaccctgggcggtaccatgggccaggcctcggcccacatcctgtgtcggaggccccgacagcgcccaactgaccagactcagtggttctccatccttccggacttcagcctggatctccaagaggggccctctgtagagtcccagccctactccgatcctcatatacccccgacagcaggctctcctgcggcctaggccagggcaggctaccagccacatcttctatgagccagatgcttatgatgacctggaccaagaagacccagatgacgacctggatatttgactggccagatttgattagattgtaattggagggggcgcgggaagactttgggcccagaaccatctttctattgtttgtgttagccttaccctgtccctgccccaccttggttccccttgtctatggagccccgccttgtgagccaggaagcagcgtctcatcaggacagaaggtaggatgaagacatggggtaatgtgagagagtagaacacccccgtacctaataaaaatctttattttttt

SEQ ID NO: 358826 - DNA, 1229 bp, Homo sapiens
gcaggaagggccaggggtcacaggctaggtgtggaaatcgcgacgggttcgcgaaggcggtaatcccagcgctctcataccctttatccgtccctcgctctgcagattccgtggagtgggaggggcgcagtctcttgaaggcgcttgtcaagaaatctgcactgtgtggggagcaagtgcatatcctgggctgtgaagtgagcgaggaagagtttcgtgaaggttttgactctgatatcaacaatcggctggtttaccatgacttcttcagagaccctctcaactggtcaaaaactgaggaggcctttcctggggggccgctgggagccttgagagccatgtgcaagaggacagatcctgttcctgtcaccattgctctcgattcactcagctggctgctacttcgccttccctgcaccacactctgccaggtcctgcatgctgtgagccatcaggactcttgtcctggtgacagctcctcagtggggaaagtgagtgtgctgggcttgctacatgaagagcttcatggaccaggccctgtgggagctctcagcagccttgctcagactgaggtgaccctgggcggtaccatgggccaggcctcggcccacatcctgtgtcggaggccccgacagcgcccaactgaccagactcagtggttctccatccttccggacttcagcctggatctccaagaggggccctctgtagagtcccagccctactccgatcctcatatacccccggtggatcccacaactcatttgacctttaaccttcacctgtccaagaaagagagagaagccagagatagcctgatcctgcccttccagttcagttctgaaaaacagcaggctctcctgcggcctaggccagggcaggctaccagccacatcttctatgagccagatgcttatgatgacctggaccaagaagacccagatgacgacctggatatttgactggccagatttgattagattgtaattggagggggcgcgggaagactttgggcccagaaccatctttctattgtttgtgttagccttaccctgtccctgccccaccttggttccccttgtctatggagccccgccttgtgagccaggaagcagcgtctcatcaggacagaaggtaggatgaagacatggggtaatgtgagagagtagaacacccccgtacctaataaaaatctttatttttttattaaaaaaaaagtactttggtag

SEQ ID NO: 358827 - DNA, 1144 bp, Homo sapiens
gaactataggctaggtagcgattccgtggagtgggaggggcgcagtctcttgaaggcgcttgtcaagaaatctgcactgtgtggggagcaagtgcatatcctgggctgtgaagtgagcgaggaagagtttcgtgaaggttttgactctgatatcaacaatcggctggtttaccatgacttcttcagagaccctctcaactggtcaaaaactgaggaggcctttcctggggggccgctgggagccttgagagccatgtgcaagaggacagatcctgttcctgtcaccattgctctcgattcactcagctggctgctacttcgccttccctgcaccacactctgccaggtcctgcatgctgtgagccatcaggactcttgtcctggtgacagctcctcagtggggaaagtgagtgtgctgggcttgctacatgaagagcttcatggaccaggccctgtgggagctctcagcagccttgctcagactgaggtgaccctgggcggtaccatgggccaggcctcggcccacatcctgtgtcggaggccccgacagcgcccaactgaccagactcagtggttctccatccttccggacttcagcctggatctccaagaggggccctctgtagagtcccagccctactccgatcctcatatacccccggtggatcccacaactcatttgacctttaaccttcacctgtccaagaaagagagagaagccagagatagcctgatcctgcccttccagttcagttctgaaaaacagcaggctctcctgcggcctaggccagggcaggctaccagccacatcttctatgagccagatgcttatgatgacctggaccaagaagacccagatgacgacctggatatttgactggccagatttgattagattgtaattggagggggcgcgggaagactttgggcccagaaccatctttctattgtttgtgttagccttaccctgtccctgccccaccttggttccccttgtctatggagccccgccttgtgagccaggaagcagcgtctcatcaggacagaaggtaggatgaagacatggggtaatgtgagagagtagaacacccccgtacctaataaaaatctttatttttttattaaaaaaaaagtactttggtag

SEQ ID NO: 358828 - DNA, 1045 bp, Homo sapiens
ggtcatgctcagtgccaagatgctcctgagttagcttttccccattttggcactcagttcgtcgctggtttaccatgacttcttcagagaccctctcaactggtcaaaaactgaggaggcctttcctggggggccgctgggagccttgagagccatgtgcaagaggacagatcctgttcctgtcaccattgctctcgattcactcagctggctgctacttcgccttccctgcaccacactctgccaggtcctgcatgctgtgagccatcaggactcttgtcctggtgacagctcctcagtggggaaagtgagtgtgctgggcttgctacatgaagagcttcatggaccaggccctgtgggagctctcagcagccttgctcagactgaggtgaccctgggcggtaccatgggccaggcctcggcccacatcctgtgtcggaggccccgacagcgcccaactgaccagactcagtggttctccatccttccggacttcagcctggatctccaagaggggccctctgtagagtcccagccctactccgatcctcatatacccccggtggatcccacaactcatttgacctttaaccttcacctgtccaagaaagagagagaagccagagatagcctgatcctgcccttccagttcagttctgaaaaacagcaggctctcctgcggcctaggccagggcaggctaccagccacatcttctatgagccagatgcttatgatgacctggaccaagaagacccagatgacgacctggatatttgactggccagatttgattagattgtaattggagggggcgcgggaagactttgggcccagaaccatctttctattgtttgtgttagccttaccctgtccctgccccaccttggttccccttgtctatggagccccgccttgtgagccaggaagcagcgtctcatcaggacagaaggtaggatgaagacatggggtaatgtgagagagtagaacacccccgtacctaataaaaatctttatttttttattaaaaaaaaagtactttggtag

SEQ ID NO: 358829 - DNA, 1108 bp, Homo sapiens
cctcgggtgtgatttagtgacggggcgggattccgtggagtgggaggggcgcagtctcttgaaggcgcttgtcaagaaatctgcactgtgtggggagcaagtgcatatcctgggctgtgaagtgagcgaggaagagtttcgtgaaggttttgactctgatatcaacaatcggctggtttaccatgacttcttcagagaccctctcaactggtcaaaaactgaggaggcctttcctggggggccgctgggagccttgagagccatgtgcaagaggacagatcctgttcctgtcaccattgctctcgattcactcagctggctgctacttcgccttccctgcaccacacgtgacagctcctcagtggggaaagtgagtgtgctgggcttgctacatgaagagcttcatggaccaggccctgtgggagctctcagcagccttgctcagactgaggtgaccctgggcggtaccatgggccaggcctcggcccacatcctgtgtcggaggccccgacagcgcccaactgaccagactcagtggttctccatccttccggacttcagcctggatctccaagaggggccctctgtagagtcccagccctactccgatcctcatatacccccggtggatcccacaactcatttgacctttaaccttcacctgtccaagaaagagagagaagccagagatagcctgatcctgcccttccagttcagttctgaaaaacagcaggctctcctgcggcctaggccagggcaggctaccagccacatcttctatgagccagatgcttatgatgacctggaccaagaagacccagatgacgacctggatatttgactggccagatttgattagattgtaattggagggggcgcgggaagactttgggcccagaaccatctttctattgtttgtgttagccttaccctgtccctgccccaccttggttccccttgtctatggagccccgccttgtgagccaggaagcagcgtctcatcaggacagaaggtaggatgaagacatggggtaatgtgagagagtagaacacccccgtacctaataaaaatctttatttttttattaaaaaaaaagtactttggtag

SEQ ID NO: 358830 - DNA, 1452 bp, Homo sapiens
gggagagtgacgtcacttggcccgcgcttagggccctcgcggggggcttgtgggtcctcctccccctcccactgacaactgccccaactgctcttcccgccccggtcacagtgaaaatgtagacggggtcgttgtccgtacgactgtgcgccaggctcggggaggggcgccctccgcgtgagcgcccccctgggaatattgaacataatcacctctcattccagactatgttaggtcttaatggtgggaggacgcccgagtgctcggcccgtttcaccccgaggaggaaggacactgggtcatgacgccatcagagggcgccagagcagggaccggacgcgagttggagatgttggactcgctgttggccttgggcggcctggtgctgcttcgggattccgtggagtgggaggggcgcagtctcttgaaggcgcttgtcaagaaatctgcactgtgtggggagcaagtgcatatcctgggctgtgaagtgagcgaggaagagtttcgtgaaggttttgactctgatatcaacaatcggctggtttaccatgacttcttcagagaccctctcaactggtcaaaaactgaggaggcctttcctggggggccgctgggagccttgagagccatgtgcaagaggacagatcctgttcctgtcaccattgctctcgattcactcagctggctgctacttcgccttccctgcaccacacgtgacagctcctcagtggggaaagtgagtgtgctgggcttgctacatgaagagcttcatggaccaggccctgtgggagctctcagcagccttgctcagactgaggtgaccctgggcggtaccatgggccaggcctcggcccacatcctgtgtcggaggccccgacagcgcccaactgaccagactcagtggttctccatccttccggacttcagcctggatctccaagaggggccctctgtagagtcccagccctactccgatcctcatatacccccggtatctaagaatgccaaggccagaacaaggaaatgtagtttagtatctggtcacgggagagaaaataaaagctgcagaggttgggggtggggtcagggattctagggatggggcagagtggcagcatcctttgtacctacaggtgccacatcttctatgagccagatgcttatgatgacctggaccaagaagacccagatgacgacctggatatttgactggccagatttgattagattgtaattggagggggcgcgggaagactttgggcccagaaccatctttctattgtttgtgttagccttaccctgtccctgccccaccttggttccccttgtctatggagccccgccttgtgagccaggaagcagcgtctcatcaggacagaaggtaggatgaagacatggggtaatgtgagagagtagaacacccccgtacctaataaaaatctttattttttt

SEQ ID NO: 358831 - DNA, 1166 bp, Homo sapiens
agttcgacggagactctccagtggaaagagagagaagccagagatagcctgatcctgcccttccagttcagttctgaaaagtaaggttgggacctgggtacgtggatccctgagtagatcccagcatctgggccatggagaggttggggcaacaggttattgattaacctgactttatagggactgaagtccacctccagagacaagtccaagttcttgatccacccattccccctataatggcagaggacctttatgtctcttttctctcccttatacccttgggtcacagctccagttgtccccagagcaccctgggcctgggctgagccagaccagacccttgggaggtggccctatccctaggcagtggtgctaggaggacagaaggctatatgggcgtggcagaggctggttaacaagggcttagtacacgcttgctgttctgtgcccagtatgtgggcggatgacgcaagactacaagatccttgccctcaagctgctaggaacttacggttttattaggagagcagtacaagggtatctatcccagtaccaaatggtgcttcagctctaacatggaggtcagagaaagggacttggaccaataaaatgacatggaggcctaacaggttgcctgaatgagagtcacagtcacctggaagaaagtatccagacccaacctgttagctaccctcaccagcaccaaatcttcccttctcagacagcaggctctcctgcggcctaggccagggcaggctaccagccacatcttctatgagccagatgcttatgatgacctggaccaagaagacccagatgacgacctggatatttgactggccagatttgattagattgtaattggagggggcgcgggaagactttgggcccagaaccatctttctattgtttgtgttagccttaccctgtccctgccccaccttggttccccttgtctatggagccccgccttgtgagccaggaagcagcgtctcatcaggacagaaggtaggatgaagacatggggtaatgtgagagagtagaacacccccgtacctaataaaaatctttatttttttattaaaaaaaaagttttaaaaaaaaaggggggggctaaaaaaccccaggggccagttagcgttccgtttttgccagggcctagt

SEQ ID NO: 358832 - DNA, 1128 bp, Homo sapiens
gggagagtgacgtcacttggcccgcgcttagggccctcgcggggggcttgtgggtcctcctccccctcccactgacaactgccccaactgctcttcccgccccggtcacagtgaaaatgtagacggggtcgttgtccgtacgactgtgcgccaggctcggggaggggcgccctccgcgtgagcgcccccctgggaatattgaacataatcacctctcattccagactatgttaggtcttaatggtgggaggacgcccgagtgctcggcccgtttcaccccgaggaggaaggacactgggtcatgacgccatcagagggcgccagagcagggaccggacgcgagttggagatgttggactcgctgttggccttgggcggcctggtgctgcttcgggattccgtggagtgggaggggcgcagtctcttgaaggcgcttgtcaagaaatctgcactgtgtggggagcaagtgcatatcctgggctgtgaagtgagcgaggaagagtttcgtgaaggttttgactctgatatcaacaatcggctggtttaccatgacttcttcagagaccctctcaactggtcaaaaactgaggaggcctttcctggggggccgctgggagccttgagagccatgtgcaagaggacagatcctgttcctgtcaccattgctctcgattcactcagctggctgctacttcgccttccctgcaccacacgaaagagagagaagccagagatagcctgatcctgcccttccagttcagttctgaaaaacagcaggctctcctgcggcctaggccagggcaggctaccagccacatcttctatgagccagatgcttatgatgacctggaccaagaagacccagatgacgacctggatatttgactggccagatttgattagattgtaattggagggggcgcgggaagactttgggcccagaaccatctttctattgtttgtgttagccttaccctgtccctgccccaccttggttccccttgtctatggagccccgccttgtgagccaggaagcagcgtctcatcaggacagaaggtaggatgaagacatggggtaatgtgagagagtagaacacccccgtacctaataaaaatctttattttttt

SEQ ID NO: 358833 - DNA, 1037 bp, Homo sapiens
gggagagtgacgtcacttggcccgcgcttagggccctcgcggggggcttgtgggtcctcctccccctcccactgacaactgccccaactgctcttcccgccccggtcacagtgaaaatgtagacggggtcgttgtccgtacgactgtgcgccaggctcggggaggggcgccctccgcgtgagcgcccccctgggaatattgaacataatcacctctcattccagactatgttaggtcttaatggtgggaggacgcccgagtgctcggcccgtttcaccccgaggaggaaggacactgggtcatgacgccatcagagggcgccagagcagggaccggacgcgagttggagatgttggactcgctgttggccttgggcggcctggtgctgcttcgggattccgtggagtgggaggggcgcagtctcttgaaggcgcttgtcaagaaatctgcactgtgtggggagcaagtgcatatcctgggctgtgaagtgagcgaggaagagtttcgtgaaggttttgactctgatatcaacaatcggctggtttaccatgacttcttcagagaccctctcaactggtgtggatcccacaactcatttgacctttaaccttcacctgtccaagaaagagagagaagccagagatagcctgatcctgcccttccagttcagttctgaaaaacagcaggctctcctgcggcctaggccagggcaggctaccagccacatcttctatgagccagatgcttatgatgacctggaccaagaagacccagatgacgacctggatatttgactggccagatttgattagattgtaattggagggggcgcgggaagactttgggcccagaaccatctttctattgtttgtgttagccttaccctgtccctgccccaccttggttccccttgtctatggagccccgccttgtgagccaggaagcagcgtctcatcaggacagaaggtaggatgaagacatggggtaatgtgagagagtagaacacccccgtacctaataaaaatctttattttttt

SEQ ID NO: 358834 - DNA, 644 bp, Homo sapiens
gtgggagaatcacttgaacctgggaggcggaggttgaggtgagccgagatcatgccactacactccagcctgggcaacagagtgagactccgtctcaaaaaaggagtaagtgggctgctctgcctaaggagtcgccatccttttattcctttacttccttaatcaacttgctttcacttttgaaaataaaatagaggctgggcgcagtggcttacacctgtaatcccagcattttgggaggccgaagtgggcagatcacctgaggttagtggtttgagaccagcctggccaatatagcaaaaccccatctctactaaaaagacaaaaattagctgggtgtggtagcacgtgcctgtaatcccagctactcgggaggctgaggcaggagaatcacttgaacctgggaggcggaggttgcagtgagctaagatcacgccactgtactccagcctgggcaacaaagccagaccctgtctcaaaaaaaaaaaaaaaagttgagggcaggagctgaaagcagtcagttaaataggtgattgggggctgaggatgtgaggtcctggagtctgtctagtttcttcagtaagatgaaaaaaactcttttcttttttctctccaactcagtggttctccatccttccggactt

SEQ ID NO: 358835 - DNA, 1432 bp, Homo sapiens
gggagagtgacgtcacttggcccgcgcttagggccctcgcggggggcttgtgggtcctcctccccctcccactgacaactgccccaactgctcttcccgccccggtcacagtgaaaatgtagacggggtcgttgtccactatgttaggtcttaatggtgggaggacgcccgagtgctcggcccgtttcaccccgaggaggaaggacactgggtcatgacgccatcagagggcgccagagcagggaccggacgcgagttggagatgttggactcgctgttggccttgggcggcctggtgctgcttcgggattccgtggagtgggaggggcgcagtctcttgaaggcgcttgtcaagaaatctgcactgtgtggggagcaagtgcatatcctgggctgtgaagtgagcgaggaagagtttcgtgaaggttttgactctgatatcaacaatcggctggtttaccatgacttcttcagagaccctctcaactggtcaaaaactgaggaggcctttcctggggggccgctgggagccttgagagccatgtgcaagaggacagatcctgttcctgtcaccattgctctcgattcactcagctggctgctacttcgccttccctgcaccacactctgccaggtcctgcatgctgtgagccatcaggactcttgtcctggtgacagctcctcagtggggaaagtgagtgtgctgggcttgctacatgaagagcttcatggaccaggccctgtgggagctctcagcagccttgctcagactgaggtgaccctgggcggtaccatgggccaggcctcggcccacatcctgtgtcggaggccccgacagcgcccaactgaccagactcagtggttctccatccttccggacttcagcctggatctccaagaggggccctctgtagagtcccagccctactccgatcctcatatacccccggtggatcccacaactcatttgacctttaaccttcacctgtccaagaaagagagagaagccagagatagcctgatcctgcccttccagttcagttctgaaaaacagcaggctctcctgcggcctaggccagggcaggctaccagccacatcttctatgagccagatgcttatgatgacctggaccaagaagacccagatgacgacctggatatttgactggccagatttgattagattgtaattggagggggcgcgggaagactttgggcccagaaccatctttctattgtttgtgttagccttaccctgtccctgccccaccttggttccccttgtctatggagccccgccttgtgagccaggaagcagcgtctcatcaggacagaaggtaggatgaagacatggggtaatgtgagagagtagaacacccccgtacctaataaaaatctttatttttttattaaaaaaaaagtactttggtag

SEQ ID NO: 358836 - DNA, 1519 bp, Homo sapiens
gggagagtgacgtcacttggcccgcgcttagggccctcgcggggggcttgtgggtcctcctccccctcccactgacaactgccccaactgctcttcccgccccggtcacagtgaaaatgtagacggggtcgttgtccgtacgactgtgcgccaggctcggggaggggcgccctccgcgtgagcgcccccctgggaatattgaacataatcacctctcattccagactatgttaggtcttaatggtgggaggacgcccgagtgctcggcccgtttcaccccgaggaggaaggacactgggtcatgacgccatcagagggcgccagagcagggaccggacgcgagttggagatgttggactcgctgttggccttgggcggcctggtgctgcttcgggattccgtggagtgggaggggcgcagtctcttgaaggcgcttgtcaagaaatctgcactgtgtggggagcaagtgcatatcctgggctgtgaagtgagcgaggaagagtttcgtgaaggttttgactctgatatcaacaatcggctggtttaccatgacttcttcagagaccctctcaactggtcaaaaactgaggaggcctttcctggggggccgctgggagccttgagagccatgtgcaagaggacagatcctgttcctgtcaccattgctctcgattcactcagctggctgctacttcgccttccctgcaccacactctgccaggtcctgcatgctgtgagccatcaggactcttgtcctggtgacagctcctcagtggggaaagtgagtgtgctgggcttgctacatgaagagcttcatggaccaggccctgtgggagctctcagcagccttgctcagactgaggtgaccctgggcggtaccatgggccaggcctcggcccacatcctgtgtcggaggccccgacagcgcccaactgaccagactcagtggttctccatccttccggacttcagcctggatctccaagaggggccctctgtagagtcccagccctactccgatcctcatatacccccggtggatcccacaactcatttgacctttaaccttcacctgtccaagaaagagagagaagccagagatagcctgatcctgcccttccagttcagttctgaaaaacagcaggctctcctgcggcctaggccagggcaggctaccagccacatcttctatgagccagatgcttatgatgacctggaccaagaagacccagatgacgacctggatatttgactggccagatttgattagattgtaattggagggggcgcgggaagactttgggcccagaaccatctttctattgtttgtgttagccttaccctgtccctgccccaccttggttccccttgtctatggagccccgccttgtgagccaggaagcagcgtctcatcaggacagaaggtaggatgaagacatggggtaatgtgagagagtagaacacccccgtacctaataaaaatctttatttttttattaaaaaaaaagtactttggtag

SEQ ID NO: 358837 - DNA, 2284 bp, Homo sapiens
gggagagtgacgtcacttggcccgcgcttagggccctcgcggggggcttgtgggtcctcctccccctcccactgacaactgccccaactgctcttcccgccccggtcacagtgaaaatgtagacggggtcgttgtccgtacgactgtgcgccaggctcggggaggggcgccctccgcgtgagcgcccccctgggaatattgaacataatcacctctcattccagactatgttaggtcttaatggtgggaggacgcccgagtgctcggcccgtttcaccccgaggaggaaggacactgggtcatgacgccatcagagggcgccagagcagggaccggacgcgagttggagatgttggactcgctgttggccttgggcggcctggtgctgcttcgggattccgtggagtgggaggggcgcagtctcttgaaggcgcttgtcaagaaatctgcactgtgtggggagcaagtgcatatcctgggctgtgaagtgagcgaggaagagtttcgtgaaggttttgactctgatatcaacaatcggctggtttaccatgacttcttcagagaccctctcaactggtcaaaaactgaggaggcctttcctggggggccgctgggagccttgagagccatgtgcaagaggacagatcctgttcctgtcaccattgctctcgattcactcagctggctgctacttcgccttccctgcaccacactctgccaggtcctgcatgctgtgagccatcaggactcttgtcctggtgacagctcctcagtggggaaagtgagtgtgctgggcttgctacatgaagagcttcatggaccaggccctgtgggagctctcagcagccttgctcagactgaggtgaccctgggcggtaccatgggccaggcctcggcccacatcctgtgtcggaggccccgacagcgcccaactgaccagactcagtggttctccatccttccggacttcagcctggatctccaagaggggccctctgtagagtcccagccctactccgatcctcatatacccccggtatctaagaatgccaaggccagaacaaggaaatgtagtttagtatctggtcacgggagagaaaataaaagctgcagaggttgggggtggggtcagggattctagggatggggcagagtggcagcatcctttgtacctacaggtggtggatcccacaactcatttgacctttaaccttcacctgtccaagaaagagagagaagccagagatagcctgatcctgcccttccagttcagttctgaaaagtaaggttgggacctgggtacgtggatccctgagtagatcccagcatctgggccatggagaggttggggcaacaggttattgattaacctgactttatagggactgaagtccacctccagagacaagtccaagttcttgatccacccattccccctataatggcagaggacctttatgtctcttttctctcccttatacccttgggtcacagctccagttgtccccagagcaccctgggcctgggctgagccagaccagacccttgggaggtggccctatccctaggcagtggtgctaggaggacagaaggctatatgggcgtggcagaggctggttaacaagggcttagtacacgcttgctgttctgtgcccagtatgtgggcggatgacgcaagactacaagatccttgccctcaagctgctaggaacttacggttttattaggagagcagtacaagggtatctatcccagtaccaaatggtgcttcagctctaacatggaggtcagagaaagggacttggaccaataaaatgacatggaggcctaacaggttgcctgaatgagagtcacagtcacctggaagaaagtatccagacccaacctgttagctaccctcaccagcaccaaatcttcccttctcagacagcaggctctcctgcggcctaggccagggcaggctaccagccacatcttctatgagccagatgcttatgatgacctggaccaagaagacccagatgacgacctggatatttgactggccagatttgattagattgtaattggagggggcgcgggaagactttgggcccagaaccatctttctattgtttgtgttagccttaccctgtccctgccccaccttggttccccttgtctatggagccccgccttgtgagccaggaagcagcgtctcatcaggacagaaggtaggatgaagacatggggtaatgtgagagagtagaacacccccgtacctaataaaaatctttattttttt

SEQ ID NO: 358838 - DNA, 1187 bp, Homo sapiens
gggagagtgacgtcacttggcccgcgcttagggccctcgcggggggcttgtgggtcctcctccccctcccactgacaactgccccaactgctcttcccgccccggtcacagtgaaaatgtagacggggtcgttgtccgtacgactgtgcgccaggctcggggaggggcgccctccgcgtgagcgcccccctgggaatattgaacataatcacctctcattccagactatgttaggtcttaatggtgggaggacgcccgagtgctcggcccgtttcaccccgaggaggaaggacactgggtcatgacgccatcagagggcgccagagcagggaccggacgcgagttggagatgttggactcgctgttggccttgggcggcctggtgctgcttcgggattccgtggagtgggaggggcgcagtctcttgaaggcgcttgtcaagaaatctgcactgtgtggggagcaagtgcatatcctgggctgtgaagtgagcgaggaagagtttcgtgaaggttttgactctgatatcaacaatcggctggtttaccatgacttcttcagagaccctctcaactggtcaaaaactgaggaggcctttcctggggggccgctgggagccttgagagccatgtgcaagaggacagatcctgttcctgtcaccattgctctcgattcactcagctggctgctacttcgccttccctgcaccacactctgccaggtcctgcatgctgtgagccatcaggactcttgtcctggtgacagctcctcagtggggaaagtgagtgtgctgggcttgctacatgaagagcttcatggaccaggccctgtgggagctctcagcagccttgctcagactgaggtgaccctgggcggtaccatgggccaggcctcggcccacatcctgtgtcggaggccccgacagcgcccaactgaccagactcagtggttctccatccttccggacttcagcctggatctccaagaggggccctctgtagagtcccagccctactccgatcctcatatacccccggtggatcccacaactcatttgacctttaaccttcacctgtccaagaaagagagagaagccagagatagcctgatcctgcccttccagttcagttctgaaaacaggaggtctctgggctagcagggcggtacgcctttttggcagttgagcg

SEQ ID NO: 358839 - DNA, 1356 bp, Homo sapiens
tccggtggtgacgtgtattcgcttcaccgggactaagttcctcctgcgcggtctatggcggactatgttaggtcttaatggtgggaggacgcccgagtgctcggcccgtttcaccccgaggaggaaggacactgggtcatgacgccatcagagggcgccagagcagggaccggacgcgagttggagatgttggactcgctgttggccttgggcggcctggtgctgcttcgggattccgtggagtgggaggggcgcagtctcttgaaggcgcttgtcaagaaatctgcactgtgtggggagcaagtgcatatcctgggctgtgaagtgagcgaggaagagtttcgtgaaggttttgactctgatatcaacaatcggctggtttaccatgacttcttcagagaccctctcaactggtcaaaaactgaggaggcctttcctggggggccgctgggagccttgagagccatgtgcaagaggacagatcctgttcctgtcaccattgctctcgattcactcagctggctgctacttcgccttccctgcaccacactctgccaggtcctgcatgctgtgagccatcaggactcttgtcctggtgacagctcctcagtggggaaagtgagtgtgctgggcttgctacatgaagagcttcatggaccaggccctgtgggagctctcagcagccttgctcagactgaggtgaccctgggcggtaccatgggccaggcctcggcccacatcctgtgtcggaggccccgacagcgcccaactgaccagactcagtggttctccatccttccggacttcagcctggatctccaagaggggccctctgtagagtcccagccctactccgatcctcatatacccccggtggatcccacaactcatttgacctttaaccttcacctgtccaagaaagagagagaagccagagatagcctgatcctgcccttccagttcagttctgaaaaacagcaggctctcctgcggcctaggccagggcaggctaccagccacatcttctatgagccagatgcttatgatgacctggaccaagaagacccagatgacgacctggatatttgactggccagatttgattagattgtaattggagggggcgcgggaagactttgggcccagaaccatctttctattgtttgtgttagccttaccctgtccctgccccaccttggttccccttgtctatggagccccgccttgtgagccaggaagcagcgtctcatcaggacagaaggtaggatgaagacatggggtaatgtgagagagtagaacacccccgtacctaataaaaatctttatttttttattaaaaaaaaagtactttggtag

SEQ ID NO: 358840 - DNA, 1263 bp, Homo sapiens
gggagagtgacgtcacttggcccgcgcttagggccctcgcggggggcttgtgggtcctcctccccctcccactgacaactgccccaactgctcttcccgccccggtcacagtgaaaatgtagacggggtcgttgtccgtacgactgtgcgccaggctcggggaggggcgccctccgcgtgagcgcccccctgggaatattgaacataatcacctctcattccagactatgttaggtcttaatggtgggaggacgcccgagtgctcggcccgtttcaccccgaggaggaaggacactgggtcatgacgccatcagagggcgccagagcagggaccggacgcgagttggagatgttggactcgctgttggccttgggcggcctggtgctgcttcgggattccgtggagtgggaggggcgcagtctcttgaaggcgcttgtcaagaaatctgcactgtgtggggagcaagtgcatatcctgggctgtgaagtgagcgaggaagagtttcgtgaaggttttgactctgatatcaacaatcggctggtttaccatgacttcttcagagaccctctcaactggtcaaaaactgaggaggcctttcctggggggccgctgggagccttgagagccatgtgcaagaggacagatcctgttcctgtcaccattgctctcgattcactcagctggctgctacttcgccttccctgcaccacactctgccaggtcctgcatgctgtgagccatcaggactcttgtcctggtgacagctcctcagtggggaaagtgagtgtgctgggcttgctacatgaagagcttcatggaccaggccctgtgggagctctcagcagccttgctcagactgaggtgaccctgggcggtaccatgggccaggcctcggcccacatcctgtgtcggaggccccgacagcgcccaactgaccagactcagtggttctccatccttccggacttcagcctggatctccaagaggggccctctgtagagtcccagccctactccgatcctcatatacccccggtggatcccacaactcatttgacctttaaccttcacctgtccaacatctttctattgtttgtgttagccttaccctgtccctgccccaccttggttccccttgtctatggagccccgccttgtgagccaggaagcagcgtctcatcaggacagaaggtaggatgaagacatggggtaatgtgagagagtagaacacccccgtacctaataaaaatctttattttttt

SEQ ID NO: 358841 - DNA, 2332 bp, Homo sapiens
gggagagtgacgtcacttggcccgcgcttagggccctcgcggggggcttgtgggtcctcctccccctcccactgacaactgccccaactgctcttcccgccccggtcacagtgaaaatgtagacggggtcgttgtccgtacgactgtgcgccaggctcggggaggggcgccctccgcgtgagcgcccccctgggaatattgaacataatcacctctcattccagactatgttaggtcttaatggtgggaggacgcccgagtgctcggcccgtttcaccccgaggaggaaggacactgggtcatgacgccatcagagggcgccagagcagggaccggacgcgagttggagatgttggactcgctgttggccttgggcggcctggtgctgcttcgggattccgtggagtgggaggggcgcagtctcttgaaggcgcttgtcaagaaatctgcactgtgtggggagcaagtgcatatcctgggctgtgaagtgagcgaggaagagtttcgtgaaggttttgactctgatatcaacaatcggctggtttaccatgacttcttcagagaccctctcaactggtcaaaaactgaggaggcctttcctggggggccgctgggagccttgagagccatgtgcaagaggacagatcctgttcctgtcaccattgctctcgattcactcagctggctgctacttcgccttccctgcaccacactctgccaggtcctgcatgctgtgagccatcaggactcttgtcctggtgacagctcctcagtggggaaagtgagtgtgctgggcttgctacatgaagagcttcatggaccaggccctgtgggagctctcagcagccttgctcagactgaggtgaccctgggcggtaccatgggccaggcctcggcccacatcactcagtggttctccatccttccggacttcagcctggatctccaagaggggccctctgtagagtcccagccctactccgatcctcatatacccccggtatctaagaatgccaaggccagaacaaggaaatgtagtttagtatctggtcacgggagagaaaataaaagctgcagaggttgggggtggggtcagggattctagggatggggcagagtggcagcatcctttgtacctacaggtggtggatcccacaactcatttgacctttaaccttcacctgtccaagaaagagagagaagccagagatagcctgatcctgcccttccagttcagttctgaaaagtaaggttgggacctgggtacgtggatccctgagtagatcccagcatctgggccatggagaggttggggcaacaggttattgattaacctgactttatagggactgaagtccacctccagagacaagtccaagttcttgatccacccattccccctataatggcagaggacctttatgtctcttttctctcccttatacccttgggtcacagctccagttgtccccagagcaccctgggcctgggctgagccagaccagacccttgggaggtggccctatccctaggcagtggtgctaggaggacagaaggctatatgggcgtggcagaggctggttaacaagggcttagtacacgcttgctgttctgtgcccagtatgtgggcggatgacgcaagactacaagatccttgccctcaagctgctaggaacttacggttttattaggagagcagtacaagggtatctatcccagtaccaaatggtgcttcagctctaacatggaggtcagagaaagggacttggaccaataaaatgacatggaggcctaacaggttgcctgaatgagagtcacagtcacctggaagaaagtatccagacccaacctgttagctaccctcaccagcaccaaatcttcccttctcagacagcaggctctcctgcggcctaggccagggcaggctaccagccacatcttctatgagccagatgcttatgatgacctggaccaagaagacccagatgacgacctggatatttgactggccagatttgattagattgtaattggagggggcgcgggaagactttgggcccagaaccatctttctattgtttgtgttagccttaccctgtccctgccccaccttggttccccttgtctatggagccccgccttgtgagccaggaagcagcgtctcatcaggacagaaggtaggatgaagacatggggtaatgtgagagagtagaacacccccgtacctaataaaaatctttatttttttattaaaaaaaaagttttaaaaaaaaaggggggggctaaaaaaccccaggggccagttagcgttccgtttttgccagggcctagt

SEQ ID NO: 358842 - DNA, 1303 bp, Homo sapiens
tccggtggtgacgtgtattcgcttcaccgggactaagttcctcctgcgcggtctatggcggactatgttaggtcttaatggtgggaggacgcccgagtgctcggcccgtttcaccccgaggaggaaggacactgggtcatgacgccatcagagggcgccagagcagggaccggacgcgagttggagatgttggactcgctgttggccttgggcggcctggtgctgcttcgggattccgtggagtgggaggggcgcagtctcttgaaggcgcttgtcaagaaatctgcactgtgtggggagcaagtgcatatcctgggctgtgaagtgagcgaggaagagtttcgtgaaggttttgactctgatatcaacaatcggctggtttaccatgacttcttcagagaccctctcaactggtcaaaaactgaggaggcctttcctggggggccgctgggagccttgagagccatgtgcaagaggacagatcctgttcctgtcactctgccaggtcctgcatgctgtgagccatcaggactcttgtcctggtgacagctcctcagtggggaaagtgagtgtgctgggcttgctacatgaagagcttcatggaccaggccctgtgggagctctcagcagccttgctcagactgaggtgaccctgggcggtaccatgggccaggcctcggcccacatcctgtgtcggaggccccgacagcgcccaactgaccagactcagtggttctccatccttccggacttcagcctggatctccaagaggggccctctgtagagtcccagccctactccgatcctcatatacccccggtggatcccacaactcatttgacctttaaccttcacctgtccaagaaagagagagaagccagagatagcctgatcctgcccttccagttcagttctgaaaaacagcaggctctcctgcggcctaggccagggcaggctaccagccacatcttctatgagccagatgcttatgatgacctggaccaagaagacccagatgacgacctggatatttgactggccagatttgattagattgtaattggagggggcgcgggaagactttgggcccagaaccatctttctattgtttgtgttagccttaccctgtccctgccccaccttggttccccttgtctatggagccccgccttgtgagccaggaagcagcgtctcatcaggacagaaggtaggatgaagacatggggtaatgtgagagagtagaacacccccgtacctaataaaaatctttatttttttattaaaaaaaaagtactttggtag

SEQ ID NO: 358843 - DNA, 1228 bp, Homo sapiens
gggagagtgacgtcacttggcccgcgcttagggccctcgcggggggcttgtgggtcctcctccccctcccactgacaactgccccaactgctcttcccgccccggtcacagtgaaaatgtagacggggtcgttgtccgtacgactgtgcgccaggctcggggaggggcgccctccgcgtgagcgcccccctgggaatattgaacataatcacctctcattccagactatgttaggtcttaatggtgggaggacgcccgagtgctcggcccgtttcaccccgaggaggaaggacactgggtcatgacgccatcagagggcgccagagcagggaccggacgcgagttggagatgttggactcgctgttggccttgggcggcctggtgctgcttcgggattccgtggagtgggaggggcgcagtctcttgaaggcgcttgtcaagaaatctgcactgtgtggggagcaagtgcatatcctgggctgtgaagtgagcgaggaagagtttcgtgaaggttttgactctgatatcaacaatcggctggtttaccatgacttcttcagagaccctctcaactggtcaaaaactgaggaggcctttcctggggggccgctgggagccttgagagccatgtgcaagaggacagatcctgttcctgtcaccattgctctcgattcactcagctggctgctacttcgccttccctgcaccacactctgccaggtcctgcatgctgtgagccatcaggactcttgtcctggtgagacccctccttcattgtttcccctcatacatctccctctgccaaggagtgtgccccttttcctttctaccctagaataaacatctgggttctccagtcagaccttttttcatttttttgacttttttgtctgtttttttttttttttacttctccttaatgccatctaccatttgcttttttttctccaagttatttttttactcatttgtttcactcattcattcatttaacaaatcaatagtaaatatatacaatgtgtcaggtacaattctagataatggcaaaatacagactgactgtagctgggtccttgccttccaggagctcgaagtcccataaaagatggagataagtaaacaggcagttacaagatggtctgataaaggccatgatgatacaggcatgcacagggcaccttaaagaagggcactcttggccgggcgcggtggctcactcctgtaatc

SEQ ID NO: 358844 - DNA, 1065 bp, Homo sapiens
gggagagtgacgtcacttggcccgcgcttagggccctcgcggggggcttgtgggtcctcctccccctcccactgacaactgccccaactgctcttcccgccccggtcacagtgaaaatgtagacggggtcgttgtccgtacgactgtgcgccaggctcggggaggggcgccctccgcgtgagcgcccccctgggaatattgaacataatcacctctcattccagactatgttaggtcttaatggtgggaggacgcccgagtgctcggcccgtttcaccccgaggaggaaggacactgggtcatgacgccatcagagggcgccagagcagggaccggacgcgagttggagatgttggactcgctgttggccttgggcggcctggtgctgcttcgggattccgtggagtgggaggggcgcagtctcttgaaggcgcttgtcaagaaatctgcactgtgtggggagcaagtgcatatcctgggctgtgaagtgagcgaggaagagtttcgtgaaggttttgactctgatatcaacaatcggctggtttaccatgacttcttcagagaccctctcaactggtaggacagatcctgttcctgtcaccattgctctcgattcactcagctggctgctacttcgccttccctgcaccacactctgccaggtcctgcatgctgtgagccatcaggactcttgtcctggtgacagctcctcagtggggaaagtgagtgtgctgggcttgctacatgaagagcttcatggaccaggccctgtgggagctctcagcagccttgctcagactgaggtgaccctgggcggtaccatgggccaggcctcggcccacatcctgtgtcggaggccccgacagcgcccaactgaccagactcagtggttctccatccttccggacttcagcctggatctccaagaggggccctctgtagagtcccagccctactccgatcctcatatacccccgacagcaggctttctgcgcctatgcagggcagctaccagcacatcttttatgagcaatgctatgatgactggacccaagagacccaatg

SEQ ID NO: 358845 - DNA, 810 bp, Homo sapiens
ttttttgcctgtgtttatctatttcttggattatggaacagaacaaacatgaacacattaccttttgcctttcctcatttcccacactctttcctagaggtaatattaagcttccaattaattttagatggtagtttcaataattttttttcactgggtattacaagtcttcatttcaaccctctgagtttggtttacttgtccatttaatactaatttagtggatacgttttaggtgctgttatggcagacccaactcaagctggtgatttctatattacttggaatcgtgctagttgctttgacaactacactcaacaacatataatatcttaaacagaacagaagtttcattcatataaactgtttttttaagataggaaaagcattgctcctttatgtccgcattcaagaacataggctactaaggtatttaatctgcagtatgttgcttccaagactactgtagaattggccgttccagtcaagcatactgaaaaacgtatacagaagagtgcatgttgggattttggagactaaattggatataaaatatgttatttctactaattttccactattttgactttaatcccatgccctaatataaagtatataagaatgagaaacatagtttatgtatctatcaaaatagaacataaatgtttgtgaacatttgaatctgtcagcttctcttgctcacgtgcctgtagtgcctgtactcaggatgctgaggcaggagaatcacaaggtgaggagatcgagaccatcctggctaacatggtgaaactctatctctactaaaaatac

SEQ ID NO: 358846 - DNA, 3361 bp, Homo sapiens
cgcccgccagccagccctccccgcggcggctcggctccttggcgctgcctggggtcctttccgcccggtccccgcttgccagcccccgctgctctgtgccctgtccggccaggcctggagccgacaccaccgccatcatgccggccgtgtccaagggcgatgggatgcgggggctcgcggtgttcatctccgacatccggaactgtaagagcaaagaggcggaaattaagagaatcaacaaggaactggccaacatccgctccaagttcaaaggagacaaagccttggatggctacagtaagaaaaaatatgtgtgtaaactgcttttcatcttcctgcttggccatgacattgactttgggcacatggaggctgtgaatctgttgagttccaataaatacacagagaagcaaataggttacctgttcatttctgtgctggtgaactcgaactcggagctgatccgcctcatcaacaacgccatcaagaatgacctggccagccgcaaccccaccttcatgtgcctggccctgcactgcatcgccaacgtgggcagccgggagatgggcgaggcctttgccgctgacatcccccgcatcctggtggccggggacagcatggacagtgtcaagcagagtgcggccctgtgcctccttcgactgtacaaggcctcgcctgacctggtgcccatgggcgagtggacggcgcgtgtggtacacctgctcaatgaccagcacatgggtgtggtcacggccgccgtcagcctcatcacctgtctctgcaagaagaacccagatgacttcaagacgtgcgtctctctggctgtgtcgcgcctgagccggatcgtctcctctgcctccaccgacctccaggactacacctactacttcgtcccagcaccctggctctcggtgaagctcctgcggctgctgcagtgctacccgcctccagaggatgcggctgtgaaggggcggctggtggaatgtctggagactgtgctcaacaaggcccaggagccccccaaatccaagaaggtgcagcattccaacgccaagaacgccatcctcttcgagaccatcagcctcatcatccactatgacagtgagcccaacctcctggttcgggcctgcaaccagctgggccagttcctgcagcaccgggagaccaacctgcgctacctggccctggagagcatgtgcacgctggccagctccgagttctcccatgaagccgtcaagacgcacattgacaccgtcatcaatgccctcaagacggagcgggacgtcagcgtgcggcagcgggcggctgacctcctctacgccatgtgtgaccggagcaatgccaagcagatcgtgtcggagatgctgcggtacctggagacggcagactacgccatccgcgaggagatcgtcctgaaggtggccatcctggccgagaagtacgccgtggactacagctggtacgtggacaccatcctcaacctcatccgcattgcgggcgactacgtgagtgaggaggtgtggtaccgtgtgctacagatcgtcaccaaccgtgatgacgtccagggctatgccgccaagaccgtctttgaggcgctccaggcccctgcctgtcacgagaacatggtgaaggttggcggctacatccttggggagtttgggaacctgattgctggggacccccgctccagccccccagtgcagttctccctgctccactccaagttccatctgtgcagcgtggccacgcgggcgctgctgctgtccacctacatcaagttcatcaacctcttccccgagaccaaggccaccatccagggcgtcctgcgggccggctcccagctgcgcaatgctgacgtggagctgcagcagcgagccgtggagtacctcaccctcagctcagtggccagcaccgacgtcctggccacggtgctggaggagatgccgcccttccccgagcgcgagtcgtccatcctggccaagctgaaacgcaagaaggggccaggggccggcagcgccctggacgatggccggagggaccccagcagcaacgacatcaacgggggcatggagcccacccccagcactgtgtcgacgccctcgccctccgccgacctcctggggctgcgggcagcccctcccccggcagcacccccggcttctgcaggagcagggaaccttctggtggacgtcttcgatggcccggccgcccagcccagcctggggcccacccccgaggaggccttcctcagcccaggtcctgaggacatcggccctcccattccggaagccgatgagttgctgaataagtttgtgtgtaagaacaacggggtcctgttcgagaaccagctgctgcagatcggagtcaagtcagagttccgacagaacctgggccgcatgtatctcttctatggcaacaagacctcggtgcagttccagaatttctcacccactgtggttcacccgggagacctccagactcagctggctgtgcagaccaagcgcgtggcggcgcaggtggacggcggcgcgcaggtgcagcaggtgctcaatatcgagtgcctgcgggacttcctgacgcccccgctgctgtccgtgcgcttccggtacggtggcgccccccaggccctcaccctgaagctcccagtgaccatcaacaagttcttccagcccaccgagatggcggcccaggatttcttccagcgctggaagcagctgagcctccctcaacaggaggcgcagaaaatcttcaaagccaaccaccccatggacgcagaagttactaaggccaagcttctggggtttggctctgctctcctggacaatgtggaccccaaccctgagaacttcgtgggggcggggatcatccagactaaagccctgcaggtgggctgtctgcttcggctggagcccaatgcccaggcccagatgtaccggctgaccctgcgcaccagcaaggagcccgtctcccgtcacctgtgtgagctgctggcacagcagttctgagccctggactctgccccgggggatgtggccggcactgggcagccccttggactgaggcagttttggtggatgggggacctccactggtgacagagaagacaccagggtttgggggatgcctgggactttcctccggccttttgtatttttatttttgttcatctgctgctgtttacattctggggggttagggggagtccccctccctccctttcccccccaagcacagaggggagaggggccagggaagtggatgtctcctcccctcccaccccaccctgttgtagcccctcctaccccctccccatccaggggctgtgtattattgtgagcgaataaacagagagacgctaaca

SEQ ID NO: 358847 - DNA, 277 bp, Homo sapiens
ggggaggctgcttcactgacctgagcgagcgagcatgggatctggatgaagtggtcatcgtggaggtaagagcaaagaggcggaaattaagagaatcaacaaggaactggccaacatccgctccaagttcaaagagagacaagagcctgtggatgcgctacgagtaagaaacaaatagtgtgtgtaaattggcttttcattcttccgtgcttggcctatgactattgacttgtgggcacagtggagggctgtgaattcgtgtcgagtttccaattaa

SEQ ID NO: 358848 - DNA, 3427 bp, Homo sapiens
cgcccgccagccagccctccccgcggcggctcggctccttggcgctgcctggggtcctttccgcccggtccccgcttgccagcccccgctgctctgtgccctgtccggccaggcctggagccgacaccaccgccatcatgccggccgtgtccaagggcgatgggatgcgggggctcgcggtgttcatctccgacatccggaactgtaagagcaaagaggcggaaattaagagaatcaacaaggaactggccaacatccgctccaagttcaaaggagacaaagccttggatggctacagtaagaaaaaatatgtgtgtaaactgcttttcatcttcctgcttggccatgacattgactttgggcacatggaggctgtgaatctgttgagttccaataaatacacagagaagcaaataggttacctgttcatttctgtgctggtgaactcgaactcggagctgatccgcctcatcaacaacgccatcaagaatgacctggccagccgcaaccccaccttcatgtgcctggccctgcactgcatcgccaacgtgggcagccgggagatgggcgaggcctttgccgctgacatcccccgcatcctggtggccggggacagcatggacagtgtcaagcagagtgcggccctgtgcctccttcgactgtacaaggcctcgcctgacctggtgcccatgggcgagtggacggcgcgtgtggtacacctgctcaatgaccagcacatgggtgtggtcacggccgccgtcagcctcatcacctgtctctgcaagaagaacccagatgacttcaagacgtgcgtctctctggctgtgtcgcgcctgagccggatcgtctcctctgcctccaccgacctccaggactacacctactacttcgtcccagcaccctggctctcggtgaagctcctgcggctgctgcagtgctacccgcctccagaggatgcggctgtgaaggggcggctggtggaatgtctggagactgtgctcaacaaggcccaggagccccccaaatccaagaaggtgcagcattccaacgccaagaacgccatcctcttcgagaccatcagcctcatcatccactatgacagtgagcccaacctcctggttcgggcctgcaaccagctgggccagttcctgcagcaccgggagaccaacctgcgctacctggccctggagagcatgtgcacgctggccagctccgagttctcccatgaagccgtcaagacgcacattgacaccgtcatcaatgccctcaagacggagcgggacgtcagcgtgcggcagcgggcggctgacctcctctacgccatgtgtgaccggagcaatgccaagcagatcgtgtcggagatgctgcggtacctggagacggcagactacgccatccgcgaggagatcgtcctgaaggtggccatcctggccgagaagtacgccgtggactacagctggtacgtggacaccatcctcaacctcatccgcattgcgggcgactacgtgagtgaggaggtgtggtaccgtgtgctacagatcgtcaccaaccgtgatgacgtccagggctatgccgccaagaccgtctttgaggcgctccaggcccctgcctgtcacgagaacatggtgaaggttggcggctacatccttggggagtttgggaacctgattgctggggacccccgctccagccccccagtgcagttctccctgctccactccaagttccatctgtgcagcgtggccacgcgggcgctgctgctgtccacctacatcaagttcatcaacctcttccccgagaccaaggccaccatccagggcgtcctgcgggccggctcccagctgcgcaatgctgacgtggagctgcagcagcgagccgtggagtacctcaccctcagctcagtggccagcaccgacgtcctggccacggtgctggaggagatgccgcccttccccgagcgcgagtcgtccatcctggccaagctgaaacgcaagaaggggccaggggccggcagcgccctggacgatggccggagggaccccagcagcaacgacatcaacgggggcatggagcccacccccagcactgtgtcgacgccctcgccctccgccgacctcctggggctgcgggcagcccctcccccggcagcacccccggcttctgcaggagcagggaaccttctggtggacgtcttcgatggcccggccgcccagcccagcctggggcccacccccgaggaggccttcctcagcgagctggagccgcctgcccccgagagccccatggctttgctggctgacccagctccagctgctgacccaggtcctgaggacatcggccctcccattccggaagccgatgagttgctgaataagtttgtgtgtaagaacaacggggtcctgttcgagaaccagctgctgcagatcggagtcaagtcagagttccgacagaacctgggccgcatgtatctcttctatggcaacaagacctcggtgcagttccagaatttctcacccactgtggttcacccgggagacctccagactcagctggctgtgcagaccaagcgcgtggcggcgcaggtggacggcggcgcgcaggtgcagcaggtgctcaatatcgagtgcctgcgggacttcctgacgcccccgctgctgtccgtgcgcttccggtacggtggcgccccccaggccctcaccctgaagctcccagtgaccatcaacaagttcttccagcccaccgagatggcggcccaggatttcttccagcgctggaagcagctgagcctccctcaacaggaggcgcagaaaatcttcaaagccaaccaccccatggacgcagaagttactaaggccaagcttctggggtttggctctgctctcctggacaatgtggaccccaaccctgagaacttcgtgggggcggggatcatccagactaaagccctgcaggtgggctgtctgcttcggctggagcccaatgcccaggcccagatgtaccggctgaccctgcgcaccagcaaggagcccgtctcccgtcacctgtgtgagctgctggcacagcagttctgagccctggactctgccccgggggatgtggccggcactgggcagccccttggactgaggcagttttggtggatgggggacctccactggtgacagagaagacaccagggtttgggggatgcctgggactttcctccggccttttgtatttttatttttgttcatctgctgctgtttacattctggggggttagggggagtccccctccctccctttcccccccaagcacagaggggagaggggccagggaagtggatgtctcctcccctcccaccccaccctgttgtagcccctcctaccccctccccatccaggggctgtgtattattgtgagcgaataaacagagagacgctaaca

SEQ ID NO: 358849 - DNA, 3102 bp, Homo sapiens
cgcccgccagccagccctccccgcggcggctcggctccttggcgctgcctggggtcctttccgcccggtccccgcttgccagcccccgctgctctgtgccctgtccggccaggcctggagccgacaccaccgccatcatgccggccgtgtccaagggcgatgggatgcgggggctcgcggtgttcatctccgacatccggaactgtaagagcaaagaggcggaaattaagagaatcaacaaggaactggccaacatccgctccaagttcaaaggagacaaagccttggatggctacagtaagaaaaaatatgtgtgtaaactgcttttcatcttcctgcttggccatgacattgactttgggcacatggaggctgtgaatctgttgagttccaataaatacacagagaagcaaataggttacctgttcatttctgtgctggtgaactcgaactcggagctgatccgcctcatcaacaacgccatcaagaatgacctggccagccgcaaccccaccttcatgtgcctggccctgcactgcatcgccaacgtgggcagccgggagatgggcgaggcctttgccgctgacatcccccgcatcctggtggccggggacagcatggacagtgtcaagcagagtgcggccctgtgcctccttcgactgtacaaggcctcgcctgacctggtgcccatgggcgagtggacggcgcgtgtggtacacctgctcaatgaccagcacatgggtgtggtcacggccgccgtcagcctcatcacctgtctctgcaagaagaacccagatgacttcaagacgtgcgtctctctggctgtgtcgcgcctgagccggatcgtctcctctgcctccaccgacctccaggactacacctactacttcgtcccagcaccctggctctcggtgaagctcctgcggctgctgcagtgctacccgcctccagaggatgcggctgtgaaggggcggctggtggaatgtctggagactgtgctcaacaaggcccaggagccccccaaatccaagaaggtgcagcattccaacgccaagaacgccatcctcttcgagaccatcagcctcatcatccactatgacagtgagcccaacctcctggttcgggcctgcaaccagctgggccagttcctgcagcaccgggagaccaacctgcgctacctggccctggagagcatgtgcacgctggccagctccgagttctcccatgaagccgtcaagacgcacattgacaccgtcatcaatgccctcaagacggagcgggacgtcagcgtgcggcagcgggcggctgacctcctctacgccatgtgtgaccggagcaatgccaagcagatcgtgtcggagatgctgcggtacctggagacggcagactacgccatccgcgaggagatcgtcctgaaggtggccatcctggccgagaagtacgccgtggactacagctggtacgtggacaccatcctcaacctcatccgcattgcgggcgactacgtgagtgaggaggtgtggtaccgtgtgctacagatcgtcaccaaccgtgatgacgtccagggctatgccgccaagaccgtctttgaggcgctccaggcccctgcctgtcacgagaacatggtgaaggttggcggctacatccttggggagtttgggaacctgattgctggggacccccgctccagccccccagtgcagttctccctgctccactccaactgaaacgcaagaaggggccaggggccggcagcgccctggacgatggccggagggaccccagcagcaacgacatcaacgggggcatggagcccacccccagcactgtgtcgacgccctcgccctccgccgacctcctggggctgcgggcagcccctcccccggcagcacccccggcttctgcaggagcagggaaccttctggtggacgtcttcgatggcccggccgcccagcccagcctggggcccacccccgaggaggccttcctcagcccaggtcctgaggacatcggccctcccattccggaagccgatgagttgctgaataagtttgtgtgtaagaacaacggggtcctgttcgagaaccagctgctgcagatcggagtcaagtcagagttccgacagaacctgggccgcatgtatctcttctatggcaacaagacctcggtgcagttccagaatttctcacccactgtggttcacccgggagacctccagactcagctggctgtgcagaccaagcgcgtggcggcgcaggtggacggcggcgcgcaggtgcagcaggtgctcaatatcgagtgcctgcgggacttcctgacgcccccgctgctgtccgtgcgcttccggtacggtggcgccccccaggccctcaccctgaagctcccagtgaccatcaacaagttcttccagcccaccgagatggcggcccaggatttcttccagcgctggaagcagctgagcctccctcaacaggaggcgcagaaaatcttcaaagccaaccaccccatggacgcagaagttactaaggccaagcttctggggtttggctctgctctcctggacaatgtggaccccaaccctgagaacttcgtgggggcggggatcatccagactaaagccctgcaggtgggctgtctgcttcggctggagcccaatgcccaggcccagatgtaccggctgaccctgcgcaccagcaaggagcccgtctcccgtcacctgtgtgagctgctggcacagcagttctgagccctggactctgccccgggggatgtggccggcactgggcagccccttggactgaggcagttttggtggatgggggacctccactggtgacagagaagacaccagggtttgggggatgcctgggactttcctccggccttttgtatttttatttttgttcatctgctgctgtttacattctggggggttagggggagtccccctccctccctttcccccccaagcacagaggggagaggggccagggaagtggatgtctcctcccctcccaccccaccctgttgtagcccctcctaccccctccccatccaggggctgtgtattattgtgagcgaataaacagagagacgctaaca

SEQ ID NO: 358850 - DNA, 2961 bp, Homo sapiens
cgcccgccagccagccctccccgcggcggctcggctccttggcgctgcctggggtcctttccgcccggtccccgcttgccagcccccgctgctctgtgccctgtccggccaggcctggagccgacaccaccgccatcatgccggccgtgtccaagggcgatgggatgcgggggctcgcggtgttcatctccgacatccggaactgtaagagcaaagaggcggaaattaagagaatcaacaaggaactggccaacatccgctccaagttcaaaggagacaaagccttggatggctacagtaagaaaaaatatgtgtgtaaactgcttttcatcttcctgcttggccatgacattgactttgggcacatggaggctgtgaatctgttgagttccaataaatacacagagaagcaaataggttacctgttcatttctgtgctggtgaactcgaactcggagctgatccgcctcatcaacaacgccatcaagaatgacctggccagccgcaaccccaccttcatgtgcctggccctgcactgcatcgccaacgtgggcagccgggagatgggcgaggcctttgccgctgacatcccccgcatcctggtggccggggacagcatggacagtgtcaagcagagtgcggccctgtgcctccttcgactgtacaaggcctcgcctgacctggtgcccatgggcgagtggacggcgcgtgtggtacacctgctcaatgaccagcacatgggtgtggtcacggccgccgtcagcctcatcacctgtctctgcaagaagaacccagatgacttcaagacgtgcgtctctctggctgtgtcgcgcctgagccggatcgtctcctctgcctccaccgacctccaggactacacctactacttcgtcccagcaccctggctctcggtgaagctcctgcggctgctgcagtgctacccgcctccagaggatgcggctgtgaaggggcggctggtggaatgtctggagactgtgctcaacaaggcccaggagccccccaaatccaagaaggtgcagcattccaacgccaagaacgccatcctcttcgagaccatcagcctcatcatccactatgacagtgagcccaacctcctggttcgggcctgcaaccagctgggccagttcctgcagcaccgggagaccaacctgcgctacctggccctggagagcatgtgcacgctggccagctccgagttctcccatgaagccgtcaagacgcacattgacaccgtcatcaatgccctcaagacggagcgggacgtcagcgtgcggcagcgggcggctgacctcctctacgccatgtgtgaccggagcaatgccaagcagatcgtgtcggagatgctgcggtacctggagacggcagactacgccatccgcgaggagatcgtcctgaaggtggccatcctggccgagaagtacgccgtggactacagctggtacgtggacaccatcctcaacctcatccgcattgcgggcgactacgtgagtgaggaggtgtggtaccgtgtgctacagatcgtcaccaaccgtgatgacgtccagggctatgccgccaagaccgtctttgaggcgctccaggcccctgcctgtcacgagaacatggtgaaggttggcggctacatccttggggagtttgggaacctgattgctggggacccccgctccagtcgacgccctcgccctccgccgacctcctggggctgcgggcagcccctcccccggcagcacccccggcttctgcaggagcagggaaccttctggtggacgtcttcgatggcccggccgcccagcccagcctggggcccacccccgaggaggccttcctcagcccaggtcctgaggacatcggccctcccattccggaagccgatgagttgctgaataagtttgtgtgtaagaacaacggggtcctgttcgagaaccagctgctgcagatcggagtcaagtcagagttccgacagaacctgggccgcatgtatctcttctatggcaacaagacctcggtgcagttccagaatttctcacccactgtggttcacccgggagacctccagactcagctggctgtgcagaccaagcgcgtggcggcgcaggtggacggcggcgcgcaggtgcagcaggtgctcaatatcgagtgcctgcgggacttcctgacgcccccgctgctgtccgtgcgcttccggtacggtggcgccccccaggccctcaccctgaagctcccagtgaccatcaacaagttcttccagcccaccgagatggcggcccaggatttcttccagcgctggaagcagctgagcctccctcaacaggaggcgcagaaaatcttcaaagccaaccaccccatggacgcagaagttactaaggccaagcttctggggtttggctctgctctcctggacaatgtggaccccaaccctgagaacttcgtgggggcggggatcatccagactaaagccctgcaggtgggctgtctgcttcggctggagcccaatgcccaggcccagatgtaccggctgaccctgcgcaccagcaaggagcccgtctcccgtcacctgtgtgagctgctggcacagcagttctgagccctggactctgccccgggggatgtggccggcactgggcagccccttggactgaggcagttttggtggatgggggacctccactggtgacagagaagacaccagggtttgggggatgcctgggactttcctccggccttttgtatttttatttttgttcatctgctgctgtttacattctggggggttagggggagtccccctccctccctttcccccccaagcacagaggggagaggggccagggaagtggatgtctcctcccctcccaccccaccctgttgtagcccctcctaccccctccccatccaggggctgtgtattattgtgagcgaataaacagagagacgctaaca

SEQ ID NO: 358851 - DNA, 2674 bp, Homo sapiens
cgcccatctcccggctgcccacgttggcgaatgcagtgcagggccagcacatgggtgtggtcacggccgccgtcagcctcatcacctgtctctgcaagaagaacccagatgacttcaagacgtgcgtctctctggctgtgtcgcgcctgagccggatcgtctcctctgcctccaccgacctccaggactacacctactacttcgtcccagcaccctggctctcggtgaagctcctgcggctgctgcagtgctacccgcctccagaggatgcggctgtgaaggggcggctggtggaatgtctggagactgtgctcaacaaggcccaggagccccccaaatccaagaaggtgcagcattccaacgccaagaacgccatcctcttcgagaccatcagcctcatcatccactatgacagtgagcccaacctcctggttcgggcctgcaaccagctgggccagttcctgcagcaccgggagaccaacctgcgctacctggccctggagagcatgtgcacgctggccagctccgagttctcccatgaagccgtcaagacgcacattgacaccgtcatcaatgccctcaagacggagcgggacgtcagcgtgcggcagcgggcggctgacctcctctacgccatgtgtgaccggagcaatgccaagcagatcgtgtcggagatgctgcggtacctggagacggcagactacgccatccgcgaggagatcgtcctgaaggtggccatcctggccgagaagtacgccgtggactacagctggtacgtggacaccatcctcaacctcatccgcattgcgggcgactacgtgagtgaggaggtgtggtaccgtgtgctacagatcgtcaccaaccgtgatgacgtccagggctatgccgccaagaccgtctttgaggcgctccaggcccctgcctgtcacgagaacatggtgaaggttggcggctacatccttggggagtttgggaacctgattgctggggacccccgctccagccccccagtgcagttctccctgctccactccaagttccatctgtgcagcgtggccacgcgggcgctgctgctgtccacctacatcaagttcatcaacctcttccccgagaccaaggccaccatccagggcgtcctgcgggccggctcccagctgcgcaatgctgacgtggagctgcagcagcgagccgtggagtacctcaccctcagctcagtggccagcaccgacgtcctggccacggtgctggaggagatgccgcccttccccgagcgcgagtcgtccatcctggccaagctgaaacgcaagaaggggccaggggccggcagcgccctggacgatggccggagggaccccagcagcaacgacatcaacgggggcatggagcccacccccagcactgtgtcgacgccctcgccctccgccgacctcctggggctgcgggcagcccctcccccggcagcacccccggcttctgcaggagcagggaaccttctggtggacgtcttcgatggcccggccgcccagcccagcctggggcccacccccgaggaggccttcctcagcccaggtcctgaggacatcggccctcccattccggaagccgatgagttgctgaataagtttgtgtgtaagaacaacggggtcctgttcgagaaccagctgctgcagatcggagtcaagtcagagttccgacagaacctgggccgcatgtatctcttctatggcaacaagacctcggtgcagttccagaatttctcacccactgtggttcacccgggagacctccagactcagctggctgtgcagaccaagcgcgtggcggcgcaggtggacggcggcgcgcaggtgcagcaggtgctcaatatcgagtgcctgcgggacttcctgacgcccccgctgctgtccgtgcgcttccggtacggtggcgccccccaggccctcaccctgaagctcccagtgaccatcaacaagttcttccagcccaccgagatggcggcccaggatttcttccagcgctggaagcagctgagcctccctcaacaggaggcgcagaaaatcttcaaagccaaccaccccatggacgcagaagttactaaggccaagcttctggggtttggctctgctctcctggacaatgtggaccccaaccctgagaacttcgtgggggcggggatcatccagactaaagccctgcaggtgggctgtctgcttcggctggagcccaatgcccaggcccagatgtaccggctgaccctgcgcaccagcaaggagcccgtctcccgtcacctgtgtgagctgctggcacagcagttctgagccctggactctgccccgggggatgtggccggcactgggcagccccttggactgaggcagttttggtggatgggggacctccactggtgacagagaagacaccagggtttgggggatgcctgggactttcctccggccttttgtatttttatttttgttcatctgctgctgtttacattctggggggttagggggagtccccctccctccctttcccccccaagcacagaggggagaggggccagggaagtggatgtctcctcccctcccaccccaccctgttgtagcccctcctaccccctccccatccaggggctgtgtattattgtgagcgaataaacagagagacgctaaca

SEQ ID NO: 358852 - DNA, 2146 bp, Homo sapiens
cgcccgccagccagccctccccgcggcggctcggctccttggcgctgcctggggtcctttccgcccggtccccgcttgccagcccccgctgctctgtgccctgtccggccaggcctggagccgacaccaccgccatcatgccggccgtgtccaagggcgatgggatgcgggggctcgcggtgttcatctccgacatccggaactgtaagagcaaagaggcggaaattaagagaatcaacaaggaactggccaacatccgctccaagttcaaaggagacaaagccttggatggctacagtaagaaaaaatatgtgtgtaaactgcttttcatcttcctgcttggccatgacattgactttgggcacatggaggctgtgaatctgttgagttccaataaatacacagagaagcaaataggttacctgttcatttctgtgctggtgaactcgaactcggagctgatccgcctcatcaacaacgccatcaagaatgacctggccagccgcaaccccaccttcatgtgcctggccctgcactgcatcgccaacgtgggcagccgggagatgggcgaggcctttgccgctgacatcccccgcatcctggtggccggggacagcatggacagtgtcaagcagagtgcggccctgtgcctccttcgactgtacaaggcctcgcctgacctggtgcccatgggcgagtggacggcgcgtgtggtacacctgctcaatgaccagcacatgggtgtggtcacggccgccgtcagcctcatcacctgtctctgcaagaagaacccagatgacttcaagacgtgcgtctctctggctgtgtcgcgcctgagccggatcgtctcctctgcctccaccgacctccaggactacacctactacttcgtcccagcaccctggctctcggtgaagctcctgcggctgctgcagtgctacccgcctccagaggatgcggctgtgaaggggcggctggtggaatgtctggagactgtgctcaacaaggcccaggagccccccaaatccaagaaggtgcagcattccaacgccaagaacgccatcctcttcgagaccatcagcctcatcatccactatgacagtgagcccaacctcctggttcgggcctgcaaccagctgggccagttcctgcagcaccgggagaccaacctgcgctacctggccctggagagcatgtgcacgctggccagctccgagttctcccatgaagccgtcaagacgcacattgacaccgtcatcaatgccctcaagacggagcgggacgtcagcgtgcggcagcgggcggctgacctcctctacgccatgtgtgaccggagcaatgccaagcagatcgtgtcggagatgctgcggtacctggagacggcagactacgccatccgcgaggagatcgtcctgaaggtggccatcctggccgagaagtacgccgtggactacagctggtacgtggacaccatcctcaacctcatccgcattgcgggcgactacgtgagtgaggaggtgtggtaccgtgtgctacagatcgtcaccaaccgtgatgacgtccagggctatgccgccaagaccgtctttgaggcgctccaggcccctgcctgtcacgagaacatggtgaaggttggcggctacatccttggggagtttgggaacctgattgctggggacccccgctccagccccccagtgcagttctccctgctccactccaagttccatctgtgcagcgtggccacgcgggcgctgctgctgtccacctacatcaagttcatcaacctctctcccctcccaccccaccctgttgtagcccctcctaccccctccccatccaggggctgtgtattattgtgagcgaataaacagagagacgctaacagccccatgtctgtgtccatcacccactgctaggtagtcaaagaagtggggtgagggcatgcagagtgtgggtggccaggcttcgcagcccatgggtgggactctggggagacagcagcagcagcagccgccgaagccccagctgcaaggccaccagacgcactcctgtgcctggttcctcagtccccaacaccaggtagcaagctctgggcagctgggcctggtagacctcatcttctgtcttctctggtggccctggc

SEQ ID NO: 358853 - DNA, 1712 bp, Homo sapiens
cgcccgccagccagccctccccgcggcggctcggctccttggcgctgcctggggtcctttccgcccggtccccgcttgccagcccccgctgctctgtgccctgtccggccaggcctggagccgacaccaccgccatcatgccggccgtgtccaagggcgatgggatgcgggggctcgcggtgttcatctccgacatccggaactgtaagagcaaagaggcggaaattaagagaatcaacaaggaactggccaacatccgctccaagttcaaaggagacaaagccttggatggctacagtaagaaaaaatatgtgtgtaaactgcttttcatcttcctgcttggccatgacattgactttgggcacatggaggctgtgaatctgttgagttccaataaatacacagagaagcaaataggttacctgttcatttctgtgctggtgaactcgaactcggagctgatccgcctcatcaacaacgccatcaagaatgacctggccagccgcaaccccaccttcatgtgcctggccctgcactgcatcgccaacgtgggcagccgggagatgggcgaggcctttgccgctgacatcccccgcatcctggtggccggggacagcatggacagtgtcaagcagagtgcggccctgtgcctccttcgactgtacaaggcctcgcctgacctggtgcccatgggcgagtggacggcgcgtgtggtacacctgctcaatgaccagcacatgggtgtggtcacggccgccgtcagcctcatcacctgtctctgcaagaagaacccagatgacttcaagacgtgcgtctctctggctgtgtcgcgcctgagccggatcgtctcctctgcctccaccgacctccaggactacacctactacttcgtcccagcaccctggctctcggtgaagctcctgcggctgctgcagtgctacccgcctccagaggatgcggctgtgaaggggcggctggtggaatgtctggagactgtgctcaacaaggcccaggagccccccaaatccaagaaggtgcagcattccaacgccaagaacgccatcctcttcgagaccatcagcctcatcatccactatgacagtgagcccaacctcctggttcgggcctgcaaccagctgggccagttcctgcagcaccgggagaccaacctgcgctacctggccctggagagcatgtgcacgctggccagctccgagttctcccatgaagccgtcaagacgcacattgacaccgtcatcaatgccctcaagacggagcgggacgtcagcgtgcggcagcgggcggctgacctcctctacgccatgtgtgaccggagcaatgccaagcagatcgtgtcggagatgctgcggtacctggagacggcagactacgccatccgcgaggagatcgtcctgaaggtggccatcctggccgagaagtacgccgtggactacagctggtacgtggacaccatcctcaacctcatccgcattgcgggcgactacgtgagtgaggaggtgtggtaccgtgtgctacagatcgtcaccaaccgtgatgacgtccagggctatgccgccaagaccgtctttgaggcgctccaggcccctgcctgtcacgagaacatggtgaaggttggcggctacatccttggggagtttgggaacctgattgctggggacccccgctccaggtaaggctccctcagcctgcag

SEQ ID NO: 358854 - DNA, 679 bp, Homo sapiens
ggccgtccaggtccctgacttgaaccttcccggtccccagccctcaacaggaggcgcagaaaatcttcaaagccaaccaccccatggacgcagaagttactaaggccaagcttctggggtttggctctgctctcctggacaatgtggaccccaaccctgagaacttcgtgggggcggggatcatccagactaaagccctgcaggtgggctgtctgcttcggctggagcccaatgcccaggcccagatgtaccggctgaccctgcgcaccagcaaggagcccgtctcccgtcacctgtgtgagctgctggcacagcagttctgagccctggactctgccccgggggatgtggccggcactgggcagccccttggactgaggcagttttggtggatgggggacctccactggtgacagagaagacaccagggtttgggggatgcctgggactttcctccggccttttgtatttttatttttgttcatctgctgctgtttacattctggggggttagggggagtccccctccctccctttcccccccaagcacagaggggagaggggccagggaagtggatgtctcctcccctcccaccccaccctgttgtagcccctcctaccccctccccatccaggggctgtgtattattgtgagcgaataaacagagagacgctaaca

SEQ ID NO: 358855 - DNA, 419 bp, Homo sapiens
tctgccgatgcgggggcacgggccagggttctattcccattggaggccactgctggatggatgcgaggttcctcgaggctctgtgaggggtctggatatgtggttctggggttctgtccttagggcttgttctcgcactcaatcgctctgggcctttgcccctccccaccaagttccttcccatctcactctgctccatgcctccagcccaggtcctgaggacatcggccctcccattccggaagccgatgagttgctgaataagtgagtcctgggagtggtgggggaggggaacgggacaggtgcggagcccaggccaggtgcagacaggcacccccgtcatcttgcgccccctgccccctcaggtttgtgtgtaagaacaacggggtcctgttcgagaaccagctgctgcagatcgg

SEQ ID NO: 358856 - DNA, 444 bp, Homo sapiens
ggctaatttttttgtagagatggggtcttgccatgttgcccaggcttacacatgtccagaggctaagagaggttaagtggttgcccacagccactcaggtggttaagagctgggattcaaacccaagtcagcctccagagctaatactattatgtctcagtgcggtgtgacattgtggaaggccaaaggaggcacctagggggcgcctcagaggtttccatagtatgaactttgtagttgaaccttgtaggattgagtccaggattgcaccatggggtccctcaaagacctgcaggcgggagctgccgggagctctggggttcctgacccagacctcccgggggcccacctcctctgtctggcttccttgactcctggcgggcacagctggctgtgcagaccaagcgcgtggcggcgcaggtggacggcggcgcgcaggtgcag

SEQ ID NO: 358857 - DNA, 307 bp, Homo sapiens
tatcctttccacctttctctcatcttttataattttcttcctctctggcgcctctgttgatttcagtcttacatttttctctcctgtgtcttgtatcacctttctggcccctttatccttccttccttctatctcccttgggtcccgacttccctgggctccccatctcctctgagttctgcccccaatgcccccacccagatgtaccggctgaccctgcgcaccagcaaggagcccgtctcccgtcacctgtgtgagctgctggcacagcagttctgagccctggactctgccccgggggatgtgg

SEQ ID NO: 358858 - DNA, 3110 bp, Homo sapiens
cgcccgccagccagccctccccgcggcggctcggctccttggcgctgcctggggtcctttccgcccggtccccgcttgccagcccccgctgctctgtgccctgtccggccaggcctggagccgacaccaccgccatcatgccggccgtgtccaagggcgatgggatgcgggggctcgcggtgttcatctccgacatccggaactgtaagagcaaagaggcggaaattaagagaatcaacaaggaactggccaacatccgctccaagttcaaaggagacaaagccttggatggctacagtaagaaaaaatatgtgtgtaaactgcttttcatcttcctgcttggccatgacattgactttgggcacatggaggctgtgaatctgttgagttccaataaatacacagagaagcaaataggttacctgttcatttctgtgctggtgaactcgaactcggagctgatccgcctcatcaacaacgccatcaagaatgacctggccagccgcaaccccaccttcatgtgcctggccctgcactgcatcgccaacgtgggcagccgggagatgggcgaggcctttgccgctgacatcccccgcatcctggtggccggggacagcatggacagtgtcaagcagagtgcggccctgtgcctccttcgactgtacaaggcctcgcctgacctggtgcccatgggcgagtggacggcgcgtgtggtacacctgctcaatgaccagcacatgggtgtggtcacggccgccgtcagcctcatcacctgtctctgcaagaagaacccagatgacttcaagacgtgcgtctctctggctgtgtcgcgcctgagccggatcgtctcctctgcctccaccgacctccaggactacacctactacttcgtcccagcaccctggctctcggtgaagctcctgcggctgctgcagtgctacccgcctccagaggatgcggctgtgaaggggcggctggtggaatgtctggagactgtgctcaacaaggcccaggagccccccaaatccaagaaggtgcagcattccaacgccaagaacgccatcctcttcgagaccatcagcctcatcatccactatgacagtgagcccaacctcctggttcgggcctgcaaccagctgggccagttcctgcagcaccgggagaccaacctgcgctacctggccctggagagcatgtgcacgctggccagctccgagttctcccatgaagccgtcaagacgcacattgacaccgtcatcaatgccctcaagacggagcgggacgtcagcgtgcggcagcgggcggctgacctcctctacgccatgtgtgaccggagcaatgccaagcagatcgtgtcggagatgctgcggtacctggagacggcagactacgccatccgcgaggagatcgtcctgaaggtggccatcctggccgagaagtacgccgtggactacagctggtacgtggacaccatcctcaacctcatccgcattgcgggcgactacgtgagtgaggaggtgtggtaccgtgtgctacagatcgtcaccaaccgtgatgacgtccagggctatgccgccaagaccgtctttgaggcgctccaggcccctgcctgtcacgagaacatggtgaaggttggcggctacatccttggggagtttgggaacctgattgctggggacccccgctccagccccccagtgcagttctccctgctccactccaagttccatctgtgcagcgtggccacgcgggcgctgctgctgtccacctacatcaagttcatcaacctcttccccgagaccaaggccaccatccagggcgtcctgcgggccggctcccagctgcgcaatgctgacgtggagctgcagcagcgagccgtggagtacctcaccctcagctcagtggccagcaccgacgtcctggccacggtgctggaggagatgccgcccttccccgagcgcgagtcgtccatcctggccaagctgaaacgcaagaaggggccaggggccggcagcgccctggacgatggccggagggaccccagcagcaacgacatcaacgggggcatggagcccacccccagcactgtgtcgacgccctcgccctccgccgacctcctggggctgcgggcagcccctcccccggcagcacccccggcttctgcaggagcagggaaccttctggtggacgtcttcgatggcccggccgcccagcccagcctggggcccacccccgaggaggccttcctcagcccaggtcctgaggacatcggccctcccattccggaagccgatgagttgctgaataagtttgtgtgtaagaacaacggggtcctgttcgagaaccagctgctgcagatcggagtcaagtcagagttccgacagaacctgggccgcatgtatctcttctatggcaacaagacctcggtgcagttccagaatttctcacccactgtggttcacccgggagacctccagactcagctggctgtgcagaccaagcgcgtggcggcgcaggtggacggcggcgcgcaggtgcagcaggtgctcaatatcgagtgcctgcgggacttcctgacgcccccgctgctgtccgtgcgcttccggtacggtggcgccccccaggccctcaccctgaagctcccagtgaccatcaacaagttcttccagcccaccgagatggcggcccaggatttcttccagcgctggaagcagctgagcctccctcaacaggaggcgcagaaaatcttcaaagccaaccaccccatggacgcagaagttactaaggccaagcttctggggtttggctctgctctcctggacaatgtggaccccaacctggtgacagagaagacaccagggtttgggggatgcctgggactttcctccggccttttgtatttttatttttgttcatctgctgctgtttacattctggggggttagggggagtccccctccctccctttcccccccaagcacagaggggagaggggccagggaagtggatgtctcctcccctcccaccccaccctgttgtagcccctcctaccccctccccatccaggggctgtgtattattgtgagcgaataaacagagagacgctaaca

SEQ ID NO: 358859 - DNA, 3620 bp, Homo sapiens
cgcccgccagccagccctccccgcggcggctcggctccttggcgctgcctggggtcctttccgcccggtccccgcttgccagcccccgctgctctgtgccctgtccggccaggcctggagccgacaccaccgccatcatgccggccgtgtccaagggcgatgggatgcgggggctcgcggtgttcatctccgacatccggaactgtaagagcaaagaggcggaaattaagagaatcaacaaggaactggccaacatccgctccaagttcaaaggagacaaagccttggatggctacagtaagaaaaaatatgtgtgtaaactgcttttcatcttcctgcttggccatgacattgactttgggcacatggaggctgtgaatctgttgagttccaataaatacacagagaagcaaataggttacctgttcatttctgtgctggtgaactcgaactcggagctgatccgcctcatcaacaacgccatcaagaatgacctggccagccgcaaccccaccttcatgtgcctggccctgcactgcatcgccaacgtgggcagccgggagatgggcgaggcctttgccgctgacatcccccgcatcctggtggccggggacagcatggacagtgtcaagcagagtgcggccctgtgcctccttcgactgtacaaggcctcgcctgacctggtgcccatgggcgagtggacggcgcgtgtggtacacctgctcaatgaccagcacatgggtgtggtcacggccgccgtcagcctcatcacctgtctctgcaagaagaacccagatgacttcaagacgtgcgtctctctggctgtgtcgcgcctgagccggatcgtctcctctgcctccaccgacctccaggactacacctactacttcgtcccagcaccctggctctcggtgaagctcctgcggctgctgcagtgctacccgcctccagaggatgcggctgtgaaggggcggctggtggaatgtctggagactgtgctcaacaaggcccaggagccccccaaatccaagaaggtgcagcattccaacgccaagaacgccatcctcttcgagaccatcagcctcatcatccactatgacagtgagcccaacctcctggttcgggcctgcaaccagctgggccagttcctgcagcaccgggagaccaacctgcgctacctggccctggagagcatgtgcacgctggccagctccgagttctcccatgaagccgtcaagacgcacattgacaccgtcatcaatgccctcaagacggagcgggacgtcagcgtgcggcagcgggcggctgacctcctctacgccatgtgtgaccggagcaatgccaagcagatcgtgtcggagatgctgcggtacctggagacggcagactacgccatccgcgaggagatcgtcctgaaggtggccatcctggccgagaagtacgccgtggactacagctggtacgtggacaccatcctcaacctcatccgcattgcgggcgactacgtgagtgaggaggtgtggtaccgtgtgctacagatcgtcaccaaccgtgatgacgtccagggctatgccgccaagaccgtctttgaggcgctccaggcccctgcctgtcacgagaacatggtgaaggttggcggctacatccttggggagtttgggaacctgattgctggggacccccgctccagccccccagtgcagttctccctgctccactccaagttccatctgtgcagcgtggccacgcgggcgctgctgctgtccacctacatcaagttcatcaacctcttccccgagaccaaggccaccatccagggcgtcctgcgggccggctcccagctgcgcaatgctgacgtggagctgcagcagcgagccgtggagtacctcaccctcagctcagtggccagcaccgacgtcctggccacggtgctggaggagatgccgcccttccccgagcgcgagtcgtccatcctggccaagctgaaacgcaagaaggggccaggggccggcagcgccctggacgatggccggagggaccccagcagcaacgacatcaacgggggcatggagcccacccccagcactgtgtcgacgccctcgccctccgccgacctcctggggctgcgggcagcccctcccccggcagcacccccggcttctgcaggagcagggaaccttctggtggacgtcttcgatggcccggccgcccagcccagcctggggcccacccccgaggaggccttcctcagcccaggtcctgaggacatcggccctcccattccggaagccgatgagttgctgaataagtttgtgtgtaagaacaacggggtcctgttcgagaaccagctgctgcagatcggagtcaagtcagagttccgacagaacctgggccgcatgtatctcttctatggcaacaagacctcggtgcagttccagaatttctcacccactgtggttcacccgggagacctccagactcagctggctgtgcagaccaagcgcgtggcggcgcaggtggacggcggcgcgcaggtgcagcaggtgctcaatatcgagtgcctgcgggacttcctgacgcccccgctgctgtccgtgcgcttccggtacggtggcgccccccaggccctcaccctgaagctcccagtgaccatcaacaagttcttccagcccaccgagatggcggcccaggatttcttccagcgctggaagcagctgagcctccctcaacaggaggcgcagaaaatcttcaaagccaaccaccccatggacgcagaagttactaaggccaagcttctggggtttggctctgctctcctggacaatgtggaccccaaccctgagaacttcgtgggggcggggatcatccagactaaagccctgcaggtgggctgtctgcttcggctggagcccaatgcccaggcccagatgtaccggctgaccctgcgcaccagcaaggagcccgtctcccgtcacctgtgtgagctgctggcacagcagttctgagccctggactctgccccgggggatgtggccggcactgggcagccccttggactgaggcagttttggtggatgggggacctccactggtgacagagaagacaccagggtttgggggatgcctgggactttcctccggccttttgtatttttatttttgttcatctgctgctgtttacattctggggggttagggggagtccccctccctccctttcccccccaagcacagaggggagaggggccagggaagtggatgtctcctcccctcccaccccaccctgttgtagcccctcctaccccctccccatccaggggctgtgtattattgtgagcgaataaacagagagacgctaacagccccatgtctgtgtccatcacccactgctaggtagtcaaagaagtggggtgagggcatgcagagtgtgggtggccaggcttcgcagcccatgggtgggactctggggagacagcagcagcagcagccgccgaagccccagctgcaaggccaccagacgcactcctgtgcctggttcctcagtccccaacaccaggtagcaagctctgggcagctgggcctggtagacctcatcttctgtcttctctggtggccctggc

SEQ ID NO: 358860 - DNA, 3291 bp, Homo sapiens
cgcccgccagccagccctccccgcggcggctcggctccttggcgctgcctggggtcctttccgcccggtccccgcttgccagcccccgctgctctgtgccctgtccggccaggcctggagccgacaccaccgccatcatgccggccgtgtccaagggcgatgggatgcgggggctcgcggtgttcatctccgacatccggaactgtaagagcaaagaggcggaaattaagagaatcaacaaggaactggccaacatccgctccaagttcaaaggagacaaagccttggatggctacagtaagaaaaaatatgtgtgtaaactgcttttcatcttcctgcttggccatgacattgactttgggcacatggaggctgtgaatctgttgagttccaataaatacacagagaagcaaataggttacctgttcatttctgtgctggtgaactcgaactcggagctgatccgcctcatcaacaacgccatcaagaatgacctggccagccgcaaccccaccttcatgtgcctggccctgcactgcatcgccaacgtgggcagccgggagatgggcgaggcctttgccgctgacatcccccgcatcctggtggccggggacagcatggacagtgtcaagcagagtgcggccctgtgcctccttcgactgtacaaggcctcgcctgacctggtgcccatgggcgagtggacggcgcgtgtggtacacctgctcaatgaccagcacatgggtgtggtcacggccgccgtcagcctcatcacctgtctctgcaagaagaacccagatgacttcaagacgtgcgtctctctggctgtgtcgcgcctgagccggatcgtctcctctgcctccaccgacctccaggactacacctactacttcgtcccagcaccctggctctcggtgaagctcctgcggctgctgcagtgctacccgcctccagaggatgcggctgtgaaggggcggctggtggaatgtctggagactgtgctcaacaaggcccaggagccccccaaatccaagaaggtgcagcattccaacgccaagaacgccatcctcttcgagaccatcagcctcatcatccactatgacagtgagcccaacctcctggttcgggcctgcaaccagctgggccagttcctgcagcaccgggagaccaacctgcgctacctggccctggagagcatgtgcacgctggccagctccgagttctcccatgaagccgtcaagacgcacattgacaccgtcatcaatgccctcaagacggagcgggacgtcagcgtgcggcagcgggcggctgacctcctctacgccatgtgtgaccggagcaatgccaagcagatcgtgtcggagatgctgcggtacctggagacggcagactacgccatccgcgaggagatcgtcctgaaggtggccatcctggccgagaagtacgccgtggactacagctggtacgtggacaccatcctcaacctcatccgcattgcgggcgactacgtgagtgaggaggtgtggtaccgtgtgctacagatcgtcaccaaccgtgatgacgtccagggctatgccgccaagaccgtctttgaggcgctccaggcccctgcctgtcacgagaacatggtgaaggttggcggctacatccttggggagtttgggaacctgattgctggggacccccgctccagccccccagtgcagttctccctgctccactccaagttccatctgtgcagcgtggccacgcgggcgctgctgctgtccacctacatcaagttcatcaacctcttccccgagaccaaggccaccatccagggcgtcctgcgggccggctcccagctgcgcaatgctgacgtggagctgcagcagcgagccgtggagtacctcaccctcagctcagtggccagcaccgacgtcctggccacggtgctggaggagatgccgcccttccccgagcgcgagtcgtccatcctggccaagctgaaacgcaagaaggggccaggggccggcagcgccctggacgatggccggagggaccccagcagcaacgacatcaacgggggcatggagcccacccccagcactgtgtcgacgccctcgccctccgccgacctcctggggctgcgggcagcccctcccccggcagcacccccggcttctgcaggagcagggaaccttctggtggacgtcttcgatggcccggccgcccagcccagcctggggcccacccccgaggaggccttcctcagcccaggtcctgaggacatcggccctcccattccggaagccgatgagttgctgaataagtttgtgtgtaagaacaacggggtcctgttcgagaaccagctgctgcagatcggagtcaagtcagagttccgacagaacctgggccgcatgtatctcttctatggcaacaagacctcggtgcagttccagaatttctcacccactgtggttcacccgggagacctccagactcagctggctgtgcagaccaagcgcgtggcggcgcaggtggacggcggcgcgcaggtgcagcaggtgctcaatatcgagtgcctgcgggacttcctgacgcccccgctgctgtccgtgcgcttccggtacggtggcgccccccaggccctcaccctgaagctcccagtgaccatcaacaagttcttccagcccaccgagatggcggcccaggatttcttccagcgctggaagcagctgagcctcttctggggtttggctctgctctcctggacaatgtggaccccaaccctgagaacttcgtgggggcggggatcatccagactaaagccctgcaggtgggctgtctgcttcggctggagcccaatgcccaggcccagatgtaccggctgaccctgcgcaccagcaaggagcccgtctcccgtcacctgtgtgagctgctggcacagcagttctgagccctggactctgccccgggggatgtggccggcactgggcagccccttggactgaggcagttttggtggatgggggacctccactggtgacagagaagacaccagggtttgggggatgcctgggactttcctccggccttttgtatttttatttttgttcatctgctgctgtttacattctggggggttagggggagtccccctccctccctttcccccccaagcacagaggggagaggggccagggaagtggatgtctcctcccctcccaccccaccctgttgtagcccctcctaccccctccccatccaggggctgtgtattattgtgagcgaataaacagagagacgctaaca

SEQ ID NO: 358861 - DNA, 2779 bp, Homo sapiens
acatcttaggctaggtacgaggctgggtggacagcatggacagtgtcaagcagagtgcggccctgtgcctccttcgactgtacaaggcctcgcctgacctggtgcccatgggcgagtggacggcgcgtgtggtacacctgctcaatgaccagcacatgggtgtggtcacggccgccgtcagcctcatcacctgtctctgcaagaagaacccagatgacttcaagacgtgcgtctctctggctgtgtcgcgcctgagccggatcgtctcctctgcctccaccgacctccaggactacacctactacttcgtcccagcaccctggctctcggtgaagctcctgcggctgctgcagtgctacccgcctccagaggatgcggctgtgaaggggcggctggtggaatgtctggagactgtgctcaacaaggcccaggagccccccaaatccaagaaggtgcagcattccaacgccaagaacgccatcctcttcgagaccatcagcctcatcatccactatgacagtgagcccaacctcctggttcgggcctgcaaccagctgggccagttcctgcagcaccgggagaccaacctgcgctacctggccctggagagcatgtgcacgctggccagctccgagttctcccatgaagccgtcaagacgcacattgacaccgtcatcaatgccctcaagacggagcgggacgtcagcgtgcggcagcgggcggctgacctcctctacgccatgtgtgaccggagcaatgccaagcagatcgtgtcggagatgctgcggtacctggagacggcagactacgccatccgcgaggagatcgtcctgaaggtggccatcctggccgagaagtacgccgtggactacagctggtacgtggacaccatcctcaacctcatccgcattgcgggcgactacgtgagtgaggaggtgtggtaccgtgtgctacagatcgtcaccaaccgtgatgacgtccagggctatgccgccaagaccgtctttgaggcgctccaggcccctgcctgtcacgagaacatggtgaaggttggcggctacatccttggggagtttgggaacctgattgctggggacccccgctccagccccccagtgcagttctccctgctccactccaagttccatctgtgcagcgtggccacgcgggcgctgctgctgtccacctacatcaagttcatcaacctcttccccgagaccaaggccaccatccagggcgtcctgcgggccggctcccagctgcgcaatgctgacgtggagctgcagcagcgagccgtggagtacctcaccctcagctcagtggccagcaccgacgtcctggccacggtgctggaggagatgccgcccttccccgagcgcgagtcgtccatcctggccaagctgaaacgcaagaaggggccaggggccggcagcgccctggacgatggccggagggaccccagcagcaacgacatcaacgggggcatggagcccacccccagcactgtgtcgacgccctcgccctccgccgacctcctggggctgcgggcagcccctcccccggcagcacccccggcttctgcaggagcagggaaccttctggtggacgtcttcgatggcccggccgcccagcccagcctggggcccacccccgaggaggccttcctcagcccaggtcctgaggacatcggccctcccattccggaagccgatgagttgctgaataagtttgtgtgtaagaacaacggggtcctgttcgagaaccagctgctgcagatcggagtcaagtcagagttccgacagaacctgggccgcatgtatctcttctatggcaacaagacctcggtgcagttccagaatttctcacccactgtggttcacccgggagacctccagactcagctggctgtgcagaccaagcgcgtggcggcgcaggtggacggcggcgcgcaggtgcagcaggtgctcaatatcgagtgcctgcgggacttcctgacgcccccgctgctgtccgtgcgcttccggtacggtggcgccccccaggccctcaccctgaagctcccagtgaccatcaacaagttcttccagcccaccgagatggcggcccaggatttcttccagcgctggaagcagctgagcctccctcaacaggaggcgcagaaaatcttcaaagccaaccaccccatggacgcagaagttactaaggccaagcttctggggtttggctctgctctcctggacaatgtggaccccaaccctgagaacttcgtgggggcggggatcatccagactaaagccctgcaggtgggctgtctgcttcggctggagcccaatgcccaggcccagatgtaccggctgaccctgcgcaccagcaaggagcccgtctcccgtcacctgtgtgagctgctggcacagcagttctgagccctggactctgccccgggggatgtggccggcactgggcagccccttggactgaggcagttttggtggatgggggacctccactggtgacagagaagacaccagggtttgggggatgcctgggactttcctccggccttttgtatttttatttttgttcatctgctgctgtttacattctggggggttagggggagtccccctccctccctttcccccccaagcacagaggggagaggggccagggaagtggatgtctcctcccctcccaccccaccctgttgtagcccctcctaccccctccccatccaggggctgtgtattattgtgagcgaataaacagagagacgctaaca

SEQ ID NO: 358862 - DNA, 1887 bp, Homo sapiens
cgcccgccagccagccctccccgcggcggctcggctccttggcgctgcctggggtcctttccgcccggtccccgcttgccagcccccgctgctctgtgccctgtccggccaggcctggagccgacaccaccgccatcatgccggccgtgtccaagggcgatgggatgcgggggctcgcggtgttcatctccgacatccggaactgtaagagcaaagaggcggaaattaagagaatcaacaaggaactggccaacatccgctccaagttcaaaggagacaaagccttggatggctacagtaagaaaaaatatgtgtgtaaactgcttttcatcttcctgcttggccatgacattgactttgggcacatggaggctgtgaatctgttgagttccaataaatacacagagaagcaaataggttacctgttcatttctgtgctggtgaactcgaactcggagctgatccgcctcatcaacaacgccatcaagaatgacctggccagccgcaaccccaccttcatgtgcctggccctgcactgcatcgccaacgtgggcagccgggagatgggcgaggcctttgccgctgacatcccccgcatcctggtggccggggacagcatggacagtgtcaagcagagtgcggccctgtgcctccttcgactgtacaaggcctcgcctgacctggtgcccatgggcgagtggacggcgcgtgtggtacacctgctcaatgaccagcacatgggtgtggtcacggccgccgtcagcctcatcacctgtctctgcaagaagaacccagatgacttcaagacgtgcgtctctctggctgtgtcgcgcctgagccggatcgtctcctctgcctccaccgacctccaggactacacctactacttcgtcccagcaccctggctctcggtgaagctcctgcggctgctgcagtgctacccgcctccagaggatgcggctgtgaaggggcggctggtggaatgtctggagactgtgctcaacaaggcccaggagccccccaaatccaagaaggtgcagcattccaacgccaagaacgccatcctcttcgagaccatcagcctcatcatccactatgacagtgagcccaacctcctggttcgggcctgcaaccagctgggccagttcctgcagcaccgggagaccaacctgcgctacctggccctggagagcatgtgcacgctggccagctccgagttctcccatgaagccgtcaagacgcacattgacaccgtcatcaatgccctcaagacggagcgggacgtcagcgtgcggcagcgggcggctgacctcctctacgccatgtgtgaccggagcaatgccaagcagatcgtgtcggagatgctgcggtacctggagacggcagactacgccatccgcgaggagatcgtcctgaaggtggccatcctggccgagaagtacgccgtggactacagctggtacgtggacaccatcctcaacctcatccgcattgcgggcgactacgtgagtgaggaggtgtggtaccgtgtgctacagatcgtcaccaaccgtgatgacgtccagggctatgccgccaagaccgtctttgaggcgctccaggcccctgcctgtcacgagaacatggtgaaggttggcggctacatccttggggagtttgggaacctgattgctggggacccccgctccagccccccagtgcagttctccctgctccactccaagttccatctgtgcagcgtggccacgcgggcgctgctgctgtccacctacatcaagttcatcaacctctctcccctcccaccccaccctgttgtagcccctcctaccccctccccatccaggggctgtgtattattgtgagcgaataaacagagagacgctaaca

SEQ ID NO: 358863 - DNA, 1201 bp, Homo sapiens
tctgctctgggattggatggctcagcgagctggagccgcctgcccccgagagccccatggctttgctggctgacccagctccagctgctgacccaggtcctgaggacatcggccctcccattccggaagccgatgagttgctgaataagtttgtgtgtaagaacaacggggtcctgttcgagaaccagctgctgcagatcggagtcaagtcagagttccgacagaacctgggccgcatgtatctcttctatggcaacaagacctcggtgcagttccagaatttctcacccactgtggttcacccgggagacctccagactcagctggctgtgcagaccaagcgcgtggcggcgcaggtggacggcggcgcgcaggtgcagcaggtgctcaatatcgagtgcctgcgggacttcctgacgcccccgctgctgtccgtgcgcttccggtacggtggcgccccccaggccctcaccctgaagctcccagtgaccatcaacaagttcttccagcccaccgagatggcggcccaggatttcttccagcgctggaagcagctgagcctccctcaacaggaggcgcagaaaatcttcaaagccaaccaccccatggacgcagaagttactaaggccaagcttctggggtttggctctgctctcctggacaatgtggaccccaaccctgagaacttcgtgggggcggggatcatccagactaaagccctgcaggtgggctgtctgcttcggctggagcccaatgcccaggcccagatgtaccggctgaccctgcgcaccagcaaggagcccgtctcccgtcacctgtgtgagctgctggcacagcagttctgagccctggactctgccccgggggatgtggccggcactgggcagccccttggactgaggcagttttggtggatgggggacctccactggtgacagagaagacaccagggtttgggggatgcctgggactttcctccggccttttgtatttttatttttgttcatctgctgctgtttacattctggggggttagggggagtccccctccctccctttcccccccaagcacagaggggagaggggccagggaagtggatgtctcctcccctcccaccccaccctgttgtagcccctcctaccccctccccatccaggggctgtgtattattgtgagcgaataaacagagagacgctaaca

SEQ ID NO: 358864 - DNA, 665 bp, Homo sapiens
cgcccgccagccagccctccccgcggcggctcggctccttggcgctgcctggggtcctttccgcccggtccccgcttgccagcccccgctgctctgtgccctgtccggccaggcctggagccgacaccaccgccatcatgccggccgtgtccaagggcgatgggatgcgggggctcgcggtgttcatctccgacatccggaactgtaagagcaaagaggcggaaattaagagaatcaacaaggaactggccaacatccgctccaagttcaaaggagacaaagccttggatggctacagtaagaaaaaatatgtgtgtaaactgcttttcatcttcctgcttggccatgacattgactttgggcacatggaggctgtgaatctgttgagttccaataaatacacagagaagcaaataggttacctgttcatttctgtgctggtgaactcgaactcggagctgatccgcctcatcaacaacgccatcaagaatgacctggccagccgcaaccccaccttcatgtgcctggccctgcactgcatcgccaacgtgggcagccgggagatgggcgaggccttgtacagtcgaaggaggcacaggccgcactctgcttgacactgtccaagctgcccccggccaccagatgcggggatgttagcggcaaag

SEQ ID NO: 358865 - DNA, 434 bp, Homo sapiens
ggaaactgaggctcacatggtgccacctcttgcccgagagggtcagagcaggaggagagcccaggtctggggatagatcttgtgtctccagaggtgccttgtctcaccatctctgctgggctgggaagaggttgagggagcagagaccctggccctgagctgcagaattctcgagtgtcagaggcaccccgagctcctcctttggaagacaggagctggggcatggccaccaccccagcaggtgtgccaggtgggcaggacactcagccgggggcgtccccttcgtttccccagaggatgcggctgtgaaggggcggctggtggaatgtctggagactgtgctcaacaaggcccaggagccccccaaatccaagaaggtgcagcattccaacgccaagaacgccatcctcttcgagaccatcagcctcatcatc

SEQ ID NO: 358866 - DNA, 529 bp, Homo sapiens
tttcttttttatttgagatggggtctcactatgttacccaggctggtcacaaactcctgggctcaagcgatcctctcacctcagcctcccgaatagctgggattatgggtgggtaccacagagcctggcttaggactatacactttaaaaggataaacttcatggtatgtgtattatgtctttaaaaagctgtttttttaaaaaaaaatgaattaaggaggttattatgtctccttagtttcctttaatgtaggagcccccaccttcactgactttcaggatgtggacatctgctcaaggctcaggccagagctcttagaaagagccctgatttgcaggggttcccacagtcctctgctgatcactgctcataatcagatccagttaaacctttctggcgagaatcacacaggcaatgctgtgccaaaagaatacttcagactatttctataccataagcgattggctctgtatgattaatatttgcaaagtcgtgtgtttgcagcactttatcttcatgtgttttcct

SEQ ID NO: 358867 - DNA, 480 bp, Homo sapiens
tatatggggtcttgaaggatatgtagaagtttgccaactgtaattaaaaggcagagcatggtggctcacgcctgtaatcccagcactttgggaggctgacgcgggaagattgcttaagcccaggattttgagaccaggctgggcaacatagtggaccccgtctctattatttaaaaatttaatttttaaaaaaatttaaaaataaagaaaaaaaatggttgtttaggctagtcatggtggctcatgcctgtaatcccagcactttgggaagctgaggcaggtggatcacctgaggtcaggagtttgagaccaacctggccaacatggcgaaaccccacctctactaaaatacaaaaattagccaggcatggcagtgcatgcctctaatcccagctactagggaggctgaggcaggagaatcgcttgaacctgggaggtggaaattgcagtgagccaagatcaagccactgcactccagcc

SEQ ID NO: 358868 - DNA, 337 bp, Homo sapiens
ggatgtattatacaatatattcttgctcgtctcggtgatacacaacacattagcatactaaaggctctgataaatcttcatgcaatgaaactcaattttgtttaatccataagttgctcaagcttaactatagaattctgcctctacccctgttcccagcataactaagggtctacagacaacactttgggaaatggactaaattatctttaacatcccctcctaggtttaaatttgcatagttctatgttagaggttttgttttttatttttttgagacaggttcttgctctgttgcccaggctggagtgcagtggcccgatctcggctcactgca

SEQ ID NO: 358869 - DNA, 144 bp, Homo sapiens
ttttcatttcatttcatttatttctaatcttatccttattgtttccttcctgctacttgctttcaagaatttttctctgtctttaagaagtttgattatgactcttcgcgagattgcatttcttttagatttgcttggtttctt

SEQ ID NO: 358870 - DNA, 1801 bp, Homo sapiens
gcgccggaagcagcctgggccgctgcgcagaggcgcggcggctgtacaactcggccgttgtcaccatgccggtcgtccggaagattttccgtcgccgccggggcgactcggagtcagaggaagatgagcaggactcagaggaggttcgattaaaactggaagagaccagagaggtacagaacttgaggaagaggcccaacggggtgagtgctgtggccttgctggtgggagagaaggtacaagaggagaccactctagtggatgatccctttcagatgaagacaggtggtatggtggatatgaagaaactgaaggaaaggggcaaagataagatcagtgaggaggaggacctgcacctggggacatcgttttctgcagaaaccaaccgaagggatgaggatgcagacatgatgaagtacattgagacagagctaaagaagaggaaagggatcgtggaacatgaggaacagaaagttaagccaaagaatgcagaggactgtctttatgaacttccagaaaacatccgtgtttcctcagcaaagaagaccgaggagatgctttccaaccagatgctgagtggcattcctgaggtggacctgggcatcgatgctaaaataaaaaatatcatttccacggaggatgccaaggcccgtctgctggcagagcagcagaacaagaagaaagacagcgagacctccttcgtgcctaccaacatggctgtgaattatgtgcagcacaacagattttatcatgaggagctcaacgcgcccatacggagaaacaaagaagagcccaaggcccggcccttgagagtaggtgacacggagaagccagagcctgagcggtcccctcctaaccgcaagcgtcctgctaacgagaaggcaactgatgactatcattatgagaagttcaagaaaatgaataggcggtactgagttgtgcagagtgggatgtaaatatcgccttcctctccctatatccctcccatgaaaaatggcttcctggccgggcgtggtggctcctgcctgtaatcccagcactttgggaggccgaggtgggcggatcacctgaggtcgggagtttgagaccagcctgaccaacatggagaaacccagtctctactgaaaatacagaaaagttagccaggcgtggtggcacatgcctgtaatcccagctgctcaggaggctgaggcaggagaattgcttgaacccaagaggcggaggttgtggtgagccgagattgcacctttgtactccagcctgggcaacgagcaaaaaactctgtctcaaagaaaaaaaaaaaagaaagaaaaagaaaaatggcttccaggacagagcatgctcatttgctggcggacagttccagaaacagaccctgttagtccttctacttacctgctggatttttcaagcactaaatttataactttttgaaacaaaataatgtgtaattttccatttgggggcaaactctattcttgtgagcattattaaatcttgtttgtaaatatattgtctttctcttaatatttgctctgggtcaggaagaagctgttcacggtgtgataatactctttagattgtgctttcattattatagatgcatcatgtcttctgctttcacgtgtctgggatggggtcagaaatgcatcctccagctgacagaaaaatccaggatgagatcagaaggatactggtgttttctgacttttacaaaattacttgtttgttttcattaaaaaaaaagcataaactatgtttcttattactattagaattattaaatttcaaaatgaatcca

SEQ ID NO: 358871 - DNA, 1800 bp, Homo sapiens
  misc_feature (29)..(29): n is a, c, g, or t
ctttaaatatataggctaggtacgaggcngggtggtgcggctgtacaactcggccgttgtcaccatgccggtcgtccggaagattttccgtcgccgccggggcgactcggagtcagaggaagatgagcaggactcagaggaggttcgattaaaactggaagagaccagagaggtacagaacttgaggaagaggcccaacggggtgagtgctgtggccttgctggtgggagagaaggtacaagaggagaccactctagtggatgatccctttcagatgaagacaggtggtatggtggatatgaagaaactgaaggaaaggggcaaagataagatcagtgaggaggaggacctgcacctggggacatcgttttctgcagaaaccaaccgaagggatgaggatgcagacatgatgaagtacattgagacagagctaaagaagaggaaagggatcgtggaacatgaggaacagaaagttaagccaaagaatgcagaggactgtctttatgaacttccagaaaacatccgtgtttcctcagcaaagaagaccgaggagatgctttccaaccagatgctgagtggcattcctgaggtggacctgggcatcgatgctaaaataaaaaatatcatttccacggaggatgccaaggcccgtctgctggcagagcagcagaacaagaagaaagacagcgagacctccttcgtgcctaccaacatggctgtgaattatgtgcagcacaacagattttatcatgaggagctcaacgcgcccatacggagaaacaaagaagagcccaaggcccggcccttgagagtaggtgacacggagaagccagagcctgagcggtcccctcctaaccgcaagcgtcctgctaacgagaaggcaactgatgactatcattatgagaagttcaagaaaatgaataggcggtactgagttgtgcagagtgggatgtaaatatcgccttcctctccctatatccctcccatgaaaaatggcttcctggccgggcgtggtggctcctgcctgtaatcccagcactttgggaggccgaggtgggcggatcacctgaggtcgggagtttgagaccagcctgaccaacatggagaaacccagtctctactgaaaatacagaaaagttagccaggcgtggtggcacatgcctgtaatcccagctgctcaggaggctgaggcaggagaattgcttgaacccaagaggcggaggttgtggtgagccgagattgcacctttgtactccagcctgggcaacgagcaaaaaactctgtctcaaagaaaaaaaaaaaagaaagaaaaagaaaaatggcttccaggacagagcatgctcatttgctggcggacagttccagaaacagaccctgttagtccttctacttacctgctggatttttcaagcactaaatttataactttttgaaacaaaataatgtgtaattttccatttgggggcaaactctattcttgtgagcattattaaatcttgtttgtaaatatattgtctttctcttaatatttgctctgggtcaggaagaagctgttcacggtgtgataatactctttagattgtgctttcattattatagatgcatcatgtcttctgctttcacgtgtctgggatggggtcagaaatgcatcctccagctgacagaaaaatccaggatgagatcagaaggatactggtgttttctgacttttacaaaattacttgtttgttttcattaaaaaaaaagcataaactatgtttcttattactattagaattattaaatttcaaaatgaatcca

SEQ ID NO: 358872 - DNA, 1992 bp, Homo sapiens
gcgccggaagcagcctgggccgctgcgcagaggcgcggcggctgtacaactcggccgttgtcaccatgccggtcgtccggaagattttccgtcgccgccggggcgactcggagtcagaggaagatgagcaggactcagaggaggttcgattaaaactggaagagaccagagaggtacagaacttgaggaagaggcccaacggggtgagtgctgtggccttgctggtgggagagaaggtacaagaggagaccactctagtggatgatccctttcagatgaagacaggtggtatggtggatatgaagaaactgaaggaaaggggcaaagataagatcagtgaggaggaggacctgcacctggggacatcgttttctgcagaaaccaaccgaagggatgaggatgcagacatgatgaagtacattgagacagagctaaagaagaggaaagggatcgtggaacatgaggaacagaaagttaagccaaagaatgcagaggactgtctttatgaacttccagaaaacatccgtgtttcctcagcaaagaagaccgaggagatgctttccaaccagatgctgagtggcattcctgaggtggacctgggcatcgatgctaaaataaaaaatatcatttccacggaggatgccaaggcccgtctgctggcagagcagcagaacaagaagaaagacagcgagacctccttcgtgcctaccaacatggctgtgaattatgtgcagcacaacagattttatcatgaggagctcaacgcgcccatacggagaaacaaagaagagcccaaggcccggcccttgagagtaggtgacacggagaagccagagcctgagcggtcccctcctaaccgcaagcgtcctgctaacgagaaggcaactgatgactatcattatgagaagttcaagaaaatgaataggcggtactgagttgtgcagagtgggatgtaaatatcgccttcctctccctatatccctcccatgaaaaatggcttcctggccgggcgtggtggctcctgcctgtaatcccagcactttgggaggccgaggtgggcggatcacctgaggtcgggagtttgagaccagcctgaccaacatggagaaacccagtctctactgaaaatacagaaaagttagccaggcgtggtggcacatgcctgtaatcccagctgctcaggaggctgaggcaggagaattgcttgaacccaagaggcggaggttgtggtgagccgagattgcacctttgtactccagcctgggcaacgagcaaaaaactctgtctcaaagaaaaaaaaaagatgctatagcttctgactgatcacgtaaaatgcgtgttccacgagagaacagagtcccccatgagtggggagagcaagtcctcgtagaaggacccccgtgttgcccttaataagtacccggcggggagtttcacagccgttaagttatagacctcttggaacaccagaagtatcgtgttgtacacatccccacatgagggggggcgcacccacgtatcctggtggggggcgactttttacacacccttggtgcggaaacatataatgtgcgcctccgcataatataatctgccacagggctacaggaaaagagactgtgccaggggagaagaaaaacacccccttagaatggcgcttcccactatattgaagagcgaccgcagataccctcagcggctaaccacgttcttcagcgaactagtgggcgtacaaaaaacttggagcctccccacaggtgggtaagaaaaaactccagggagggacaccacgaagagaactggggtgagtctcgagcgtcgttaaccacaacaactcgaggtgttggtctcttatacaaagacggcacacgacaagtgtccttgtctaatgcaaacattcaactttacgagcgactgcctacgaagaaaaaatcctccggggtgcccaccaaaaggggacgtcctagaggaggcagccaacacattggctct

SEQ ID NO: 358873 - DNA, 1212 bp, Homo sapiens
gcgccggaagcagcctgggccgctgcgcagaggcgcggcggctgtacaactcggccgttgtcaccatgccggtcgtccggaagattttccgtcgccgccggggcgactcggagtcagaggaagatgagcaggactcagaggaggttcgattaaaactggaagagaccagagaggtacagaacttgaggaagaggcccaacggggtgagtgctgtggccttgctggtgggagagaaggtacaagaggagaccactctagtggatgatccctttcagatgaagacaggtggtatggtggatatgaagaaactgaaggaaaggggcaaagataagatcagtgaggaggaggacctgcacctggggacatcgttttctgcagaaaccaaccgaagggatgaggatgcagacatgatgaagtacattgagacagagctaaagaagaggaaagggatcgtggaacatgaggaacagaaagttaagccaaagaatgcagaggactgtctttatgaacttccagaaaacatccgtgtttcctcagcaaagaagaccgaggagatgctttccaaccagatgctgagtggcattcctgaggtggacctgggcatcgatgctaaaataaaaaatatcatttccacggaggatgccaaggcccgtctgctggcagagcagcagaacaagaagaaagacagcgagacctccttcgtgcctaccaacatggctgtgaattatgtgcagcacaacagattttatcatgaggagctcaacgcgcccatacggagaaacaaagaagagcccaaggcccggcccttgagagtaggtgacacggagaagccagagcctgagcggtcccctcctaaccgcaagcgtcctgctaacgagaaggcaactgatgactatcattatgagaagttcaagaaaatgaataggcggtactgagttgtgcagagtgggatgtaaatatcgccttcctctccctatatccctcccatgaaaaatggcttcctggccgggcgtggtggctcctgcctgtaatcccagcactttgggaggccgaggtgggcggatcacctgaggtcgggagtttgagaccagcctgaccaacatggagaaacccagtctctactgaaaatacagaaaagttagccacgccgtgttgatatgcattgcaggatacaagtttacatcaaggacagctatgcgatagtacaagtct

SEQ ID NO: 358874 - DNA, 1798 bp, Homo sapiens
ttcactccgggcaatcagctgtagctcaccatagtctaatagaaaataaccgtaaaccaaattatttaatgcactgcttattacaattttactgggtctctattttaccctcctacaagcctcacagtacttcgagtcccccccccggtacatgcaagatcggtacacccggttacattgcaaggcatgtaccgggggggttgagtgctgtggccttgctggtgggagagaaggtacaagaggagaccactctagtggatgatccctttcagatgaagacaggtggtatggtggatatgaagaaactgaaggaaaggggcaaagataagatcagtgaggaggaggacctgcacctggggacatcgttttctgcagaaaccaaccgaagggatgaggatgcagacatgatgaagtacattgagacagagctaaagaagaggaaagggatcgtggaacatgaggaacagaaagttaagccaaagaatgcagaggactgtctttatgaacttccagaaaacatccgtgtttcctcagcaaagaagaccgaggagatgctttccaaccagatgctgagtggcattcctgaggtggacctgggcatcgatgctaaaataaaaaatatcatttccacggaggatgccaaggcccgtctgctggcagagcagcagaacaagaagaaagacagcgagacctccttcgtgcctaccaacatggctgtgaattatgtgcagcacaacagattttatcatgaggagctcaacgcgcccatacggagaaacaaagaagagcccaaggcccggcccttgagagtaggtgacacggagaagccagagcctgagcggtcccctcctaaccgcaagcgtcctgctaacgagaaggcaactgatgactatcattatgagaagttcaagaaaatgaataggcggtactgagttgtgcagagtgggatgtaaatatcgccttcctctccctatatccctcccatgaaaaatggcttcctggccgggcgtggtggctcctgcctgtaatcccagcactttgggaggccgaggtgggcggatcacctgaggtcgggagtttgagaccagcctgaccaacatggagaaacccagtctctactgaaaatacagaaaagttagccaggcgtggtggcacatgcctgtaatcccagctgctcaggaggctgaggcaggagaattgcttgaacccaagaggcggaggttgtggtgagccgagattgcacctttgtactccagcctgggcaacgagcaaaaaactctgtctcaaagaaaaaaaaaaaagaaagaaaaagaaaaatggcttccaggacagagcatgctcatttgctggcggacagttccagaaacagaccctgttagtccttctacttacctgctggatttttcaagcactaaatttataactttttgaaacaaaataatgtgtaattttccatttgggggcaaactctattcttgtgagcattattaaatcttgtttgtaaatatattgtctttctcttaatatttgctctgggtcaggaagaagctgttcacggtgtgataatactctttagattgtgctttcattattatagatgcatcatgtcttctgctttcacgtgtctgggatggggtcagaaatgcatcctccagctgacagaaaaatccaggatgagatcagaaggatactggtgttttctgacttttacaaaattacttgtttgttttcattaaaaaaaaagcataaactatgtttcttattactattagaattattaaatttcaaaatgaatcca

SEQ ID NO: 358875 - DNA, 1926 bp, Homo sapiens
gtgacttaaataggaatcatagcccttcagagcccgggctcatacaaaaccacacagtgagtaggaacccagagaaaaacagacttctagttcttgatgttagccattaatgagatttggctgtgatttataatgggggtccgcagggatgggcggccttggggaagaaataaagaactagttggaagagaaggaaagaataagagtaggaattaaaaggaaattgaaaaggggtgggtagaatactgaaagcctagatactgtgaaagtttaaggattcagattttctaatgtgggtcaccagagggaaggatgtaaggagagtccacagatgcctcagtagcccttactgagactgcagaatgcctccgctactctccagcagccagaactttgagcggaaggaaggtgtgaagggggagatatgaagaaactgaaggaaaggggcaaagataagatcagtgaggaggaggacctgcacctggggacatcgttttctgcagaaaccaaccgaagggatgaggatgcagacatgatgaagtacattgagacagagctaaagaagaggaaagggatcgtggaacatgaggaacagaaagttaagccaaagaatgcagaggactgtctttatgaacttccagaaaacatccgtgtttcctcagcaaagaagaccgaggagatgctttccaaccagatgctgagtggcattcctgaggtggacctgggcatcgatgctaaaataaaaaatatcatttccacggaggatgccaaggcccgtctgctggcagagcagcagaacaagaagaaagacagcgagacctccttcgtgcctaccaacatggctgtgaattatgtgcagcacaacagattttatcatgaggagctcaacgcgcccatacggagaaacaaagaagagcccaaggcccggcccttgagagtaggtgacacggagaagccagagcctgagcggtcccctcctaaccgcaagcgtcctgctaacgagaaggcaactgatgactatcattatgagaagttcaagaaaatgaataggcggtactgagttgtgcagagtgggatgtaaatatcgccttcctctccctatatccctcccatgaaaaatggcttcctggccgggcgtggtggctcctgcctgtaatcccagcactttgggaggccgaggtgggcggatcacctgaggtcgggagtttgagaccagcctgaccaacatggagaaacccagtctctactgaaaatacagaaaagttagccaggcgtggtggcacatgcctgtaatcccagctgctcaggaggctgaggcaggagaattgcttgaacccaagaggcggaggttgtggtgagccgagattgcacctttgtactccagcctgggcaacgagcaaaaaactctgtctcaaagaaaaaaaaaaaagaaagaaaaagaaaaatggcttccaggacagagcatgctcatttgctggcggacagttccagaaacagaccctgttagtccttctacttacctgctggatttttcaagcactaaatttataactttttgaaacaaaataatgtgtaattttccatttgggggcaaactctattcttgtgagcattattaaatcttgtttgtaaatatattgtctttctcttaatatttgctctgggtcaggaagaagctgttcacggtgtgataatactctttagattgtgctttcattattatagatgcatcatgtcttctgctttcacgtgtctgggatggggtcagaaatgcatcctccagctgacagaaaaatccaggatgagatcagaaggatactggtgttttctgacttttacaaaattacttgtttgttttcattaaaaaaaaagcataaactatgtttcttattactattagaattattaaatttcaaaatgaatcca

SEQ ID NO: 358876 - DNA, 1492 bp, Homo sapiens
  misc_feature (29)..(29): n is a, c, g, or t
ctttaaatatataggctaggtacgaggcngggtggtgcggctgtacaactcggccgttgtcaccatgccggtcgtccggaagattttccgtcgccgccggggcgactcggagtcagaggaagatgagcaggactcagaggaggttcgattaaaactggaagagaccagagaggtacagaacttgaggaagaggcccaacggggtgagaaaacatccgtgtttcctcagcaaagaagaccgaggagatgctttccaaccagatgctgagtggcattcctgaggtggacctgggcatcgatgctaaaataaaaaatatcatttccacggaggatgccaaggcccgtctgctggcagagcagcagaacaagaagaaagacagcgagacctccttcgtgcctaccaacatggctgtgaattatgtgcagcacaacagattttatcatgaggagctcaacgcgcccatacggagaaacaaagaagagcccaaggcccggcccttgagagtaggtgacacggagaagccagagcctgagcggtcccctcctaaccgcaagcgtcctgctaacgagaaggcaactgatgactatcattatgagaagttcaagaaaatgaataggcggtactgagttgtgcagagtgggatgtaaatatcgccttcctctccctatatccctcccatgaaaaatggcttcctggccgggcgtggtggctcctgcctgtaatcccagcactttgggaggccgaggtgggcggatcacctgaggtcgggagtttgagaccagcctgaccaacatggagaaacccagtctctactgaaaatacagaaaagttagccaggcgtggtggcacatgcctgtaatcccagctgctcaggaggctgaggcaggagaattgcttgaacccaagaggcggaggttgtggtgagccgagattgcacctttgtactccagcctgggcaacgagcaaaaaactctgtctcaaagaaaaaaaaaaaagaaagaaaaagaaaaatggcttccaggacagagcatgctcatttgctggcggacagttccagaaacagaccctgttagtccttctacttacctgctggatttttcaagcactaaatttataactttttgaaacaaaataatgtgtaattttccatttgggggcaaactctattcttgtgagcattattaaatcttgtttgtaaatatattgtctttctcttaatatttgctctgggtcaggaagaagctgttcacggtgtgataatactctttagattgtgctttcattattatagatgcatcatgtcttctgctttcacgtgtctgggatggggtcagaaatgcatcctccagctgacagaaaaatccaggatgagatcagaaggatactggtgttttctgacttttacaaaattacttgtttgttttcattaaaaaaaaagcataaactatgtttcttattactattagaattattaaatttcaaaatgaatcca

SEQ ID NO: 358877 - DNA, 899 bp, Homo sapiens
gcgccggaagcagcctgggccgctgcgcagaggcgcggcggctgtacaactcggccgttgtcaccatgccggtcgtccggaagattttccgtcgccgccggggcgactcggagtcagaggaagatgagcaggactcagaggaggttcgattaaaactggaagagaccagagaggtacagaacttgaggaagaggcccaacggggtgagtgctgtggccttgctggtgggagagaaggtacaagaggagaccactctagtggatgatccctttcagatgaagacaggtggtatggtggatatgaagaaactgaaggaaaggggcaaagataagatcagtgaggaggaggacctgcacctggggacatcgttttctgcagaaaccaaccgaagggatgaggatgcagacatgatgaagtacattgagacagagctaaagaagaggaaagggatcgtggaacatgaggaacagaaagttaagccaaagaatgcagaggactgtctttatgaacttccagaaaacatccgtgtttcctcagcaaagaagaccgaggagatgctttccaaccagatgctgagtggcattcctgaggtggacctgggcatcgatgctaaaataaaaaatatcatttccacggaggatgccaaggcccgtctgctggcagagcagcagaacaagaagaaagacagcgagacctccttcgtgcctaccaacatggctgtgaattatgtgcagcacaacagattttatcatgaggagctcaacgcgcgccatacggattacaggcgtgagccatcaagtctggcgagagagattgtttctagatgagggtgggggcgggtgtccttagcccaaagcttgtgccagtctctatcagaaataaatgcccccaaaacctca

SEQ ID NO: 358878 - DNA, 1087 bp, Homo sapiens
gttcactgggttaggcgctggggctcctgtgcgggaaggaaacaggcagttgtctttgcctgcatggagtaaagtctagcagtgggttccagcatggcaaaccacctttcctgttcttttccttctcagggtcccctcctaaccgcaagcgtcctgctaacgagaaggcaactgatgactatcattatgagaagttcaagaaaatgaataggcggtactgagttgtgcagagtgggatgtaaatatcgccttcctctccctatatccctcccatgaaaaatggcttcctggccgggcgtggtggctcctgcctgtaatcccagcactttgggaggccgaggtgggcggatcacctgaggtcgggagtttgagaccagcctgaccaacatggagaaacccagtctctactgaaaatacagaaaagttagccaggcgtggtggcacatgcctgtaatcccagctgctcaggaggctgaggcaggagaattgcttgaacccaagaggcggaggttgtggtgagccgagattgcacctttgtactccagcctgggcaacgagcaaaaaactctgtctcaaagaaaaaaaaaaaagaaagaaaaagaaaaatggcttccaggacagagcatgctcatttgctggcggacagttccagaaacagaccctgttagtccttctacttacctgctggatttttcaagcactaaatttataactttttgaaacaaaataatgtgtaattttccatttgggggcaaactctattcttgtgagcattattaaatcttgtttgtaaatatattgtctttctcttaatatttgctctgggtcaggaagaagctgttcacggtgtgataatactctttagattgtgctttcattattatagatgcatcatgtcttctgctttcacgtgtctgggatggggtcagaaatgcatcctccagctgacagaaaaatccaggatgagatcagaaggatactggtgttttctgacttttacaaaattacttgtttgttttcattaaaaaaaaagcataaactatgtttcttattactattagaattattaaatttcaaaatgaatcca

SEQ ID NO: 358879 - DNA, 736 bp, Homo sapiens
taaggcatcttctgtgagttattaaatacccactgtgtttgtagttgtgctacagtctgttgaaggacacggaaatgtaatataaaatacttcttccgtctagagaatttggagtttcagttacataagacagtagcaaaaagtataaggtgcacagtcgtgacaatgtttgataagtgaatgctcagttatgtgtaacgtttccaggacaagggtcacagagggctgtgtaagtagaagaaagaaaaagaaaaatggcttccaggacagagcatgctcatttgctggcggacagttccagaaacagaccctgttagtccttctacttacctgctggatttttcaagcactaaatttataactttttgaaacaaaataatgtgtaattttccatttgggggcaaactctattcttgtgagcattattaaatcttgtttgtaaatatattgtctttctcttaatatttgctctgggtcaggaagaagctgttcacggtgtgataatactctttagattgtgctttcattattatagatgcatcatgtcttctgctttcacgtgtctgggatggggtcagaaatgcatcctccagctgacagaaaaatccaggatgagatcagaaggatactggtgttttctgacttttacaaaattacttgtttgttttcattaaaaaaaaagcataaactatgtttcttattactattagaattattaaatttcaaaatgaatcca

SEQ ID NO: 358880 - DNA, 564 bp, Homo sapiens
gcgccggaagcagcctgggccgctgcgcagaggcgcggcggctgtacaactcggccgttgtcaccatgccggtcgtccggaagattttccgtcgccgccggggcgactcggagtcagaggaagatgagcaggactcagaggaggttcgattaaaactggaagagaccagagaggtacagaacttgaggaagaggcccaacggggtgagtgctgtggccttgctggtgggagagaaggtacaagaggagaccactctagtggatgatccctttcagatgaagacaggtggtatggtggatatgaagaaactgaaggaaaggggcaaagataagatcagtgaggaggaggacctgcacctggggacatcgttttctgcagaaaccaaccgaagggatgaggatgcagacatgatgaagtacattgagacagagctaaagaagaggaaagggatcgtggaacatgaggaacagaaagttaagccaaagaatgcagaggactgtctttatgaacttccagaaaacatccgtgtttcctcagcaaagccccaaaaggggtaccgagctc

SEQ ID NO: 358881 - DNA, 898 bp, Homo sapiens
  misc_feature (29)..(29): n is a, c, g, or t
ctttaaatatataggctaggtacgaggcngggtggtgcggctgtacaactcggccgttgtcaccatgccggtcgtccggaagattttccgtcgccgccggggcgactcggagtcagaggaagatgagcaggactcagaggaggttcgattaaaactggaagagaccagagaggtacagaacttgaggaagaggcccaacggggtgagtgctgtggccttgctggtgggagagaaggtacaagaggagaccactctagtggatgatccctttcagatgaagacaggtggtatggtggatatgaagaaactgaaggaaaggggcaaagataagatcagtgaggaggaggacctgcacctggggacatcgttttctgcagaaaccaaccgaagggatgaggatgcagacatgatgaagtacattgagacagagctaaagaagaggaaagggatcgtggaacatgaggaacagaaagttaagccaaagaatgcagaggactgtctttatgaacttccagaaaacatccgtgtttcctcagcaaagaagaccgaggagatgctttccaaccagatgctgagtggcattcctgaggtggacctgggcatcgatgctaaaataaaaaatatcatttccacggaggatgccaaggcccgtctgctggcagagcagcagaacaagaagaaagacagcgagacctccttcgtgcctaccaacatggctgtgaattatgtgcagcacaacagattttatcatgaggagctcaacgcgcgccatacggattacaggcgtgagccatcaagtctggcgagagagattgtttctagatgagggtgggggcgggtgtccttagcccaaagcttgtgccagtctctatcagaaataaatgcccccaaaacctca

SEQ ID NO: 358882 - DNA, 1968 bp, Homo sapiens
gcgccggaagcagcctgggccgctgcgcagaggcgcggcggctgtacaactcggccgttgtcaccatgccggtcgtccggaagattttccgtcgccgccggggcgactcggagtcagaggaagatgagcaggactcagaggaggttcgattaaaactggaagagaccagagaggtacagaacttgaggaagaggcccaacggggtgagtgctgtggccttgctggtgggagagaaggtacaagaggagaccactctagtggatgatccctttcagatgaagacaggtggtatggtggatatgaagaaactgaaggaaaggggcaaagataagatcagtgaggaggaggacctgcacctggggacatcgttttctgcagaaaccaaccgaagggatgaggatgcagacatgatgaagtacattgagacagagctaaagaagaggaaagggatcgtggaacatgaggaacagaaagttaagccaaagaatgcagaggactgtctttatgaacttccagaaaacatccgtgtttcctcagcaaagaagaccgaggagatgctttccaaccagatgctgagtggcattcctgaggtggacctgggcatcgatgctaaaataaaaaatatcatttccacggaggatgccaaggcccgtctgctggcagagcagcagaacaagaagaaagacagcgagacctccttcgtgcctaccaacatggctgtgaattatgtgcagcacaacagattttatcatgaggagctcaacgcgcccatacggagaaacaaagaagagcccaaggcccggcccttgagagtaggtgacacggagaagccagagcctgagcggtcccctcctaaccgcaagcgtcctgctaacgagaaggcaactgatgactatcattatgagaagttcaagaaaatgaataggcggtactgagttgtgcagagtgggatgtaaatatcgccttcctctccctatatccctcccatgaaaaatggcttcctggccgggcgtggtggctcctgcctgtaatcccagcactttgggaggccgaggtgggcggatcacctgaggtcgggagtttgagaccagcctgaccaacatggagaaacccagtctctactgaaaatacagaaaagttagccaggcgtggtggcacatgcctgtaatcccagctgctcaggaggctgaggcaggagaattgcttgaacccaagaggcggaggttgtggtgagccgagattgcacctttgtactccagcctgggcaacgagcaaaaaactctgtctcaaagaaaaaaaaaaaagaaagaaaaagaaaaatggcttccaggacagagcatgctcatttgctggcggacagttccagaaacagaccctgttagtccttctacttacctgctggatttttcaagcactaaatttataactttttgaaacaaaataatgtgtaattttccatttgggggcaaactctattcttgtgagcattattaaatcttgtttgtaaatatattgtctttctcttaatatttgctctgggtcaggaagaagctgttcacggtgtgataatactctttagattgtgctttcattattatagatgcatcatgtcttctgctttcacgtgtctgggatggggtcagaaatgcatcctccagctgacagaaaaatccaggatgagatcagaaggatactggtgttttctgacttttacaaaattacttgtttgttttcattaaaaaaaaagcataaactatgtttcttattactattagaattattaaatttcaaaatgaatccaaaaaaattgtttgtattatgtttcttataccagcatcaggtaatgtttttaaagcccatggtttgggtagcctaaatgtaaaactgaattactgagatggattttctcatttatttcaaacagtgagctatgattggaccactgcagcatagacatgctgcaacctg

SEQ ID NO: 358883 - DNA, 1394 bp, Homo sapiens
gcgccggaagcagcctgggccgctgcgcagaggcgcggcggctgtacaactcggccgttgtcaccatgccggtcgtccggaagattttccgtcgccgccggggcgactcggagtcagaggaagatgagcaggactcagaggaggttcgattaaaactggaagagaccagagaggtacagaacttgaggaagaggcccaacggggtgagtgctgtggccttgctggtgggagagaaggtacaagaggagaccactctagtggatgatccctttcagatgaagacaggtggtatggtggatatgaagaaactgaaggaaaggggcaaagataagatcagtgaggaggaggacctgcacctggggacatcgttttctgcagaaaccaaccgaagggatgaggatgcagacatgatgaagtacattgagacagagctaaagaagaggaaagggatcgtggaacatgaggaacagaaagttaagccaaagaatgcagaggactgtctttatgaacttccagaaaacatccgtgtttcctcagcaaagaagaccgaggagatgctttccaaccagatgctgagtggcattcctgaggtggacctgggcatcgatgctaaaataaaaaatatcatttccacggaggatgccaaggcccgtctgctggcagagcagcagaacaagaagaaagacagcgagacctccttcgtgcctaccaacatggctgtgaattatgtgcagcacaacagattttatcatgaggagctcaacgcgcccatacggagaaacaaagaagagcccaaggcccggcccttgagagtaggtgacacggagaagccagagcctgagcggtcccctcctaaccgcaagcgtcctgctaacgagaaggcaactgatgactatcattatgagaagttcaagaaaatgaataggcggtactgagttgtgcagagtgggatgtaaatatcgccttcctctccctatatccctcccatgaaaaatggcttcctggccgggcgtggtggctcctgcctgtaatcccagcactttgggaggccgaggtgggcggatcacctgaggtcgggagtttgagaccagcctgaccaacatggagaaacccagtctctactgaaaatacagaaaagttagccaggcgtggtggcacatgcctgtaatcccagctgctcaggaggctgaggcaggagaattgcttgaacccaagaggcggaggttgtggtgagccgagattgcacctttgtactccagcctgggcaacgagcaaaaaactctgtctcaaagaaaaaaaaaatttctacttgaggggggggcccggtaccccaatttgccctattagggaggcgtatttacaattaccttggccggcgtttttccaaccgtcgg

SEQ ID NO: 358884 - DNA, 1675 bp, Homo sapiens
acgcacgtcagggctcagagcccgaggaaagaaaagtcagcgcccgagacgcgagacgccacgcggatgctttcaacgctagtgctgtggccttgctggtgggagagaaggtacaagaggagaccactctagtggatgatccctttcagatgaagacaggtggtatggtggatatgaagaaactgaaggaaaggggcaaagataagatcagtgaggaggaggacctgcacctggggacatcgttttctgcagaaaccaaccgaagggatgaggatgcagacatgatgaagtacattgagacagagctaaagaagaggaaagggatcgtggaacatgaggaacagaaagttaagccaaagaatgcagaggactgtctttatgaacttccagaaaacatccgtgtttcctcagcaaagaagaccgaggagatgctttccaaccagatgctgagtggcattcctgaggtggacctgggcatcgatgctaaaataaaaaatatcatttccacggaggatgccaaggcccgtctgctggcagagcagcagaacaagaagaaagacagcgagacctccttcgtgcctaccaacatggctgtgaattatgtgcagcacaacagattttatcatgaggagctcaacgcgcccatacggagaaacaaagaagagcccaaggcccggcccttgagagtaggtgacacggagaagccagagcctgagcggtcccctcctaaccgcaagcgtcctgctaacgagaaggcaactgatgactatcattatgagaagttcaagaaaatgaataggcggtactgagttgtgcagagtgggatgtaaatatcgccttcctctccctatatccctcccatgaaaaatggcttcctggccgggcgtggtggctcctgcctgtaatcccagcactttgggaggccgaggtgggcggatcacctgaggtcgggagtttgagaccagcctgaccaacatggagaaacccagtctctactgaaaatacagaaaagttagccaggcgtggtggcacatgcctgtaatcccagctgctcaggaggctgaggcaggagaattgcttgaacccaagaggcggaggttgtggtgagccgagattgcacctttgtactccagcctgggcaacgagcaaaaaactctgtctcaaagaaaaaaaaaaaagaaagaaaaagaaaaatggcttccaggacagagcatgctcatttgctggcggacagttccagaaacagaccctgttagtccttctacttacctgctggatttttcaagcactaaatttataactttttgaaacaaaataatgtgtaattttccatttgggggcaaactctattcttgtgagcattattaaatcttgtttgtaaatatattgtctttctcttaatatttgctctgggtcaggaagaagctgttcacggtgtgataatactctttagattgtgctttcattattatagatgcatcatgtcttctgctttcacgtgtctgggatggggtcagaaatgcatcctccagctgacagaaaaatccaggatgagatcagaaggatactggtgttttctgacttttacaaaattacttgtttgttttcattaaaaaaaaagcataaactatgtttcttattactattagaattattaaatttcaaaatgaatcca

SEQ ID NO: 358885 - DNA, 1269 bp, Homo sapiens
  misc_feature (1195)..(1195): n is a, c, g, or t
gcgccggaagcagcctgggccgctgcgcagaggcgcggcggctgtacaactcggccgttgtcaccatgccggtcgtccggaagattttccgtcgccgccggggcgactcggagtcagaggaagatgagcaggactcagaggaggttcgattaaaactggaagagaccagagaggtacagaacttgaggaagaggcccaacggggtgagtgctgtggccttgctggtgggagagaaggtacaagaggagaccactctagtggatgatccctttcagatgaagacaggtggtatggtggatatgaagaaactgaaggaaaggggcaaagataagatcagtgaggaggaggacctgcacctggggacatcgttttctgcagaaaccaaccgaagggatgaggatgcagacatgatgaagtacattgagacagagctaaagaagaggaaagggatcgtggaacatgaggaacagaaagttaagccaaagaatgcagaggactgtctttatgaacttccagaaaacatccgtgtttcctcagcaaagaagaccgaggagatgctttccaaccagatgctgagtggcattcctgaggtggacctgggcatcgatgctaaaataaaaaatatcatttccacggaggatgccaaggcccgtctgctggcagagcagcagaacaagaagaaagacagcgagacctccttcgtgcctaccaacatggctgtgaattatgtgcagcacaacagattttatcatgaggagctcaacgcgcccatacggagaaacaaagaagagcccaaggcccggcccttgagagtaggtgacacggagaagccagagcctgagcggtcccctcctaagcccgcaagcgtcctagctaagcgagaacggcaagcttgatgaccgtagtcaatgtagtgaagaaaagtttcatagacacaactgaaagtagggacgagtacctgaagatttgctgccacgacggtggggaatgtaaaagtattcgccctgtgcgcgtgctcgcgcgtatagtgccccctgctccagtgagagaaattggcttcctggccgggcgtggtggctcctgcctgtaatcccagcactttgcggaggccagagtgttgtgtgctggatacaacacatagaagagatacagagagaagatatatagaaagacacaaggacacatagaagcacanaaacacattggcgatgacacacgcgcacagtgatgcaatgcttgcaatattagcatgagacagagagcaaggtc

SEQ ID NO: 358886 - DNA, 905 bp, Homo sapiens
  misc_feature (881)..(881): n is a, c, g, or t
  misc_feature (899)..(899): n is a, c, g, or t
gcgccggaagcagcctgggccgctgcgcagaggcgcggcggctgtacaactcggccgttgtcaccatgccggtcgtccggaagattttccgtcgccgccggggcgactcggagtcagaggaagatgagcaggactcagaggaggttcgattaaaactggaagagaccagagaggtacagaacttgaggaagaggcccaacggggtgagtgctgtggccttgctggtgggagagaaggtacaagaggagaccactctagtggatgatccctttcagatgaagacaggtggtatggtggatatgaagaaactgaaggaaaggggcaaagataagatcagtgaggaggaggacctgcacctggggacatcgttttctgcagaaaccaaccgaagggatgaggatgcagacatgatgaagtacattgagacagagctaaagaagaggaaagggatcgtggaacatgaggaacagaaagttaagccaaagaatgcagaggactgtctttatgaacttccagaaaacatccgtgtttcctcagcaaagaagaccgaggagatgctttccaaccagatgctgagtggcattcctgaggtggacctgggcatcgatgctaaaataaaaaatatcatttccacggaggatgccaaggcccgtctgctggcagagcagcagaacaagaagaaagacagcgagacctccttcgtgcctaccaacatggctgtgaattatgtgcagcacaacagattttatcatgaggagctcaacgcgcccatacggagaaacaaagaagagcccaaggcccggcccttgagagtcccctcctaaccgcagcgtcctgctaacgagaagcactgtgatatctttgagagttcagtgatagcngtatgatttgcgatgggngtttcg

SEQ ID NO: 358887 - DNA, 1112 bp, Homo sapiens
ggaaatataaagtaagaaggataaagctatagaaaccaagctgaatgagctaataaaagataatgatgatctgatgaaaggatctcaataagcatgcagatgcccaaggcccggcccttgagagtaggtgacacggagaagccagagcctgagcggtcccctcctaaccgcaagcgtcctgctaacgagaaggcaactgatgactatcattatgagaagttcaagaaaatgaataggcggtactgagttgtgcagagtgggatgtaaatatcgccttcctctccctatatccctcccatgaaaaatggcttcctggccgggcgtggtggctcctgcctgtaatcccagcactttgggaggccgaggtgggcggatcacctgaggtcgggagtttgagaccagcctgaccaacatggagaaacccagtctctactgaaaatacagaaaagttagccaggcgtggtggcacatgcctgtaatcccagctgctcaggaggctgaggcaggagaattgcttgaacccaagaggcggaggttgtggtgagccgagattgcacctttgtactccagcctgggcaacgagcaaaaaactctgtctcaaagaaaaaaaaaaaagaaagaaaaagaaaaatggcttccaggacagagcatgctcatttgctggcggacagttccagaaacagaccctgttagtccttctacttacctgctggatttttcaagcactaaatttataactttttgaaacaaaataatgtgtaattttccatttgggggcaaactctattcttgtgagcattattaaatcttgtttgtaaatatattgtctttctcttaatatttgctctgggtcaggaagaagctgttcacggtgtgataatactctttagattgtgctttcattattatagatgcatcatgtcttctgctttcacgtgtctgggatggggtcagaaatgcatcctccagctgacagaaaaatccaggatgagatcagaaggatactggtgttttctgacttttacaaaattacttgtttgttttcattaaaaaaaaagcataaactatgtttcttattactattagaattattaaatttcaaaatgaatcca

SEQ ID NO: 358888 - DNA, 2253 bp, Homo sapiens
  misc_feature (1371)..(1371): n is a, c, g, or t
cgccccttccgggtccggaacggctccagctgtacggactcgtcccgaggggagccggggacggcggcaccgggcgggtagggacaagactaccgcgcgtgcccccgcctggtggcagcccctctctgcgtccctcgcggcctggcaaaattacattcggccgagagttcacgctggggaagctctctgaatgcctctgagaagcgagatccggcgccatctcaccgacgagcctcccctttaccgccccgtgcgtttcctcagcactttaggaactaaagcctgtctgggtagctccctaacaggctctggagctcaatccctgggcagggaaaagggggtcctcggggctccccgctcgctgtcctttttctggacaggcagttccttggccacctggtagggccgcgttgcctggcaacggcagggtccttcttggctcggcggcgctcggggcctgaggggagaaaaccgccgcggagggcgctgggggtggcggcggcggtccgggaggtggtcgcgcgactgcgtggagcgccagggcgtccgacctctgcacctgagagaagatgaacacggccgaccaggcccgggtggggcccgcggacgacgggcctgcgccgtctggggaggaggagggagaggggggcggcgaggcgggcgggaaggagccagcagcggacgcggccccggggcccagcgctgcattccgcctcatggtgactcggcgggagccggccgtgaagctgcagtatgcggtgagcggcctggaaccgctggcttggtccgaggaccaccgcgtgtctgtgtccacggcccgcagcatcgctgtgctggagctcatctgcgacgtgcacaacccgggccaggacctggttatccaccgcacctcggtgcccgcaccgctcaacagctgtctcctcaaagttggctcaaaaacagaagttgctgagtgcaaggagaaattcgccgcctccaaggaccccacggtcagtcagactttcatgttggatagggtgttcaaccctgaggggaaggctttaccaccaatgagaggattcaagtacaccagctggtctcccatgggttgcgatgctaatggcaggtgcctcttggcagcactgaccatggacaatcgcctgaccatccaggcaaatctcaacagactgcagtgggtccagctggttgacctgactgagatctatggagaacgtctttatgagaccagttacaggctctctaaaaatgaggccccggaaggaaatctcggggattttgctgagtttcagaggagacacagcatgcagaccccagtcagaatggagtggtcgggcatctgtaccacccagcaggtcaagcataacaacgaangccgggacgttggcagtgtgctcctggctgtcctctttgaaaacggtaatatcgccgtgtggcagtttcagctgccgtttgtaggaaaagaatccatctcttcatgcaacacaattgagtcaggaatcacctctcccagtgtattgttttggtgggaatatgagcacaataatcgaaaaatgagtggccttattgtggggagtgcttttggacccataaaaattcttcctgtcaatctcaaagcagtcaaaggctatttcactttaaggcagcctgttatcttgtggaaagaaatggaccagttacctgtgcacagtatcaaatgtgtgccactttatcatccttaccagaagtgtagttgcagcttagtagtggctgcaagaggctcttatgtattttggtgtcttcttctgatctccaaagcagggctgaatgttcacaattcccatgtcacaggccttcactcactgccaattgtctccatgactgcagacaaacagaatggaacagtctatacttgctccagtgacggaaaggtgaggcagctgattcccattttcacagatgttgcattgaagtttgaacaccagttgattaaactctcagatgtgtttggctcagtgaggactcacgggatagcagtgagcccctgcggtgcatacctggccatcatcaccactgagggcatgatcaacggcctccaccctgttaacaaaaactaccaggtccaatttgttactctcaaaacctttgaagaagcagctgctcagctcctggaatcttcagttcaaaacctttttaagcaggtagatttaatagacctagtacgctggaagattttaaaagataaacatatccctcaatttttacaagaagctttgg

SEQ ID NO: 358889 - DNA, 5587 bp, Homo sapiens
  misc_feature (1371)..(1371): n is a, c, g, or t
cgccccttccgggtccggaacggctccagctgtacggactcgtcccgaggggagccggggacggcggcaccgggcgggtagggacaagactaccgcgcgtgcccccgcctggtggcagcccctctctgcgtccctcgcggcctggcaaaattacattcggccgagagttcacgctggggaagctctctgaatgcctctgagaagcgagatccggcgccatctcaccgacgagcctcccctttaccgccccgtgcgtttcctcagcactttaggaactaaagcctgtctgggtagctccctaacaggctctggagctcaatccctgggcagggaaaagggggtcctcggggctccccgctcgctgtcctttttctggacaggcagttccttggccacctggtagggccgcgttgcctggcaacggcagggtccttcttggctcggcggcgctcggggcctgaggggagaaaaccgccgcggagggcgctgggggtggcggcggcggtccgggaggtggtcgcgcgactgcgtggagcgccagggcgtccgacctctgcacctgagagaagatgaacacggccgaccaggcccgggtggggcccgcggacgacgggcctgcgccgtctggggaggaggagggagaggggggcggcgaggcgggcgggaaggagccagcagcggacgcggccccggggcccagcgctgcattccgcctcatggtgactcggcgggagccggccgtgaagctgcagtatgcggtgagcggcctggaaccgctggcttggtccgaggaccaccgcgtgtctgtgtccacggcccgcagcatcgctgtgctggagctcatctgcgacgtgcacaacccgggccaggacctggttatccaccgcacctcggtgcccgcaccgctcaacagctgtctcctcaaagttggctcaaaaacagaagttgctgagtgcaaggagaaattcgccgcctccaaggaccccacggtcagtcagactttcatgttggatagggtgttcaaccctgaggggaaggctttaccaccaatgagaggattcaagtacaccagctggtctcccatgggttgcgatgctaatggcaggtgcctcttggcagcactgaccatggacaatcgcctgaccatccaggcaaatctcaacagactgcagtgggtccagctggttgacctgactgagatctatggagaacgtctttatgagaccagttacaggctctctaaaaatgaggccccggaaggaaatctcggggattttgctgagtttcagaggagacacagcatgcagaccccagtcagaatggagtggtcgggcatctgtaccacccagcaggtcaagcataacaacgaangccgggacgttggcagtgtgctcctggctgtcctctttgaaaacggtaatatcgccgtgtggcagtttcagctgccgtttgtaggaaaagaatccatctcttcatgcaacacaattgagtcaggaatcacctctcccagtgtattgttttggtgggaatatgagcacaataatcgaaaaatgagtggccttattgtggggagtgcttttggacccataaaaattcttcctgtcaatctcaaagcagtcaaaggctatttcactttaaggcagcctgttatcttgtggaaagaaatggaccagttacctgtgcacagtatcaaatgtgtgccactttatcatccttaccagaagtgtagttgcagcttagtagtggctgcaagaggctcttatgtattttggtgtcttcttctgatctccaaagcagggctgaatgttcacaattcccatgtcacaggccttcactcactgccaattgtctccatgactgcagacaaacagaatggaacagtctatacttgctccagtgacggaaaggtgaggcagctgattcccattttcacagatgttgcattgaagtttgaacaccagttgattaaactctcagatgtgtttggctcagtgaggactcacgggatagcagtgagcccctgcggtgcatacctggccatcatcaccactgagggcatgatcaacggcctccaccctgttaacaaaaactaccaggtccaatttgttactctcaaaacctttgaagaagcagctgctcagctcctggaatcttcagttcaaaacctttttaagcaggtagatttaatagacctagtacgctggaagattttaaaagataaacatatccctcaatttttacaagaagctttggaaaaaaagattgaaagcagtggagtcacctatttttggcgttttaagcttttcctcctgaggattttatatcagtcaatgcagaaaaccccttcagaagccttgtggaaacccacccatgaggactcaaaaatcttactagtggattcgcctgggatgggcaatgctgacgatgaacagcaggaagaaggcacttcttccaaacaggtggtgaagcaaggcctgcaggagaggagcaaggaaggagatgtagaggagcccactgatgactcgctccccacgactggagatgctggaggccgtgagccaatggaagagaaactcctggaaatccaagggaaaatcgaagctgtggagatgcacttgaccagggaacacatgaagcgagtcttaggagaagtgtatctgcacacctggatcacagaaaacactagcatccccacccgcggactctgtaactttttaatgtctgatgaagagtatgatgacagaactgcacgggtgctgattggacatatctcaaagaagatgaacaaacagactttccctgagcactgtagtttgtgtaaagagatcttgccattcacagatcgcaaacaggcagtctgttccaatggccacatttggctccggtgcttcttaacctaccagtcctgccagagtttgatatatagaaggtgtttgctccatgacagcattgcccggcatccagctccagaagatcccgactggattaagaggttactgcaaagcccctgccctttctgtgattctcctgtcttctaaataatcagtgacgggaagatggaagggcatgatgaactctgccatagaaaacttcctccagcctgaagagaaggatgcactggaggaagccggaccctcacgagtggagagaagtccttggtgattgtaaagagggcccctggagctcatttctgaatcgcactctccatttccagagactaaaggatgtcctttgaaatggctggactcagagagttggagtcgttttgagatgagcattagccccagctttgtaaccaatgaggaacacttacttatttttaagtatcttgacagaagcaatttgaacacagtgtcccgtcatttctagaaacagaatggtctcttctagagagcttggataaggaccttgctgggttgagttaggttttaatccttgctttggtttggaactgccttcgggctccagaacttaaattgcttggtccgtggcatctgatgtaccaacagagattaaaagtgtaaagcaacacatgggctgatgttttgttctcagaaaatagctgctggtctgcatccctccattcttgttttttatgcatatggaaaacattttcctaaaactctatattcttaagttgaagccaagactaaaatttaatgtgtcaaatgatctggtgactattataatgaataattgtgacttatttttcattctctcctgggtcatcaggtttcctgacccaactccttaatccgtataaagatgtcaaatactgtagttcacccacgccacagccctgcttcagacttaactgtggtagcctagatgagctatttgtacacagaggaaaaaaagatattttcctcttttagtaataagactttcagtatttttaatgttgacatttccagatgtttcatttagtatccaggggtctgtctggagacttctagagagggacagctcagaagtgagacccttgagctctggtgctgtaagcttgtgcaattaagttgaacagagcctgggaatttctttcctctgcacagtcccttgatatttggaatccaggttctgcccccaacccctacccacccagtggtctgttaagatgtctcagatggggctgggcttggtggctcatgcctgtactctcaacactttgggaagcaaaggcaggcagatcacaaggtcaggagttcagcctaaccaacatggtgaaaccgtgtctctactaaaaatacaaaaattagccaggcgtggtggtgcacacctgtaatcccagcactttgggaggccgaggcagacgggtcacttgaggccaggagttcgagaccagcctgggcaatatggcgagactccgtctctactacaaatacaaaagttagcctggcatggtggcgcatgcctgtaatctcagttactcaggaggctgaggcaggagcatcacttcaacccaggaggcagaagctgcagtcagccgaggtggcaccactgcacttcagcctgggcaagactggagactgcctcaaaaaaaaaagaaaaaaaatgttggtacttagatgataccatgacggcaacctccccacccccaccccgcattgataggtagtgcagaccagcccttggaggcacttctaaacagtctgctcagaaatgttttctgtttcctattcaaattgctgttttgtctcctatgtttaatcatgtatttgctattctgcttatttttctcatttggtggtaatttcaagaagagcgtttatccactattgattttcaagaaagaaaccaagcagcattgaaatcatgagtaacagaattcagaacattgtatggtggaagtcatttgtgtctgcagctgttttttcactttacaataaataagagtaaaaattgagatcatgtcaaaaaattattgcagttttaatcattatggcatagtttcacttcccctccccccattagaatcagtggagatttgttcttactagggaattttggactgctgccatttaaaacttaggtttttatttaaagcagttgtgcatttttgagaaaatgtattgggagtaactagagaggatctcccaaatttttttgtatgtctctctaggagtaaacatggcaacagtttttctagaacgtggactcactgcagggactggacccaatggcattgttaagaccctaaaatctagccaccacctgcctcccccaggtttccacacacccagttggaaggcctttccctgcccttgtccctgtctcacacccatggaggttaagctacagagctggggaaacaggagattttgagttaatggcagcctcacaaatagtgcttctgaatttctctgagggtcagcatacctcatgggagtgtgttgctcagtgcaaccttggaaaagtgggaatggcaccagacgtttttcaggtgcctcttgcaattcaaacttacatcctctataccgtcctaaaatttgcctgatcttatttggtagatttcaagttgctttcagctgtgaccgtaataactgtttcaggaactggagaaatagtggaagcgctatgtccgcgctgc

SEQ ID NO: 358890 - DNA, 5169 bp, Homo sapiens
  misc_feature (953)..(953): n is a, c, g, or t
aacaatcggagctatgggcatcgaggtcccgtgcggggtattaaaattgggcacggaagggtgtggcgctgggggtggcggcggcggtccgggaggtggtcgcgcgactgcgtggagcgccagggcgtccgacctctgcacctgagagaagatgaacacggccgaccaggcccgggtggggcccgcggacgacgggcctgcgccgtctggggaggaggagggagaggggggcggcgaggcgggcgggaaggagccagcagcggacgcggccccggggcccagcgctgcattccgcctcatggtgactcggcgggagccggccgtgaagctgcagtatgcggtgagcggcctggaaccgctggcttggtccgaggaccaccgcgtgtctgtgtccacggcccgcagcatcgctgtgctggagctcatctgcgacgtgcacaacccgggccaggacctggttatccaccgcacctcggtgcccgcaccgctcaacagctgtctcctcaaagttggctcaaaaacagaagttgctgagtgcaaggagaaattcgccgcctccaaggaccccacggtcagtcagactttcatgttggatagggtgttcaaccctgaggggaaggctttaccaccaatgagaggattcaagtacaccagctggtctcccatgggttgcgatgctaatggcaggtgcctcttggcagcactgaccatggacaatcgcctgaccatccaggcaaatctcaacagactgcagtgggtccagctggttgacctgactgagatctatggagaacgtctttatgagaccagttacaggctctctaaaaatgaggccccggaaggaaatctcggggattttgctgagtttcagaggagacacagcatgcagaccccagtcagaatggagtggtcgggcatctgtaccacccagcaggtcaagcataacaacgaangccgggacgttggcagtgtgctcctggctgtcctctttgaaaacggtaatatcgccgtgtggcagtttcagctgccgtttgtaggaaaagaatccatctcttcatgcaacacaattgagtcaggaatcacctctcccagtgtattgttttggtgggaatatgagcacaataatcgaaaaatgagtggccttattgtggggagtgcttttggacccataaaaattcttcctgtcaatctcaaagcagtcaaaggctatttcactttaaggcagcctgttatcttgtggaaagaaatggaccagttacctgtgcacagtatcaaatgtgtgccactttatcatccttaccagaagtgtagttgcagcttagtagtggctgcaagaggctcttatgtattttggtgtcttcttctgatctccaaagcagggctgaatgttcacaattcccatgtcacaggccttcactcactgccaattgtctccatgactgcagacaaacagaatggaacagtctatacttgctccagtgacggaaaggtgaggcagctgattcccattttcacagatgttgcattgaagtttgaacaccagttgattaaactctcagatgtgtttggctcagtgaggactcacgggatagcagtgagcccctgcggtgcatacctggccatcatcaccactgagggcatgatcaacggcctccaccctgttaacaaaaactaccaggtccaatttgttactctcaaaacctttgaagaagcagctgctcagctcctggaatcttcagttcaaaacctttttaagcaggtagatttaatagacctagtacgctggaagattttaaaagataaacatatccctcaatttttacaagaagctttggaaaaaaagattgaaagcagtggagtcacctatttttggcgttttaagcttttcctcctgaggattttatatcagtcaatgcagaaaaccccttcagaagccttgtggaaacccacccatgaggactcaaaaatcttactagtggattcgcctgggatgggcaatgctgacgatgaacagcaggaagaaggcacttcttccaaacaggtggtgaagcaaggcctgcaggagaggagcaaggaaggagatgtagaggagcccactgatgactcgctccccacgactggagatgctggaggccgtgagccaatggaagagaaactcctggaaatccaagggaaaatcgaagctgtggagatgcacttgaccagggaacacatgaagcgagtcttaggagaagtgtatctgcacacctggatcacagaaaacactagcatccccacccgcggactctgtaactttttaatgtctgatgaagagtatgatgacagaactgcacgggtgctgattggacatatctcaaagaagatgaacaaacagactttccctgagcactgtagtttgtgtaaagagatcttgccattcacagatcgcaaacaggcagtctgttccaatggccacatttggctccggtgcttcttaacctaccagtcctgccagagtttgatatatagaaggtgtttgctccatgacagcattgcccggcatccagctccagaagatcccgactggattaagaggttactgcaaagcccctgccctttctgtgattctcctgtcttctaaataatcagtgacgggaagatggaagggcatgatgaactctgccatagaaaacttcctccagcctgaagagaaggatgcactggaggaagccggaccctcacgagtggagagaagtccttggtgattgtaaagagggcccctggagctcatttctgaatcgcactctccatttccagagactaaaggatgtcctttgaaatggctggactcagagagttggagtcgttttgagatgagcattagccccagctttgtaaccaatgaggaacacttacttatttttaagtatcttgacagaagcaatttgaacacagtgtcccgtcatttctagaaacagaatggtctcttctagagagcttggataaggaccttgctgggttgagttaggttttaatccttgctttggtttggaactgccttcgggctccagaacttaaattgcttggtccgtggcatctgatgtaccaacagagattaaaagtgtaaagcaacacatgggctgatgttttgttctcagaaaatagctgctggtctgcatccctccattcttgttttttatgcatatggaaaacattttcctaaaactctatattcttaagttgaagccaagactaaaatttaatgtgtcaaatgatctggtgactattataatgaataattgtgacttatttttcattctctcctgggtcatcaggtttcctgacccaactccttaatccgtataaagatgtcaaatactgtagttcacccacgccacagccctgcttcagacttaactgtggtagcctagatgagctatttgtacacagaggaaaaaaagatattttcctcttttagtaataagactttcagtatttttaatgttgacatttccagatgtttcatttagtatccaggggtctgtctggagacttctagagagggacagctcagaagtgagacccttgagctctggtgctgtaagcttgtgcaattaagttgaacagagcctgggaatttctttcctctgcacagtcccttgatatttggaatccaggttctgcccccaacccctacccacccagtggtctgttaagatgtctcagatggggctgggcttggtggctcatgcctgtactctcaacactttgggaagcaaaggcaggcagatcacaaggtcaggagttcagcctaaccaacatggtgaaaccgtgtctctactaaaaatacaaaaattagccaggcgtggtggtgcacacctgtaatcccagcactttgggaggccgaggcagacgggtcacttgaggccaggagttcgagaccagcctgggcaatatggcgagactccgtctctactacaaatacaaaagttagcctggcatggtggcgcatgcctgtaatctcagttactcaggaggctgaggcaggagcatcacttcaacccaggaggcagaagctgcagtcagccgaggtggcaccactgcacttcagcctgggcaagactggagactgcctcaaaaaaaaaagaaaaaaaatgttggtacttagatgataccatgacggcaacctccccacccccaccccgcattgataggtagtgcagaccagcccttggaggcacttctaaacagtctgctcagaaatgttttctgtttcctattcaaattgctgttttgtctcctatgtttaatcatgtatttgctattctgcttatttttctcatttggtggtaatttcaagaagagcgtttatccactattgattttcaagaaagaaaccaagcagcattgaaatcatgagtaacagaattcagaacattgtatggtggaagtcatttgtgtctgcagctgttttttcactttacaataaataagagtaaaaattgagatcatgtcaaaaaattattgcagttttaatcattatggcatagtttcacttcccctccccccattagaatcagtggagatttgttcttactagggaattttggactgctgccatttaaaacttaggtttttatttaaagcagttgtgcatttttgagaaaatgtattgggagtaactagagaggatctcccaaatttttttgtatgtctctctaggagtaaacatggcaacagtttttctagaacgtggactcactgcagggactggacccaatggcattgttaagaccctaaaatctagccaccacctgcctcccccaggtttccacacacccagttggaaggcctttccctgcccttgtccctgtctcacacccatggaggttaagctacagagctggggaaacaggagattttgagttaatggcagcctcacaaatagtgcttctgaatttctctgagggtcagcatacctcatgggagtgtgttgctcagtgcaaccttggaaaagtgggaatggcaccagacgtttttcaggtgcctcttgcaattcaaacttacatcctctataccgtcctaaaatttgcctgatcttatttggtagatttcaagttgctttcagctgtgaccgtaataactgtttcaggaactggagaaatagtggaagcgctatgtccgcgctgc

SEQ ID NO: 358891 - DNA, 2246 bp, Homo sapiens
cgccccttccgggtccggaacggctccagctgtacggactcgtcccgaggggagccggggacggcggcaccgggcgggtagggacaagactaccgcgcgtgcccccgcctggtggcagcccctctctgcgtccctcgcggcctggcaaaattacattcggccgagagttcacgctggggaagctctctgaatgcctctgagaagcgagatccggcgccatctcaccgacgagcctcccctttaccgccccgtgcgtttcctcagcactttaggaactaaagcctgtctgggtagctccctaacaggctctggagctcaatccctgggcagggaaaagggggtcctcggggctccccgctcgctgtcctttttctggacaggcagttccttggccacctggtagggccgcgttgcctggcaacggcagggtccttcttggctcggcggcgctcggggcctgaggggagaaaaccgccgcggagggcgctgggggtggcggcggcggtccgggaggtggtcgcgcgactgcgtggagcgccagggcgtccgacctctgcacctgagagaagatgaacacggccgaccaggcccgggtggggcccgcggacgacgggcctgcgccgtctggggaggaggagggagaggggggcggcgaggcgggcgggaaggagccagcagcggacgcggccccggggcccagcgctgcattccgcctcatggtgactcggcgggagccggccgtgaagctgcagtatgcggtgagcggcctggaaccgctggcttggtccgaggaccaccgcgtgtctgtgtccacggcccgcagcatcgctgtgctggagctcatctgcgacgtgcacaacccgggccaggacctggttatccaccgcacctcggtgcccgcaccgctcaacagctgtctcctcaaagttggctcaaaaacagaagttgctgagtgcaaggagaaattcgccgcctccaaggaccccacggtcagtcagactttcatgttggatagggtgttcaaccctgaggggaaggctttaccaccaatgagaggattcaagtacaccagctggtctcccatgggttgcgatgctaatggcaggtgcctcttggcagcactgaccatggacaatcgcctgaccatccaggcaaatctcacttcagcctgggcaagactggagactgcctcaaaaaaaaaagaaaaaaaatgttggtacttagatgataccatgacggcaacctccccacccccaccccgcattgataggtagtgcagaccagcccttggaggcacttctaaacagtctgctcagaaatgttttctgtttcctattcaaattgctgttttgtctcctatgtttaatcatgtatttgctattctgcttatttttctcatttggtggtaatttcaagaagagcgtttatccactattgattttcaagaaagaaaccaagcagcattgaaatcatgagtaacagaattcagaacattgtatggtggaagtcatttgtgtctgcagctgttttttcactttacaataaataagagtaaaaattgagatcatgtcaaaaaattattgcagttttaatcattatggcatagtttcacttcccctccccccattagaatcagtggagatttgttcttactagggaattttggactgctgccatttaaaacttaggtttttatttaaagcagttgtgcatttttgagaaaatgtattgggagtaactagagaggatctcccaaatttttttgtatgtctctctaggagtaaacatggcaacagtttttctagaacgtggactcactgcagggactggacccaatggcattgttaagaccctaaaatctagccaccacctgcctcccccaggtttccacacacccagttggaaggcctttccctgcccttgtccctgtctcacacccatggaggttaagctacagagctggggaaacaggagattttgagttaatggcagcctcacaaatagtgcttctgaatttctctgagggtcagcatacctcatgggagtgtgttgctcagtgcaaccttggaaaagtgggaatggcaccagacgtttttcaggtgcctcttgcaattcaaacttacatcctctataccgtcctaaaatttgcctgatcttatttggtagatttcaagttgctttcagctgtgaccgtaataactgtttcaggaactggagaaatagtggaagcgctatgtccgcgctgc

SEQ ID NO: 358892 - DNA, 479 bp, Homo sapiens
  misc_feature (1)..(1): n is a, c, g, or t
ntctatacaattcagctcggtacccccagtacaacagctccagttacaacagctctagtggattcgcctgggatgggcaatgctgacgatgaacagcaggaagaaggcacttcttccaaacaggtggtgaagcaaggcctgcaggagaggagcaaggaaggagatgtagaggagcccactgatgactcgctccccacgactggagatgctggaggccgtgagccaatggaagagaaactcctggaaatccaagggaaaatcgaagctgtggagatgcacttgaccagggaacacatgaagcgagtcttaggagaagtgtatctgcacacctggatcacagaaaacactagcatccccacccgcggactctgtaactttttaatgtctgatgaagagtatgatgacagaactgcacgggtaggtgtttattaacaaaaactctgaaattgtaaagcctgctttcttcatgagaaagaaat

SEQ ID NO: 358893 - DNA, 3561 bp, Homo sapiens
  misc_feature (1371)..(1371): n is a, c, g, or t
cgccccttccgggtccggaacggctccagctgtacggactcgtcccgaggggagccggggacggcggcaccgggcgggtagggacaagactaccgcgcgtgcccccgcctggtggcagcccctctctgcgtccctcgcggcctggcaaaattacattcggccgagagttcacgctggggaagctctctgaatgcctctgagaagcgagatccggcgccatctcaccgacgagcctcccctttaccgccccgtgcgtttcctcagcactttaggaactaaagcctgtctgggtagctccctaacaggctctggagctcaatccctgggcagggaaaagggggtcctcggggctccccgctcgctgtcctttttctggacaggcagttccttggccacctggtagggccgcgttgcctggcaacggcagggtccttcttggctcggcggcgctcggggcctgaggggagaaaaccgccgcggagggcgctgggggtggcggcggcggtccgggaggtggtcgcgcgactgcgtggagcgccagggcgtccgacctctgcacctgagagaagatgaacacggccgaccaggcccgggtggggcccgcggacgacgggcctgcgccgtctggggaggaggagggagaggggggcggcgaggcgggcgggaaggagccagcagcggacgcggccccggggcccagcgctgcattccgcctcatggtgactcggcgggagccggccgtgaagctgcagtatgcggtgagcggcctggaaccgctggcttggtccgaggaccaccgcgtgtctgtgtccacggcccgcagcatcgctgtgctggagctcatctgcgacgtgcacaacccgggccaggacctggttatccaccgcacctcggtgcccgcaccgctcaacagctgtctcctcaaagttggctcaaaaacagaagttgctgagtgcaaggagaaattcgccgcctccaaggaccccacggtcagtcagactttcatgttggatagggtgttcaaccctgaggggaaggctttaccaccaatgagaggattcaagtacaccagctggtctcccatgggttgcgatgctaatggcaggtgcctcttggcagcactgaccatggacaatcgcctgaccatccaggcaaatctcaacagactgcagtgggtccagctggttgacctgactgagatctatggagaacgtctttatgagaccagttacaggctctctaaaaatgaggccccggaaggaaatctcggggattttgctgagtttcagaggagacacagcatgcagaccccagtcagaatggagtggtcgggcatctgtaccacccagcaggtcaagcataacaacgaangccgggacgttggcagtgtgctcctggctgtcctctttgaaaacggtaatatcgccgtgtggcagtttcagctgccgtttgtaggaaaagaatccatctcttcatgcaacacaattgagtcaggaatcacctctcccagtgtattgttttggtgggaatatgagcacaataatcgaaaaatgagtggccttattgtggggagtgcttttggacccataaaaattcttcctgtcaatctcaaagcagtcaaaggctatttcactttaaggcagcctgttatcttgtggaaagaaatggaccagttacctgtgcacagtatcaaatgtgtgccactttatcatccttaccagaagtgtagttgcagcttagtagtggctgcaagaggctcttatgtattttggtgtcttcttctgatctccaaagcagggctgaatgttcacaattcccatgtcacaggccttcactcactgccaattgtctccatgactgcagacaaacagaatggaacagtctatacttgctccagtgacggaaaggtgaggcagctgattcccattttcacagatgttgcattgaagtttgaacaccagttgattaaactctcagatgtgtttggctcagtgaggactcacgggatagcagtgagcccctgcggtgcatacctggccatcatcaccactgagggcatgatcaacggcctccaccctgttaacaaaaactaccaggtccaatttgttactctcaaaacctttgaagaagcagctgctcagctcctggaatcttcagttcaaaacctttttaagcaggtagatttaatagacctagtacgctggaagattttaaaagataaacatatccctcaatttttacaagaagctttggaaaaaaagattgaaagcagtggagtcacctatttttggcgttttaagcttttcctcctgaggattttatatcagtcaatgcagaaaaccccttcagaagccttgtggaaacccacccatgaggactcaaaaatcttactagtggattcgcctgggatgggcaatgctgacgatgaacagcaggaagaaggcacttcttccaaacaggtggtgaagcaaggcctgcaggagaggagcaaggaaggagatgtagaggagcccactgatgactcgctccccacgactggagatgctggaggccgtgagccaatggaagagaaactcctggaaatccaagggaaaatcgaagctgtggagatgcacttgaccagggaacacatgaagcgagtcttaggagaagtgtatctgcacacctggatcacagaaaacactagcatccccacccgcggactctgtaactttttaatgtctgatgaagagtatgatgacagaactgcacgggtgctgattggacatatctcaaagaagatgaacaaacagactttccctgagcactgtagtttgtgtaaagagatcttgccattcacagatcgcaaacaggcagtctgttccaatggccacatttggctccggtgcttcttaacctaccagtcctgccagagtttgatatatagaaggtgtttgctccatgacagcattgcccggcatccagctccagaagatcccgactggattaagaggttactgcaaagcccctgccctttctgtgattctcctgtcttctaaataatcagtgacgggaagatggaagggcatgatgaactctgccatagaaaacttcctccagcctgaagagaaggatgcactggaggaagccggaccctcacgagtggagagaagtccttggtgattgtaaagagggcccctggagctcatttctgaatcgcactctccatttccagagactaaaggatgtcctttgaaatggctggactcagagagttggagtcgttttgagatgagcattagccccagctttgtaaccaatgaggaacacttacttatttttaagtatcttgacagaagcaatttgaacacagtgtcccgtcatttctagaaacagaatggtctcttctagagagcttggataaggaccttgctgggttgagttaggttttaatccttgctttggtttggaactgccttcgggctccagaacttaaattgcttggtccgtggcatctgatgtaccaacagagattaaaagtgtaaagcaaaaaaaaaaaagtcgacgcggccgcgaatttag

SEQ ID NO: 358894 - DNA, 5533 bp, Homo sapiens
  misc_feature (1371)..(1371): n is a, c, g, or t
cgccccttccgggtccggaacggctccagctgtacggactcgtcccgaggggagccggggacggcggcaccgggcgggtagggacaagactaccgcgcgtgcccccgcctggtggcagcccctctctgcgtccctcgcggcctggcaaaattacattcggccgagagttcacgctggggaagctctctgaatgcctctgagaagcgagatccggcgccatctcaccgacgagcctcccctttaccgccccgtgcgtttcctcagcactttaggaactaaagcctgtctgggtagctccctaacaggctctggagctcaatccctgggcagggaaaagggggtcctcggggctccccgctcgctgtcctttttctggacaggcagttccttggccacctggtagggccgcgttgcctggcaacggcagggtccttcttggctcggcggcgctcggggcctgaggggagaaaaccgccgcggagggcgctgggggtggcggcggcggtccgggaggtggtcgcgcgactgcgtggagcgccagggcgtccgacctctgcacctgagagaagatgaacacggccgaccaggcccgggtggggcccgcggacgacgggcctgcgccgtctggggaggaggagggagaggggggcggcgaggcgggcgggaaggagccagcagcggacgcggccccggggcccagcgctgcattccgcctcatggtgactcggcgggagccggccgtgaagctgcagtatgcggtgagcggcctggaaccgctggcttggtccgaggaccaccgcgtgtctgtgtccacggcccgcagcatcgctgtgctggagctcatctgcgacgtgcacaacccgggccaggacctggttatccaccgcacctcggtgcccgcaccgctcaacagctgtctcctcaaagttggctcaaaaacagaagttgctgagtgcaaggagaaattcgccgcctccaaggaccccacggtcagtcagactttcatgttggatagggtgttcaaccctgaggggaaggctttaccaccaatgagaggattcaagtacaccagctggtctcccatgggttgcgatgctaatggcaggtgcctcttggcagcactgaccatggacaatcgcctgaccatccaggcaaatctcaacagactgcagtgggtccagctggttgacctgactgagatctatggagaacgtctttatgagaccagttacaggctctctaaaaatgaggccccggaaggaaatctcggggattttgctgagtttcagaggagacacagcatgcagaccccagtcagaatggagtggtcgggcatctgtaccacccagcaggtcaagcataacaacgaangccgggacgttggcagtgtgctcctggctgtcctctttgaaaacggtaatatcgccgtgtggcagtttcagctgccgtttgtaggaaaagaatccatctcttcatgcaacacaattgagtcaggaatcacctctcccagtgtattgttttggtgggaatatgagcacaataatcgaaaaatgagtggccttattgtggggagtgcttttggacccataaaaattcttcctgtcaatctcaaagcagtcaaaggctatttcactttaaggcagcctgttatcttgtggaaagaaatggaccagttacctgtgcacagtatcaaatgtgtgccactttatcatccttaccagaagtgtagttgcagcttagtagtggctgcaagaggctcttatgtattttggtgtcttcttctgatctccaaagcagggctgaatgttcacaattcccatgtcacaggccttcactcactgccaattgtctccatgactgcagacaaacagaatggaacagtctatacttgctccagtgacggaaaggtgaggcagctgattcccattttcacagatgttgcattgaagtttgaacaccagttgattaaactctcagatgtgtttggctcagtgaggactcacgggatagcagtgagcccctgcggtgcatacctggccatcatcaccactgagggcatgatcaacggcctccaccctgttaacaaaaactaccaggtccaatttgttactctcaaaacctttgaagaagcagctgctcagctcctggaatcttcagttcaaaacctttttaagcaggtagatttaatagacctagtacgctggaagattttaaaagataaacatatccctcaatttttacaagaagctttggaaaaaaagattgaaagcagtggagtcacctatttttggcgttttaagcttttcctcctgaggattttatatcagtcaatgcagaaaaccccttcagaagccttgtggaaacccacccatgaggactcaaaaatcttactagtggattcgcctgggatgggcaatgctgacgatgaacagcaggaagaaggcacttcttccaaacaggtggtgaagcaaggcctgcaggagaggagcaaggaaggagatgtagaggagcccactgatgactcgctccccacgactggagatgctggaggccgtgagccaatggaagagaaactcctggaaatccaagggaaaatcgaagctgtggagatgcacttgaccagggaacacatgaagcgagtcttaggagaagtgtatctgcacacctggatcacagagtatgatgacagaactgcacgggtgctgattggacatatctcaaagaagatgaacaaacagactttccctgagcactgtagtttgtgtaaagagatcttgccattcacagatcgcaaacaggcagtctgttccaatggccacatttggctccggtgcttcttaacctaccagtcctgccagagtttgatatatagaaggtgtttgctccatgacagcattgcccggcatccagctccagaagatcccgactggattaagaggttactgcaaagcccctgccctttctgtgattctcctgtcttctaaataatcagtgacgggaagatggaagggcatgatgaactctgccatagaaaacttcctccagcctgaagagaaggatgcactggaggaagccggaccctcacgagtggagagaagtccttggtgattgtaaagagggcccctggagctcatttctgaatcgcactctccatttccagagactaaaggatgtcctttgaaatggctggactcagagagttggagtcgttttgagatgagcattagccccagctttgtaaccaatgaggaacacttacttatttttaagtatcttgacagaagcaatttgaacacagtgtcccgtcatttctagaaacagaatggtctcttctagagagcttggataaggaccttgctgggttgagttaggttttaatccttgctttggtttggaactgccttcgggctccagaacttaaattgcttggtccgtggcatctgatgtaccaacagagattaaaagtgtaaagcaacacatgggctgatgttttgttctcagaaaatagctgctggtctgcatccctccattcttgttttttatgcatatggaaaacattttcctaaaactctatattcttaagttgaagccaagactaaaatttaatgtgtcaaatgatctggtgactattataatgaataattgtgacttatttttcattctctcctgggtcatcaggtttcctgacccaactccttaatccgtataaagatgtcaaatactgtagttcacccacgccacagccctgcttcagacttaactgtggtagcctagatgagctatttgtacacagaggaaaaaaagatattttcctcttttagtaataagactttcagtatttttaatgttgacatttccagatgtttcatttagtatccaggggtctgtctggagacttctagagagggacagctcagaagtgagacccttgagctctggtgctgtaagcttgtgcaattaagttgaacagagcctgggaatttctttcctctgcacagtcccttgatatttggaatccaggttctgcccccaacccctacccacccagtggtctgttaagatgtctcagatggggctgggcttggtggctcatgcctgtactctcaacactttgggaagcaaaggcaggcagatcacaaggtcaggagttcagcctaaccaacatggtgaaaccgtgtctctactaaaaatacaaaaattagccaggcgtggtggtgcacacctgtaatcccagcactttgggaggccgaggcagacgggtcacttgaggccaggagttcgagaccagcctgggcaatatggcgagactccgtctctactacaaatacaaaagttagcctggcatggtggcgcatgcctgtaatctcagttactcaggaggctgaggcaggagcatcacttcaacccaggaggcagaagctgcagtcagccgaggtggcaccactgcacttcagcctgggcaagactggagactgcctcaaaaaaaaaagaaaaaaaatgttggtacttagatgataccatgacggcaacctccccacccccaccccgcattgataggtagtgcagaccagcccttggaggcacttctaaacagtctgctcagaaatgttttctgtttcctattcaaattgctgttttgtctcctatgtttaatcatgtatttgctattctgcttatttttctcatttggtggtaatttcaagaagagcgtttatccactattgattttcaagaaagaaaccaagcagcattgaaatcatgagtaacagaattcagaacattgtatggtggaagtcatttgtgtctgcagctgttttttcactttacaataaataagagtaaaaattgagatcatgtcaaaaaattattgcagttttaatcattatggcatagtttcacttcccctccccccattagaatcagtggagatttgttcttactagggaattttggactgctgccatttaaaacttaggtttttatttaaagcagttgtgcatttttgagaaaatgtattgggagtaactagagaggatctcccaaatttttttgtatgtctctctaggagtaaacatggcaacagtttttctagaacgtggactcactgcagggactggacccaatggcattgttaagaccctaaaatctagccaccacctgcctcccccaggtttccacacacccagttggaaggcctttccctgcccttgtccctgtctcacacccatggaggttaagctacagagctggggaaacaggagattttgagttaatggcagcctcacaaatagtgcttctgaatttctctgagggtcagcatacctcatgggagtgtgttgctcagtgcaaccttggaaaagtgggaatggcaccagacgtttttcaggtgcctcttgcaattcaaacttacatcctctataccgtcctaaaatttgcctgatcttatttggtagatttcaagttgctttcagctgtgaccgtaataactgtttcaggaactggagaaatagtggaagcgctatgtccgcgctgc

SEQ ID NO: 358895 - DNA, 983 bp, Homo sapiens
cgccccttccgggtccggaacggctccagctgtacggactcgtcccgaggggagccggggacggcggcaccgggcgggtagggacaagactaccgcgcgtgcccccgcctggtggcagcccctctctgcgtccctcgcggcctggcaaaattacattcggccgagagttcacgctggggaagctctctgaatgcctctgagaagcgagatccggcgccatctcaccgacgagcctcccctttaccgccccgtgcgtttcctcagcactttaggaactaaagcctgtctgggtagctccctaacaggctctggagctcaatccctgggcagggaaaagggggtcctcggggctccccgctcgctgtcctttttctggacaggcagttccttggccacctggtagggccgcgttgcctggcaacggcagggtccttcttggctcggcggcgctcggggcctgaggggagaaaaccgccgcggagggcgctgggggtggcggcggcggtccgggaggtggtcgcgcgactgcgtggagcgccagggcgtccgacctctgcacctgagagaagatgaacacggccgaccaggcccgggtggggcccgcggacgacgggcctgcgccgtctggggaggaggagggagaggggggcggcgaggcgggcgggaaggagccagcagcggacgcggccccggggcccagcgctgcattccgcctcatggtgactcggcgggagccggccgtgaagctgcagtatgcggtgagcggcctggaaccgctggcttggtccgaggaccaccgcgtgtctgtgtccacggcccgcagcatcgctgtgctggagctcatctgcgacgtgcacaacccgggccaggacctggttatccaccgcacctcggtgcccgcaccgctcaacagctgtctcctcaaagtaagtcatcccccgccatccctggggtcttcccctgtccccctctcgcggccgcat

SEQ ID NO: 358896 - DNA, 4319 bp, Homo sapiens
cggggagggcgggcctgtcgcagccgcgctggtcgccaggcgtccgggaggagcggggtccgcgcggcggacgaggcgggggcggaggcgcaggcagagcgagcgcgggaggtcgccgcagccagggacaccgcgcgccgccgctcaacatggtcgctgcgcacgctgcccattcttcctcctctgccgagtggatcgcctgcctggataaaagaccactggagcgatccagcgaagatgtggatataatcttcactcgactgaaagaagttaaagcttttgagaaatttcacccaaatctccttcatcagatttgcttatgtggttattatgagaatctggaaaagggaataacattatttcgccagggtgatattggaacaaactggtatgctgtcctggcagggtctttggatgttaaagtatctgagaccagcagtcaccaggatgctgtgaccatctgtaccctgggaattgggacggcctttggagagtccattctggacaacacaccccgccatgcaaccatcgttaccagggagagcagtgaactgctccgcatcgagcagaaggacttcaaggcactatgggagaaatatcgacagtatatggcaggacttctggctcctccttatggtgttatggaaacgggctctaacaatgacaggattcctgacaaggagaacacacctctcattgaacctcacgttcctcttcgtcctgctaacaccattaccaaggtcccttcagagaagatcctcagagctggaaaaattttacgaaatgccattctctctcgagcacctcacatgataagagatagaaaataccacctaaagacatacagacaatgctgtgtgggaactgaactggtggactggatgatgcagcagacaccatgtgttcactcccggactcaagctgttggcatgtggcaagtcctgttagaagatggtgttctcaaccacgtggaccaggagcaccatttccaagacaaatatttattctatcgatttctggatgatgagcacgaggatgcccctttgcctactgaggaggagaagaaggagtgtgatgaggagctccaggacaccatgctgctgctgtcacagatgggccccgacgcccacatgaggatgatccttcgcaaaccacctggccagaggactgtggatgacctagagattatctatgaggagcttcttcatattaaagccttatcccatctttctaccacagtgaaacgagagttagcaggtgttctcatttttgagtctcacgccaaaggagggactgtgttgtttaaccagggggaagaaggtacctcctggtacattattctaaaaggatcagtgaatgtagtcatttacggcaagggtgtggtctgcaccctgcatgaaggagatgacttcggcaagttagcactagtgaatgatgccccacgagctgcctctatcgtcttacgagaagataactgccatttcttaagagtagacaaggaggatttcaaccggatcctaagggacgtggaggcgaatacagtcagacttaaagaacatgaccaagatgtcttggtgctggagaaggtcccagcagggaacagagcttctaatcaaggaaactcacagcctcagcaaaagtatactgtgatgtcaggaacacctgaaaaaattttagagcattttctagaaacaatacgccttgaggcaactttaaatgaagcaacagattctgttttaaatgactttattatgatgcactgtgtttttatgccaaatacccagctttgcccggcactggtggcccactaccacgcacagccttcacaaggtacagaacaggagaaaatggattatgccctcaacaataagaggcgagtcatccgcctggttctacagtgggctgccatgtatggagacctcctgcaagaggatgacgtatctatggccttcctggaggagttttatgtatctgtatcagatgatgcccggatgattgctgccctcaaggagcaactgccagagttggagaagattgtcaagcaaatctcagaagatgcaaaggcaccacaaaagaagcacaaggttcttttgcaacagttcaatacgggcgatgagagagcccagaagcgccagcctatccgcggctctgatgaagttctgtttaaggtctattgcatggaccacacctacacaaccattcgggtgccagtggccacttcggtgaaggaagtcatcagtgcagttgccgacaagctgggctccggggagggcctgatcatagtcaagatgagttccggaggagaaaaggtggtgctcaaacctaatgatgtttcagtatttacgacgctcaccattaatggacgcctgtttgcttgcccgcgagagcaattcgattcactgactcccttaccagaacaggaaggcccaactgttggaacagtgggaacttttgaactgatgagctccaaagatttagcataccagatgacaatttatgattgggaactcttcaactgcgtgcatgagctggagctaatctatcacacatttggaaggcataattttaaaaagaccacagcaaacttggatttgttcctgaggagatttaatgaaattcagttttgggtcgtcactgagatctgcctttgttctcagctcagcaagcgtgttcagctattaaaaaaatttattaagatagcagcccactgtaaggagtataaaaatctgaattccttttttgccatcgtcatgggactaagtaacgttgctgtgagccgcttggcactaacgtgggagaaactgccaagcaagttcaagaagttctatgcggagtttgaaagtttaatggacccttcaaggaaccacagggcctacaggctgacagtagctaagctggaacctcctctcatccccttcatgcctttgctcattaaagatatgacatttactcatgaggggaacaagacgttcattgacaatctagtaaactttgaaaaaatgcgcatgattgcaaatacggccagaacagtgagatactacaggagccaacccttcaatcctgatgcagctcaagctaataagaaccatcaggatgtccggagttatgtacggcaattaaatgtgattgacaaccagagaactttatcacagatgtcacacagattagagcctcgtcgaccatagacatttcaaatgcccaaagcaacagtttgtctccagtccacaatctttcaaaaatgccatttatgctactactgactgtattgccactagagaattctacaaaacaagcaaaaacacatcctgagacacctcagggctgcattcagcttaccagctacctagcaagagaaggaattatttgacatgcctaaagcttacacactctagcttaggaatccccagtttgtggctaccctgtttcatttccacttgtgccatcttctttgctgaagtgttgaataaggcccacgtgaagagtttggtagaaatagccttgtcaagagaactagcaagcccctgacatttttttctaagagtgtttatgggatgagatgtgctacaaatgggatagatttggataaaattttaactcaacatcttgatttggagcctggggtttcgggaaggtgttgaggaatctatagaagtccaaattataggttgtattcttccatcttcattgtcttacctctgaaggaatagaacctgaccacattattatgaaacattatggctgtttatgtaatttagggaggactggtctgtaatttctgaatgtatatagaataatatttatgtttacaatgtaacttttcaaaatttacaaatcaggattatatacataagaattccactaagaaatgccaagattcttaaatttgccagcgttaaagtagaaaataacatttcagaagagcacaatatgcataaaacatttttcaaaattgaaatattttcctgggcattaaaaacctttactattggctacaaatttattgtacctgatgaaaacatattttctggacttaaatgttattacaaatatcttaattttcagtaattgttttgcactttcaaagattgtaaatagttcattcaatcaatggtatagagttatttatttgctacataatagatactgtgccaaataattactttttatttattttatttagtacgtaattttgaagtacattttttcctgttttcacaattagactacatttaatgtgtaggaattgtatgtatgtatatcttctgtaaataacatctagtatcttcactaaatataattgtcgaccgggaaaaaaaaaa

SEQ ID NO: 358897 - DNA, 3282 bp, Homo sapiens
cggggagggcgggcctgtcgcagccgcgctggtcgccaggcgtccgggaggagcggggtccgcgcggcggacgaggcgggggcggaggcgcaggcagagcgagcgcgggaggtcgccgcagccagggacaccgcgcgccgccgctcaacatggtcgctgcgcacgctgcccattcttcctcctctgccgagtggatcgcctgcctggataaaagaccactggagcgatccagcgaagatgtggatataatcttcactcgactgaaagaagttaaagcttttgagaaatttcacccaaatctccttcatcagatttgcttatgtggttattatgagaatctggaaaagggaataacattatttcgccagggtgatattggaacaaactggtatgctgtcctggcagggtctttggatgttaaagtatctgagaccagcagtcaccaggatgctgtgaccatctgtaccctgggaattgggacggcctttggagagtccattctggacaacacaccccgccatgcaaccatcgttaccagggagagcagtgaactgctccgcatcgagcagaaggacttcaaggcactatgggagaaatatcgacagtatatggcaggacttctggctcctccttatggtgttatggaaacgggctctaacaatgacaggattcctgacaaggagaacacacctctcattgaacctcacgttcctcttcgtcctgctaacaccattaccaaggtcccttcagagaagatcctcagagctggaaaaattttacgaaatgccattctctctcgagcacctcacatgataagagatagaaaataccacctaaagacatacagacaatgctgtgtgggaactgaactggtggactggatgatgcagcagacaccatgtgttcactcccggactcaagctgttggcatgtggcaagtcctgttagaagatggtgttctcaaccacgtggaccaggagcaccatttccaagacaaatatttattctatcgatttctggatgatgagcacgaggatgcccctttgcctactgaggaggagaagaaggagtgtgatgaggagctccaggacaccatgctgctgctgtcacagatgggccccgacgcccacatgaggatgatccttcgcaaaccacctggccagaggactgtggatgacctagagattatctatgaggagcttcttcatattaaagccttatcccatctttctaccacagtgaaacgagagttagcaggtgttctcatttttgagtctcacgccaaaggagggactgtgttgtttaaccagggggaagaaggtacctcctggtacattattctaaaaggatcagtgaatgtagtcatttacggcaagggtgtggtctgcaccctgcatgaaggagatgacttcggcaagttagcactagtgaatgatgccccacgagctgcctctatcgtcttacgagaagataactgccatttcttaagagtagacaaggaggatttcaaccggatcctaagggacgtggaggcgaatacagtcagacttaaagaacatgaccaagatgtcttggtgctggagaaggtcccagcagggaacagagcttctaatcaaggaaactcacagcctcagcaaaagtatactgtgatgtcaggaacacctgaaaaaattttagagcattttctagaaacaatacgccttgaggcaactttaaatgaagcaacagattctgttttaaatgactttattatgatgcactgtgtttttatgccaaatacccagctttgcccggcactggtggcccactaccacgcacagccttcacaaggtacagaacaggagaaaatggattatgccctcaacaataagaggcgagtcatccgcctggttctacagtgggctgccatgtatggagacctcctctcatccccttcatgcctttgctcattaaagatatgacatttactcatgaggggaacaagacgttcattgacaatctagtaaactttgaaaaaatgcgcatgattgcaaatacggccagaacagtgagatactacaggagccaacccttcaatcctgatgcagctcaagctaataagaaccatcaggatgtccggagttatgtacggcaattaaatgtgattgacaaccagagaactttatcacagatgtcacacagattagagcctcgtcgaccatagacatttcaaatgcccaaagcaacagtttgtctccagtccacaatctttcaaaaatgccatttatgctactactgactgtattgccactagagaattctacaaaacaacaagagaaggaattatttgacatgcctaaagcttacacactctagcttaggaatccccagtttgtggctaccctgtttcatttccacttgtgccatcttctttgctgaagtgttgaataaggcccacgtgaagagtttggtagaaatagccttgtcaagagaactagcaagcccctgacatttttttctaagagtgtttatgggatgagatgtgctacaaatgggatagatttggataaaattttaactcaacatcttgatttggagcctggggtttcgggaaggtgttgaggaatctatagaagtccaaattataggttgtattcttccatcttcattgtcttacctctgaaggaatagaacctgaccacattattatgaaacattatggctgtttatgtaatttagggaggactggtctgtaatttctgaatgtatatagaataatatttatgtttacaatgtaacttttcaaaatttacaaatcaggattatatacataagaattccactaagaaatgccaagattcttaaatttgccagcgttaaagtagaaaataacatttcagaagagcacaatatgcataaaacatttttcaaaattgaaatattttcctgggcattaaaaacctttactattggctacaaatttattgtacctgatgaaaacatattttctggacttaaatgttattacaaatatcttaattttcagtaattgttttgcactttcaaagattgtaaatagttcattcaatcaatggtatagagttatttatttgctacataatagatactgtgccaaataattactttttatttattttatttagtacgtaattttgaagtacattttttcctgttttcacaattagactacatttaatgtgtaggaattgtatgtatgtatatcttctgtaaataacatctagtatcttcactaaatataattgtcgaccgggaaaaaaaaaa

SEQ ID NO: 358898 - DNA, 2799 bp, Homo sapiens
gaattcccgttgggcggggcagggagttcgtagccgcctctgggtaactcgactcgggcggccaaacctccggaggccggggacggaaggcgggcccgcagcagatcctggatccggaatctcccgggcaggagcggaatctgtcccgaaccgggtctgtgaggaactcgcgaacttggattaggaaatcccggagcccggatcgacaaatcccggaacccggaattaagatcgccaagtcccggatcgcggagcacagagcacggagtggactcgacgcggagcccggagtccggatcgcggcaccgcgggacgggacggagcgatgtcgggccgaggcgcgggcgggttcccgctgcccccgctaagccctggcggcggcgccgtggctgcggccctgggagcgccgcctccccccgcgggacccggcatgctgcccggaccggcgctccggggaccgggtccggcaggaggcgtggggggccccggggccgccgccttccgccccatgggccccgcgggccccgcggcgcagtaccagcgacctggcatgtcaccagggaaccggatgcccatggctggcttgcaggtgggaccccctgctggctccccatttggtgcagcagctccgcttcgacctggcatgccacccaccatgatggatccattccgaaaacgcctgcttgtgccccaggcgcagcctcccatgcctgcccagcgccgggggttaaagaggaggaagatggcagataaggttctacctcagcgaatccgggagcttgttccagagtctcaggcgtacatggatctcttggcttttgagcggaagctggaccagaccattgctcgcaagcggatggagatccaggaggccatcaaaaagcctctgacacaaaagcgaaagcttcggatctacatttccaatacgttcagtcccagcaaggcggaaggcgatagtgcaggaactgcaggggacccctgggggaaccccagcaggggacaaggtggcttcctgggaactccgagtggaaggaaaactgctggatgatcctagcaaacagaagaggaagttttcttcattctttaagagcctcgtcattgagctggacaaggagctgtacgggcctgacaatcacctggtggagtggcaccggatgcccaccacccaggagacagatggcttccaagtaaaacggcctggagacctcaacgtcaagtgcaccctcctgctcatgctggatcatcagcctccccagtacaaattggacccccgattggcaaggctgctgggagtgcacacgcagacgagggccgccatcatgcaggccctgtggctttacatcaagcacaaccagctgcaggatgggcacgagcgggagtacatcaactgcaaccgttacttccgccagatcttcagttgtggccgactccgtttctccgagattcccatgaagctggcagggttgctgcagcatccagaccccattgtcatcaaccatgtcattagtgtcgaccctaacgaccagaagaagacagcctgttacgacatcgatgtggaggtggacgacccactgaaggcccaaatgagcaattttctggcctctaccaccaatcagcaggagatcgcctcccttgatgtcaagatccatgagaccattgagtccatcaaccagctgaagacccagagagatttcatgctcagttttagcaccgacccccaggacttcatccaggaatggctccgttcccagcgccgagacctcaagatcatcactgatgtgattggaaatcctgaggaggagagacgagctgctttctaccaccagccctgggcccaggaagcagtaggcaggcacatctttgccaaggtgcagcagcgaaggcaggaactggaacaggtgctgggaattcgcctgacctaactgctcagggatctttcttcccagccctggagcctggagggagaccaccctctgggtccttgctggggccgcagacacgtaggctggggtgaggagtgtctgctgtcaccctctactctccagctttagttttataaatgtagtgataggattccttgttgcttggtccccaaagccttatactttttgcattggctttaattgggttcagcagatgcctcctctgcccccctgcaggcaggcccaagtaggactgctggaggctgtgctttgacattgtaagacatttccgaaccaaaggctgctgggtttgcatgtttacagactccccctggggcgagggtcagagctggctctggggagctgggctaggaagaggaggtgcagcccagactcttcctagcctttctaaaccaaagttctttgccattcctacaagcccagccttgctgctggttttttcctttcctttgggtatttgcactattttgggagcaagttttctatgtgggagccactttttttgtacaggggtaagttgggggttttcagggagcctgttaggtgcctccttcttttctttcctcaatctatgcaagcggctctggccgccatcatctcctgggatgccagagggctgcctctccagcggcttgggccggggaggggacactccagttctctagcatggcctgaggtatggggtatgtgcatgtggaggccagggtaaggtgaatggggaggctgggaggactggtgttgccctttggagcttggtgaggagggtgggcctagggcttggcgagtgccacttctggcaggtttggaaatttccaaataaatccttttgtctattggtggtgcctggacctggtcc

SEQ ID NO: 358899 - DNA, 2705 bp, Homo sapiens
ggcagtgacactgcccctgtgcctctcagccatgcttcttcttcatgatgggagaaagagaaggagggcagggcttggcaggactgtctgagagaatagggaccagcttgcccagggaatagggcacagcatgctggggctggaaggtagcaatgggccctgaaaagctccccaaggcccttccctctgcaggcaggaccctcctcccagcccaggttctggcaggcctcattcgctggcatggctgccagggcggttgcagggggcagggcaggtgtggtttacactctgtgctcaggcgcccactcccctttgttcctggggctccagcagggctctggtgtgctgctcaggccctacctggctgacgagagggatggagggcatgggctatgggtcccggagggccttgcccctgacctatgcacccccgttggctcacttccccccgacctggcatgtcaccagggaaccggatgcccatggctggcttgcaggtgggaccccctgctggctccccatttggtgcagcagctccgcttcgacctggcatgccacccaccatgatggatccattccgaaaacgcctgcttgtgccccaggcgcagcctcccatgcctgcccagcgccggggaagaggaggacagatggccagataaggtctacctcaggggaatccgggagcttgttccagagtctcaggcgtacatggatctcttggcttttgagcggaagctggaccagaccattgctcgcaagcggatggagatccaggaggccatcaaaaagcctctgacacaaaagcgaaagcttcggatctacatttccaatacgttcagtcccagcaaggcggaaggcgatagtgcaggaactgcaggggacccctgggggaaccccagcaggggacaaggtggcttcctgggaactccgagtggaaggaaaactgctggatgatcctagcaaacagaagaggaagttttcttcattctttaagagcctcgtcattgagctggacaaggagctgtacgggcctgacaatcacctggtggagtggcaccggatgcccaccacccaggagacagatggcttccaagtaaaacggcctggagacctcaacgtcaagtgcaccctcctgctcatgctggatcatcagcctccccagtacaaattggacccccgattggcaaggctgctgggagtgcacacgcagacgagggccgccatcatgcaggccctgtggctttacatcaagcacaaccagctgcaggatgggcacgagcgggagtacatcaactgcaaccgttacttccgccagatcttcagttgtggccgactccgtttctccgagattcccatgaagctggcagggttgctgcagcatccagaccccattgtcatcaaccatgtcattagtgtcgaccctaacgaccagaagaagacagcctgttacgacatcgatgtggaggtggacgacccactgaaggcccaaatgagcaattttctggcctctaccaccaatcagcaggagatcgcctcccttgatgtcaagatccatgagaccattgagtccatcaaccagctgaagacccagagagatttcatgctcagttttagcaccgacccccaggacttcatccaggaatggctccgttcccagcgccgagacctcaagatcatcactgatgtgattggaaatcctgaggaggagagacgagctgctttctaccaccagccctgggcccaggaagcagtaggcaggcacatctttgccaaggtgcagcagcgaaggcaggaactggaacaggtgctgggaattcgcctgacctaactgctcagggatctttcttcccagccctggagcctggagggagaccaccctctgggtccttgctggggccgcagacacgtaggctggggtgaggagtgtctgctgtcaccctctactctccagctttagttttataaatgtagtgataggattccttgttgcttggtccccaaagccttatactttttgcattggctttaattgggttcagcagatgcctcctctgcccccctgcaggcaggcccaagtaggactgctggaggctgtgctttgacattgtaagacatttccgaaccaaaggctgctgggtttgcatgtttacagactccccctggggcgagggtcagagctggctctggggagctgggctaggaagaggaggtgcagcccagactcttcctagcctttctaaaccaaagttctttgccattcctacaagcccagccttgctgctggttttttcctttcctttgggtatttgcactattttgggagcaagttttctatgtgggagccactttttttgtacaggggtaagttgggggttttcagggagcctgttaggtgcctccttcttttctttcctcaatctatgcaagcggctctggccgccatcatctcctgggatgccagagggctgcctctccagcggcttgggccggggaggggacactccagttctctagcatggcctgaggtatggggtatgtgcatgtggaggccagggtaaggtgaatggggaggctgggaggactggtgttgccctttggagcttggtgaggagggtgggcctagggcttggcgagtgccacttctggcaggtttggaaatttccaaataaatccttttgtctattggtggtgcctggacctggtcc

SEQ ID NO: 358900 - DNA, 1831 bp, Homo sapiens
gaatgccggctctctggggaattccggctctatgggccggctctctgggaactccgagtggaaggaaaactgctggatgatcctagcaaacagaagaggaagttttcttcattctttaagagcctcgtcattgagctggacaaggagctgtacgggcctgacaatcacctggtggagtggcaccggatgcccaccacccaggagacagatggcttccaagtaaaacggcctggagacctcaacgtcaagtgcaccctcctgctcatgctggatcatcagcctccccagtacaaattggacccccgattggcaaggctgctgggagtgcacacgcagacgagggccgccatcatgcaggccctgtggctttacatcaagcacaaccagctgcaggatgggcacgagcgggagtacatcaactgcaaccgttacttccgccagatcttcagttgtggccgactccgtttctccgagattcccatgaagctggcagggttgctgcagcatccagaccccattgtcatcaaccatgtcattagtgtcgaccctaacgaccagaagaagacagcctgttacgacatcgatgtggaggtggacgacccactgaaggcccaaatgagcaattttctggcctctaccaccaatcagcaggagatcgcctcccttgatgtcaagatccatgagaccattgagtccatcaaccagctgaagacccagagagatttcatgctcagttttagcaccgacccccaggacttcatccaggaatggctccgttcccagcgccgagacctcaagatcatcactgatgtgattggaaatcctgaggaggagagacgagctgctttctaccaccagccctgggcccaggaagcagtaggcaggcacatctttgccaaggtgcagcagcgaaggcaggaactggaacaggtgctgggaattcgcctgacctaactgctcagggatctttcttcccagccctggagcctggagggagaccaccctctgggtccttgctggggccgcagacacgtaggctggggtgaggagtgtctgctgtcaccctctactctccagctttagttttataaatgtagtgataggattccttgttgcttggtccccaaagccttatactttttgcattggctttaattgggttcagcagatgcctcctctgcccccctgcaggcaggcccaagtaggactgctggaggctgtgctttgacattgtaagacatttccgaaccaaaggctgctgggtttgcatgtttacagactccccctggggcgagggtcagagctggctctggggagctgggctaggaagaggaggtgcagcccagactcttcctagcctttctaaaccaaagttctttgccattcctacaagcccagccttgctgctggttttttcctttcctttgggtatttgcactattttgggagcaagttttctatgtgggagccactttttttgtacaggggtaagttgggggttttcagggagcctgttaggtgcctccttcttttctttcctcaatctatgcaagcggctctggccgccatcatctcctgggatgccagagggctgcctctccagcggcttgggccggggaggggacactccagttctctagcatggcctgaggtatggggtatgtgcatgtggaggccagggtaaggtgaatggggaggctgggaggactggtgttgccctttggagcttggtgaggagggtgggcctagggcttggcgagtgccacttctggcaggtttggaaatttccaaataaatccttttgtctattggtggtgcctggacctggtcc

SEQ ID NO: 358901 - DNA, 2719 bp, Homo sapiens
gaattcccgttgggcggggcagggagttcgtagccgcctctgggtaactcgactcgggcggccaaacctccggaggccggggacggaaggcgggcccgcagcagatcctggatccggaatctcccgggcaggagcggaatctgtcccgaaccgggtctgtgaggaactcgcgaacttggattaggaaatcccggagcccggatcgacaaatcccggaacccggaattaagatcgccaagtcccggatcgcggagcacagagcacggagtggactcgacgcggagcccggagtccggatcgcggcaccgcgggacgggacggagcgatgtcgggccgaggcgcgggcgggttcccgctgcccccgctaagccctggcggcggcgccgtggctgcggccctgggagcgccgcctccccccgcgggacccggcatgctgcccggaccggcgctccggggaccgggtccggcaggaggccgacctggcatgtcaccagggaaccggatgcccatggctggcttgcaggtgggaccccctgctggctccccatttggtgcagcagctccgcttcgacctggcatgccacccaccatgatggatccattccgaaaacgcctgcttgtgccccaggcgcagcctcccatgcctgcccagcgccgggggttaaagaggaggaagatggcagataaggttctacctcagcgaatccgggagcttgttccagagtctcaggcgtacatggatctcttggcttttgagcggaagctggaccagaccattgctcgcaagcggatggagatccaggaggccatcaaaaagcctctgacacaaaagcgaaagcttcggatctacatttccaatacgttcagtcccagcaaggcggaaggcgatagtgcaggaactgcaggggacccctgggggaaccccagcaggggacaaggtggcttcctgggaactccgagtggaaggaaaactgctggatgatcctagcaaacagaagaggaagttttcttcattctttaagagcctcgtcattgagctggacaaggagctgtacgggcctgacaatcacctggtggagtggcaccggatgcccaccacccaggagacagatggcttccaagtaaaacggcctggagacctcaacgtcaagtgcaccctcctgctcatgctggatcatcagcctccccagtacaaattggacccccgattggcaaggctgctgggagtgcacacgcagacgagggccgccatcatgcaggccctgtggctttacatcaagcacaaccagctgcaggatgggcacgagcgggagtacatcaactgcaaccgttacttccgccagatcttcagttgtggccgactccgtttctccgagattcccatgaagctggcagggttgctgcagcatccagaccccattgtcatcaaccatgtcattagtgtcgaccctaacgaccagaagaagacagcctgttacgacatcgatgtggaggtggacgacccactgaaggcccaaatgagcaattttctggcctctaccaccaatcagcaggagatcgcctcccttgatgtcaagatccatgagaccattgagtccatcaaccagctgaagacccagagagatttcatgctcagttttagcaccgacccccaggacttcatccaggaatggctccgttcccagcgccgagacctcaagatcatcactgatgtgattggaaatcctgaggaggagagacgagctgctttctaccaccagccctgggcccaggaagcagtaggcaggcacatctttgccaaggtgcagcagcgaaggcaggaactggaacaggtgctgggaattcgcctgacctaactgctcagggatctttcttcccagccctggagcctggagggagaccaccctctgggtccttgctggggccgcagacacgtaggctggggtgaggagtgtctgctgtcaccctctactctccagctttagttttataaatgtagtgataggattccttgttgcttggtccccaaagccttatactttttgcattggctttaattgggttcagcagatgcctcctctgcccccctgcaggcaggcccaagtaggactgctggaggctgtgctttgacattgtaagacatttccgaaccaaaggctgctgggtttgcatgtttacagactccccctggggcgagggtcagagctggctctggggagctgggctaggaagaggaggtgcagcccagactcttcctagcctttctaaaccaaagttctttgccattcctacaagcccagccttgctgctggttttttcctttcctttgggtatttgcactattttgggagcaagttttctatgtgggagccactttttttgtacaggggtaagttgggggttttcagggagcctgttaggtgcctccttcttttctttcctcaatctatgcaagcggctctggccgccatcatctcctgggatgccagagggctgcctctccagcggcttgggccggggaggggacactccagttctctagcatggcctgaggtagcaggcaagcagacgcccccatagattgtcagctgtaagtgaaactcctagtgaaaaagaggggagccctgtgttaggagtccccataaacatgtactgtaattctttgtatatagaaaaaaaatttactgtaaagtaaagtttaactttactcataaaaaaa

SEQ ID NO: 358902 - DNA, 1347 bp, Homo sapiens
taccggcccggtatgggatgtcccagtagactgatggtcatctacatgtcactggtgtcgaccctaacgaccagaagaagacagcctgttacgacatcgatgtggaggtggacgacccactgaaggcccaaatgagcaattttctggcctctaccaccaatcagcaggagatcgcctcccttgatgtcaagatccatgagaccattgagtccatcaaccagctgaagacccagagagatttcatgctcagttttagcaccgacccccaggacttcatccaggaatggctccgttcccagcgccgagacctcaagatcatcactgatgtgattggaaatcctgaggaggagagacgagctgctttctaccaccagccctgggcccaggaagcagtaggcaggcacatctttgccaaggtgcagcagcgaaggcaggaactggaacaggtgctgggaattcgcctgacctaactgctcagggatctttcttcccagccctggagcctggagggagaccaccctctgggtccttgctggggccgcagacacgtaggctggggtgaggagtgtctgctgtcaccctctactctccagctttagttttataaatgtagtgataggattccttgttgcttggtccccaaagccttatactttttgcattggctttaattgggttcagcagatgcctcctctgcccccctgcaggcaggcccaagtaggactgctggaggctgtgctttgacattgtaagacatttccgaaccaaaggctgctgggtttgcatgtttacagactccccctggggcgagggtcagagctggctctggggagctgggctaggaagaggaggtgcagcccagactcttcctagcctttctaaaccaaagttctttgccattcctacaagcccagccttgctgctggttttttcctttcctttgggtatttgcactattttgggagcaagttttctatgtgggagccactttttttgtacaggggtaagttgggggttttcagggagcctgttaggtgcctccttcttttctttcctcaatctatgcaagcggctctggccgccatcatctcctgggatgccagagggctgcctctccagcggcttgggccggggaggggacactccagttctctagcatggcctgaggtatggggtatgtgcatgtggaggccagggtaaggtgaatggggaggctgggaggactggtgttgccctttggagcttggtgaggagggtgggcctagggcttggcgagtgccacttctggcaggtttggaaatttccaaataaatccttttgtctattggtggtgcctggacctggtcc

SEQ ID NO: 358903 - DNA, 2175 bp, Homo sapiens
gaattcccgttgggcggggcagggagttcgtagccgcctctgggtaactcgactcgggcggccaaacctccggaggccggggacggaaggcgggcccgcagcagatcctggatccggaatctcccgggcaggagcggaatctgtcccgaaccgggtctgtgaggaactcgcgaacttggattaggaaatcccggagcccggatcgacaaatcccggaacccggaattaagatcgccaagtcccggatcgcggagcacagagcacggagtggactcgacgcggagcccggagtccggatcgcggcaccgcgggacgggacggagcgatgtcgggccgaggcgcgggcgggttcccgctgcccccgctaagccctggcggcggcgccgtggctgcggccctgggagcgccgcctccccccgcgggacccggcatgctgcccggaccggcgctccggggaccgggtccggcaggaggccgacctggcatgtcaccagggaaccggatgcccatggctggcttgcaggtgggaccccctgctggctccccatttggtgcagcagctccgcttcgacctggcatgccacccaccatgatggatccattccgaaaacgcctgcttgtgccccaggcgcagcctcccatgcctgcccagcgccgggggttaaagaggaggaagatggcagataaggttctacctcagcgaatccgggagcttgttccagagtctcaggcgtacatggatctcttggcttttgagcggaagctggaccagaccattgctcgcaagcggatggagatccaggaggccatcaaaaagcctctgacacaaaagcgaaagcttcggatctacatttccaatacgttcagtcccagcaaggcggaaggcgatagtgcaggaactgcaggggacccctgggggaaccccagcaggggacaaggtggcttcctgggaactccgagtggaaggaaaactgctggatgatcctagcaaacagaagaggaagttttcttcattctttaagagcctcgtcattgagctggacaaggagctgtacgggcctgacaatcacctggtggagtggcaccggatgcccaccacccaggagacagatggcttccaagtaaaacggcctggagacctcaacgtcaagtgcaccctcctgctcatgctggatcatcagcctccccagtacaaattggacccccgattggcaaggctgctgggagtgcacacgcagacgagggccgccatcatgcaggccctgtggctttacatcaagcacaaccagctgcaggatgggcacgagcgggagtacatcaactgcaaccgttacttccgccagatcttcagttgtggccgactccgtttctccgagattcccatgaagctggcagggttgctgcagcatccagaccccattgtcatcaaccatgtcattagtgtcgaccctaacgaccagaagaagacagcctgttacgacatcgatgtggaggtggacgacccactgaaggcccaaatgagcaattttctggcctctaccaccaatcagcaggagatcgcctcccttgatgtcaagatccatgagaccattgagtccatcaaccagctgaagacccagagagatttcatgctcagttttagcaccgacccccaggacttcatccaggaatggctccgttcccagcgccgagacctcaagatcatcactgatgtgattggaaatcctgaggaggagagacgagctgctttctaccaccagccctgggcccaggaagcagtaggcaggcacatctttgccaaggtgcagcagcgaaggcaggaactggaacaggtgctgggaattcgcctgacctaactgctcagggatctttcttcccagccctggagcctggagggagaccaccctctgggtccttgctggggccgcagacacgtaggctggggtgaggagtgtctgctgtcaccctctactctccagctttagttttataaatgtagtgataggattccttgttgcttggtccccaaagccttatactttttgcattggctttaattgggttcagcagatgcctcctctgcccccctgcaggcaggcccaaaattaggatttggtcgtgagggattttagtcttttgaacaattgtcaaagaacatttattctcgaaactaaa

SEQ ID NO: 358904 - DNA, 1929 bp, Homo sapiens
gaattcccgttgggcggggcagggagttcgtagccgcctctgggtaactcgactcgggcggccaaacctccggaggccggggacggaaggcgggcccgcagcagatcctggatccggaatctcccgggcaggagcggaatctgtcccgaaccgggtctgtgaggaactcgcgaacttggattaggaaatcccggagcccggatcgacaaatcccggaacccggaattaagatcgccaagtcccggatcgcggagcacagagcacggagtggactcgacgcggagcccggagtccggatcgcggcaccgcgggacgggacggagcgatgtcgggccgaggcgcgggcgggttcccgctgcccccgctaagccctggcggcggcgccgtggctgcggccctgggagcgccgcctccccccgcgggacccggcatgctgcccggaccggcgctccggggaccgggtccggcaggaggcgtggggggccccggggccgccgccttccgccccatgggccccgcgggccccgcggcgcagtaccagcgacctggcatgtcaccagggaaccggatgcccatggctggcttgcaggtgggaccccctgctggctccccatttggtgcagcagctccgcttcgacctggcatgccacccaccatgatggatccattccgaaaacgcctgcttgtgccccaggcgcagcctcccatgcctgcccagcgccgggggttaaagaggaggaagatggcagataaggttctacctcagcgaatccgggagcttgttccagagtctcaggcgtacatggatctcttggcttttgagcggaagctggaccagaccattgctcgcaagcggatggagatccaggaggccatcaaaaagcctctgacacaaaagcgaaagcttcggatctacatttccaatacgttcagtcccagcaaggcggaaggcgatagtgcaggaactgcaggggacccctgggggaaccccagcaggggacaaggtggcttcctgggaactccgagtggaaggaaaactgctggatgatcctagcaaacagaagaggaagttttcttcattctttaagagcctcgtcattgagctggacaaggagctgtacgggcctgacaatcacctggtggagtggcaccggatgcccaccacccaggagacagatggcttccaagtaaaacggcctggagacctcaacgtcaagtgcaccctcctgctcatgctggatcatcagcctccccagtacaaattggacccccgattggcaaggctgctgggagtgcacacgcagacgagggccgccatcatgcaggccctgtggctttacatcaagcacaaccagctgcaggatgggcacgagcgggagtacatcaactgcaaccgttacttccgccagatcttcagttgtggccgactccgtttctccgagattcccatgaagctggcagggttgctgcagcatccagaccccattgtcatcaaccatgtcattagtgtcgaccctaacgaccagaagaagacagcctgttacgacatcgatgtggaggtggacgacccactgaaggcccaaatgagcaattttctggcctctaccaccaatcagcaggagatcgcctcccttgatgtcaagatccatgagaccattgagtccatcaaccagctgaagacccagagggctgcctctccagcggcttgggccggggaggggacactccagttctctagcatggcctgaggtatggggtatgtgcatgtggaggccagggtaaggtgaatggggaggctgggaggactggtgttgccctttggagcttggtgaggagggtgggcctagggcttggcgagtgccacttctggcaggtttggaaatttccaaataaatccttttgtctattggtggtgcctggacctggtcc

SEQ ID NO: 358905 - DNA, 1454 bp, Homo sapiens
gaattcccgttgggcggggcagggagttcgtagccgcctctgggtaactcgactcgggcggccaaacctccggaggccggggacggaaggcgggcccgcagcagatcctggatccggaatctcccgggcaggagcggaatctgtcccgaaccgggtctgtgaggaactcgcgaacttggattaggaaatcccggagcccggatcgacaaatcccggaacccggaattaagatcgccaagtcccggatcgcggagcacagagcacggagtggactcgacgcggagcccggagtccggatcgcggcaccgcgggacgggacggagcgatgtcgggccgaggcgcgggcgggttcccgctgcccccgctaagccctggcggcggcgccgtggctgcggccctgggagcgccgcctccccccgcgggacccggcatgctgcccggaccggcgctccggggaccgggtccggcaggaggcgtggggggccccggggccgccgccttccgccccatgggccccgcgggccccgcggcgcagtaccagcgacctggcatgtcaccagggaaccggatgcccatggctggcttgcaggtgggaccccctgctggctccccatttggtgcagcagctccgcttcgacctggcatgccacccaccatgatggatccattccgaaaacgcctgcttgtgccccaggcgcagcctcccatgcctgcccagcgccgggggttaaagaggaggaagatggcagataaggttctacctcagcgaatccgggagcttgttccagagtctcaggcgtacatggatctcttggcttttgagcggaagctggaccagaccattgctcgcaagcggatggagatccaggaggccatcaaaaagcctctgacacaaaagcgaaagcttcggatctacatttccaatacgttcagtcccagcaaggcggaaggcgatagtgcaggaactgcaggggacccctgggggaaccccagcaggggacaaggtggcttcctgggaactccgagtggaaggaaaactgctggatgatcctagcaaacagaagaggaagttttcttcattctttaagagcctcgtcattgagctggacaaggagctgtacgggcctgacaatcacctggtggagtggcaccggatgcccaccacccaggagacagatggcttccaagtaaaacggcctggagacctcaacgtcaagtgcaccctcctgctcatgctggatcatcagcctccccagtacaaattggacccccgattggcaaggctgctgggagtgcacacgcagacgagggccgccatcatgcaggccctgtggctttacatcaagcacagtttcagcacgaattcccttagcaccagcacgaattcccttagcaccagcacgaattcccttagcaccagcacgacatcccttagcaccagcacgaactccctt

SEQ ID NO: 358906 - DNA, 906 bp, Homo sapiens
gaattcccgttgggcggggcagggagttcgtagccgcctctgggtaactcgactcgggcggccaaacctccggaggccggggacggaaggcgggcccgcagcagatcctggatccggaatctcccgggcaggagcggaatctgtcccgaaccgggtctgtgaggaactcgcgaacttggattaggaaatcccggagcccggatcgacaaatcccggaacccggaattaagatcgccaagtcccggatcgcggagcacagagcacggagtggactcgacgcggagcccggagtccggatcgcggcaccgcgggacgggacggagcgatgtcgggccgaggcgcgggcgggttcccgctgcccccgctaagccctggcggcggcgccgtggctgcggccctgggagcgccgcctccccccgcgggacccggcatgctgcccggaccggcgctccggggaccgggtccggcaggaggcgtggggggccccggggccgccgccttccgccccatgggccccgcgggccccgcggcgcagtaccaggtgagcaaggaggacgcgagcggacgggggcgagaggcgctgcgagggcgcccgggccggcggctgaaggggcctcgagtgagggccctggggaatgcatgaggaactccgggagacggtggagggcgggccgggaccctcgggctgcggcgggtcgcggtggagaagtgggaaggggaagcaggttctgcagcggagggctggaagcagctgggaggcctgggggcttccgcggcacagggattccgagtgactgggagatggaggagtttggggagccagtgaattgtggcgggtgggttgagaagtctagggtaggagggctggaaagtgatgagaaagtttgggaaagggccctcgctgag

SEQ ID NO: 358907 - DNA, 368 bp, Homo sapiens
agggaggggggcgctgctccaagcccgttggaggttgatttgtgtggttattacagtgttcctgcagatggcagtcgagtgtctcgaggaagtccctcgtgggctgcaagagggcaccatttccctgcctccagtctgcccagagtcctgcttccatccttcagggcccaggaatcttcagtatccggagctccagggctgaaatggggcttctctttcttgggatttagcatagcttgagatttgagagctcagcagcaccatctcacacccctttccatccccagcctagcaaacagaagaggaagttttcttcattctttaagagcctcgtcattgagctggacaaggagctgtacgggcctgac

SEQ ID NO: 358908 - DNA, 2733 bp, Homo sapiens
gaattcccgttgggcggggcagggagttcgtagccgcctctgggtaactcgactcgggcggccaaacctccggaggccggggacggaaggcgggcccgcagcagatcctggatccggaatctcccgggcaggagcggaatctgtcccgaaccgggtctgtgaggaactcgcgaacttggattaggaaatcccggagcccggatcgacaaatcccggaacccggaattaagatcgccaagtcccggatcgcggagcacagagcacggagtggactcgacgcggagcccggagtccggatcgcggcaccgcgggacgggacggagcgatgtcgggccgaggcgcgggcgggttcccgctgcccccgctaagccctggcggcggcgccgtggctgcggccctgggagcgccgcctccccccgcgggacccggcatgctgcccggaccggcgctccggggaccgggtccggcaggaggccgacctggcatgtcaccagggaaccggatgcccatggctggcttgcaggtgggaccccctgctggctccccatttggtgcagcagctccgcttcgacctggcatgccacccaccatgatggatccattccgaaaacgcctgcttgtgccccaggcgcagcctcccatgcctgcccagcgccgggggttaaagaggaggaagatggcagataaggttctacctcagcgaatccgggagcttgttccagagtctcaggcgtacatggatctcttggcttttgagcggaagctggaccagaccattgctcgcaagcggatggagatccaggaggccatcaaaaagcctctgacacaaaagcgaaagcttcggatctacatttccaatacgttcagtcccagcaaggcggaaggcgatagtgcaggaactgcaggggacccctgggggaaccccagcaggggacaaggtggcttcctgggaactccgagtggaaggaaaactgctggatgatcctagcaaacagaagaggaagttttcttcattctttaagagcctcgtcattgagctggacaaggagctgtacgggcctgacaatcacctggtggagtggcaccggatgcccaccacccaggagacagatggcttccaagtaaaacggcctggagacctcaacgtcaagtgcaccctcctgctcatgctggatcatcagcctccccagtacaaattggacccccgattggcaaggctgctgggagtgcacacgcagacgagggccgccatcatgcaggccctgtggctttacatcaagcacaaccagctgcaggatgggcacgagcgggagtacatcaactgcaaccgttacttccgccagatcttcagttgtggccgactccgtttctccgagattcccatgaagctggcagggttgctgcagcatccagaccccattgtcatcaaccatgtcattagtgtcgaccctaacgaccagaagaagacagcctgttacgacatcgatgtggaggtggacgacccactgaaggcccaaatgagcaattttctggcctctaccaccaatcagcaggagatcgcctcccttgatgtcaagatccatgagaccattgagtccatcaaccagctgaagacccagagagatttcatgctcagttttagcaccgacccccaggacttcatccaggaatggctccgttcccagcgccgagacctcaagatcatcactgatgtgattggaaatcctgaggaggagagacgagctgctttctaccaccagccctgggcccaggaagcagtaggcaggcacatctttgccaaggtgcagcagcgaaggcaggaactggaacaggtgctgggaattcgcctgacctaactgctcagggatctttcttcccagccctggagcctggagggagaccaccctctgggtccttgctggggccgcagacacgtaggctggggtgaggagtgtctgctgtcaccctctactctccagctttagttttataaatgtagtgataggattccttgttgcttggtccccaaagccttatactttttgcattggctttaattgggttcagcagatgcctcctctgcccccctgcaggcaggcccaagtaggactgctggaggctgtgctttgacattgtaagacatttccgaaccaaaggctgctgggtttgcatgtttacagactccccctggggcgagggtcagagctggctctggggagctgggctaggaagaggaggtgcagcccagactcttcctagcctttctaaaccaaagttctttgccattcctacaagcccagccttgctgctggttttttcctttcctttgggtatttgcactattttgggagcaagttttctatgtgggagccactttttttgtacaggggtaagttgggggttttcagggagcctgttaggtgcctccttcttttctttcctcaatctatgcaagcggctctggccgccatcatctcctgggatgccagagggctgcctctccagcggcttgggccggggaggggacactccagttctctagcatggcctgaggtatggggtatgtgcatgtggaggccagggtaaggtgaatggggaggctgggaggactggtgttgccctttggagcttggtgaggagggtgggcctagggcttggcgagtgccacttctggcaggtttggaaatttccaaataaatccttttgtctattggtggtgcctggacctggtcc

SEQ ID NO: 358909 - DNA, 1770 bp, Homo sapiens
  misc_feature (109)..(109): n is a, c, g, or t
aacgagggtctcagctcaacgatgctcagctcaacggagggtcctcagctcaacgatggtcctcagctcaacgatggtcctcagctcaacgatggtcctcagctcaccnggtggagtggcaccggatgcccaccacccaggagacagatggcttccaagtaaaacggcctggagacctcaacgtcaagtgcaccctcctgctcatgctggatcatcagcctccccagtacaaattggacccccgattggcaaggctgctgggagtgcacacgcagacgagggccgccatcatgcaggccctgtggctttacatcaagcacaaccagctgcaggatgggcacgagcgggagtacatcaactgcaaccgttacttccgccagatcttcagttgtggccgactccgtttctccgagattcccatgaagctggcagggttgctgcagcatccagaccccattgtcatcaaccatgtcattagtgtcgaccctaacgaccagaagaagacagcctgttacgacatcgatgtggaggtggacgacccactgaaggcccaaatgagcaattttctggcctctaccaccaatcagcaggagatcgcctcccttgatgtcaagatccatgagaccattgagtccatcaaccagctgaagacccagagagatttcatgctcagttttagcaccgacccccaggacttcatccaggaatggctccgttcccagcgccgagacctcaagatcatcactgatgtgattggaaatcctgaggaggagagacgagctgctttctaccaccagccctgggcccaggaagcagtaggcaggcacatctttgccaaggtgcagcagcgaaggcaggaactggaacaggtgctgggaattcgcctgacctaactgctcagggatctttcttcccagccctggagcctggagggagaccaccctctgggtccttgctggggccgcagacacgtaggctggggtgaggagtgtctgctgtcaccctctactctccagctttagttttataaatgtagtgataggattccttgttgcttggtccccaaagccttatactttttgcattggctttaattgggttcagcagatgcctcctctgcccccctgcaggcaggcccaagtaggactgctggaggctgtgctttgacattgtaagacatttccgaaccaaaggctgctgggtttgcatgtttacagactccccctggggcgagggtcagagctggctctggggagctgggctaggaagaggaggtgcagcccagactcttcctagcctttctaaaccaaagttctttgccattcctacaagcccagccttgctgctggttttttcctttcctttgggtatttgcactattttgggagcaagttttctatgtgggagccactttttttgtacaggggtaagttgggggttttcagggagcctgttaggtgcctccttcttttctttcctcaatctatgcaagcggctctggccgccatcatctcctgggatgccagagggctgcctctccagcggcttgggccggggaggggacactccagttctctagcatggcctgaggtatggggtatgtgcatgtggaggccagggtaaggtgaatggggaggctgggaggactggtgttgccctttggagcttggtgaggagggtgggcctagggcttggcgagtgccacttctggcaggtttggaaatttccaaataaatccttttgtctattggtggtgcctggacctggtcc

SEQ ID NO: 358910 - DNA, 2367 bp, Homo sapiens
gaattcccgttgggcggggcagggagttcgtagccgcctctgggtaactcgactcgggcggccaaacctccggaggccggggacggaaggcgggcccgcagcagatcctggatccggaatctcccgggcaggagcggaatctgtcccgaaccgggtctgtgaggaactcgcgaacttggattaggaaatcccggagcccggatcgacaaatcccggaacccggaattaagatcgccaagtcccggatcgcggagcacagagcacggagtggactcgacgcggagcccggagtccggatcgcggcaccgcgggacgggacggagcgatgtcgggccgaggcgcgggcgggttcccgctgcccccgctaagccctggcggcggcgccgtggctgcggccctgggagcgccgcctccccccgcgggacccggcatgctgcccggaccggcgctccggggaccgggtccggcaggaggccgacctggcatgtcaccagggaaccggatgcccatggctggcttgcaggtgggaccccctgctggctccccatttggtgcagcagctccgcttcgacctggcatgccacccaccatgatggatccattccgaaaacgcctgcttgtgccccaggcgcagcctcccatgcctgcccagcgccgggggttaaagaggaggaagatggcagataaggttctacctcagcgaatccgggagcttgttccagagtctcaggcgtacatggatctcttggcttttgagcggaagctggaccagaccattgctcgcaagcggatggagatccaggaggccatcaaaaagcctctgacacaaaagcgaaagcttcggatctacatttccaatacgttcagtcccagcaaggcggaaggcgatagtgcaggaactgcaggggacccctgggggaaccccagcaggggacaaggtggcttcctgggaactccgagtggaaggaaaactgctggatgatcctagcaaacagaagaggaagttttcttcattctttaagagcctcgtcattgagctggacaaggagctgtacgggcctgacaatcacctggtggagtggcaccggatgcccaccacccaggagacagatggcttccaagtaaaacggcctggagacctcaacgtcaagtgcaccctcctgctcatgctggatcatcagcctccccagtacaaattggacccccgattggcaaggctgctgggagtgcacacgcagacgagggccgccatcatgcaggccctgtggctttacatcaagcacaaccagctgcaggatgggcacgagcgggagtacatcaactgcaaccgttacttccgccagatcttcagttgtggccgactccgtttctccgagattcccatgaagctggcagggttgctgcagcatccagaccccattgtcatcaaccatgtcattagtgtcgaccctaacgaccagaagaagacagcctgttacgacatcgatgtggaggtggacgacccactgaaggcccaaatgagcaattttctggcctctaccaccaatcagcaggagatcgcctcccttgatgtcaagatccatgagaccattgagtccatcaaccagctgaagacccagagagatttcatgctcagttttagcaccgacccccaggacttcatccaggaatggctccgttcccagcgccgagacctcaagatcatcactgatgtgattggaaatcctgaggaggagagacgagctgctttctaccaccagccctgggcccaggaagcagtaggcaggcacatctttgccaaggtgcagcagcgaaggcaggaactggaacaggtgctgggaattcgcctgacctaactgctcagggatctttcttcccagccctggagcctggagggagaccaccctctgggtccttgctggggccgcagacacgtaggctggggtgaggagtgtctgctgtcaccctctactctccagctttagttttataaatgtagtgataggattccttgttgcttggtccccaaagccttatactttttgcattggctttaattgggttcagcagatgcctcctctgcccccctgcaggcaggcccaagtaggactgctggaggctgtgctttgacattgtaagacatttccgaaccaaaggctgctgggtttgcatgtttacagactccccctggggcgagggtcagagctggctctggggagctgggctaggaagaggaggtgcagcccagactcttcctagcctttctaaaccaaagttctttgccattcctacaagcccagccttgctgctggttttttccttggtttcgcttgggcgcgtctctttggccctttggcgggcggggtc

SEQ ID NO: 358911 - DNA, 1918 bp, Homo sapiens
  misc_feature (1770)..(1771): n is a, c, g, or t
  misc_feature (1776)..(1777): n is a, c, g, or t
  misc_feature (1786)..(1786): n is a, c, g, or t
  misc_feature (1788)..(1789): n is a, c, g, or t
  misc_feature (1794)..(1794): n is a, c, g, or t
  misc_feature (1800)..(1800): n is a, c, g, or t
  misc_feature (1802)..(1802): n is a, c, g, or t
  misc_feature (1809)..(1809): n is a, c, g, or t
  misc_feature (1811)..(1811): n is a, c, g, or t
gaattcccgttgggcggggcagggagttcgtagccgcctctgggtaactcgactcgggcggccaaacctccggaggccggggacggaaggcgggcccgcagcagatcctggatccggaatctcccgggcaggagcggaatctgtcccgaaccgggtctgtgaggaactcgcgaacttggattaggaaatcccggagcccggatcgacaaatcccggaacccggaattaagatcgccaagtcccggatcgcggagcacagagcacggagtggactcgacgcggagcccggagtccggatcgcggcaccgcgggacgggacggagcgatgtcgggccgaggcgcgggcgggttcccgctgcccccgctaagccctggcggcggcgccgtggctgcggccctgggagcgccgcctccccccgcgggacccggcatgctgcccggaccggcgctccggggaccgggtccggcaggaggcgtggggggccccggggccgccgccttccgccccatgggccccgcgggccccgcggcgcagtaccagcgacctggcatgtcaccagggaaccggatgcccatggctggcttgcaggtgggaccccctgctggctccccatttggtgcagcagctccgcttcgacctggcatgccacccaccatgatggatccattccgaaaacgcctgcttgtgccccaggcgcagcctcccatgcctgcccagcgccgggggttaaagaggaggaagatggcagataaggttctacctcagcgaatccgggagcttgttccagagtctcaggcgtacatggatctcttggcttttgagcggaagctggaccagaccattgctcgcaagcggatggagatccaggaggccatcaaaaagcctctgacacaaaagcgaaagcttcggatctacatttccaatacgttcagtcccagcaaggcggaaggcgatagtgcaggaactgcaggggacccctgggggaaccccagcaggggacaaggtggcttcctgggaactccgagtggaaggaaaactgctggatgatcctagcaaacagaagaggaagttttcttcattctttaagagcctcgtcattgagctggacaaggagctgtacgggcctgacaatcacctggtggagtggcaccggatgcccaccacccaggagacagatggcttccaagtaaaacggcctggagacctcaacgtcaagtgcaccctcctgctcatgctggatcatcagcctccccagtacaaattggacccccgattggcaaggctgctgggagtgcacacgcagacgagggccgccatcatgcaggccctgtggctttacatcaagcacaaccagctgcaggatgggcacgagcgggagtacatcaactgcaaccgttacttccgccagatcttcagttgtggccgactccgtttctccgagattcccatgaagctggcagggttgctgcagcatccagaccccattgtcatcaaccatgtcattagtgtcgaccctaacgaccagaagaagacagcctgttacgacatcgatgtggaggtggacgacccactgaaggcccaaatgagcaattttctggcctctaccaccaatcagcaggagatcgcctcccttgatgtcaagatccatgagaccattgagtccatcaaccagctgaagacccagagagatttcatgctcagttttagcaccgacccccaggacttcatccaggaatggctccgttcccagcgccgagacctcaagatcnncctgnngtggatggnanncctgnggaggncnagacaancngtttttaacccaggccgtgcccgaacgagcgggaccttttgcaggtgcacgcacggcgacttggagtcgggatccggcaaggcgggagttaccaccggctggggacc

SEQ ID NO: 358912 - DNA, 1502 bp, Homo sapiens
gaattcccgttgggcggggcagggagttcgtagccgcctctgggtaactcgactcgggcggccaaacctccggaggccggggacggaaggcgggcccgcagcagatcctggatccggaatctcccgggcaggagcggaatctgtcccgaaccgggtctgtgaggaactcgcgaacttggattaggaaatcccggagcccggatcgacaaatcccggaacccggaattaagatcgccaagtcccggatcgcggagcacagagcacggagtggactcgacgcggagcccggagtccggatcgcggcaccgcgggacgggacggagcgatgtcgggccgaggcgcgggcgggttcccgctgcccccgctaagccctggcggcggcgccgtggctgcggccctgggagcgccgcctccccccgcgggacccggcatgctgcccggaccggcgctccggggaccgggtccggcaggaggcgtggggggccccggggccgccgccttccgccccatgggccccgcgggccccgcggcgcagtaccagcgacctggcatgtcaccagggaaccggatgcccatggctggcttgcaggtgggaccccctgctggctccccatttggtgcagcagctccgcttcgacctggcatgccacccaccatgatggatccattccgaaaacgcctgcttgtgccccaggcgcagcctcccatgcctgcccagcgccgggggttaaagaggaggaagatggcagataaggttctacctcagcgaatccgggagcttgttccagagtctcaggcgtacatggatctcttggcttttgagcggaagctggaccagaccattgctcgcaagcggatggagatccaggaggccatcaaaaagcctctgacacaaaagcgaaagcttcggatctacatttccaatacgttcagtcccagcaaggcggaaggcgatagtgcaggaactgcaggggacccctgggggaaccccagcaggggacaaggtggcttcctgggaactccgagtggaaggaaaactgctggatgatcctagcaaacagaagaggaagttttcttcattctttaagagcctcgtcattgagctggacaaggagctgtacgggcctgacaatcacctggtggagtggcaccggatgcccaccacccaggagacagatggcttccaagtaaaacggcctggagacctcaacgtcaagtgcaccctcctgctcatgctggatcatcagcctccccagtacaaattggacccccgattggcaaggctgctgggagtgcacacgcagacgagggccgccatcatgcaggccctgtggctttacatcaagcacaaccagctgcaggatgggcacgagcgggagtacatcaactgcaaccgttacttccgccagatcttcagttgtggccgactccgtttctccgagattcccatgcctgcccagcgccgggggttaaagaggaggaagatggcagataaggttcta

SEQ ID NO: 358913 - DNA, 891 bp, Homo sapiens
gaattcccgttgggcggggcagggagttcgtagccgcctctgggtaactcgactcgggcggccaaacctccggaggccggggacggaaggcgggcccgcagcagatcctggatccggaatctcccgggcaggagcggaatctgtcccgaaccgggtctgtgaggaactcgcgaacttggattaggaaatcccggagcccggatcgacaaatcccggaacccggaattaagatcgccaagtcccggatcgcggagcacagagcacggagtggactcgacgcggagcccggagtccggatcgcggcaccgcgggacgggacggagcgatgtcgggccgaggcgcgggcgggttcccgctgcccccgctaagccctggcggcggcgccgtggctgcggccctgggagcgccgcctccccccgcgggacccggcatgctgcccggaccggcgctccggggaccgggtccggcaggaggcgtggggggccccggggccgccgccttccgccccatgggccccgcgggccccgcggcgcagtaccaggttaaagaggaggaagatggcagataaggttctacctcagcgaatccgggagcttgttccagagtctcaggcgtacatggatctcttggcttttgagcggaagctggaccagaccattgctcgcaagcggatggagatccaggaggccatcaaaaagcctctgacagtatgtgtggccctgaccacctctagccttcccaggtttccttgccttccacccccttgttttccaggggccaagcaagttgggctagagccgggtttttcacatgcaggatgcagcccactagtagagtacgaactcagttgaatgtgttggggccagtatgttttaaatgaatatatgacag

SEQ ID NO: 358914 - DNA, 415 bp, Homo sapiens
gagaccattgagtccatcaaccagctgaagacccagagagatttcatgctcagttttagcaccgacccccaggacttcatccaggaatggctccgttcccagcgccgagacctcaaggtgtagtcctctttcccgaggggactcctatgtaaagctctgggtgatttttacccacagcagttcccagggtggattagcccaggggtggggattatgctatggctttcctcctggctctttgcagatcatcactgatgtgattggaaatcctgaggaggagagacgagctgctttctaccaccagccctgggcccaggaagcagtaggcaggcacatctttgccaaggtgaggctctgccctgttttccctcctttggccgtgagtagcaaaggcctgagccacttggtttctccc

SEQ ID NO: 358915 - DNA, 809 bp, Homo sapiens
tctgacttataatagatgaggttaaacagtagatggagaatcaagtaattctcctgcctcatcctcctcagtagctgggattataggcatgtgccgccacacccagctaatttttcttttcttttcttttttttttttagtagagacggggttttgccgtgttggccaggctggtctcaaactcctgacctcaaataatccgcccgcctcggcctcccaaagtggtgggattgcagacatgagccatcgtgcctggcctccagcaaggtctttatgatctatatcttgagtcgacctcctatctcattctgtaacctagaatgcctaactgtctgggaatgcagcccagtaggtttcagcctcattgtccccagcccctattcaagatgcagttgctctagttcaaatgcctctgacagttgtgcttcaccaaacctagagaatgaacaaagcgaaggacctggagttcaagaatggagggatccaactccaaggcaggaagcaggtccagaaagcaggcagggcagcagcaacagggaagaacagcttatctgatgactggctgggtgggaagcacaactgagaggacttgaaggactttggaagactaagttagctacaaagaaaactaagtattataccaaaaaaacttatccgggcgtggtgacaggcgcctgtagtcccagctactcgggaggctgaggcaggagaatggcgtgaacccggaaggcagagcttgcagtgagtccagattgcgccactgcgctccagcctgggcgacagagcaagactccgtctcagaaaaaaaa

SEQ ID NO: 358916 - DNA, 664 bp, Homo sapiens
tctgacttataatagatgaggttaaacagtagatggagaatcaagtaattctcctgcctcatcctcctcagtagctgggattataggcatgtgccgccacacccagctaatttttcttttcttttcttttttttttttagtagagacggggttttgccgtgttggccaggctggtctcaaactcctgacctcaaataatccgcccgcctcggcctcccaaagtggtgggattgcagacatgagccatcgtgcctggcctccagcaaggtctttatgatctatatcttgagtcgacctcctatctcattctgtaacctagaatgcctaactgtctgggaatgcagcccagtaggtttcagcctcattgtccccagcccctattcaagatgcagttgctctagttcaaatgcctctgacagttgtgcttcaccaaacctagagaatgaacaaagcgaaggacctggagttcaagaatggagggatccaactccaaggcaggaagcaggtccagaaagcaggcagggcagcagcaacagggaagaacagcttatctgatgactggctgggtgggaagcacaactgagaggacttgaaggactttggaagactaagttagctacaaagaaaactaagtattatacccacgccgaccctatgcagtctc

SEQ ID NO: 358917 - DNA, 1259 bp, Homo sapiens
cctgtcctccccagcctcctcgccctcctccaccccctctcccatcaccctcccctcccctcccctcccctcccccgtcctgagctcccacttccacacctactccaggctcggagccttaggaccatcacctgcccacctaagcccacggtgctccctcctgggaccccactcctgaaaccccctgcccctgcctcccccagcccggtgcgccggggctctccgcccgctccctcggtccctcctcccttgcaggcgccgtttcccggcttcgactccccgcgcgtctatccctctcctccccgcgaagtttcggggctgtcagtctgtcagtctttcaggccgtcagcacccgagctgcaggcggcgagcgccattgtgagcagagccggcggggcaggaggcccgggcgcctgggtccccgcggcgcgggcggagcggccggccagccaggttctgtggcctgatccccaggaggagctactctgggttaccatgagagagaccttggaggccctcagctccctgggattctctgtgggacagccagagatggccccccaaagtgagcccagggaaggatcccataatgcccaggagcagatgtcctcttctagggaagagagagcactgggggtgtgctcagggcacgaggcccctacaccggaggaaggtgcccacacagaacaagccgaggctccctgcagaggccaggcgtgctcagcacagaaggctcagcctgtgggtacctgcccagtttcgagaggcccgtgccatgagaccgcctggggtgagcaaggcgacctgggctgctgcccgaaggtttggccgccgcgggacacctgtttccttcccgcagtgtctgcgtccgcacagcatacccagctcggacctcctaggacagagactcagcgaacccttgctgggaaccgctgagctgaagttcttggaaggctcccacccaggtgccccgttggaaagcagatatttcccggacccagcgcggcctcaaccagggcaggaaagagtggttatttatgtacttaaagtttcattaaagttaaaatcggaaagttctggggctgctaaatgaattgggggagggaacacctgactctccttagccactgtcccacctccatccacacacagaccacccccctccacttccccttctgtcctgggtgagttacatttagccagctgctgttaattggttctcccaaataaaaatgtaatatatttattcactaagccac

SEQ ID NO: 358918 - DNA, 2242 bp, Homo sapiens
  misc_feature (2121)..(2121): n is a, c, g, or t
cctgtcctccccagcctcctcgccctcctccaccccctctcccatcaccctcccctcccctcccctcccctcccccgtcctgagctcccacttccacacctactccaggctcggagccttaggaccatcacctgcccacctaagcccacggtgctccctcctgggaccccactcctgaaaccccctgcccctgcctcccccagcccggtgcgccggggctctccgcccgctccctcggtccctcctcccttgcaggcgccgtttcccggcttcgactccccgcgcgtctatccctctcctccccgcgaagtttcggggctgtcagtctgtcagtctttcaggccgtcagcacccgagctgcaggcggcgagcgccattgtgagcagagccggcggggcaggaggcccgggcgcctgggtccccgcggcgcgggcggagcggccggccagccaggttctgtggcctgatccccaggaggagctactctgggttaccatgagagagaccttggaggccctcagctccctgggattctctgtgggacagccagagatggccccccaaagtgagcccagggaaggatcccataatgcccaggagcagatgtcctcttctagggaagagagagcactgggggtgtgctcagggcacgaggcccctacaccggaggaaggtgcccacacagaacaagccgaggctccctgcagaggccaggcgtgctcagcacagaaggctcagcctgtgggtacctgcccaggagaggagtggatgattcggaaggtgaaggtggaggacgaagatcaggaggcagaagaggaggtcgaatggccccagcatctatcgttacttcccagcccctttcccgcgcctgacctggggcatctggctgccgcgtacaaactggagccaggggccccgggggcactgagtgggctcgcgctgtctgggtggggtccgatgccggagaagccctacggctgcggggagtgtgagcggcgcttccgggaccagctgacgttgcgactgcaccagcggctgcaccggggcgagggcccctgcgcctgcccggactgcggccgcagcttcacgcagcgcgcccacatgctactgcatcagcgcagccaccgcggcgagcggcctttcccgtgctccgagtgcgacaagcgcttcagcaagaaggcccatctgacccgccacctgcgcacgcacacgggcgagcggccctacccgtgcgcggagtgcggcaagcgcttcagccagaagatccacctgggctcgcaccaaaagacccacaccggcgagcggcccttcccctgcacggaatgcgagaagcgctttcgcaagaagacgcacttgattcggcaccagcgcatccatacgggcgagaggccctaccagtgcgcacagtgcgcacgcagcttcacgcacaagcagcacttggtgcggcaccaaagggtgcaccagacggccggcccggccaggccctctcccgactcgtccgcttctcctcattccactgccccgtccccgaccccatcctttcccgggccaaagcctttcgcgtgctccgactgcggcttgagcttcggctggaaaaagaacctcgccacgcaccagtgtctgcaccgcagcgagggtcgcccctttgggtgcgatgagtgcgcactgggcgccaccgtggatgcccccgccgccaagcccctggccagcgcgcctggcggaccgggctgcggcccaggatccgatcccgtggtgccccagcgcgccccctcgggcgagcggtccttcttctgcccggactgcgggcgcggcttctcccatgggcagcacctggcgcggcacccgcgcgtgcacacgggcgaacggcccttcgcctgcacgcagtgtgaccgccgcttcggctcgcggcctaatctggtcgcccactccagggcccacagcggcgccaggcctttcgcctgcgctcagtgcggccgccgcttcagccgcaagtcgcacctgggccgccaccaggcggtgcacactggcagccgcccccacgcctgcgccgtctgcgcccgcagcttcagctccaaaaccaacctagtccgccaccaggcgatccacacaggctctccctcnttatcttcaccacgtcgtgcagggagtgttgctccctctggctggctgaaggcgacgggcctctgtagccacagcctgcactgggggtgccgtggagagcgggtgaccttcgctcgctcag

SEQ ID NO: 358919 - DNA, 2820 bp, Homo sapiens
cctgtcctccccagcctcctcgccctcctccaccccctctcccatcaccctcccctcccctcccctcccctcccccgtcctgagctcccacttccacacctactccaggctcggagccttaggaccatcacctgcccacctaagcccacggtgctccctcctgggaccccactcctgaaaccccctgcccctgcctcccccagcccggtgcgccggggctctccgcccgctccctcggtccctcctcccttgcaggcgccgtttcccggcttcgactccccgcgcgtctatccctctcctccccgcgaagtttcggggctgtcagtctgtcagtctttcaggccgtcagcacccgagctgcaggcggcgagcgccattgtgagcagagccggcggggcaggaggcccgggcgcctgggtccccgcggcgcgggcggagcggccggccagccaggttctgtggcctgatccccaggaggagctactctgggttaccatgagagagaccttggaggccctcagctccctgggattctctgtgggacagccagagatggccccccaaagtgagcccagggaaggatcccataatgcccaggagcagatgtcctcttctagggaagagagagcactgggggtgtgctcagggcacgaggcccctacaccggaggaaggtgcccacacagaacaagccgaggctccctgcagaggccaggcgtgctcagcacagaaggctcagcctgtgggtacctgcccaggagaggagtggatgattcggaaggtgaaggtggaggacgaagatcaggaggcagaagaggaggtcgaatggccccagcatctatcgttacttcccagcccctttcccgcgcctgacctggggcatctggctgccgcgtacaaactggagccaggggccccgggggcactgagtgggctcgcgctgtctgggtggggtccgatgccggagaagccctacggctgcggggagtgtgagcggcgcttccgggaccagctgacgttgcgactgcaccagcggctgcaccggggcgagggcccctgcgcctgcccggactgcggccgcagcttcacgcagcgcgcccacatgctactgcatcagcgcagccaccgcggcgagcggcctttcccgtgctccgagtgcgacaagcgcttcagcaagaaggcccatctgacccgccacctgcgcacgcacacgggcgagcggccctacccgtgcgcggagtgcggcaagcgcttcagccagaagatccacctgggctcgcaccaaaagacccacaccggcgagcggcccttcccctgcacggaatgcgagaagcgctttcgcaagaagacgcacttgattcggcaccagcgcatccatacgggcgagaggccctaccagtgcgcacagtgcgcacgcagcttcacgcacaagcagcacttggtgcggcaccaaagggtgcaccagacggccggcccggccaggccctctcccgactcgtccgcttctcctcattccactgccccgtccccgaccccatcctttcccgggccaaagcctttcgcgtgctccgactgcggcttgagcttcggctggaaaaagaacctcgccacgcaccagtgtctgcaccgcagcgagggtcgcccctttgggtgcgatgagtgcgcactgggcgccaccgtggatgcccccgccgccaagcccctggccagcgcgcctggcggaccgggctgcggcccaggatccgatcccgtggtgccccagcgcgccccctcgggcgagcggtccttcttctgcccggactgcgggcgcggcttctcccatgggcagcacctggcgcggcacccgcgcgtgcacacgggcgaacggcccttcgcctgcacgcagtgtgaccgccgcttcggctcgcggcctaatctggtcgcccactccagggcccacagcggcgccaggcctttcgcctgcgctcagtgcggccgccgcttcagccgcaagtcgcacctgggccgccaccaggcggtgcacactggcagccgcccccacgcctgcgccgtctgcgcccgcagcttcagctccaaaaccaacctagtccgccaccaggcgatccacacaggctcccgccccttctcctgcccgcagtgcggaaagagcttcagccgcaagacccacctggtgcggcaccagctcattcacggcgaagccgcccacgcggccccggacgccgcccttgcggccccagcctggtccgctccccccgaggtggcgccgcccccgctcttcttctgagcctagttctcacgaggaccctttcttgcccacagtttcgagaggcccgtgccatgagaccgcctggggtgagcaaggcgacctgggctgctgcccgaaggtttggccgccgcgggacacctgtttccttcccgcagtgtctgcgtccgcacagcatacccagctcggacctcctaggacagagactcagcgaacccttgctgggaaccgctgagctgaagttcttggaaggctcccacccaggtgccccgttggaaagcagatatttcccggacccagcgcggcctcaaccagggcaggaaagagtggttatttatgtacttaaagtttcattaaagttaaaatcggaaagttctggggctgctaaatgaattgggggagggaacacctgactctccttagccactgtcccacctccatccacacacagaccacccccctccacttccccttctgtcctgggtgagttacatttagccagctgctgttaattggttctcccaaataaaaatgtaatatatttattcactaagccac

SEQ ID NO: 358920 - DNA, 2199 bp, Homo sapiens
cttgaggtatcctattctctgccagggcacgaggcccctacaccggaggaaggtgcccacacagaacaagccgaggctccctgcagaggccaggcgtgctcagcacagaaggctcagcctgtgggtacctgcccaggagaggagtggatgattcggaaggtgaaggtggaggacgaagatcaggaggcagaagaggaggtcgaatggccccagcatctatcgttacttcccagcccctttcccgcgcctgacctggggcatctggctgccgcgtacaaactggagccaggggccccgggggcactgagtgggctcgcgctgtctgggtggggtccgatgccggagaagccctacggctgcggggagtgtgagcggcgcttccgggaccagctgacgttgcgactgcaccagcggctgcaccggggcgagggcccctgcgcctgcccggactgcggccgcagcttcacgcagcgcgcccacatgctactgcatcagcgcagccaccgcggcgagcggcctttcccgtgctccgagtgcgacaagcgcttcagcaagaaggcccatctgacccgccacctgcgcacgcacacgggcgagcggccctacccgtgcgcggagtgcggcaagcgcttcagccagaagatccacctgggctcgcaccaaaagacccacaccggcgagcggcccttcccctgcacggaatgcgagaagcgctttcgcaagaagacgcacttgattcggcaccagcgcatccatacgggcgagaggccctaccagtgcgcacagtgcgcacgcagcttcacgcacaagcagcacttggtgcggcaccaaagggtgcaccagacggccggcccggccaggccctctcccgactcgtccgcttctcctcattccactgccccgtccccgaccccatcctttcccgggccaaagcctttcgcgtgctccgactgcggcttgagcttcggctggaaaaagaacctcgccacgcaccagtgtctgcaccgcagcgagggtcgcccctttgggtgcgatgagtgcgcactgggcgccaccgtggatgcccccgccgccaagcccctggccagcgcgcctggcggaccgggctgcggcccaggatccgatcccgtggtgccccagcgcgccccctcgggcgagcggtccttcttctgcccggactgcgggcgcggcttctcccatgggcagcacctggcgcggcacccgcgcgtgcacacgggcgaacggcccttcgcctgcacgcagtgtgaccgccgcttcggctcgcggcctaatctggtcgcccactccagggcccacagcggcgccaggcctttcgcctgcgctcagtgcggccgccgcttcagccgcaagtcgcacctgggccgccaccaggcggtgcacactggcagccgcccccacgcctgcgccgtctgcgcccgcagcttcagctccaaaaccaacctagtccgccaccaggcgatccacacaggctcccgccccttctcctgcccgcagtgcggaaagagcttcagccgcaagacccacctggtgcggcaccagctcattcacggcgaagccgcccacgcggccccggacgccgcccttgcggccccagcctggtccgctccccccgaggtggcgccgcccccgctcttcttctgagcctagttctcacgaggaccctttcttgcccacagtttcgagaggcccgtgccatgagaccgcctggggtgagcaaggcgacctgggctgctgcccgaaggtttggccgccgcgggacacctgtttccttcccgcagtgtctgcgtccgcacagcatacccagctcggacctcctaggacagagactcagcgaacccttgctgggaaccgctgagctgaagttcttggaaggctcccacccaggtgccccgttggaaagcagatatttcccggacccagcgcggcctcaaccagggcaggaaagagtggttatttatgtacttaaagtttcattaaagttaaaatcggaaagttctggggctgctaaatgaattgggggagggaacacctgactctccttagccactgtcccacctccatccacacacagaccacccccctccacttccccttctgtcctgggtgagttacatttagccagctgctgttaattggttctcccaaataaaaatgtaatatatttattcactaagccac

SEQ ID NO: 358921 - DNA, 538 bp, Homo sapiens
gcccccgggagccgtgtggtgttcacacgcatcacaggttcaggagaatgcaggagggggcctgagaagagctgcggatttggtcactcccgggaagcgttaggtagagtggagagcagagccagaccgcggggctccaggaagtggagatcctgtggttaaatagacgttgccgcacgtggagctcaatagacaattcttgttttgactttccaggagaggagtggatgattcggaaggtgaaggtggaggacgaagatcaggaggcagaagaggaggtcgaatggccccagcatctatcgttacttcccagcccctttcccgcgcctgacctggggcatctggctgccgcgtacaaactggagccaggggccccgggggcactgagtgggctcgcgctgtctgggtggggtccgatgccggagaagccctacggctgcggggagtgtgagcggcgcttccgggaccagctgacgttgcgactgcaccagcggctgcaccggggcgagggcccctgcgcctgcccggactgcggccg

SEQ ID NO: 358922 - DNA, 207 bp, Homo sapiens
gacttcctgactccagatcttttttttctttccatgacatcacattgctgccttaattcatttgcacaatgcatgattgtatggccagtgttcactgacacctttcctacagaagtatcaatgagcccaggcattacgtagagccatgtggagaagaaaataattcataccttcagaggagcttccattttagtgggggttgataca

SEQ ID NO: 358923 - DNA, 453 bp, Homo sapiens
gtgagtattctttgtgagatagctatcagggctagagatacattaggatggtgaacttttttggggagtaagaatccccaaagtagagatgagtgtaaatgaccttgctttgtggttcactctaggagaattcttcaggccccatgactactgtccgagttagcctacggtgtcctttgagactgcctggccttttggtgtttcaaggcatgttaaagggaatgatctgctggggttgtcttagaatacttcaaagtagctgggtacagtggctcacacctgtgatcctagcatgttgggaggccaaggtagaaagattgcttgaacccaggagttcgagtgcagcctggacaacatagtgagatctcccatctctacaaaaaaacacccagaatacttgaaagcaatagttgagcaacctctttttgtaatctgttaggattatcagtagta

SEQ ID NO: 358924 - DNA, 396 bp, Homo sapiens
ctttcctgtttcactgccttggcactggaaaatatggggtaaaatgttgttaacattaacacaaatatatttatcatgaagagtaaatctaatctcttatgtacagtgttttaaaaaaatcaagttctggccaggcgcagtgtttcacgcctgtaatcccagcactttgggaggccgaggtgggcggatcaggaggtcaagagatcgagaccattctggctaacatggtgaaaccccgtctctactaaaaatacaaaattagctgggtgtggtggcgcgtgcctgtagtcccagctacttgtgaggctgaggcagaagaatcgctgaaacccgggaggcggaggttgcagtgagccaagatcgcgccagtgcactccggcctagcgacagagcgag

SEQ ID NO: 358925 - DNA, 855 bp, Homo sapiens
attgtgtgacacttgatagttattagaaagaggcagatcagggcaaaaacatttggaaaggatgatctcatctgtataaaagttctaagatgatacacaagaaatggtaattctgtagcttctagagagctttatgtatagtttgtacactgaataaatgtaattggccatccgtatgacaggaagacaagggttttggtcggcagccatctcaaggtgatccattgagacaaggtgccaagacctgaacaaggctgccgccgccccagcttgcattaagagaggaagagcatcctggcctcctccatactggtcacaccatgtgtgtctggggtccctcagtagctctgagggccgctctcttaagagcatagcacactgaagctcccctaccacacacaggaagccggagcagctccaggtccaacaggaactgacagccacgaggtggaccacctggagggcggtgcggggaaggaggcagggccctgtgcctgaagcctgggcaccatggtggccccagtcaggagcaacagtggtagccctgagtaaaacccattgtccctctttggaggagcggccagaggatgacagcagccccagcaggcagcagtgcctgggcaggctgatccagcagagcactaatgggtcagtttcatgtattggcagatgtggtgtagcatggcaaggctacaagttttaaggatttttgtctgattttcagacctggaggaggggatttttcttcctactttcccccttttttatttctaatttactttcaaccaaatattcccactatgtgctatatgtaataataaaaagttgacaacaactgaaaaatcaacagcagag

SEQ ID NO: 358926 - DNA, 6337 bp, Homo sapiens
cgccgctcaggccctggagcggacggttcctactgcggctgggcaccggctccgctcccgcgtctgcccgcgctccagctgcgcctggcccggccccggcccggctcggcgtggccccggcctccaagcgaaggcgccgctgccgctgggccgctcccagggccatgaggaagcggcggcagccactgcggcccgcgtcaaggacttctccagacaggttatgttacctgcagaggctgccctgaagctccctgtggcctggagactatgtacaagaggaatggtctgatggctagcgtgttggtcacctctgccactccacagggcagcagcagctcggactctctggagggccagagctgcgactatgccagcaagagctatgatgccgttgtcttcgatgtcttgaaagtgaccccagaggagtttgctagccagattacattaatggatatacctgtgtttaaagctatccagccggaggaactagccagctgtggatggagtaagaaggagaaacacagtcttgcccctaacgttgtggcctttacccggaggtttaaccaggtcagtttttgggttgtacgagaaattctaacagcacagactttaaaaataagggcagaaatcctcagccattttgtgaaaatagccaagaaacttctagaactcaacaaccttcattctctcatgtctgtggtatcagcattacaaagtgctcccatcttcaggctgacaaaaacctgggctcttttaaatcgaaaagacaagactacctttgagaaattggactacctgatgtcgaaagaagataattacaagcggacacgggaatatatccgaagcctgaagatggttccaagtattccctatctaggaatctatcttctggatttaatctacattgattctgcatatcctgcctcaggcagtatcatggaaaatgaacaaagatccaatcagatgaacaatattcttcgaataattgctgatttacaagtttcctgcagctatgatcacctcaccaccctgccccatgtgcagaagtacctgaagtccgtacgctacattgaagagctccagaagtttgtggaagacgacaactacaaactgtcgctcagaatcgaaccaggaagcagctctccaagactagtctcttccaaggaagatcttgcaggtccctctgctggctccggttctgcgaggttcagccggaggcccacctgtcctgacacatctgttgctggcagcctccccacacctccagtccccagacacaggaagagccacagcctaggcaacaatatgatgtgtcagttgagtgtagttgagagtaaaagtgcgacattcccatcggagaaagcaaggcacctactggacgacagtgtcctagagtcccgcagcccccgaaggggcctggctctgacctcctcctctgctgtcaccaatggactctccctaggcagtagtgagagctcagagtttagtgaagagatgtcttcagggctggaaagccccaccggcccgtgcatctgttctctggggaactccgcagctgtgcccaccatggaggggcctctgagaagaaaaaccctgctcaaggaagggcggaagcctgcgctgtcctcgtggaccaggtactgggtcatactctcaggatccaccctcctgtactacggagccaagtccttgcggggcacagacagaaaacactataaatccacacctggcaaaaaggtttccatcgtgggctggatggtgcagctgcccgatgaccccgagcacccagatatcttccagctgaacaaccctgacaaaggcaatgtttacaagtttcagactggttcccgatttcatgcaatactgtggcacaagcatttggatgatgcatgtaaaagcaacaggcctcaggtacctgcaaaccttatgtcatttgagtaagtctctgcaggacgtggcatgacttcagaggcttctgggaacccaggctgggcctggtggtgaagagcagtcctgggcacaggctgtgagccagggtgctgggaaactcacagctggactcaggggacacggcctgtggcctcaccatcccagagggcttcaccagtgtgggatccacctgtcagtccccagcgactctcatgacactcattctgcagcaccgcctcttggggcagtggtcagaccccacacgccctctctgggcccaccacctgcatctgcgactagagagcacccggcccacgttgggttctcagtgctttctactgcacagagtggacagcgctaactaacctgtgagaggggcccgagagaaggaacagctgtggaacaggctttttacaccccaagtgcatggggttgctcgcccacagggctgcctcagattttgtacaaccccgaagcgtcctctgcgtgtgcgtgctgtacgtgtgtgtgtgtgtgtgagcgagtgtgaactcttcaagaaacatgcattttggcacaagactcgtgacatcacacacttcattcgctttgaggccctgctttaaccttaagttatagccctgtccaccgaggaaggtcagggtgagagcctagattcctcctgtgtcaagggtccctcgcattcttttactgtaaacaaacaatgccttaaattgtgtcttgttttctgttcctatgggtgctattcatctggaaggcctgcttccaggcctctttgctgtcagcccttctgagacaggacctggcttcaggactgtggactgggctgctggcctgcttgcttcctcccttccccattcctagcagggcctgaggccctcctcttctcgcccttcccaccatgccagaatgggaagttgtgacgttgcagctccaaccgacgtgctcatagtgatcagctgtgcaggagccatgaggcaccaacctctccccgcagggcaaagcctgtgcccccatcatctcactcctttgcctgcactgccagggtggggcccaccaagattcctgatcatgacgggaagctgagtgaccctgaggccttaagcttccccagtcttggccccaaatgcagtcaccagcaagttttccattttccaagtccaagggcacaattgttgatgaccgtgtgacaatagagcgaagccccggggagtgaacggtccaacctctgcattcagttaggagctcttcacatgaatcacatccttatctgtcaccttgtgtcacattttaaagtgacttttattttgcacaaataatttttattcagaataataaatcactctttatcatagtatcttctcttccctcttcccctttagtttggatagcctaactctgagaagttaacccttaaacagttttctggaagagactgaatttctgggtccttgcagctgtgatggtttcagagctcagactgatcaggcatcaagctaccctcaagagtttctgggctggatgtttcagaacaacatctacaccagtaaagtgtaataggtcagtttcaaaacgaccaaaagacccaccactgtattttgaccaaataatgacaacttctttagaaatttgaatggcttggtgaggaaagtagttgtcaccagggcctcattttgtagttgagccttacaatgcttagtagttcatcttctttttgagcaaagactagaatactttcctcctaagagaaactcccaggtgataaaagttgatgccatcaaaccttgacaccgggtgctctgcacacccacgcggatgttgcacctcattctcccgatgactattcaaatcagcatctagaggctgaatgacaatgccaaacactccacctctgatcagaaccatgcagtgttaacactttaacctacattgaatctgattctacctgttaacttttaaaaagtcgtaagtttggatgaaagtgcaagatgtggaacatcaactacctattttccttgggtttttccactctgcaaactgtcctggtttttcacaccaatgaagtattatagatgccaatccaaaacctcagaatttcaggcaccacaaaaacaggtaattttctatcccttataagtttgtcttttctttcagaaacatctcttagcctaatttgaaatagcacaatcacaattcaaaatgtttagtcttctcactaattgagtctgcttccacgtcctctcccaggaacattcttagctcggactcttgaagaatctctttagattttgttggcaaaagccttatagaagcagtaagaggcttgaccacgccggaagagtcctggagctaaagctggaagacactcagctctctaagcaggggctcggccaaacatgggagttaagtgctgcttgtcttcccagtgttggtttgaaccctgtgagcctgagacagagagggccaggcaccaaccacaaggcgggaaagtccatgggtagaccctccccctggagggaagcatttctagtttttgctccttgactgtccagagtgtacaaatgttcataacgccattgaagggattatttcttgcatgcatatgctgaatttttttaagcaaatggatcatggcaccccaaaatgaaagttatagaaagctgtctacaactgtggagttggtagctggtaacattgttgtctcaagaacaactcacctctctccctaggactaatttttgtctctctcagttgaacatgttttgtcattcaagatcagtcaggtgcattctggcaactgacatacttgatggaggattgattcggtagagagcagtagaaatcttgttctaactgtgcctggtgagagactttggccccctccctccctataaggctgtggaacctgaggaagtagatacttgaagagattctgtttaggaagaaactcactctcttttgccagttgaatttatagagcattttttttcttaccaagatggccagtatcattttacccccacctcccaagccccaagaggtgtaccttttcagatgccattttacaggcggaaatgctccatgaaacaggaagccacttgcaagcaacatctgctctgttcctcaggtggggcccagagcccttccccgagactgctgatgtctgtaaccactggggagcactgccaaaaatacagctttctggtttgtgagcccataaatgacttaaatcagctttacatcatttttacatatcaagtggtttcatgttaaaaaacaaactcctagtcctttagaaataacagattctctgcacaaaaccacccattcattcatttattcattcacagcactagcaagtgctgcctatgctgagaacaagtcagatctgatccctgccctcatggacctgaccactcaacaaacagtccccaccacacctatctccttaggcaagactttgcctctctcctagtcctgagtataaatcctgtgcatagattcctctagaaaggcatcaaaaggctcaacagactgaatggcctcttggtctgcgaaaattcagttgcaatgaggatgaagtcactatcctagaggctgcttggcccagaagagccaggcacagagctgcagttgggcacgccaaggattccaaaggtggaatgagagagtagggtcaaactgtcacagtatctgctccataggtttctgtttttaatttcaatgttaaatacaactacaatatgagcgagaactgcattttcttgggtgttgagaacttgtaccatggacttcagaccgccttgcagccgtatgctgcacaagcgtgtacaccccctgggcagcctcaaaaccccgcttacagcagcaacacaggagatcatctgtccattttagaaccattaatctctttatccattgctgaacgactgtgactattcagtaacgaagtaatagtaattaattagtatggtataatctttaataaatttcgtgccaaaatgcatggttttccacttagcattcaaaatgttgcatagagagtagttttcaatttcttatgtactcttcgaagtaagttgaaaatcagtttctacattttaattcgtttcctgttaaatctgttgcactctcctgggctgtctttttctccagcagacccctgcatgcagttgtgtaaggactttctctaattcttgtgaatcgtctcacccgcagtaaccactgaacgtcaatcagccctccatggggttctttcgatttttggtgaagtattttgttacctcagtcttgtatcaagttgctgtatttttcagcttgttacattgataataattatttcactaattaaatactttaatgtacaaacatctttgtttactttgaaattaaatgtgttttccaatga

SEQ ID NO: 358927 - DNA, 740 bp, Homo sapiens
aaatgttagcaatacctgtgatttttatctccaagaggaatcacatattgttacagacatttcaaaatgtcacttatgctcatctcttttacagtgcagtatcggaccgtactagatctgtttttagtgctttaatatagaagcacctatagaattatactgctggtttgttttttagttgtttaataactgtatttgagtattatcgatttcctttgtattttatacatttggaaacattattctgaggattgtccacaggcttaaccagacagccaaaggcaccatggccccaaaatggttacaagccatggtccaaagagaccactggagggagccctggaggctgctttctctgcatgttccagctcacctggggccgaccttcccactttagttacccgtgtttacatttctctttatgccagtcaccagctgaccctcctacgtggccctcttcttaactcatggtttctctacccatcaggcaatgtttacaagtttcagactggttcccgatttcatgcaatactgtggcacaagcatttggatgatgcatgtaaaagcaacaggcctcaggtaaagtcatcaaaatcctgcttgtcacctgaaatatcctctcccacccttggaactaagggtctttagaaaacagggttcccttcttctttcagagcccattagccacactctcagataccctcttctgatcagcatcttcccttgagacaaggcacccc

SEQ ID NO: 358928 - DNA, 751 bp, Homo sapiens
cgccgctcaggccctggagcggacggttcctactgcggctgggcaccggctccgctcccgcgtctgcccgcgctccagctgcgcctggcccggccccggcccggctcggcgtggccccggcctccaagcgaaggcgccgctgccgctgggccgctcccagggccatgaggaagcggcggcagccactgcggcccgcgtcaaggtgaccggccgggactgcggcggcggggagagcggcggacttctccagacaggttatgttacctgcagaggctgccctgaagctccctgtggcctggagactatgtacaagaggaatggtctgatggctagcgtgttggtcacctctgccactccacagggcagcagcagctcggactctctggagggccagagctgcgactatgccagcaagagctatgatgccgttgtcttcgatgtcttgaaagtgaccccagaggagtttgctagccagattacattaatggatatacctgtgtttaaagctatccagccggagaaaggctggcctgccagaatggaagactccctgcagaagtccacagtttcctccaggccacatgacacgttgcagttcaggaaaacactgcctgtgggtccaggaacctgaccctctggccttttgtctggatgccgtttgcctgctctgaagaagcgggcgttccagaaagccgaggtcaatgttggacgtcggacaaaccctgtgtgtctttgctgctccttggaatca

SEQ ID NO: 358929 - DNA, 6248 bp, Homo sapiens
cgccgctcaggccctggagcggacggttcctactgcggctgggcaccggctccgctcccgcgtctgcccgcgctccagctgcgcctggcccggccccggcccggctcggcgtggccccggcctccaagcgaaggcgccgctgccgctgggccgctcccagggccatgaggaagcggcggcagccactgcggcccgcgtcaaggtgaccggccgggactgcggcggcggggagagcggcggacttctccagacaggttatgttacctgcagaggctgccctgaagctccctgtggcctggagactatgtacaagaggaatggtctgatggctagcgtgttggtcacctctgccactccacagggcagcagcagctcggactctctggagggccagagctgcgactatgccagcaagagctatgatgccgttgtcttcgatgtcttgaaagtgaccccagaggagtttgctagccagattacattaatggatatacctgtgtttaaagctatccagccggaggaactagccagctgtggatggagtaagaaggagaaacacagtcttgcccctaacgttgtggcctttacccggaggtttaaccaggtcagtttttgggttgtacgagaaattctaacagcacagactttaaaaataagggcagaaatcctcagccattttgtgaaaatagccaagaaacttctagaactcaacaaccttcattctctcatgtctgtggtatcagcattacaaagtgctcccatcttcaggctgacaaaaacctgggctcttttaaatcgaaaagacaagactacctttgagaaattggactacctgatgtcgaaagaagataattacaagcggacacgggaatatatccgaagcctgaagatggttccaagtattccctatctaggaatctatcttctggatttaatctacattgattctgcatatcctgcctcaggcagtatcatggaaaatgaacaaagatccaatcagatgaacaatattcttcgaataattgctgatttacaagtttcctgcagctatgatcacctcaccaccctgccccatgtgcagaagtacctgaagtccgtacgctacattgaagagctccagaagtttgtggaagacgacaactacaaactgtcgctcagaatcgaaccaggaagcagctctccaagactagtctcttccaaggaagatcttgcaggtccctctgctggctccggttctgcgaggttcagccggaggcccacctgtcctgacacatctgttgctggcagcctccccacacctccagtccccagacacaggaagagccacagcctaggcaacaacaggggacgtctctatgccaccctggggcccaactggcgggttccagttaggaattctcccagaacccggagctgtgtctacagccccaccggcccgtgcatctgttctctggggaactccgcagctgtgcccaccatggaggggcctctgagaagaaaaaccctgctcaaggaagggcggaagcctgcgctgtcctcgtggaccaggtactgggtcatactctcaggatccaccctcctgtactacggagccaagtccttgcggggcacagacagaaaacactataaatccacacctggcaaaaaggtttccatcgtgggctggatggtgcagctgcccgatgaccccgagcacccagatatcttccagctgaacaaccctgacaaaggcaatgtttacaagtttcagactggttcccgatttcatgcaatactgtggcacaagcatttggatgatgcatgtaaaagcaacaggcctcaggtacctgcaaaccttatgtcatttgagtaagtctctgcaggacgtggcatgacttcagaggcttctgggaacccaggctgggcctggtggtgaagagcagtcctgggcacaggctgtgagccagggtgctgggaaactcacagctggactcaggggacacggcctgtggcctcaccatcccagagggcttcaccagtgtgggatccacctgtcagtccccagcgactctcatgacactcattctgcagcaccgcctcttggggcagtggtcagaccccacacgccctctctgggcccaccacctgcatctgcgactagagagcacccggcccacgttgggttctcagtgctttctactgcacagagtggacagcgctaactaacctgtgagaggggcccgagagaaggaacagctgtggaacaggctttttacaccccaagtgcatggggttgctcgcccacagggctgcctcagattttgtacaaccccgaagcgtcctctgcgtgtgcgtgctgtacgtgtgtgtgtgtgtgtgagcgagtgtgaactcttcaagaaacatgcattttggcacaagactcgtgacatcacacacttcattcgctttgaggccctgctttaaccttaagttatagccctgtccaccgaggaaggtcagggtgagagcctagattcctcctgtgtcaagggtccctcgcattcttttactgtaaacaaacaatgccttaaattgtgtcttgttttctgttcctatgggtgctattcatctggaaggcctgcttccaggcctctttgctgtcagcccttctgagacaggacctggcttcaggactgtggactgggctgctggcctgcttgcttcctcccttccccattcctagcagggcctgaggccctcctcttctcgcccttcccaccatgccagaatgggaagttgtgacgttgcagctccaaccgacgtgctcatagtgatcagctgtgcaggagccatgaggcaccaacctctccccgcagggcaaagcctgtgcccccatcatctcactcctttgcctgcactgccagggtggggcccaccaagattcctgatcatgacgggaagctgagtgaccctgaggccttaagcttccccagtcttggccccaaatgcagtcaccagcaagttttccattttccaagtccaagggcacaattgttgatgaccgtgtgacaatagagcgaagccccggggagtgaacggtccaacctctgcattcagttaggagctcttcacatgaatcacatccttatctgtcaccttgtgtcacattttaaagtgacttttattttgcacaaataatttttattcagaataataaatcactctttatcatagtatcttctcttccctcttcccctttagtttggatagcctaactctgagaagttaacccttaaacagttttctggaagagactgaatttctgggtccttgcagctgtgatggtttcagagctcagactgatcaggcatcaagctaccctcaagagtttctgggctggatgtttcagaacaacatctacaccagtaaagtgtaataggtcagtttcaaaacgaccaaaagacccaccactgtattttgaccaaataatgacaacttctttagaaatttgaatggcttggtgaggaaagtagttgtcaccagggcctcattttgtagttgagccttacaatgcttagtagttcatcttctttttgagcaaagactagaatactttcctcctaagagaaactcccaggtgataaaagttgatgccatcaaaccttgacaccgggtgctctgcacacccacgcggatgttgcacctcattctcccgatgactattcaaatcagcatctagaggctgaatgacaatgccaaacactccacctctgatcagaaccatgcagtgttaacactttaacctacattgaatctgattctacctgttaacttttaaaaagtcgtaagtttggatgaaagtgcaagatgtggaacatcaactacctattttccttgggtttttccactctgcaaactgtcctggtttttcacaccaatgaagtattatagatgccaatccaaaacctcagaatttcaggcaccacaaaaacaggtaattttctatcccttataagtttgtcttttctttcagaaacatctcttagcctaatttgaaatagcacaatcacaattcaaaatgtttagtcttctcactaattgagtctgcttccacgtcctctcccaggaacattcttagctcggactcttgaagaatctctttagattttgttggcaaaagccttatagaagcagtaagaggcttgaccacgccggaagagtcctggagctaaagctggaagacactcagctctctaagcaggggctcggccaaacatgggagttaagtgctgcttgtcttcccagtgttggtttgaaccctgtgagcctgagacagagagggccaggcaccaaccacaaggcgggaaagtccatgggtagaccctccccctggagggaagcatttctagtttttgctccttgactgtccagagtgtacaaatgttcataacgccattgaagggattatttcttgcatgcatatgctgaatttttttaagcaaatggatcatggcaccccaaaatgaaagttatagaaagctgtctacaactgtggagttggtagctggtaacattgttgtctcaagaacaactcacctctctccctaggactaatttttgtctctctcagttgaacatgttttgtcattcaagatcagtcaggtgcattctggcaactgacatacttgatggaggattgattcggtagagagcagtagaaatcttgttctaactgtgcctggtgagagactttggccccctccctccctataaggctgtggaacctgaggaagtagatacttgaagagattctgtttaggaagaaactcactctcttttgccagttgaatttatagagcattttttttcttaccaagatggccagtatcattttacccccacctcccaagccccaagaggtgtaccttttcagatgccattttacaggcggaaatgctccatgaaacaggaagccacttgcaagcaacatctgctctgttcctcaggtggggcccagagcccttccccgagactgctgatgtctgtaaccactggggagcactgccaaaaatacagctttctggtttgtgagcccataaatgacttaaatcagctttacatcatttttacatatcaagtggtttcatgttaaaaaacaaactcctagtcctttagaaataacagattctctgcacaaaaccacccattcattcatttattcattcacagcactagcaagtgctgcctatgctgagaacaagtcagatctgatccctgccctcatggacctgaccactcaacaaacagtccccaccacacctatctccttaggcaagactttgcctctctcctagtcctgagtataaatcctgtgcatagattcctctagaaaggcatcaaaaggctcaacagactgaatggcctcttggtctgcgaaaattcagttgcaatgaggatgaagtcactatcctagaggctgcttggcccagaagagccaggcacagagctgcagttgggcacgccaaggattccaaaggtggaatgagagagtagggtcaaactgtcacagtatctgctccataggtttctgtttttaatttcaatgttaaatacaactacaatatgagcgagaactgcattttcttgggtgttgagaacttgtaccatggacttcagaccgccttgcagccgtatgctgcacaagcgtgtacaccccctgggcagcctcaaaaccccgcttacagcagcaacacaggagatcatctgtccattttagaaccattaatctctttatccattgctgaacgactgtgactattcagtaacgaagtaatagtaattaattagtatggtataatctttaataaatttcgtgccaaaatgcatggttttccacttagcattcaaaatgttgcatagagagtagttttcaatttcttatgtactcttcgaagtaagttgaaaatcagtttctacattttaattcgtttcctgttaaatctgttgcactctcctgggctgtctttttctccagcagacccctgcatgcagttgtgtaaggactttctctaattcttgtgaatcgtctcacccgcagtaaccactgaacgtcaatcagccctccatggggttctttcgatttttggtgaagtattttgttacctcagtcttgtatcaagttgctgtatttttcagcttgttacattgataataattatttcactaattaaatactttaatgtacaaacatctttgtttactttgaaattaaatgtgttttccaatga

SEQ ID NO: 358930 - DNA, 6414 bp, Homo sapiens
cgccgctcaggccctggagcggacggttcctactgcggctgggcaccggctccgctcccgcgtctgcccgcgctccagctgcgcctggcccggccccggcccggctcggcgtggccccggcctccaagcgaaggcgccgctgccgctgggccgctcccagggccatgaggaagcggcggcagccactgcggcccgcgtcaaggtgaccggccgggactgcggcggcggggagagcggcggacttctccagacaggttatgttacctgcagaggctgccctgaagctccctgtggcctggagactatgtacaagaggaatggtctgatggctagcgtgttggtcacctctgccactccacagggcagcagcagctcggactctctggagggccagagctgcgactatgccagcaagagctatgatgccgttgtcttcgatgtcttgaaagtgaccccagaggagtttgctagccagattacattaatggatatacctgtgtttaaagctatccagccggaggaactagccagctgtggatggagtaagaaggagaaacacagtcttgcccctaacgttgtggcctttacccggaggtttaaccaggtcagtttttgggttgtacgagaaattctaacagcacagactttaaaaataagggcagaaatcctcagccattttgtgaaaatagccaagaaacttctagaactcaacaaccttcattctctcatgtctgtggtatcagcattacaaagtgctcccatcttcaggctgacaaaaacctgggctcttttaaatcgaaaagacaagactacctttgagaaattggactacctgatgtcgaaagaagataattacaagcggacacgggaatatatccgaagcctgaagatggttccaagtattccctatctaggaatctatcttctggatttaatctacattgattctgcatatcctgcctcaggcagtatcatggaaaatgaacaaagatccaatcagatgaacaatattcttcgaataattgctgatttacaagtttcctgcagctatgatcacctcaccaccctgccccatgtgcagaagtacctgaagtccgtacgctacattgaagagctccagaagtttgtggaagacgacaactacaaactgtcgctcagaatcgaaccaggaagcagctctccaagactagtctcttccaaggaagatcttgcaggtccctctgctggctccggttctgcgaggttcagccggaggcccacctgtcctgacacatctgttgctggcagcctccccacacctccagtccccagacacaggaagagccacagcctaggcaacaatatgatgtgtcagttgagtgtagttgagagtaaaagtgcgacattcccatcggagaaagcaaggcacctactggacgacagtgtcctagagtcccgcagcccccgaaggggcctggctctgacctcctcctctgctgtcaccaatggactctccctaggcagtagtgagagctcagagtttagtgaagagatgtcttcagggctggaaagccccaccggcccgtgcatctgttctctggggaactccgcagctgtgcccaccatggaggggcctctgagaagaaaaaccctgctcaaggaagggcggaagcctgcgctgtcctcgtggaccaggtactgggtcatactctcaggatccaccctcctgtactacggagccaagtccttgcggggcacagacagaaaacactataaatccacacctggcaaaaaggtttccatcgtgggctggatggtgcagctgcccgatgaccccgagcacccagatatcttccagctgaacaaccctgacaaaggcaatgtttacaagtttcagactggttcccgatttcatgcaatactgtggcacaagcatttggatgatgcatgtaaaagcaacaggcctcaggtacctgcaaaccttatgtcatttgagtaagtctctgcaggacgtggcatgacttcagaggcttctgggaacccaggctgggcctggtggtgaagagcagtcctgggcacaggctgtgagccagggtgctgggaaactcacagctggactcaggggacacggcctgtggcctcaccatcccagagggcttcaccagtgtgggatccacctgtcagtccccagcgactctcatgacactcattctgcagcaccgcctcttggggcagtggtcagaccccacacgccctctctgggcccaccacctgcatctgcgactagagagcacccggcccacgttgggttctcagtgctttctactgcacagagtggacagcgctaactaacctgtgagaggggcccgagagaaggaacagctgtggaacaggctttttacaccccaagtgcatggggttgctcgcccacagggctgcctcagattttgtacaaccccgaagcgtcctctgcgtgtgcgtgctgtacgtgtgtgtgtgtgtgtgagcgagtgtgaactcttcaagaaacatgcattttggcacaagactcgtgacatcacacacttcattcgctttgaggccctgctttaaccttaagttatagccctgtccaccgaggaaggtcagggtgagagcctagattcctcctgtgtcaagggtccctcgcattcttttactgtaaacaaacaatgccttaaattgtgtcttgttttctgttcctatgggtgctattcatctggaaggcctgcttccaggcctctttgctgtcagcccttctgagacaggacctggcttcaggactgtggactgggctgctggcctgcttgcttcctcccttccccattcctagcagggcctgaggccctcctcttctcgcccttcccaccatgccagaatgggaagttgtgacgttgcagctccaaccgacgtgctcatagtgatcagctgtgcaggagccatgaggcaccaacctctccccgcagggcaaagcctgtgcccccatcatctcactcctttgcctgcactgccagggtggggcccaccaagattcctgatcatgacgggaagctgagtgaccctgaggccttaagcttccccagtcttggccccaaatgcagtcaccagcaagttttccattttccaagtccaagggcacaattgttgatgaccgtgtgacaatagagcgaagccccggggagtgaacggtccaacctctgcattcagttaggagctcttcacatgaatcacatccttatctgtcaccttgtgtcacattttaaagtgacttttattttgcacaaataatttttattcagaataataaatcactctttatcatagtatcttctcttccctcttcccctttagtttggatagcctaactctgagaagttaacccttaaacagttttctggaagagactgaatttctgggtccttgcagctgtgatggtttcagagctcagactgatcaggcatcaagctaccctcaagagtttctgggctggatgtttcagaacaacatctacaccagtaaagtgtaataggtcagtttcaaaacgaccaaaagacccaccactgtattttgaccaaataatgacaacttctttagaaatttgaatggcttggtgaggaaagtagttgtcaccagggcctcattttgtagttgagccttacaatgcttagtagttcatcttctttttgagcaaagactagaatactttcctcctaagagaaactcccaggtgataaaagttgatgccatcaaaccttgacaccgggtgctctgcacacccacgcggatgttgcacctcattctcccgatgactattcaaatcagcatctagaggctgaatgacaatgccaaacactccacctctgatcagaaccatgcagtgttaacactttaacctacattgaatctgattctacctgttaacttttaaaaagtcgtaagtttggatgaaagtgcaagatgtggaacatcaactacctattttccttgggtttttccactctgcaaactgtcctggtttttcacaccaatgaagtattatagatgccaatccaaaacctcagaatttcaggcaccacaaaaacaggtaattttctatcccttataagtttgtcttttctttcagaaacatctcttagcctaatttgaaatagcacaatcacaattcaaaatgtttagtcttctcactaattgagtctgcttccacgtcctctcccaggaacattcttagctcggactcttgaagaatctctttagattttgttggcaaaagccttatagaagcagtaagaggcttgaccacgccggaagagtcctggagctaaagctggaagacactcagctctctaagcaggggctcggccaaacatgggagttaagtgctgcttgtcttcccagtgttggtttgaaccctgtgagcctgagacagagagggccaggcaccaaccacaaggcgggaaagtccatgggtagaccctccccctggagggaagcatttctagtttttgctccttgactgtccagagtgtacaaatgttcataacgccattgaagggattatttcttgcatgcatatgctgaatttttttaagcaaatggatcatggcaccccaaaatgaaagttatagaaagctgtctacaactgtggagttggtagctggtaacattgttgtctcaagaacaactcacctctctccctaggactaatttttgtctctctcagttgaacatgttttgtcattcaagatcagtcaggtgcattctggcaactgacatacttgatggaggattgattcggtagagagcagtagaaatcttgttctaactgtgcctggtgagagactttggccccctccctccctataaggctgtggaacctgaggaagtagatacttgaagagattctgtttaggaagaaactcactctcttttgccagttgaatttatagagcattttttttcttaccaagatggccagtatcattttacccccacctcccaagccccaagaggtgtaccttttcagatgccattttacaggcggaaatgctccatgaaacaggaagccacttgcaagcaacatctgctctgttcctcaggtggggcccagagcccttccccgagactgctgatgtctgtaaccactggggagcactgccaaaaatacagctttctggtttgtgagcccataaatgacttaaatcagctttacatcatttttacatatcaagtggtttcatgttaaaaaacaaactcctagtcctttagaaataacagattctctgcacaaaaccacccattcattcatttattcattcacagcactagcaagtgctgcctatgctgagaacaagtcagatctgatccctgccctcatggacctgaccactcaacaaacagtccccaccacacctatctccttaggcaagactttgcctctctcctagtcctgagtataaatcctgtgcatagattcctctagaaaggcatcaaaaggctcaacagactgaatggcctcttggtctgcgaaaattcagttgcaatgaggatgaagtcactatcctagaggctgcttggcccagaagagccaggcacagagctgcagttgggcacgccaaggattccaaaggtggaatgagagagtagggtcaaactgtcacagtatctgctccataggtttctgtttttaatttcaatgttaaatacaactacaatatgagcgagaactgcattttcttgggtgttgagaacttgtaccatggacttcagaccgccttgcagccgtatgctgcacaagcgtgtacaccccctgggcagcctcaaaaccccgcttacagcagcaacacaggagatcatctgtccattttagaaccattaatctctttatccattgctgaacgactgtgactattcagtaacgaagtaatagtaattaattagtatggtataatctttaataaatttcgtgccaaaatgcatggttttccacttagcattcaaaatgttgcatagagagtagttttcaatttcttatgtactcttcgaagtaagttgaaaatcagtttctacattttaattcgtttcctgttaaatctgttgcactctcctgggctgtctttttctccagcagacccctgcatgcagttgtgtaaggactttctctaattcttgtgaatcgtctcacccgcagtaaccactgaacgtcaatcagccctccatggggttctttcgatttttggtgaagtattttgttacctcagtcttgtatcaagttgctgtatttttcagcttgttacattgataataattatttcactaattaaatactttaatgtacaaacatctttgtttactttgaaattaaatgtgttttccaatgaatgttgctcagtttattaaagtcacacacattcacttagc

SEQ ID NO: 358931 - DNA, 6284 bp, Homo sapiens
cgccgctcaggccctggagcggacggttcctactgcggctgggcaccggctccgctcccgcgtctgcccgcgctccagctgcgcctggcccggccccggcccggctcggcgtggccccggcctccaagcgaaggcgccgctgccgctgggccgctcccagggccatgaggaagcggcggcagccactgcggcccgcgtcaaggtgaccggccgggactgcggcggcggggagagcggcggacttctccagacaggttatgttacctgcagaggctgccctgaagctccctgtggcctggagactatgtacaagaggaatggtctgatggctagcgtgttggtcacctctgccactccacagggcagcagcagctcggactctctggagggccagagctgcgactatgccagcaagagctatgatgccgttgtcttcgatgtcttgaaagtgaccccagaggagtttgctagccagattacattaatggatatacctgtgtttaaagctatccagccggaggaactagccagctgtggatggagtaagaaggagaaacacagtcttgcccctaacgttgtggcctttacccggaggtttaaccagaaacttctagaactcaacaaccttcattctctcatgtctgtggtatcagcattacaaagtgctcccatcttcaggctgacaaaaacctgggctcttttaaatcgaaaagacaagactacctttgagaaattggactacctgatgtcgaaagaagataattacaagcggacacgggaatatatccgaagcctgaagatggttccaagtattccctatctaggaatctatcttctggatttaatctacattgattctgcatatcctgcctcaggcagtatcatggaaaatgaacaaagatccaatcagatgaacaatattcttcgaataattgctgatttacaagtttcctgcagctatgatcacctcaccaccctgccccatgtgcagaagtacctgaagtccgtacgctacattgaagagctccagaagtttgtggaagacgacaactacaaactgtcgctcagaatcgaaccaggaagcagctctccaagactagtctcttccaaggaagatcttgcaggtccctctgctggctccggttctgcgaggttcagccggaggcccacctgtcctgacacatctgttgctggcagcctccccacacctccagtccccagacacaggaagagccacagcctaggcaacaatatgatgtgtcagttgagtgtagttgagagtaaaagtgcgacattcccatcggagaaagcaaggcacctactggacgacagtgtcctagagtcccgcagcccccgaaggggcctggctctgacctcctcctctgctgtcaccaatggactctccctaggcagtagtgagagctcagagtttagtgaagagatgtcttcagggctggaaagccccaccggcccgtgcatctgttctctggggaactccgcagctgtgcccaccatggaggggcctctgagaagaaaaaccctgctcaaggaagggcggaagcctgcgctgtcctcgtggaccaggtactgggtcatactctcaggatccaccctcctgtactacggagccaagtccttgcggggcacagacagaaaacactataaatccacacctggcaaaaaggtttccatcgtgggctggatggtgcagctgcccgatgaccccgagcacccagatatcttccagctgaacaaccctgacaaaggcaatgtttacaagtttcagactggttcccgatttcatgcaatactgtggcacaagcatttggatgatgcatgtaaaagcaacaggcctcaggtacctgcaaaccttatgtcatttgagtaagtctctgcaggacgtggcatgacttcagaggcttctgggaacccaggctgggcctggtggtgaagagcagtcctgggcacaggctgtgagccagggtgctgggaaactcacagctggactcaggggacacggcctgtggcctcaccatcccagagggcttcaccagtgtgggatccacctgtcagtccccagcgactctcatgacactcattctgcagcaccgcctcttggggcagtggtcagaccccacacgccctctctgggcccaccacctgcatctgcgactagagagcacccggcccacgttgggttctcagtgctttctactgcacagagtggacagcgctaactaacctgtgagaggggcccgagagaaggaacagctgtggaacaggctttttacaccccaagtgcatggggttgctcgcccacagggctgcctcagattttgtacaaccccgaagcgtcctctgcgtgtgcgtgctgtacgtgtgtgtgtgtgtgtgagcgagtgtgaactcttcaagaaacatgcattttggcacaagactcgtgacatcacacacttcattcgctttgaggccctgctttaaccttaagttatagccctgtccaccgaggaaggtcagggtgagagcctagattcctcctgtgtcaagggtccctcgcattcttttactgtaaacaaacaatgccttaaattgtgtcttgttttctgttcctatgggtgctattcatctggaaggcctgcttccaggcctctttgctgtcagcccttctgagacaggacctggcttcaggactgtggactgggctgctggcctgcttgcttcctcccttccccattcctagcagggcctgaggccctcctcttctcgcccttcccaccatgccagaatgggaagttgtgacgttgcagctccaaccgacgtgctcatagtgatcagctgtgcaggagccatgaggcaccaacctctccccgcagggcaaagcctgtgcccccatcatctcactcctttgcctgcactgccagggtggggcccaccaagattcctgatcatgacgggaagctgagtgaccctgaggccttaagcttccccagtcttggccccaaatgcagtcaccagcaagttttccattttccaagtccaagggcacaattgttgatgaccgtgtgacaatagagcgaagccccggggagtgaacggtccaacctctgcattcagttaggagctcttcacatgaatcacatccttatctgtcaccttgtgtcacattttaaagtgacttttattttgcacaaataatttttattcagaataataaatcactctttatcatagtatcttctcttccctcttcccctttagtttggatagcctaactctgagaagttaacccttaaacagttttctggaagagactgaatttctgggtccttgcagctgtgatggtttcagagctcagactgatcaggcatcaagctaccctcaagagtttctgggctggatgtttcagaacaacatctacaccagtaaagtgtaataggtcagtttcaaaacgaccaaaagacccaccactgtattttgaccaaataatgacaacttctttagaaatttgaatggcttggtgaggaaagtagttgtcaccagggcctcattttgtagttgagccttacaatgcttagtagttcatcttctttttgagcaaagactagaatactttcctcctaagagaaactcccaggtgataaaagttgatgccatcaaaccttgacaccgggtgctctgcacacccacgcggatgttgcacctcattctcccgatgactattcaaatcagcatctagaggctgaatgacaatgccaaacactccacctctgatcagaaccatgcagtgttaacactttaacctacattgaatctgattctacctgttaacttttaaaaagtcgtaagtttggatgaaagtgcaagatgtggaacatcaactacctattttccttgggtttttccactctgcaaactgtcctggtttttcacaccaatgaagtattatagatgccaatccaaaacctcagaatttcaggcaccacaaaaacaggtaattttctatcccttataagtttgtcttttctttcagaaacatctcttagcctaatttgaaatagcacaatcacaattcaaaatgtttagtcttctcactaattgagtctgcttccacgtcctctcccaggaacattcttagctcggactcttgaagaatctctttagattttgttggcaaaagccttatagaagcagtaagaggcttgaccacgccggaagagtcctggagctaaagctggaagacactcagctctctaagcaggggctcggccaaacatgggagttaagtgctgcttgtcttcccagtgttggtttgaaccctgtgagcctgagacagagagggccaggcaccaaccacaaggcgggaaagtccatgggtagaccctccccctggagggaagcatttctagtttttgctccttgactgtccagagtgtacaaatgttcataacgccattgaagggattatttcttgcatgcatatgctgaatttttttaagcaaatggatcatggcaccccaaaatgaaagttatagaaagctgtctacaactgtggagttggtagctggtaacattgttgtctcaagaacaactcacctctctccctaggactaatttttgtctctctcagttgaacatgttttgtcattcaagatcagtcaggtgcattctggcaactgacatacttgatggaggattgattcggtagagagcagtagaaatcttgttctaactgtgcctggtgagagactttggccccctccctccctataaggctgtggaacctgaggaagtagatacttgaagagattctgtttaggaagaaactcactctcttttgccagttgaatttatagagcattttttttcttaccaagatggccagtatcattttacccccacctcccaagccccaagaggtgtaccttttcagatgccattttacaggcggaaatgctccatgaaacaggaagccacttgcaagcaacatctgctctgttcctcaggtggggcccagagcccttccccgagactgctgatgtctgtaaccactggggagcactgccaaaaatacagctttctggtttgtgagcccataaatgacttaaatcagctttacatcatttttacatatcaagtggtttcatgttaaaaaacaaactcctagtcctttagaaataacagattctctgcacaaaaccacccattcattcatttattcattcacagcactagcaagtgctgcctatgctgagaacaagtcagatctgatccctgccctcatggacctgaccactcaacaaacagtccccaccacacctatctccttaggcaagactttgcctctctcctagtcctgagtataaatcctgtgcatagattcctctagaaaggcatcaaaaggctcaacagactgaatggcctcttggtctgcgaaaattcagttgcaatgaggatgaagtcactatcctagaggctgcttggcccagaagagccaggcacagagctgcagttgggcacgccaaggattccaaaggtggaatgagagagtagggtcaaactgtcacagtatctgctccataggtttctgtttttaatttcaatgttaaatacaactacaatatgagcgagaactgcattttcttgggtgttgagaacttgtaccatggacttcagaccgccttgcagccgtatgctgcacaagcgtgtacaccccctgggcagcctcaaaaccccgcttacagcagcaacacaggagatcatctgtccattttagaaccattaatctctttatccattgctgaacgactgtgactattcagtaacgaagtaatagtaattaattagtatggtataatctttaataaatttcgtgccaaaatgcatggttttccacttagcattcaaaatgttgcatagagagtagttttcaatttcttatgtactcttcgaagtaagttgaaaatcagtttctacattttaattcgtttcctgttaaatctgttgcactctcctgggctgtctttttctccagcagacccctgcatgcagttgtgtaaggactttctctaattcttgtgaatcgtctcacccgcagtaaccactgaacgtcaatcagccctccatggggttctttcgatttttggtgaagtattttgttacctcagtcttgtatcaagttgctgtatttttcagcttgttacattgataataattatttcactaattaaatactttaatgtacaaacatctttgtttactttgaaattaaatgtgttttccaatga

SEQ ID NO: 358932 - DNA, 5005 bp, Homo sapiens
aaatgttagcaatacctgtgatttttatctccaagaggaatcacatattgttacagacatttcaaaatgtcacttatgctcatctcttttacagtgcagtatcggaccgtactagatctgtttttagtgctttaatatagaagcacctatagaattatactgctggtttgttttttagttgtttaataactgtatttgagtattatcgatttcctttgtattttatacatttggaaacattattctgaggattgtccacaggcttaaccagacagccaaaggcaccatggccccaaaatggttacaagccatggtccaaagagaccactggagggagccctggaggctgctttctctgcatgttccagctcacctggggccgaccttcccactttagttacccgtgtttacatttctctttatgccagtcaccagctgaccctcctacgtggccctcttcttaactcatggtttctctacccatcaggcaatgtttacaagtttcagactggttcccgatttcatgcaatactgtggcacaagcatttggatgatgcatgtaaaagcaacaggcctcaggtacctgcaaaccttatgtcatttgagtaagtctctgcaggacgtggcatgacttcagaggcttctgggaacccaggctgggcctggtggtgaagagcagtcctgggcacaggctgtgagccagggtgctgggaaactcacagctggactcaggggacacggcctgtggcctcaccatcccagagggcttcaccagtgtgggatccacctgtcagtccccagcgactctcatgacactcattctgcagcaccgcctcttggggcagtggtcagaccccacacgccctctctgggcccaccacctgcatctgcgactagagagcacccggcccacgttgggttctcagtgctttctactgcacagagtggacagcgctaactaacctgtgagaggggcccgagagaaggaacagctgtggaacaggctttttacaccccaagtgcatggggttgctcgcccacagggctgcctcagattttgtacaaccccgaagcgtcctctgcgtgtgcgtgctgtacgtgtgtgtgtgtgtgtgagcgagtgtgaactcttcaagaaacatgcattttggcacaagactcgtgacatcacacacttcattcgctttgaggccctgctttaaccttaagttatagccctgtccaccgaggaaggtcagggtgagagcctagattcctcctgtgtcaagggtccctcgcattcttttactgtaaacaaacaatgccttaaattgtgtcttgttttctgttcctatgggtgctattcatctggaaggcctgcttccaggcctctttgctgtcagcccttctgagacaggacctggcttcaggactgtggactgggctgctggcctgcttgcttcctcccttccccattcctagcagggcctgaggccctcctcttctcgcccttcccaccatgccagaatgggaagttgtgacgttgcagctccaaccgacgtgctcatagtgatcagctgtgcaggagccatgaggcaccaacctctccccgcagggcaaagcctgtgcccccatcatctcactcctttgcctgcactgccagggtggggcccaccaagattcctgatcatgacgggaagctgagtgaccctgaggccttaagcttccccagtcttggccccaaatgcagtcaccagcaagttttccattttccaagtccaagggcacaattgttgatgaccgtgtgacaatagagcgaagccccggggagtgaacggtccaacctctgcattcagttaggagctcttcacatgaatcacatccttatctgtcaccttgtgtcacattttaaagtgacttttattttgcacaaataatttttattcagaataataaatcactctttatcatagtatcttctcttccctcttcccctttagtttggatagcctaactctgagaagttaacccttaaacagttttctggaagagactgaatttctgggtccttgcagctgtgatggtttcagagctcagactgatcaggcatcaagctaccctcaagagtttctgggctggatgtttcagaacaacatctacaccagtaaagtgtaataggtcagtttcaaaacgaccaaaagacccaccactgtattttgaccaaataatgacaacttctttagaaatttgaatggcttggtgaggaaagtagttgtcaccagggcctcattttgtagttgagccttacaatgcttagtagttcatcttctttttgagcaaagactagaatactttcctcctaagagaaactcccaggtgataaaagttgatgccatcaaaccttgacaccgggtgctctgcacacccacgcggatgttgcacctcattctcccgatgactattcaaatcagcatctagaggctgaatgacaatgccaaacactccacctctgatcagaaccatgcagtgttaacactttaacctacattgaatctgattctacctgttaacttttaaaaagtcgtaagtttggatgaaagtgcaagatgtggaacatcaactacctattttccttgggtttttccactctgcaaactgtcctggtttttcacaccaatgaagtattatagatgccaatccaaaacctcagaatttcaggcaccacaaaaacaggtaattttctatcccttataagtttgtcttttctttcagaaacatctcttagcctaatttgaaatagcacaatcacaattcaaaatgtttagtcttctcactaattgagtctgcttccacgtcctctcccaggaacattcttagctcggactcttgaagaatctctttagattttgttggcaaaagccttatagaagcagtaagaggcttgaccacgccggaagagtcctggagctaaagctggaagacactcagctctctaagcaggggctcggccaaacatgggagttaagtgctgcttgtcttcccagtgttggtttgaaccctgtgagcctgagacagagagggccaggcaccaaccacaaggcgggaaagtccatgggtagaccctccccctggagggaagcatttctagtttttgctccttgactgtccagagtgtacaaatgttcataacgccattgaagggattatttcttgcatgcatatgctgaatttttttaagcaaatggatcatggcaccccaaaatgaaagttatagaaagctgtctacaactgtggagttggtagctggtaacattgttgtctcaagaacaactcacctctctccctaggactaatttttgtctctctcagttgaacatgttttgtcattcaagatcagtcaggtgcattctggcaactgacatacttgatggaggattgattcggtagagagcagtagaaatcttgttctaactgtgcctggtgagagactttggccccctccctccctataaggctgtggaacctgaggaagtagatacttgaagagattctgtttaggaagaaactcactctcttttgccagttgaatttatagagcattttttttcttaccaagatggccagtatcattttacccccacctcccaagccccaagaggtgtaccttttcagatgccattttacaggcggaaatgctccatgaaacaggaagccacttgcaagcaacatctgctctgttcctcaggtggggcccagagcccttccccgagactgctgatgtctgtaaccactggggagcactgccaaaaatacagctttctggtttgtgagcccataaatgacttaaatcagctttacatcatttttacatatcaagtggtttcatgttaaaaaacaaactcctagtcctttagaaataacagattctctgcacaaaaccacccattcattcatttattcattcacagcactagcaagtgctgcctatgctgagaacaagtcagatctgatccctgccctcatggacctgaccactcaacaaacagtccccaccacacctatctccttaggcaagactttgcctctctcctagtcctgagtataaatcctgtgcatagattcctctagaaaggcatcaaaaggctcaacagactgaatggcctcttggtctgcgaaaattcagttgcaatgaggatgaagtcactatcctagaggctgcttggcccagaagagccaggcacagagctgcagttgggcacgccaaggattccaaaggtggaatgagagagtagggtcaaactgtcacagtatctgctccataggtttctgtttttaatttcaatgttaaatacaactacaatatgagcgagaactgcattttcttgggtgttgagaacttgtaccatggacttcagaccgccttgcagccgtatgctgcacaagcgtgtacaccccctgggcagcctcaaaaccccgcttacagcagcaacacaggagatcatctgtccattttagaaccattaatctctttatccattgctgaacgactgtgactattcagtaacgaagtaatagtaattaattagtatggtataatctttaataaatttcgtgccaaaatgcatggttttccacttagcattcaaaatgttgcatagagagtagttttcaatttcttatgtactcttcgaagtaagttgaaaatcagtttctacattttaattcgtttcctgttaaatctgttgcactctcctgggctgtctttttctccagcagacccctgcatgcagttgtgtaaggactttctctaattcttgtgaatcgtctcacccgcagtaaccactgaacgtcaatcagccctccatggggttctttcgatttttggtgaagtattttgttacctcagtcttgtatcaagttgctgtatttttcagcttgttacattgataataattatttcactaattaaatactttaatgtacaaacatctttgtttactttgaaattaaatgtgttttccaatga

SEQ ID NO: 358933 - DNA, 2251 bp, Homo sapiens
cgccgctcaggccctggagcggacggttcctactgcggctgggcaccggctccgctcccgcgtctgcccgcgctccagctgcgcctggcccggccccggcccggctcggcgtggccccggcctccaagcgaaggcgccgctgccgctgggccgctcccagggccatgaggaagcggcggcagccactgcggcccgcgtcaaggtgaccggccgggactgcggcggcggggagagcggcggacttctccagacaggttatgttacctgcagaggctgccctgaagctccctgtggcctggagactatgtacaagaggaatggtctgatggctagcgtgttggtcacctctgccactccacagggcagcagcagctcggactctctggagggccagagctgcgactatgccagcaagagctatgatgccgttgtcttcgatgtcttgaaagtgaccccagaggagtttgctagccagattacattaatggatatacctgtgtttaaagctatccagccggaggaactagccagctgtggatggagtaagaaggagaaacacagtcttgcccctaacgttgtggcctttacccggaggtttaaccaggtcagtttttgggttgtacgagaaattctaacagcacagactttaaaaataagggcagaaatcctcagccattttgtgaaaatagccaagaaacttctagaactcaacaaccttcattctctcatgtctgtggtatcagcattacaaagtgctcccatcttcaggctgacaaaaacctgggctcttttaaatcgaaaagacaagactacctttgagaaattggactacctgatgtcgaaagaagataattacaagcggacacgggaatatatccgaagcctgaagatggttccaagtattccctatctaggaatctatcttctggatttaatctacattgattctgcatatcctgcctcaggcagtatcatggaaaatgaacaaagatccaatcagatgaacaatattcttcgaataattgctgatttacaagtttcctgcagctatgatcacctcaccaccctgccccatgtgcagaagtacctgaagtccgtacgctacattgaagagctccagaagtttgtggaagacgacaactacaaactgtcgctcagaatcgaaccaggaagcagctctccaagactagtctcttccaaggaagatcttgcaggtccctctgctggctccggttctgcgaggttcagccggaggcccacctgtcctgacacatctgttgctggcagcctccccacacctccagtccccagacacaggaagagccacagcctaggcaacaacaggggacgtctctatgccaccctggggcccaactggcgggttccagttaggaattctcccagaacccggagctgtgtctacagccccaccggcccgtgcatctgttctctggggaactccgcagctgtgcccaccatggaggggcctctgagaagaaaaaccctgctcaaggaagggcggaagcctgcgctgtcctcgtggaccaggtactgggtcatactctcaggatccaccctcctgtactacggagccaagtccttgcggggcacagacagaaaacacgtttccatcgtgggctggatggtgcagctgcccgatgaccccgagcacccagatatcttccagctgaacaaccctgacaaaggcaatgtttacaagtttcagactggttcccgatttcatgcaatactgtggcacaagcatttggatgatgcatgtaaaagcaacaggcctcaggaagccggagcagctccaggtccaacaggaactgacagccacgaggtggaccacctggagggcggtgcggggaaggaggcagggccctgtgcctgaagcctgggcaccatggtggccccagtcaggagcaacagtggtagccctgagtaaaacccattgtccctctttggaggagcggccagaggatgacagcagccccagcaggcagcagtgcctgggcaggctgatccagcagagcactaatgggtcagtttcatgtattggcagatgtggtgtagcatggcaaggctacaagttttaaggatttttgtctgattttcagacctggaggaggggatttttcttcctactttcccccttttttatttctaatttactttcaaccaaatattcccactatgtgctatatgtaataataaaaagttgacaacaactgaaaaatcaacagcagag

SEQ ID NO: 358934 - DNA, 822 bp, Homo sapiens
cgccgctcaggccctggagcggacggttcctactgcggctgggcaccggctccgctcccgcgtctgcccgcgctccagctgcgcctggcccggccccggcccggctcggcgtggccccggcctccaagcgaaggcgccgctgccgctgggccgctcccagggccatgaggaagcggcggcagccactgcggcccgcgtcaaggtgaccggccgggactgcggcggcggggagagcggcggacttctccagacaggttatgttacctgcagaggctgccctgaagctccctgtggcctggagactatgtacaagaggaatggtctgatggctagcgtgttggtcacctctgccactccacagggcagcagcagctcggactctctggagggccagagctgcgactatgccagcaagagctatgatgccgttgtcttcgatgtcttgaaagtgaccccagaggagtttgctagccagattacattaatggatatacctgtgtttaaagctatccagccggaggagtgaagcatggaggtggggacagacttcaagcgatggagatataaacaacctaggtcagtcatacgcagtgtcatcatctgttcagtcttcctacttgtcctgggctgaccttgccctctggttcttagcttcctgccttggctccaacctcactccagcccttattgatggggcttcatggtttgtctttggttctcctaccttgaccccaccttttcaagaagtacaccttatatttcaatgtcacgtctttttacatcagttagagctgtgttgtcttaatatggtggctgcatgtg

SEQ ID NO: 358935 - DNA, 6374 bp, Homo sapiens
cgccgctcaggccctggagcggacggttcctactgcggctgggcaccggctccgctcccgcgtctgcccgcgctccagctgcgcctggcccggccccggcccggctcggcgtggccccggcctccaagcgaaggcgccgctgccgctgggccgctcccagggccatgaggaagcggcggcagccactgcggcccgcgtcaaggtgaccggccgggactgcggcggcggggagagcggcggacttctccagacaggttatgttacctgcagaggctgccctgaagctccctgtggcctggagactatgtacaagaggaatggtctgatggctagcgtgttggtcacctctgccactccacagggcagcagcagctcggactctctggagggccagagctgcgactatgccagcaagagctatgatgccgttgtcttcgatgtcttgaaagtgaccccagaggagtttgctagccagattacattaatggatatacctgtgtttaaagctatccagccggaggaactagccagctgtggatggagtaagaaggagaaacacagtcttgcccctaacgttgtggcctttacccggaggtttaaccaggtcagtttttgggttgtacgagaaattctaacagcacagactttaaaaataagggcagaaatcctcagccattttgtgaaaatagccaagaaacttctagaactcaacaaccttcattctctcatgtctgtggtatcagcattacaaagtgctcccatcttcaggctgacaaaaacctgggctcttttaaatcgaaaagacaagactacctttgagaaattggactacctgatgtcgaaagaagataattacaagcggacacgggaatatatccgaagcctgaagatggttccaagtattccctatctaggaatctatcttctggatttaatctacattgattctgcatatcctgcctcaggcagtatcatggaaaatgaacaaagatccaatcagatgaacaatattcttcgaataattgctgatttacaagtttcctgcagctatgatcacctcaccaccctgccccatgtgcagaagtacctgaagtccgtacgctacattgaagagctccagaagtttgtggaagacgacaactacaaactgtcgctcagaatcgaaccaggaagcagctctccaagactagtctcttccaaggaagatcttgcaggtccctctgctggctccggttctgcgaggttcagccggaggcccacctgtcctgacacatctgttgctggcagcctccccacacctccagtccccagacacaggaagagccacagcctaggcaacaatatgatgtgtcagttgagtgtagttgagagtaaaagtgcgacattcccatcggagaaagcaaggcacctactggacgacagtgtcctagagtcccgcagcccccgaaggggcctggctctgacctcctcctctgctgtcaccaatggactctccctaggcagtagtgagagctcagagtttagtgaagagatgtcttcagggctggaaagccccaccggcccgtgcatctgttctctggggaactccgcagctgtgcccaccatggaggggcctctgagaagaaaaaccctgctcaaggaagggcggaagcctgcgctgtcctcgtggaccaggtactgggtcatactctcaggatccaccctcctgtactacggagccaagtccttgcggggcacagacagaaaacactataaatccacacctggcaaaaaggtttccatcgtgggctggatggtgcagctgcccgatgaccccgagcacccagatatcttccagctgaacaaccctgacaaaggcaatgtttacaagtttcagactggttcccgatttcatgcaatactgtggcacaagcatttggatgatgcatgtaaaagcaacaggcctcaggtacctgcaaaccttatgtcatttgagtaagtctctgcaggacgtggcatgacttcagaggcttctgggaacccaggctgggcctggtggtgaagagcagtcctgggcacaggctgtgagccagggtgctgggaaactcacagctggactcaggggacacggcctgtggcctcaccatcccagagggcttcaccagtgtgggatccacctgtcagtccccagcgactctcatgacactcattctgcagcaccgcctcttggggcagtggtcagaccccacacgccctctctgggcccaccacctgcatctgcgactagagagcacccggcccacgttgggttctcagtgctttctactgcacagagtggacagcgctaactaacctgtgagaggggcccgagagaaggaacagctgtggaacaggctttttacaccccaagtgcatggggttgctcgcccacagggctgcctcagattttgtacaaccccgaagcgtcctctgcgtgtgcgtgctgtacgtgtgtgtgtgtgtgtgagcgagtgtgaactcttcaagaaacatgcattttggcacaagactcgtgacatcacacacttcattcgctttgaggccctgctttaaccttaagttatagccctgtccaccgaggaaggtcagggtgagagcctagattcctcctgtgtcaagggtccctcgcattcttttactgtaaacaaacaatgccttaaattgtgtcttgttttctgttcctatgggtgctattcatctggaaggcctgcttccaggcctctttgctgtcagcccttctgagacaggacctggcttcaggactgtggactgggctgctggcctgcttgcttcctcccttccccattcctagcagggcctgaggccctcctcttctcgcccttcccaccatgccagaatgggaagttgtgacgttgcagctccaaccgacgtgctcatagtgatcagctgtgcaggagccatgaggcaccaacctctccccgcagggcaaagcctgtgcccccatcatctcactcctttgcctgcactgccagggtggggcccaccaagattcctgatcatgacgggaagctgagtgaccctgaggccttaagcttccccagtcttggccccaaatgcagtcaccagcaagttttccattttccaagtccaagggcacaattgttgatgaccgtgtgacaatagagcgaagccccggggagtgaacggtccaacctctgcattcagttaggagctcttcacatgaatcacatccttatctgtcaccttgtgtcacattttaaagtgacttttattttgcacaaataatttttattcagaataataaatcactctttatcatagtatcttctcttccctcttcccctttagtttggatagcctaactctgagaagttaacccttaaacagttttctggaagagactgaatttctgggtccttgcagctgtgatggtttcagagctcagactgatcaggcatcaagctaccctcaagagtttctgggctggatgtttcagaacaacatctacaccagtaaagtgtaataggtcagtttcaaaacgaccaaaagacccaccactgtattttgaccaaataatgacaacttctttagaaatttgaatggcttggtgaggaaagtagttgtcaccagggcctcattttgtagttgagccttacaatgcttagtagttcatcttctttttgagcaaagactagaatactttcctcctaagagaaactcccaggtgataaaagttgatgccatcaaaccttgacaccgggtgctctgcacacccacgcggatgttgcacctcattctcccgatgactattcaaatcagcatctagaggctgaatgacaatgccaaacactccacctctgatcagaaccatgcagtgttaacactttaacctacattgaatctgattctacctgttaacttttaaaaagtcgtaagtttggatgaaagtgcaagatgtggaacatcaactacctattttccttgggtttttccactctgcaaactgtcctggtttttcacaccaatgaagtattatagatgccaatccaaaacctcagaatttcaggcaccacaaaaacaggtaattttctatcccttataagtttgtcttttctttcagaaacatctcttagcctaatttgaaatagcacaatcacaattcaaaatgtttagtcttctcactaattgagtctgcttccacgtcctctcccaggaacattcttagctcggactcttgaagaatctctttagattttgttggcaaaagccttatagaagcagtaagaggcttgaccacgccggaagagtcctggagctaaagctggaagacactcagctctctaagcaggggctcggccaaacatgggagttaagtgctgcttgtcttcccagtgttggtttgaaccctgtgagcctgagacagagagggccaggcaccaaccacaaggcgggaaagtccatgggtagaccctccccctggagggaagcatttctagtttttgctccttgactgtccagagtgtacaaatgttcataacgccattgaagggattatttcttgcatgcatatgctgaatttttttaagcaaatggatcatggcaccccaaaatgaaagttatagaaagctgtctacaactgtggagttggtagctggtaacattgttgtctcaagaacaactcacctctctccctaggactaatttttgtctctctcagttgaacatgttttgtcattcaagatcagtcaggtgcattctggcaactgacatacttgatggaggattgattcggtagagagcagtagaaatcttgttctaactgtgcctggtgagagactttggccccctccctccctataaggctgtggaacctgaggaagtagatacttgaagagattctgtttaggaagaaactcactctcttttgccagttgaatttatagagcattttttttcttaccaagatggccagtatcattttacccccacctcccaagccccaagaggtgtaccttttcagatgccattttacaggcggaaatgctccatgaaacaggaagccacttgcaagcaacatctgctctgttcctcaggtggggcccagagcccttccccgagactgctgatgtctgtaaccactggggagcactgccaaaaatacagctttctggtttgtgagcccataaatgacttaaatcagctttacatcatttttacatatcaagtggtttcatgttaaaaaacaaactcctagtcctttagaaataacagattctctgcacaaaaccacccattcattcatttattcattcacagcactagcaagtgctgcctatgctgagaacaagtcagatctgatccctgccctcatggacctgaccactcaacaaacagtccccaccacacctatctccttaggcaagactttgcctctctcctagtcctgagtataaatcctgtgcatagattcctctagaaaggcatcaaaaggctcaacagactgaatggcctcttggtctgcgaaaattcagttgcaatgaggatgaagtcactatcctagaggctgcttggcccagaagagccaggcacagagctgcagttgggcacgccaaggattccaaaggtggaatgagagagtagggtcaaactgtcacagtatctgctccataggtttctgtttttaatttcaatgttaaatacaactacaatatgagcgagaactgcattttcttgggtgttgagaacttgtaccatggacttcagaccgccttgcagccgtatgctgcacaagcgtgtacaccccctgggcagcctcaaaaccccgcttacagcagcaacacaggagatcatctgtccattttagaaccattaatctctttatccattgctgaacgactgtgactattcagtaacgaagtaatagtaattaattagtatggtataatctttaataaatttcgtgccaaaatgcatggttttccacttagcattcaaaatgttgcatagagagtagttttcaatttcttatgtactcttcgaagtaagttgaaaatcagtttctacattttaattcgtttcctgttaaatctgttgcactctcctgggctgtctttttctccagcagacccctgcatgcagttgtgtaaggactttctctaattcttgtgaatcgtctcacccgcagtaaccactgaacgtcaatcagccctccatggggttctttcgatttttggtgaagtattttgttacctcagtcttgtatcaagttgctgtatttttcagcttgttacattgataataattatttcactaattaaatactttaatgtacaaacatctttgtttactttgaaattaaatgtgttttccaatga

SEQ ID NO: 358936 - DNA, 4930 bp, Homo sapiens
gtttactggcctggcagctccagcaggggacgtctctatgccaccctggggcccaactggcgggttccagttaggaattctcccagaacccggagctgtgtctacagccccaccggcccgtgcatctgttctctggggaactccgcagctgtgcccaccatggaggggcctctgagaagaaaaaccctgctcaaggaagggcggaagcctgcgctgtcctcgtggaccaggtactgggtcatactctcaggatccaccctcctgtactacggagccaagtccttgcggggcacagacagaaaacactataaatccacacctggcaaaaaggtttccatcgtgggctggatggtgcagctgcccgatgaccccgagcacccagatatcttccagctgaacaaccctgacaaaggcaatgtttacaagtttcagactggttcccgatttcatgcaatactgtggcacaagcatttggatgatgcatgtaaaagcaacaggcctcaggtacctgcaaaccttatgtcatttgagtaagtctctgcaggacgtggcatgacttcagaggcttctgggaacccaggctgggcctggtggtgaagagcagtcctgggcacaggctgtgagccagggtgctgggaaactcacagctggactcaggggacacggcctgtggcctcaccatcccagagggcttcaccagtgtgggatccacctgtcagtccccagcgactctcatgacactcattctgcagcaccgcctcttggggcagtggtcagaccccacacgccctctctgggcccaccacctgcatctgcgactagagagcacccggcccacgttgggttctcagtgctttctactgcacagagtggacagcgctaactaacctgtgagaggggcccgagagaaggaacagctgtggaacaggctttttacaccccaagtgcatggggttgctcgcccacagggctgcctcagattttgtacaaccccgaagcgtcctctgcgtgtgcgtgctgtacgtgtgtgtgtgtgtgtgagcgagtgtgaactcttcaagaaacatgcattttggcacaagactcgtgacatcacacacttcattcgctttgaggccctgctttaaccttaagttatagccctgtccaccgaggaaggtcagggtgagagcctagattcctcctgtgtcaagggtccctcgcattcttttactgtaaacaaacaatgccttaaattgtgtcttgttttctgttcctatgggtgctattcatctggaaggcctgcttccaggcctctttgctgtcagcccttctgagacaggacctggcttcaggactgtggactgggctgctggcctgcttgcttcctcccttccccattcctagcagggcctgaggccctcctcttctcgcccttcccaccatgccagaatgggaagttgtgacgttgcagctccaaccgacgtgctcatagtgatcagctgtgcaggagccatgaggcaccaacctctccccgcagggcaaagcctgtgcccccatcatctcactcctttgcctgcactgccagggtggggcccaccaagattcctgatcatgacgggaagctgagtgaccctgaggccttaagcttccccagtcttggccccaaatgcagtcaccagcaagttttccattttccaagtccaagggcacaattgttgatgaccgtgtgacaatagagcgaagccccggggagtgaacggtccaacctctgcattcagttaggagctcttcacatgaatcacatccttatctgtcaccttgtgtcacattttaaagtgacttttattttgcacaaataatttttattcagaataataaatcactctttatcatagtatcttctcttccctcttcccctttagtttggatagcctaactctgagaagttaacccttaaacagttttctggaagagactgaatttctgggtccttgcagctgtgatggtttcagagctcagactgatcaggcatcaagctaccctcaagagtttctgggctggatgtttcagaacaacatctacaccagtaaagtgtaataggtcagtttcaaaacgaccaaaagacccaccactgtattttgaccaaataatgacaacttctttagaaatttgaatggcttggtgaggaaagtagttgtcaccagggcctcattttgtagttgagccttacaatgcttagtagttcatcttctttttgagcaaagactagaatactttcctcctaagagaaactcccaggtgataaaagttgatgccatcaaaccttgacaccgggtgctctgcacacccacgcggatgttgcacctcattctcccgatgactattcaaatcagcatctagaggctgaatgacaatgccaaacactccacctctgatcagaaccatgcagtgttaacactttaacctacattgaatctgattctacctgttaacttttaaaaagtcgtaagtttggatgaaagtgcaagatgtggaacatcaactacctattttccttgggtttttccactctgcaaactgtcctggtttttcacaccaatgaagtattatagatgccaatccaaaacctcagaatttcaggcaccacaaaaacaggtaattttctatcccttataagtttgtcttttctttcagaaacatctcttagcctaatttgaaatagcacaatcacaattcaaaatgtttagtcttctcactaattgagtctgcttccacgtcctctcccaggaacattcttagctcggactcttgaagaatctctttagattttgttggcaaaagccttatagaagcagtaagaggcttgaccacgccggaagagtcctggagctaaagctggaagacactcagctctctaagcaggggctcggccaaacatgggagttaagtgctgcttgtcttcccagtgttggtttgaaccctgtgagcctgagacagagagggccaggcaccaaccacaaggcgggaaagtccatgggtagaccctccccctggagggaagcatttctagtttttgctccttgactgtccagagtgtacaaatgttcataacgccattgaagggattatttcttgcatgcatatgctgaatttttttaagcaaatggatcatggcaccccaaaatgaaagttatagaaagctgtctacaactgtggagttggtagctggtaacattgttgtctcaagaacaactcacctctctccctaggactaatttttgtctctctcagttgaacatgttttgtcattcaagatcagtcaggtgcattctggcaactgacatacttgatggaggattgattcggtagagagcagtagaaatcttgttctaactgtgcctggtgagagactttggccccctccctccctataaggctgtggaacctgaggaagtagatacttgaagagattctgtttaggaagaaactcactctcttttgccagttgaatttatagagcattttttttcttaccaagatggccagtatcattttacccccacctcccaagccccaagaggtgtaccttttcagatgccattttacaggcggaaatgctccatgaaacaggaagccacttgcaagcaacatctgctctgttcctcaggtggggcccagagcccttccccgagactgctgatgtctgtaaccactggggagcactgccaaaaatacagctttctggtttgtgagcccataaatgacttaaatcagctttacatcatttttacatatcaagtggtttcatgttaaaaaacaaactcctagtcctttagaaataacagattctctgcacaaaaccacccattcattcatttattcattcacagcactagcaagtgctgcctatgctgagaacaagtcagatctgatccctgccctcatggacctgaccactcaacaaacagtccccaccacacctatctccttaggcaagactttgcctctctcctagtcctgagtataaatcctgtgcatagattcctctagaaaggcatcaaaaggctcaacagactgaatggcctcttggtctgcgaaaattcagttgcaatgaggatgaagtcactatcctagaggctgcttggcccagaagagccaggcacagagctgcagttgggcacgccaaggattccaaaggtggaatgagagagtagggtcaaactgtcacagtatctgctccataggtttctgtttttaatttcaatgttaaatacaactacaatatgagcgagaactgcattttcttgggtgttgagaacttgtaccatggacttcagaccgccttgcagccgtatgctgcacaagcgtgtacaccccctgggcagcctcaaaaccccgcttacagcagcaacacaggagatcatctgtccattttagaaccattaatctctttatccattgctgaacgactgtgactattcagtaacgaagtaatagtaattaattagtatggtataatctttaataaatttcgtgccaaaatgcatggttttccacttagcattcaaaatgttgcatagagagtagttttcaatttcttatgtactcttcgaagtaagttgaaaatcagtttctacattttaattcgtttcctgttaaatctgttgcactctcctgggctgtctttttctccagcagacccctgcatgcagttgtgtaaggactttctctaattcttgtgaatcgtctcacccgcagtaaccactgaacgtcaatcagccctccatggggttctttcgatttttggtgaagtattttgttacctcagtcttgtatcaagttgctgtatttttcagcttgttacattgataataattatttcactaattaaatactttaatgtacaaacatctttgtttactttgaaattaaatgtgttttccaatga

SEQ ID NO: 358937 - DNA, 1173 bp, Homo sapiens
cgccgctcaggccctggagcggacggttcctactgcggctgggcaccggctccgctcccgcgtctgcccgcgctccagctgcgcctggcccggccccggcccggctcggcgtggccccggcctccaagcgaaggcgccgctgccgctgggccgctcccagggccatgaggaagcggcggcagccactgcggcccgcgtcaaggtgaccggccgggactgcggcggcggggagagcggcggacttctccagacaggttatgttacctgcagaggctgccctgaagctccctgtggcctggagactatgtacaagaggaatggtctgatggctagcgtgttggtcacctctgccactccacagggcagcagcagctcggactctctggagggccagagctgcgactatgccagcaagagctatgatgccgttgtcttcgatgtcttgaaagtgaccccagaggagtttgctagccagattacattaatggatatacctgtgtttaaagctatccagccggaggaactagccagctgtggatggagtaagaaggagaaacacagtcttgcccctaacgttgtggcctttacccggaggtttaaccaggtcagtttttgggttgtacgagaaattctaacagcacagactttaaaaataagggcagaaatcctcagccattttgtgaaaatagccaagaaacttctagaactcaacaaccttcattctctcatgtctgtggtatcagcattacaaagtgctcccatcttcaggctgacaaaaacctgggctcttttaaatcgaaaagacaagactacctttgagaaattggactacctgatgtcgaaagaagataattacaagcggacacgggaatatatccgaagcctgaagatggttccaagtattccctatctaggaatccagctgctctgtgtttggcagtcgtgtgaagaggcccgtgtggcacgggattgagacctgccaacaaccatgtgagggagtttggaagaagattctgctaaaaaggcgagccttcagatgagactgcagccccagccaatagcttgactgaagtctcatcacagaccttaaaccagagacacccagctaagacatgcccaaattcccaatccacagaaactgcaagacaataaatgtttattgtaagatgctaa

SEQ ID NO: 358938 - DNA, 1369 bp, Homo sapiens
accgtgaggtgttgggtttgggggacgctggcagctgggttctcccggttcccttgggcaggtgcagggtcgggttcaaagcctccggaacgcgttttggcctgatttgaggaggggggcggggagggacctgcggcttgcggccccgcccccttctccggctcgcagccgaccggtaagcccgcctcctccctcggccggccctggggccgtgtccgccgggcaactccagccgaggcctgggcttctgcctgcaggtgtctgcggcgaggcccctagggtacagcccgatttggccccatggtgggtttcggggccaaccggcgggctggccgcctgccctctctcgtgctggtggtgctgctggtggtgatcgtcgtcctcgccttcaactactggagcatctcctcccgccacgtcctgcttcaggaggaggtggccgagctgcagggccaggtccagcgcaccgaagtggcccgcgggcggctggaaaagcgcaattcggacctcttgctgttggtggacacgcacaagaaacagatcgaccagaaggaggccgactacggccgcctcagcagccggctgcaggccagagagggcctcgggaagagatgcgaggatgacaaggttaaactacagaacaacatatcgtatcagatggcagacatacatcatttaaaggagcaacttgctgagcttcgtcaggaatttcttcgacaagaagaccagcttcaggactataggaagaacaatacttaccttgtgaagaggttagaatatgaaagcaagagacccaaaagattcaatcaaatgatggaaaggaattggatataaacaatcaagtagtacctaaaaatattccaaaagtagctgagaatgttgcagataagaatgaagaaccctcaagcaatcatattccacatgggaaagaacaaatcaaaagaggtggtgatgcagggatgcctggaatagaagagaatgacctagcaaaagttgatgatcttccccctggccctggttcccagacatcatctctgaacctgctgggggaatttgccaccctgaaaggaaggacacaagcccagctggcttcatcatctgctgattgtggagctctagggccttgagcaaacatatgtggtagccaggtagtggttacagcaggccttggtaagacccagtgctgtattggcttcaggtctaacccagcacagttctaatggtggtgccacagtggtacatgcctatagtcccagctactccagaagctgaggtgggaagatcacttgagcctgggagattgaggctgcagtgagctgagatcatgccattgcactccagcttgggcaccagagcaagaccttgtctc

SEQ ID NO: 358939 - DNA, 327 bp, Homo sapiens
aagcaagaggtaaagatgttcagttgatgtagcctattacttttagaaactgattgttacattccttcaaaacattttcaaattatgtaagaaaaacgatagaattctatctttttgttacttgggcagaacaaatcaaaagaggtggtgatgcagggatgcctggaatagaagagaatgacctagcaaaagttgatgatcttccccctgggtaagtaaaaattgttagagaattcgactaaagtgatgataatacatttcatgtgaccccattctctttttcggtaacacttggaatagtgctacagatatctggatgatcgatat

SEQ ID NO: 358940 - DNA, 3906 bp, Homo sapiens
accgtgaggtgttgggtttgggggacgctggcagctgggttctcccggttcccttgggcaggtgcagggtcgggttcaaagcctccggaacgcgttttggcctgatttgaggaggggggcggggagggacctgcggcttgcggccccgcccccttctccggctcgcagccgaccggtaagcccgcctcctccctcggccggccctggggccgtgtccgccgggcaactccagccgaggcctgggcttctgcctgcaggtgtctgcggcgaggcccctagggtacagcccgatttggccccatggtgggtttcggggccaaccggcgggctggccgcctgccctctctcgtgctggtggtgctgctggtggtgatcgtcgtcctcgccttcaactactggagcatctcctcccgccacgtcctgcttcaggaggaggtggccgagctgcagggccaggtccagcgcaccgaagtggcccgcgggcggctggaaaagcgcaattcggacctcttgctgttggtggacacgcacaagaaacagatcgaccagaaggaggccgactacggccgcctcagcagccggctgcaggccagagagggcctcgggaagagatgcgaggatgacaagagcaacttgctgagcttcgtcaggaatttcttcgacaagaagaccagcttcaggactataggaagaacaatacttaccttgtgaagaggttagaatatgaaagttttcagtgtggacagcagatgaaggaattgagagcacagcatgaagaaaatattaaaaagttagcagaccagtttttagaggaacaaaagcaagagacccaaaagattcaatcaaatgatggaaaggaattggatataaacaatcaagtagtacctaaaaatattccaaaagtagctgagaatgttgcagataagaatgaagaaccctcaagcaatcatattccacatgggaaagaacaaatcaaaagaggtggtgatgcagggatgcctggaatagaagagaatgacctagcaaaagttgatgatcttccccctgctttaaggaagcctcctatttcagtttctcaacatgaaagtcatcaagcaatctcccatcttccaactggacaacctctctccccaaatatgcctccagattcacacataaaccacaatggaaaccccggtacttcaaaacagaatccttccagtcctcttcagcgtttaattccaggctcaaacttggacagtgaacccagaattcaaacagatatactaaagcaggctaccaaggacagagtcagtgatttccataaattgaagcaaagccgattctttgatgaaaatgaatcccctgttgatccgcagcatggctctaaactggcggattataatggggatgatggtaacgtaggtgagtatgaggcagacaagcaggctgagctggcttacaatgaggaagaagatggtgatggtggagaggaagacgtccaagatgatgaagaacgagagcttcaaatggatcctgcagactatggaaagcaacatttcaatgatgtcctttaagtcctaaaggaatgcttcagaaaacctaaagtgctgtaaaatgaaatcattctactttgtcctttctgacttttgttgtaaagacgaattgtatcagttgtaaagatacattgagatagaattaaggaaaaactttaatgaaggaatgtacccatgtacatatgtgaactttttcatattgtattatcaaggtatagacttttttggttatgatacagttaagccaaaaacagctaatctttgcatctaaagcaaactaatgtatatttcacattttattgagccgacttatttccacaaatagataaacaggacaaaatagttgtacaggttatatgtggcatagcataaccacagtaagaacagaacagatattcagcagaaaactttttatactctaattctttttttttttttttttgagacagagttttagtcttgtttcccaggctggagtgcaatggcacaatcttggctcactgcaacctccgcctcctgggttcaggcaattttcctgcctcagcctcccaagtagctgggattacaggcacccaccaccatgcccagctaatttttgtatttttaatagagagctaataattgtatatttaataaagacgggtttcaccatgttggccaggctggtcttgaactcctgacctcaggtgatcctcctgcattggcctcccaaagtgctggaattccaggcatgagccactgcgcccagtctacacactaattcttgttagcccaacagctgttctgttctatctacccctcatttcacgctcaaggagtcatacctagaatagttacacacaagagggaaactggaagccaaacactgtacagtattgtgtagaaagtcacctccctactccttttattttacatgagtgctgatgtgttttggcagatgagctttcagctgaggcctgatggaaattgagataacctgcaaagacataacagtatttatgagttatatcttagttcttgaaattgtggaatgcatgattgacaatatatttttaatttttattttttcaagtaataccagtactgtttaactatagccagaactggctaaaatttttatattttcagagttgaagttggtgaagacattcatgatttaaacaccagatcctgaaaggggttaaatctactttgaaatgaatctgcaatcagtatttcaaagcttttctggtaattttagtgatcttatttgattagactttttcagaagtactaaataaggaattttaacaggtttttattaatgcacagataaatagaagtacagtgaggtctatagccattttattaaaatagcttaaaagtttgtaaaaaaatgaatctttgtaattacttaatatgttagttaagaacccgtcaagcttatatttgctagacttacaaattattttaaatgcatttatcttttttgacactattcagtggaatgtgtaagctagctaattcttgttttctgatttaaagcacttttaaatcttatcctgccccctaaaaacaaaaggttttgatcacaaggggaaatttaagattgttaaccctgtttttcagaagggctactgttaattgcacataaacatgaaatgtgttttcccctgtgtactaacacattctaggcaaaattcaaacttatagtggtaaagaaacaggttgttcacttgctgaggtgcaaaaattcttaagacttctgtttgaaattgctcaatgactaggaaaagatgtagtagtttactaaaattgtttttctaccatatcaaattaaacaattcatgcctttatagggtcaggcctacaatgaataggtatggtggtttcacagaattttaaaatagagttaaagggaagtgatgtacatttcgggggcattagggtagggagatgaatcaaaaaatacccctagtaatgctttatattttaatactgcaaaagctttacaaatggaaaccatgcaattacctgccttagttcttttgtcataaaaacaatcacttggttggttgtattgtagctattacttatacagcaacatttcttcaattagcagtctagacattttataaacagaaatcttggaccaattgataatatttctgactgtattaatattttagtgctataaaatactatgtgaatctcttaaaaatctgacattttacagtctgtattagacatactgtttttataatgttttacttctgccttaagatttaggttttttaaatgtatttttgccctgaattaagtgttaatttgatggaaactctgcttttaaaatcatcatttactgggttctaataaattaaaaattaacttg

SEQ ID NO: 358941 - DNA, 3069 bp, Homo sapiens
aagcaagaggtaaagatgttcagttgatgtagcctattacttttagaaactgattgttacattccttcaaaacattttcaaattatgtaagaaaaacgatagaattctatctttttgttacttgggcagaacaaatcaaaagaggtggtgatgcagggatgcctggaatagaagagaatgacctagcaaaagttgatgatcttccccctgctttaaggaagcctcctatttcagtttctcaacatgaaagtcatcaagcaatctcccatcttccaactggacaacctctctccccaaatatgcctccagattcacacataaaccacaatggaaaccccggtacttcaaaacagaatccttccagtcctcttcagcgtttaattccaggctcaaacttggacagtgaacccagaattcaaacagatatactaaagcaggctaccaaggacagagtcagtgatttccataaattgaagcaaagccgattctttgatgaaaatgaatcccctgttgatccgcagcatggctctaaactggcggattataatggggatgatggtaacgtaggtgagtatgaggcagacaagcaggctgagctggcttacaatgaggaagaagatggtgatggtggagaggaagacgtccaagatgatgaagaacgagagcttcaaatggatcctgcagactatggaaagcaacatttcaatgatgtcctttaagtcctaaaggaatgcttcagaaaacctaaagtgctgtaaaatgaaatcattctactttgtcctttctgacttttgttgtaaagacgaattgtatcagttgtaaagatacattgagatagaattaaggaaaaactttaatgaaggaatgtacccatgtacatatgtgaactttttcatattgtattatcaaggtatagacttttttggttatgatacagttaagccaaaaacagctaatctttgcatctaaagcaaactaatgtatatttcacattttattgagccgacttatttccacaaatagataaacaggacaaaatagttgtacaggttatatgtggcatagcataaccacagtaagaacagaacagatattcagcagaaaactttttatactctaattctttttttttttttttttgagacagagttttagtcttgtttcccaggctggagtgcaatggcacaatcttggctcactgcaacctccgcctcctgggttcaggcaattttcctgcctcagcctcccaagtagctgggattacaggcacccaccaccatgcccagctaatttttgtatttttaatagagagctaataattgtatatttaataaagacgggtttcaccatgttggccaggctggtcttgaactcctgacctcaggtgatcctcctgcattggcctcccaaagtgctggaattccaggcatgagccactgcgcccagtctacacactaattcttgttagcccaacagctgttctgttctatctacccctcatttcacgctcaaggagtcatacctagaatagttacacacaagagggaaactggaagccaaacactgtacagtattgtgtagaaagtcacctccctactccttttattttacatgagtgctgatgtgttttggcagatgagctttcagctgaggcctgatggaaattgagataacctgcaaagacataacagtatttatgagttatatcttagttcttgaaattgtggaatgcatgattgacaatatatttttaatttttattttttcaagtaataccagtactgtttaactatagccagaactggctaaaatttttatattttcagagttgaagttggtgaagacattcatgatttaaacaccagatcctgaaaggggttaaatctactttgaaatgaatctgcaatcagtatttcaaagcttttctggtaattttagtgatcttatttgattagactttttcagaagtactaaataaggaattttaacaggtttttattaatgcacagataaatagaagtacagtgaggtctatagccattttattaaaatagcttaaaagtttgtaaaaaaatgaatctttgtaattacttaatatgttagttaagaacccgtcaagcttatatttgctagacttacaaattattttaaatgcatttatcttttttgacactattcagtggaatgtgtaagctagctaattcttgttttctgatttaaagcacttttaaatcttatcctgccccctaaaaacaaaaggttttgatcacaaggggaaatttaagattgttaaccctgtttttcagaagggctactgttaattgcacataaacatgaaatgtgttttcccctgtgtactaacacattctaggcaaaattcaaacttatagtggtaaagaaacaggttgttcacttgctgaggtgcaaaaattcttaagacttctgtttgaaattgctcaatgactaggaaaagatgtagtagtttactaaaattgtttttctaccatatcaaattaaacaattcatgcctttatagggtcaggcctacaatgaataggtatggtggtttcacagaattttaaaatagagttaaagggaagtgatgtacatttcgggggcattagggtagggagatgaatcaaaaaatacccctagtaatgctttatattttaatactgcaaaagctttacaaatggaaaccatgcaattacctgccttagttcttttgtcataaaaacaatcacttggttggttgtattgtagctattacttatacagcaacatttcttcaattagcagtctagacattttataaacagaaatcttggaccaattgataatatttctgactgtattaatattttagtgctataaaatactatgtgaatctcttaaaaatctgacattttacagtctgtattagacatactgtttttataatgttttacttctgccttaagatttaggttttttaaatgtatttttgccctgaattaagtgttaatttgatggaaactctgcttttaaaatcatcatttactgggttctaataaattaaaaattaacttg

SEQ ID NO: 358942 - DNA, 4246 bp, Homo sapiens
accgtgaggtgttgggtttgggggacgctggcagctgggttctcccggttcccttgggcaggtgcagggtcgggttcaaagcctccggaacgcgttttggcctgatttgaggaggggggcggggagggacctgcggcttgcggccccgcccccttctccggctcgcagccgaccggtaagcccgcctcctccctcggccggccctggggccgtgtccgccgggcaactccagccgaggcctgggcttctgcctgcaggtgtctgcggcgaggcccctagggtacagcccgatttggccccatggtgggtttcggggccaaccggcgggctggccgcctgccctctctcgtgctggtggtgctgctggtggtgatcgtcgtcctcgccttcaactactggagcatctcctcccgccacgtcctgcttcaggaggaggtggccgagctgcagggccaggtccagcgcaccgaagtggcccgcgggcggctggaaaagcgcaattcggacctcttgctgttggtggacacgcacaagaaacagatcgaccagaaggaggccgactacggccgcctcagcagccggctgcaggccagagagggcctcgggaagagatgcgaggatgacaaggttaaactacagaacaacatatcgtatcagatggcagacatacatcatttaaaggagcaacttgctgagcttcgtcaggaatttcttcgacaagaagaccagcttcaggactataggaagaacaatacttaccttgtgaagaggttagaatatgaaagttttcagtgtggacagcagatgaaggaattgagagcacagcatgaagaaaatattaaaaagttagcagaccagtttttagaggaacaaaagcaagagacccaaaagattcaatcaaatgatggaaaggaattggatataaacaatcaagtagtacctaaaaatattccaaaagtagctgagaatgttgcagataagaatgaagaaccctcaagcaatcatattccacatgggaaagaacaaatcaaaagaggtggtgatgcagggatgcctggaatagaagagaatgacctagcaaaagttgatgatcttccccctgctttaaggaagcctcctatttcagtttctcaacatgaaagtcatcaagcaatctcccatcttccaactggacaacctctctccccaaatatgcctccagattcacacataaaccacaatggaaaccccggtacttcaaaacagaatccttccagtcctcttcagcgtttaattccaggctcaaacttggacagtgaacccagaattcaaacagatatactaaagcaggctaccaaggacagagtcagtgatttccataaattgaagcaaagccgattctttgatgaaaatgaatcccctgttgatccgcagcatggctctaaactggcggattataatggggatgatggtaacgtaggtgagtatgaggcagacaagcaggctgagctggcttacaatgaggaagaagatggtgatggtggagaggaagacgtccaagatgatgaagaacgagagcttcaaatggatcctgcagactatggaaagcaacatttcaatgatgtcctttaagtcctaaaggaatgcttcagaaaacctaaagtgctgtaaaatgaaatcattctactttgtcctttctgacttttgttgtaaagacgaattgtatcagttgtaaagatacattgagatagaattaaggaaaaactttaatgaaggaatgtacccatgtacatatgtgaactttttcatattgtattatcaaggtatagacttttttggttatgatacagttaagccaaaaacagctaatctttgcatctaaagcaaactaatgtatatttcacattttattgagccgacttatttccacaaatagataaacaggacaaaatagttgtacaggttatatgtggcatagcataaccacagtaagaacagaacagatattcagcagaaaactttttatactctaattctttttttttttttttttgagacagagttttagtcttgtttcccaggctggagtgcaatggcacaatcttggctcactgcaacctccgcctcctgggttcaggcaattttcctgcctcagcctcccaagtagctgggattacaggcacccaccaccatgcccagctaatttttgtatttttaatagagagctaataattgtatatttaataaagacgggtttcaccatgttggccaggctggtcttgaactcctgacctcaggtgatcctcctgcattggcctcccaaagtgctggaattccaggcatgagccactgcgcccagtctacacactaattcttgttagcccaacagctgttctgttctatctacccctcatttcacgctcaaggagtcatacctagaatagttacacacaagagggaaactggaagccaaacactgtacagtattgtgtagaaagtcacctccctactccttttattttacatgagtgctgatgtgttttggcagatgagctttcagctgaggcctgatggaaattgagataacctgcaaagacataacagtatttatgagttatatcttagttcttgaaattgtggaatgcatgattgacaatatatttttaatttttattttttcaagtaataccagtactgtttaactatagccagaactggctaaaatttttatattttcagagttgaagttggtgaagacattcatgatttaaacaccagatcctgaaaggggttaaatctactttgaaatgaatctgcaatcagtatttcaaagcttttctggtaattttagtgatcttatttgattagactttttcagaagtactaaataaggaattttaacaggtttttattaatgcacagataaatagaagtacagtgaggtctatagccattttattaaaatagcttaaaagtttgtaaaaaaatgaatctttgtaattacttaatatgttagttaagaacccgtcaagcttatatttgctagacttacaaattattttaaatgcatttatcttttttgacactattcagtggaatgtgtaagctagctaattcttgttttctgatttaaagcacttttaaatcttatcctgccccctaaaaacaaaaggttttgatcacaaggggaaatttaagattgttaaccctgtttttcagaagggctactgttaattgcacataaacatgaaatgtgttttcccctgtgtactaacacattctaggcaaaattcaaacttatagtggtaaagaaacaggttgttcacttgctgaggtgcaaaaattcttaagacttctgtttgaaattgctcaatgactaggaaaagatgtagtagtttactaaaattgtttttctaccatatcaaattaaacaattcatgcctttatagggtcaggcctacaatgaataggtatggtggtttcacagaattttaaaatagagttaaagggaagtgatgtacatttcgggggcattagggtagggagatgaatcaaaaaatacccctagtaatgctttatattttaatactgcaaaagctttacaaatggaaaccatgcaattacctgccttagttcttttgtcataaaaacaatcacttggttggttgtattgtagctattacttatacagcaacatttcttcaattagcagtctagacattttataaacagaaatcttggaccaattgataatatttctgactgtattaatattttagtgctataaaatactatgtgaatctcttaaaaatctgacattttacagtctgtattagacatactgtttttataatgttttacttctgccttaagatttaggttttttaaatgtatttttgccctgaattaagtgttaatttgatggaaactctgcttttaaaatcatcatttactgggttctaataaattaaaaattaacttgaaaaaaaaaggagagaaagaagagaaagcagagaaaaaagagagagaaggggaaaaaaaagaagaaaaaaagtgggcgcggaggctaccacacaaaagaagagtgcaaagcaccaagcgaggagagaggggcgccaaggaggcaacaaagggcgacaagagatacaagaaagcgacggaacacacagcgggaggcaaccacaaaaaaagcggcggaacacaggggcgaaacaaccacggcggacgaaggacacagaggaaccacgaggggccgagggagagacgg

SEQ ID NO: 358943 - DNA, 4049 bp, Homo sapiens
  misc_feature (4039)..(4039): n is a, c, g, or t
accgtgaggtgttgggtttgggggacgctggcagctgggttctcccggttcccttgggcaggtgcagggtcgggttcaaagcctccggaacgcgttttggcctgatttgaggaggggggcggggagggacctgcggcttgcggccccgcccccttctccggctcgcagccgaccggtaagcccgcctcctccctcggccggccctggggccgtgtccgccgggcaactccagccgaggcctgggcttctgcctgcaggtgtctgcggcgaggcccctagggtacagcccgatttggccccatggtgggtttcggggccaaccggcgggctggccgcctgccctctctcgtgctggtggtgctgctggtggtgatcgtcgtcctcgccttcaactactggagcatctcctcccgccacgtcctgcttcaggaggaggtggccgagctgcagggccaggtccagcgcaccgaagtggcccgcgggcggctggaaaagcgcaattcggacctcttgctgttggtggacacgcacaagaaacagatcgaccagaaggaggccgactacggccgcctcagcagccggctgcaggccagagagggcctcgggaagagatgcgaggatgacaaggttaaactacagaacaacatatcgtatcagatggcagacatacatcatttaaaggagcaacttgctgagcttcgtcaggaatttcttcgacaagaagaccagcttcaggactataggaagaacaatacttaccttgtgaagaggttagaatatgaaagttttcagtgtggacagcagatgaaggaattgagagcacagcatgaagaaaatattaaaaagttagcagaccagtttttagaggaacaaaagcaagagacccaaaagattcaatcaaatgatggaaaggaattggatataaacaatcaagtagtacctaaaaatattccaaaagtagctgagaatgttgcagataagaatgaagaaccctcaagcaatcatattccacatgggaaagaacaaatcaaaagaggtggtgatgcagggatgcctggaatagaagagaatgacctagcaaaagttgatgatcttccccctgctttaaggaagcctcctatttcagtttctcaacatgaaagtcatcaagcaatctcccatcttccaactggacaacctctctccccaaatatgcctccagattcacacataaaccacaatggaaaccccggtacttcaaaacagaatccttccagtcctcttcagcgtttaattccaggctcaaacttggacagtgaacccagaattcaaacagatatactaaagcaggctaccaaggacagagtcagtgatttccataaattgaagcaaagccgattctttgatgaaaatgaatcccctgttgatccgcagcatggctctaaactggcggattataatggggatgatggtaacgtaggtgagtatgaggcagacaagcaggctgagctggcttacaatgaggaagaagatggtgatggtggagaggaagacgtccaagatgatgaagaacgagagcttcaaatggatcctgcagactatggaaagcaacatttcaatgatgtcctttaagtcctaaaggaatgcttcagaaaacctaaagtgctgtaaaatgaaatcattctactttgtcctttctgacttttgttgtaaagacgaattgtatcagttgtaaagatacattgagatagaattaaggaaaaactttaatgaaggaatgtacccatgtacatatgtgaactttttcatattgtattatcaaggtatagacttttttggttatgatacagttaagccaaaaacagctaatctttgcatctaaagcaaactaatgtatatttcacattttattgagccgacttatttccacaaatagataaacaggacaaaatagttgtacaggttatatgtggcatagcataaccacagtaagaacagaacagatattcagcagaaaactttttatactctaattctttttttttttttttttgagacagagttttagtcttgtttcccaggctggagtgcaatggcacaatcttggctcactgcaacctccgcctcctgggttcaggcaattttcctgcctcagcctcccaagtagctgggattacaggcacccaccaccatgcccagctaatttttgtatttttaatagagagctaataattgtatatttaataaagacgggtttcaccatgttggccaggctggtcttgaactcctgacctcaggtgatcctcctgcattggcctcccaaagtgctggaattccaggcatgagccactgcgcccagtctacacactaattcttgttagcccaacagctgttctgttctatctacccctcatttcacgctcaaggagtcatacctagaatagttacacacaagagggaaactggaagccaaacactgtacagtattgtgtagaaagtcacctccctactccttttattttacatgagtgctgatgtgttttggcagatgagctttcagctgaggcctgatggaaattgagataacctgcaaagacataacagtatttatgagttatatcttagttcttgaaattgtggaatgcatgattgacaatatatttttaatttttattttttcaagtaataccagtactgtttaactatagccagaactggctaaaatttttatattttcagagttgaagttggtgaagacattcatgatttaaacaccagatcctgaaaggggttaaatctactttgaaatgaatctgcaatcagtatttcaaagcttttctggtaattttagtgatcttatttgattagactttttcagaagtactaaataaggaattttaacaggtttttattaatgcacagataaatagaagtacagtgaggtctatagccattttattaaaatagcttaaaagtttgtaaaaaaatgaatctttgtaattacttaatatgttagttaagaacccgtcaagcttatatttgctagacttacaaattattttaaatgcatttatcttttttgacactattcagtggaatgtgtaagctagctaattcttgttttctgatttaaagcacttttaaatcttatcctgccccctaaaaacaaaaggttttgatcacaaggggaaatttaagattgttaaccctgtttttcagaagggctactgttaattgcacataaacatgaaatgtgttttcccctgtgtactaacacattctaggcaaaattcaaacttatagtggtaaagaaacaggttgttcacttgctgaggtgcaaaaattcttaagacttctgtttgaaattgctcaatgactaggaaaagatgtagtagtttactaaaattgtttttctaccatatcaaattaaacaattcatgcctttatagggtcaggcctacaatgaataggtatggtggtttcacagaattttaaaatagagttaaagggaagtgatgtacatttcgggggcattagggtagggagatgaatcaaaaaatacccctagtaatgctttatattttaatactgcaaaagctttacaaatggaaaccatgcaattacctgccttagttcttttgtcataaaaacaatcacttggttggttgtattgtagctattacttatacagcaacatttcttcaattagcagtctagacattttataaacagaaatcttggaccaattgataatatttctgactgtattaatattttagtgctataaaatactatgtgaatctcttaaaaatctgacattttacagtctgtattagacatactgtttttataatgttttacttctgccttaagatttaggttttttaaatgtatttttgccctgaattaagtgttaatttgatggaaactctgcttttaaaatcatcatttactgggttctaataaattaaaaattaacttgaaaaccaaagaaaaaaaaaactcggctcgaaagaattcatacagcccggggaatccactaggtctagatcgccaaacnccgcggagag

SEQ ID NO: 358944 - DNA, 2792 bp, Homo sapiens
accgtgaggtgttgggtttgggggacgctggcagctgggttctcccggttcccttgggcaggtgcagggtcgggttcaaagcctccggaacgcgttttggcctgatttgaggaggggggcggggagggacctgcggcttgcggccccgcccccttctccggctcgcagccgaccggtaagcccgcctcctccctcggccggccctggggccgtgtccgccgggcaactccagccgaggcctgggcttctgcctgcaggtgtctgcggcgaggcccctagggtacagcccgatttggccccatggtgggtttcggggccaaccggcgggctggccgcctgccctctctcgtgctggtggtgctgctggtggtgatcgtcgtcctcgccttcaactactggagcatctcctcccgccacgtcctgcttcaggaggaggtggccgagctgcagggccaggtccagcgcaccgaagtggcccgcgggcggctggaaaagcgcaattcggacctcttgctgttggtggacacgcacaagaaacagatcgaccagaaggaggccgactacggccgcctcagcagccggctgcaggccagagagggcctcgggaagagatgcgaggatgacaaggttaaactacagaacaacatatcgtatcagatggcagacatacatcatttaaaggagcaacttgctgagcttcgtcaggaatttcttcgacaagaagaccagcttcaggactataggaagaacaatacttaccttgtgaagaggttagaatatgaaagttttcagtgtggacagcagatgaaggaattgagagcacagcatgaagaaaatattaaaaagttagcagaccagtttttagaggaacaaaagcaagagacccaaaagattcaatcaaatgatggaaaggaattggatataaacaatcaagtagtacctaaaaatattccaaaagtagctgagaatgttgcagataagaatgaagaaccctcaagcaatcatattccacatgggaaagaacaaatcaaaagaggtggtgatgcagggatgcctggaatagaagagaatgacctagcaaaagttgatgatcttccccctgctttaaggaagcctcctatttcagtttctcaacatgaaagtcatcaagcaatctcccatcttccaactggacaacctctctccccaaatatgcctccagattcacacataaaccacaatggaaaccccggtacttcaaaacagaatccttccagtcctcttcagcgtttaattccaggctcaaacttggacagtgaacccagaattcaaacagatatactaaagcaggctaccaaggacagagtcagtgatttccataaattgaagcaaagccgattctttgatgaaaatgaatcccctgttgatccgcagcatggctctaaactggcggattataatggggatgatggtaacgtaggtgagtatgaggcagacaagcaggctgagctggcttacaatgaggaagaagatggtgatggtggagaggaagacgtccaagatgatgaagaacgagagcttcaaatggatcctgcagactatggaaagcaacatttcaatgatgtcctttaagtcctaaaggaatgcttcagaaaacctaaagtgctgtaaaatgaaatcattctactttgtcctttctgacttttgttgtaaagacgaattgtatcagttgtaaagatacattgagatagaattaaggaaaaactttaatgaaggaatgtacccatgtacatatgtgaactttttcatattgtattatcaaggtatagacttttttggttatgatacagttaagccaaaaacagctaatctttgcatctaaagcaaactaatgtatatttcacattttattgagccgacttatttccacaaatagataaacaggacaaaatagttgtacaggttatatgtggcatagcataaccacagtaagaacagaacagatattcagcagaaaactttttatactctaattctttttttttttttttttgagacagagttttagtcttgtttcccaggctggagtgcaatggcacaatcttggctcactgcaacctccgcctcctgggttcaggcaattttcctgcctcagcctcccaagtagctgggattacaggcacccaccaccatgcccagctaatttttgtatttttaatagagagctaataattgtatatttaataaagacgggtttcaccatgttggccaggctggtcttgaactcctgacctcaggtgatcctcctgcattggcctcccaaagtgctggaattccaggcatgagccactgcgcccagtctacacactaattcttgttagcccaacagctgttctgttctatctacccctcatttcacgctcaaggagtcatacctagaatagttacacacaagagggaaactggaagccaaacactgtacagtattgtgtagaaagtcacctccctactctgtatgggggatctccgagatcccccatacagagtagcaaatgaagaagccagtgtgtgaccctccagcatctccgcaagggctgcttcaggatgaagccgctgaagaaagaaagaaagaaaggtgtgtgggaaaaagagcagggacctcgggaaagctcctccattctaactgtctgaagaggatactttcattttgaacatggccgagtacctcatggtatttcttgtatgaatggcctttaactcataatgtcgattattatcctgttgttttaacactctgatggggtctcgcggga

SEQ ID NO: 358945 - DNA, 1376 bp, Homo sapiens
accgtgaggtgttgggtttgggggacgctggcagctgggttctcccggttcccttgggcaggtgcagggtcgggttcaaagcctccggaacgcgttttggcctgatttgaggaggggggcggggagggacctgcggcttgcggccccgcccccttctccggctcgcagccgaccggtaagcccgcctcctccctcggccggccctggggccgtgtccgccgggcaactccagccgaggcctgggcttctgcctgcaggtgtctgcggcgaggcccctagggtacagcccgatttggccccatggtgggtttcggggccaaccggcgggctggccgcctgccctctctcgtgctggtggtgctgctggtggtgatcgtcgtcctcgccttcaactactggagcatctcctcccgccacgtcctgcttcaggaggaggtggccgagctgcagggccaggtccagcgcaccgaagtggcccgcgggcggctggaaaagcgcaattcggacctcttgctgttggtggacacgcacaagaaacagatcgaccagaaggaggccgactacggccgcctcagcagccggctgcaggccagagagggcctcgggaagagatgcgaggatgacaaggttaaactacagaacaacatatcgtatcagatggcagacatacatcatttaaaggagcaacttgctgagcttcgtcaggaatttcttcgacaagaagaccagcttcaggactataggaagaacaatacttaccttgtgaagaggttagaatatgaaagttttcagtgtggacagcagatgaaggaattgagagcacagcatgaagaaaatattaaaaagttagcagaccagtttttagaggaacaaaagcaagagacccaaaagattcaatcaaatgatggaaaggaattggatataaacaatcaagtagtacctaaaaatattccaaaagtagctgagaatgttgcagataagaatgaagaaccctcaagcaatcatattccacatgggaaagaacaaatcaaaagaggtggtgatgcagggatgcctggaatagaagagaatgacctagcaaaagttgatgatcttccccctgcatccaggaaaagcttttaggttttgtgtgtgtgtgtgtgtgtgtgtgacagagtctcgctctgttgtccaggctgaagtatagtagcgtgatcttggctcactgcaacctgcgcctcctgggttcaagcaattcttctgtctcagcctcccaagtagctgagattacaggcgcctgccaccatgcctggctaattttttgtatttttagtagagatggggtttcaccatgttggccaggctggtcttgaactcctgacctcaggtgatccacc

SEQ ID NO: 358946 - DNA, 553 bp, Homo sapiens
cccatatctactaaaaatacaaaaattagccggatgtggtgttgcacacctgtagtctcagctgtctgggaggttgaggtgagagaatcacttgagctcaggaggtgcaggttgcagtgagccaagattgcaccactgcactctaacctgagtgacagagcaagaccctatctcaaataaataaatgaataaattttattgaccatgaatgtgttacaaaaggatattaaatgtggtgtttgttatataatttaatttcctgggagtattactaaagaaattgagaattatgtataattaaaaaaacatcccatagcttctgaataggaagcattacaatgagtgaacttgattcctttggttcttaccttgggtggatagagcaacttgctgagcttcgtcaggaatttcttcgacaagaagaccagcttcaggactataggaagaacaatacttaccttgtgaagaggttagaatatgaaaggtaagatgttacatgcaacatatgtttatgaatctaaaatatttgtccagcttttggactcagttcatt

SEQ ID NO: 358947 - DNA, 3961 bp, Homo sapiens
accgtgaggtgttgggtttgggggacgctggcagctgggttctcccggttcccttgggcaggtgcagggtcgggttcaaagcctccggaacgcgttttggcctgatttgaggaggggggcggggagggacctgcggcttgcggccccgcccccttctccggctcgcagccgaccggtaagcccgcctcctccctcggccggccctggggccgtgtccgccgggcaactccagccgaggcctgggcttctgcctgcaggtgtctgcggcgaggcccctagggtacagcccgatttggccccatggtgggtttcggggccaaccggcgggctggccgcctgccctctctcgtgctggtggtgctgctggtggtgatcgtcgtcctcgccttcaactactggagcatctcctcccgccacgtcctgcttcaggaggaggtggccgagctgcagggccaggtccagcgcaccgaagtggcccgcgggcggctggaaaagcgcaattcggacctcttgctgttggtggacacgcacaagaaacagatcgaccagaaggaggccgactacggccgcctcagcagccggctgcaggccagagagggcctcgggaagagatgcgaggatgacaaggttaaactacagaacaacatatcgtatcagatggcagacatacatcatttaaaggagcaacttgctgagcttcgtcaggaatttcttcgacaagaagaccagcttcaggactataggaagaacaatacttaccttgtgaagaggttagaatatgaaagttttcagtgtggacagcagatgaaggaattgagagcacagcatgaagaaaatattaaaaagttagcagaccagtttttagaggaacaaaagcaagagacccaaaagattcaatcaaatgatggaaaggaattggatataaacaatcaagtagtacctaaaaatattccaaaagtagctgagaatgttgcagataagaatgaagaaccctcaagcaatcatattccacatgggaaagaacaaatcaaaagaggtggtgatgcagggatgcctggaatagaagagaatgacctagcaaaagttgatgatcttccccctgctttaaggaagcctcctatttcagtttctcaacatgaaagtcatcaagcaatctcccatcttccaactggacaacctctctccccaaatatgcctccagattcacacataaaccacaatggaaaccccggtacttcaaaacagaatccttccagtcctcttcagcgtttaattccaggctcaaacttggacagtgaacccagaattcaaacagatatactaaagcaggctaccaaggacagagtcagtgatttccataaattgaagcaaagccgattctttgatgaaaatgaatcccctgttgatccgcagcatggctctaaactggcggattataatggggatgatggtaacgtaggtgagtatgaggcagacaagcaggctgagctggcttacaatgaggaagaagatggtgatggtggagaggaagacgtccaagatgatgaagaacgagagcttcaaatggatcctgcagactatggaaagcaacatttcaatgatgtcctttaagtcctaaaggaatgcttcagaaaacctaaagtgctgtaaaatgaaatcattctactttgtcctttctgacttttgttgtaaagacgaattgtatcagttgtaaagatacattgagatagaattaaggaaaaactttaatgaaggaatgtacccatgtacatatgtgaactttttcatattgtattatcaaggtatagacttttttggttatgatacagttaagccaaaaacagctaatctttgcatctaaagcaaactaatgtatatttcacattttattgagccgacttatttccacaaatagataaacaggacaaaatagttgtacaggttatatgtggcatagcataaccacagtaagaacagaacagatattcagcagaaaactttttatactctaattctttttttttttttttttgagacagagttttagtcttgtttcccaggctggagtgcaatggcacaatcttggctcactgcaacctccgcctcctgggttcaggcaattttcctgcctcagcctcccaagtagctgggattacaggcacccaccaccatgcccagctaatttttgtatttttaatagagagctaataattgtatatttaataaagacgggtttcaccatgttggccaggctggtcttgaactcctgacctcaggtgatcctcctgcattggcctcccaaagtgctggaattccaggcatgagccactgcgcccagtctacacactaattcttgttagcccaacagctgttctgttctatctacccctcatttcacgctcaaggagtcatacctagaatagttacacacaagagggaaactggaagccaaacactgtacagtattgtgtagaaagtcacctccctactccttttattttacatgagtgctgatgtgttttggcagatgagctttcagctgaggcctgatggaaattgagataacctgcaaagacataacagtatttatgagttatatcttagttcttgaaattgtggaatgcatgattgacaatatatttttaatttttattttttcaagtaataccagtactgtttaactatagccagaactggctaaaatttttatattttcagagttgaagttggtgaagacattcatgatttaaacaccagatcctgaaaggggttaaatctactttgaaatgaatctgcaatcagtatttcaaagcttttctggtaattttagtgatcttatttgattagactttttcagaagtactaaataaggaattttaacaggtttttattaatgcacagataaatagaagtacagtgaggtctatagccattttattaaaatagcttaaaagtttgtaaaaaaatgaatctttgtaattacttaatatgttagttaagaacccgtcaagcttatatttgctagacttacaaattattttaaatgcatttatcttttttgacactattcagtggaatgtgtaagctagctaattcttgttttctgatttaaagcacttttaaatcttatcctgccccctaaaaacaaaaggttttgatcacaaggggaaatttaagattgttaaccctgtttttcagaagggctactgttaattgcacataaacatgaaatgtgttttcccctgtgtactaacacattctaggcaaaattcaaacttatagtggtaaagaaacaggttgttcacttgctgaggtgcaaaaattcttaagacttctgtttgaaattgctcaatgactaggaaaagatgtagtagtttactaaaattgtttttctaccatatcaaattaaacaattcatgcctttatagggtcaggcctacaatgaataggtatggtggtttcacagaattttaaaatagagttaaagggaagtgatgtacatttcgggggcattagggtagggagatgaatcaaaaaatacccctagtaatgctttatattttaatactgcaaaagctttacaaatggaaaccatgcaattacctgccttagttcttttgtcataaaaacaatcacttggttggttgtattgtagctattacttatacagcaacatttcttcaattagcagtctagacattttataaacagaaatcttggaccaattgataatatttctgactgtattaatattttagtgctataaaatactatgtgaatctcttaaaaatctgacattttacagtctgtattagacatactgtttttataatgttttacttctgccttaagatttaggttttttaaatgtatttttgccctgaattaagtgttaatttgatggaaactctgcttttaaaatcatcatttactgggttctaataaattaaaaattaacttg

SEQ ID NO: 358948 - DNA, 3793 bp, Homo sapiens
accgtgaggtgttgggtttgggggacgctggcagctgggttctcccggttcccttgggcaggtgcagggtcgggttcaaagcctccggaacgcgttttggcctgatttgaggaggggggcggggagggacctgcggcttgcggccccgcccccttctccggctcgcagccgaccggtaagcccgcctcctccctcggccggccctggggccgtgtccgccgggcaactccagccgaggcctgggcttctgcctgcaggtgtctgcggcgaggcccctagggtacagcccgatttggccccatggtgggtttcggggccaaccggcgggctggccgcctgccctctctcgtgctggtggtgctgctggtggtgatcgtcgtcctcgccttcaactactggagcatctcctcccgccacgtcctgcttcaggaggaggtggccgagctgcagggccaggtccagcgcaccgaagtggcccgcgggcggctggaaaagcgcaattcggacctcttgctgttggtggacacgcacaagaaacagatcgaccagaaggaggccgactacggccgcctcagcagccggctgcaggccagagagggcctcgggaagagatgcgaggatgacaaggttaaactacagaacaacatatcgtatcagatggcagacatacatcatttaaaggagcaacttgctgagcttcgtcaggaatttcttcgacaagaagaccagcttcaggactataggaagaacaatacttaccttgtgaagaggttagaatatgaaagttttcagtgtggacagcagatgaaggaattgagagcacagcatgaagaaaatattaaaaagttagcagaccagtttttagaggaacaaaagcaagagacccaaaagattcaatcaaatgatggaaaggaattggatataaacaatcaagtagtacctaaaaatattccaaaagtagctgagaatgttgcagataagaatgaagaaccctcaagcaatcatattccacatgggaaagaacaaatcaaaagaggtggtgatgcagggatgcctggaatagaagagaatgacctagcaaaagttgatgatcttccccctgctttaaggaagcctcctatttcagtttctcaacatgaaagtcatcaagcaatctcccatcttccaactggacaacctctctccccaaatatgcctccagattcacacataaaccacaatggaaaccccggtacttcaaaacagaatccttccagtcctcttcagcgtttaattccaggctcaaacttggacagtgaacccagaattcaaacagatatactaaagcaggctaccaaggacagagtcagtgatttccataaattgaagcaaaatgatgaagaacgagagcttcaaatggatcctgcagactatggaaagcaacatttcaatgatgtcctttaagtcctaaaggaatgcttcagaaaacctaaagtgctgtaaaatgaaatcattctactttgtcctttctgacttttgttgtaaagacgaattgtatcagttgtaaagatacattgagatagaattaaggaaaaactttaatgaaggaatgtacccatgtacatatgtgaactttttcatattgtattatcaaggtatagacttttttggttatgatacagttaagccaaaaacagctaatctttgcatctaaagcaaactaatgtatatttcacattttattgagccgacttatttccacaaatagataaacaggacaaaatagttgtacaggttatatgtggcatagcataaccacagtaagaacagaacagatattcagcagaaaactttttatactctaattctttttttttttttttttgagacagagttttagtcttgtttcccaggctggagtgcaatggcacaatcttggctcactgcaacctccgcctcctgggttcaggcaattttcctgcctcagcctcccaagtagctgggattacaggcacccaccaccatgcccagctaatttttgtatttttaatagagagctaataattgtatatttaataaagacgggtttcaccatgttggccaggctggtcttgaactcctgacctcaggtgatcctcctgcattggcctcccaaagtgctggaattccaggcatgagccactgcgcccagtctacacactaattcttgttagcccaacagctgttctgttctatctacccctcatttcacgctcaaggagtcatacctagaatagttacacacaagagggaaactggaagccaaacactgtacagtattgtgtagaaagtcacctccctactccttttattttacatgagtgctgatgtgttttggcagatgagctttcagctgaggcctgatggaaattgagataacctgcaaagacataacagtatttatgagttatatcttagttcttgaaattgtggaatgcatgattgacaatatatttttaatttttattttttcaagtaataccagtactgtttaactatagccagaactggctaaaatttttatattttcagagttgaagttggtgaagacattcatgatttaaacaccagatcctgaaaggggttaaatctactttgaaatgaatctgcaatcagtatttcaaagcttttctggtaattttagtgatcttatttgattagactttttcagaagtactaaataaggaattttaacaggtttttattaatgcacagataaatagaagtacagtgaggtctatagccattttattaaaatagcttaaaagtttgtaaaaaaatgaatctttgtaattacttaatatgttagttaagaacccgtcaagcttatatttgctagacttacaaattattttaaatgcatttatcttttttgacactattcagtggaatgtgtaagctagctaattcttgttttctgatttaaagcacttttaaatcttatcctgccccctaaaaacaaaaggttttgatcacaaggggaaatttaagattgttaaccctgtttttcagaagggctactgttaattgcacataaacatgaaatgtgttttcccctgtgtactaacacattctaggcaaaattcaaacttatagtggtaaagaaacaggttgttcacttgctgaggtgcaaaaattcttaagacttctgtttgaaattgctcaatgactaggaaaagatgtagtagtttactaaaattgtttttctaccatatcaaattaaacaattcatgcctttatagggtcaggcctacaatgaataggtatggtggtttcacagaattttaaaatagagttaaagggaagtgatgtacatttcgggggcattagggtagggagatgaatcaaaaaatacccctagtaatgctttatattttaatactgcaaaagctttacaaatggaaaccatgcaattacctgccttagttcttttgtcataaaaacaatcacttggttggttgtattgtagctattacttatacagcaacatttcttcaattagcagtctagacattttataaacagaaatcttggaccaattgataatatttctgactgtattaatattttagtgctataaaatactatgtgaatctcttaaaaatctgacattttacagtctgtattagacatactgtttttataatgttttacttctgccttaagatttaggttttttaaatgtatttttgccctgaattaagtgttaatttgatggaaactctgcttttaaaatcatcatttactgggttctaataaattaaaaattaacttg

SEQ ID NO: 358949 - DNA, 3907 bp, Homo sapiens
accgtgaggtgttgggtttgggggacgctggcagctgggttctcccggttcccttgggcaggtgcagggtcgggttcaaagcctccggaacgcgttttggcctgatttgaggaggggggcggggagggacctgcggcttgcggccccgcccccttctccggctcgcagccgaccggtaagcccgcctcctccctcggccggccctggggccgtgtccgccgggcaactccagccgaggcctgggcttctgcctgcaggtgtctgcggcgaggcccctagggtacagcccgatttggccccatggtgggtttcggggccaaccggcgggctggccgcctgccctctctcgtgctggtggtgctgctggtggtgatcgtcgtcctcgccttcaactactggagcatctcctcccgccacgtcctgcttcaggaggaggtggccgagctgcagggccaggtccagcgcaccgaagtggcccgcgggcggctggaaaagcgcaattcggacctcttgctgttggtggacacgcacaagaaacagatcgaccagaaggaggccgactacggccgcctcagcagccggctgcaggccagagagggcctcgggaagagatgcgaggatgacaaggttaaactacagaacaacatatcgtatcagatggcagacatacatcatttaaaggagcaacttgctgagcttcgtcaggaatttcttcgacaagaagaccagcttcaggactataggaagaacaatacttaccttgtgaagaggttagaatatgaaagttttcagtgtggacagcagatgaaggaattgagagcacagcatgaagaaaatattaaaaagttagcagaccagtttttagaggaacaaaagcaagagacccaaaagattcaatcaaatgatggaaaggaattggatataaacaatcaagtagtacctaaaaatattccaaaagtagctgagaatgttgcagataagaatgaagaaccctcaagcaatcatattccacatgggaaagaacaaatcaaaagaggtggtgatgcagggatgcctggaatagaagagaatgacctagcaaaagttgatgatcttccccctgctttaaggaagcctcctatttcagtttctcaacatgaaagtcatcaagcaatctcccatcttccaactggacaacctctctccccaaatatgcctccagattcacacataaaccacaatggaaaccccggtacttcaaaacagaatccttccagtcctcttcagcgtttaattccaggctcaaacttggacagtgaacccagaattcaaacagatatactaaagcaggctaccaaggacagagtcagtgatttccataaattgaagcaaagccgattctttgatgaaaatgaatcccctgttgatccgcagcatggctctaaactggcggattataatggggatgatggtaacgtaggtgagtatgaggcagacaagcaggctgagctggcttacaatgaggaagaagatggtgatggtggagaggaagacgtccaagatgatgaagaacgagagcttcaaatggatcctgcagactatggaaagcaacatttcaatgatgtcctttaagtcctaaaggaatgcttcagaaaacctaaagtgctgtaaaatgaaatcattctactttgtcctttctgacttttgttgtaaagacgaattgtatcagttgtaaagatacattgagatagaattaaggaaaaactttaatgaaggaatgtacccatgtacatatgtgaactttttcatattgtattatcaaggtatagacttttttggttatgatacagttaagccaaaaacagctaatctttgcatctaaagcaaactaatgtatatttcacattttattgagccgacttatttccacaaatagataaacaggacaaaatagttgtacaggttatatgtggcatagcataaccacagtaagaacagaacagatattcagcagtcttgtttcccaggctggagtgcaatggcacaatcttggctcactgcaacctccgcctcctgggttcaggcaattttcctgcctcagcctcccaagtagctgggattacaggcacccaccaccatgcccagctaatttttgtatttttaatagagagctaataattgtatatttaataaagacgggtttcaccatgttggccaggctggtcttgaactcctgacctcaggtgatcctcctgcattggcctcccaaagtgctggaattccaggcatgagccactgcgcccagtctacacactaattcttgttagcccaacagctgttctgttctatctacccctcatttcacgctcaaggagtcatacctagaatagttacacacaagagggaaactggaagccaaacactgtacagtattgtgtagaaagtcacctccctactccttttattttacatgagtgctgatgtgttttggcagatgagctttcagctgaggcctgatggaaattgagataacctgcaaagacataacagtatttatgagttatatcttagttcttgaaattgtggaatgcatgattgacaatatatttttaatttttattttttcaagtaataccagtactgtttaactatagccagaactggctaaaatttttatattttcagagttgaagttggtgaagacattcatgatttaaacaccagatcctgaaaggggttaaatctactttgaaatgaatctgcaatcagtatttcaaagcttttctggtaattttagtgatcttatttgattagactttttcagaagtactaaataaggaattttaacaggtttttattaatgcacagataaatagaagtacagtgaggtctatagccattttattaaaatagcttaaaagtttgtaaaaaaatgaatctttgtaattacttaatatgttagttaagaacccgtcaagcttatatttgctagacttacaaattattttaaatgcatttatcttttttgacactattcagtggaatgtgtaagctagctaattcttgttttctgatttaaagcacttttaaatcttatcctgccccctaaaaacaaaaggttttgatcacaaggggaaatttaagattgttaaccctgtttttcagaagggctactgttaattgcacataaacatgaaatgtgttttcccctgtgtactaacacattctaggcaaaattcaaacttatagtggtaaagaaacaggttgttcacttgctgaggtgcaaaaattcttaagacttctgtttgaaattgctcaatgactaggaaaagatgtagtagtttactaaaattgtttttctaccatatcaaattaaacaattcatgcctttatagggtcaggcctacaatgaataggtatggtggtttcacagaattttaaaatagagttaaagggaagtgatgtacatttcgggggcattagggtagggagatgaatcaaaaaatacccctagtaatgctttatattttaatactgcaaaagctttacaaatggaaaccatgcaattacctgccttagttcttttgtcataaaaacaatcacttggttggttgtattgtagctattacttatacagcaacatttcttcaattagcagtctagacattttataaacagaaatcttggaccaattgataatatttctgactgtattaatattttagtgctataaaatactatgtgaatctcttaaaaatctgacattttacagtctgtattagacatactgtttttataatgttttacttctgccttaagatttaggttttttaaatgtatttttgccctgaattaagtgttaatttgatggaaactctgcttttaaaatcatcatttactgggttctaataaattaaaaattaacttg

SEQ ID NO: 358950 - DNA, 4396 bp, Homo sapiens
accgtgaggtgttgggtttgggggacgctggcagctgggttctcccggttcccttgggcaggtgcagggtcgggttcaaagcctccggaacgcgttttggcctgatttgaggaggggggcggggagggacctgcggcttgcggccccgcccccttctccggctcgcagccgaccggtaagcccgcctcctccctcggccggccctggggccgtgtccgccgggcaactccagccgaggcctgggcttctgcctgcaggtgtctgcggcgaggcccctagggtacagcccgatttggccccatggtgggtttcggggccaaccggcgggctggccgcctgccctctctcgtgctggtggtgctgctggtggtgatcgtcgtcctcgccttcaactactggagcatctcctcccgccacgtcctgcttcaggaggaggtggccgagctgcagggccaggtccagcgcaccgaagtggcccgcgggcggctggaaaagcgcaattcggacctcttgctgttggtggacacgcacaagaaacagatcgaccagaaggaggccgactacggccgcctcagcagccggctgcaggccagagagggcctcgggaagagatgcgaggatgacaaggttaaactacagaacaacatatcgtatcagatggcagacatacatcatttaaaggagcaacttgctgagcttcgtcaggaatttcttcgacaagaagaccagcttcaggactataggaagaacaatacttaccttgtgaagaggttagaatatgaaagttttcagtgtggacagcagatgaaggaattgagagcacagcatgaagaaaatattaaaaagttagcagaccagtttttagaggaacaaaagcaagagacccaaaagattcaatcaaatgatggaaaggaattggatataaacaatcaagtagtacctaaaaatattccaaaagtagctgagaatgttgcagataagaatgaagaaccctcaagcaatcatattccacatgggaaagaacaaatcaaaagaggtggtgatgcagggatgcctggaatagaagagaatgacctagcaaaagttgatgatcttccccctgctttaaggaagcctcctatttcagtttctcaacatgaaagtcatcaagcaatctcccatcttccaactggacaacctctctccccaaatatgcctccagattcacacataaaccacaatggaaaccccggtacttcaaaacagaatccttccagtcctcttcagcgtttaattccaggctcaaacttggacagtgaacccagaattcaaacagatatactaaagcaggctaccaaggacagagtcagtgatttccataaattgaagcaaagccgattctttgatgaaaatgaatcccctgttgatccgcagcatggctctaaactggcggattataatggggatgatggtaacgtaggtgagtatgaggcagacaagcaggctgagctggcttacaatgaggaagaagatggtgatggtggagaggaagacgtccaagatgatgaagaacgagagcttcaaatggatcctgcagactatggaaagcaacatttcaatgatgtcctttaagtcctaaaggaatgcttcagaaaacctaaagtgctgtaaaatgaaatcattctactttgtcctttctgacttttgttgtaaagacgaattgtatcagttgtaaagatacattgagatagaattaaggaaaaactttaatgaaggaatgtacccatgtacatatgtgaactttttcatattgtattatcaaggtatagacttttttggttatgatacagttaagccaaaaacagctaatctttgcatctaaagcaaactaatgtatatttcacattttattgagccgacttatttccacaaatagataaacaggacaaaatagttgtacaggttatatgtggcatagcataaccacagtaagaacagaacagatattcagcagaaaactttttatactctaattctttttttttttttttttgagacagagttttagtcttgtttcccaggctggagtgcaatggcacaatcttggctcactgcaacctccgcctcctgggttcaggcaattttcctgcctcagcctcccaagtagctgggattacaggcacccaccaccatgcccagctaatttttgtatttttaatagagagctaataattgtatatttaataaagacgggtttcaccatgttggccaggctggtcttgaactcctgacctcaggtgatcctcctgcattggcctcccaaagtgctggaattccaggcatgagccactgcgcccagtctacacactaattcttgttagcccaacagctgttctgttctatctacccctcatttcacgctcaaggagtcatacctagaatagttacacacaagagggaaactggaagccaaacactgtacagtattgtgtagaaagtcacctccctactccttttattttacatgagtgctgatgtgttttggcagatgagctttcagctgaggcctgatggaaattgagataacctgcaaagacataacagtatttatgagttatatcttagttcttgaaattgtggaatgcatgattgacaatatatttttaatttttattttttcaagtaataccagtactgtttaactatagccagaactggctaaaatttttatattttcagagttgaagttggtgaagacattcatgatttaaacaccagatcctgaaaggggttaaatctactttgaaatgaatctgcaatcagtatttcaaagcttttctggtaattttagtgatcttatttgattagactttttcagaagtactaaataaggaattttaacaggtttttattaatgcacagataaatagaagtacagtgaggtctatagccattttattaaaatagcttaaaagtttgtaaaaaaatgaatctttgtaattacttaatatgttagttaagaacccgtcaagcttatatttgctagacttacaaattattttaaatgcatttatcttttttgacactattcagtggaatgtgtaagctagctaattcttgttttctgatttaaagcacttttaaatcttatcctgccccctaaaaacaaaaggttttgatcacaaggggaaatttaagattgttaaccctgtttttcagaagggctactgttaattgcacataaacatgaaatgtgttttcccctgtgtactaacacattctaggcaaaattcaaacttatagtggtaaagaaacaggttgttcacttgctgaggtgcaaaaattcttaagacttctgtttgaaattgctcaatgactaggaaaagatgtagtagtttactaaaattgtttttctaccatatcaaattaaacaattcatgcctttatagggtcaggcctacaatgaataggtatggtggtttcacagaattttaaaatagagttaaagggaagtgatgtacatttcgggggcattagggtagggagatgaatcaaaaaatacccctagtaatgctttatattttaatactgcaaaagctttacaaatggaaaccatgcaattacctgccttagttcttttgtcataaaaacaatcacttggttggttgtattgtagctattacttatacagcaacatttcttcaattagcagtctagacattttataaacagaaatcttggaccaattgataatatttctgactgtattaatattttagtgctataaaatactatgtgaatctcttaaaaatctgacattttacagtctgtattagacatactgtttttataatgttttacttctgccttaagatttaggttttttaaatgtatttttgccctgaattaagtgttaatttgatggaaactctgcttttaaaatcatcatttactgggttctaataaattaaaaattaacttgaaaaaaaaaaaaaaaaaaaaaaaaaaaaaaaaaaaaaaaaaaaaaagaaaaacaaaaaaaaaaaaatcaacaataaaacaaaatgaatcaaaaagaagaggatcaagaaagacaagaggagcaaacaggataaagaacatagcacaaaaaaacacagcatacgaaaagcccacacgcaagaagacgacacagggcggggcgctcgacgctcctcgcagcccggcagaatcgagaaacgacacgcgctaccgcgagagcaggagagcgaactgccgagcgaccccaggcggaggggcaatataccaagtcagagcagcgaataccagaaacatcaaaatctcgccgctgaacgaaaacagccgctggcgagtgcgagaagacaacagaagatagagaggaacagaagcagacgccaccaacctgcgaccacgcaca

SEQ ID NO: 358951 - DNA, 2884 bp, Homo sapiens
accgtgaggtgttgggtttgggggacgctggcagctgggttctcccggttcccttgggcaggtgcagggtcgggttcaaagcctccggaacgcgttttggcctgatttgaggaggggggcggggagggacctgcggcttgcggccccgcccccttctccggctcgcagccgaccggtaagcccgcctcctccctcggccggccctggggccgtgtccgccgggcaactccagccgaggcctgggcttctgcctgcaggtgtctgcggcgaggcccctagggtacagcccgatttggccccatggtgggtttcggggccaaccggcgggctggccgcctgccctctctcgtgctggtggtgctgctggtggtgatcgtcgtcctcgccttcaactactggagcatctcctcccgccacgtcctgcttcaggaggaggtggccgagctgcagggccaggtccagcgcaccgaagtggcccgcgggcggctggaaaagcgcaattcggacctcttgctgttggtggacacgcacaagaaacagatcgaccagaaggaggccgactacggccgcctcagcagccggctgcaggccagagagggcctcgggaagagatgcgaggatgacaaggttaaactacagaacaacatatcgtatcagatggcagacatacatcatttaaaggagcaacttgctgagcttcgtcaggaatttcttcgacaagaagaccagcttcaggactataggaagaacaatacttaccttgtgaagaggttagaatatgaaagttttcagtgtggacagcagatgaaggaattgagagcacagcatgaagaaaatattaaaaagttagcagaccagtttttagaggaacaaaagcaagagacccaaaagattcaatcaaatgatggaaaggaattggatataaacaatcaagtagtacctaaaaatattccaaaagtagctgagaatgttgcagataagaatgaagaaccctcaagcaatcatattccacatgggaaagaacaaatcaaaagaggtggtgatgcagggatgcctggaatagaagagaatgacctagcaaaagttgatgatcttccccctgctttaaggaagcctcctatttcagtttctcaacatgaaagtcatcaagcaatctcccatcttccaactggacaacctctctccccaaatatgcctccagattcacacataaaccacaatggaaaccccggtacttcaaaacagaatccttccagtcctcttcagcgtttaattccaggctcaaacttggacagtgaacccagaattcaaacagatatactaaagcaggctaccaaggacagagtcagtgatttccataaattgaagcaaagccgattctttgatgaaaatgaatcccctgttgatccgcagcatggctctaaactggcggattataatggggatgatggtaacgtaggtgagtatgaggcagacaagcaggctgagctggcttacaatgaggaagaagatggtgatggtggagaggaagacgtccaagatgatgaagaacgagagcttcaaatggatcctgcagactatggaaagcaacatttcaatgatgtcctttaagtcctaaaggaatgcttcagaaaacctaaaagttgaagttggtgaagacattcatgatttaaacaccagatcctgaaaggggttaaatctactttgaaatgaatctgcaatcagtatttcaaagcttttctggtaattttagtgatcttatttgattagactttttcagaagtactaaataaggaattttaacaggtttttattaatgcacagataaatagaagtacagtgaggtctatagccattttattaaaatagcttaaaagtttgtaaaaaaatgaatctttgtaattacttaatatgttagttaagaacccgtcaagcttatatttgctagacttacaaattattttaaatgcatttatcttttttgacactattcagtggaatgtgtaagctagctaattcttgttttctgatttaaagcacttttaaatcttatcctgccccctaaaaacaaaaggttttgatcacaaggggaaatttaagattgttaaccctgtttttcagaagggctactgttaattgcacataaacatgaaatgtgttttcccctgtgtactaacacattctaggcaaaattcaaacttatagtggtaaagaaacaggttgttcacttgctgaggtgcaaaaattcttaagacttctgtttgaaattgctcaatgactaggaaaagatgtagtagtttactaaaattgtttttctaccatatcaaattaaacaattcatgcctttatagggtcaggcctacaatgaataggtatggtggtttcacagaattttaaaatagagttaaagggaagtgatgtacatttcgggggcattagggtagggagatgaatcaaaaaatacccctagtaatgctttatattttaatactgcaaaagctttacaaatggaaaccatgcaattacctgccttagttcttttgtcataaaaacaatcacttggttggttgtattgtagctattacttatacagcaacatttcttcaattagcagtctagacattttataaacagaaatcttggaccaattgataatatttctgactgtattaatattttagtgctataaaatactatgtgaatctcttaaaaatctgacattttacagtctgtattagacatactgtttttataatgttttacttctgccttaagatttaggttttttaaatgtatttttgccctgaattaagtgttaatttgatggaaactctgcttttaaaatcatcatttactgggttctaataaattaaaaattaacttg

SEQ ID NO: 358952 - DNA, 1155 bp, Homo sapiens
accgtgaggtgttgggtttgggggacgctggcagctgggttctcccggttcccttgggcaggtgcagggtcgggttcaaagcctccggaacgcgttttggcctgatttgaggaggggggcggggagggacctgcggcttgcggccccgcccccttctccggctcgcagccgaccggtaagcccgcctcctccctcggccggccctggggccgtgtccgccgggcaactccagccgaggcctgggcttctgcctgcaggtgtctgcggcgaggcccctagggtacagcccgatttggccccatggtgggtttcggggccaaccggcgggctggccgcctgccctctctcgtgctggtggtgctgctggtggtgatcgtcgtcctcgccttcaactactggagcatctcctcccgccacgtcctgcttcaggaggaggtggccgagctgcagggccaggtccagcgcaccgaagtggcccgcgggcggctggaaaagcgcaattcggacctcttgctgttggtggacacgcacaagaaacagatcgaccagaaggaggccgactacggccgcctcagcagccggctgcaggccagagagggcctcgggaagagatgcgaggatgacaaggttaaactacagaacaacatatcgtatcagatggcagacatacatcatttaaaggagcaacttgctgagcttcgtcaggaatttcttcgacaagaagaccagcttcaggactataggaagaacaatacttaccttgtgaagaggttagaatatgaaagttttcagtgtggacagcagatgaaggaattgagagcacagcatgaagaaaatattaaaaagttagcagaccagtttttagaggaacaaaagcaagagacccaaaagattcaatcaaatgatggaaaggaattggatataaacaatcaagtagtacctaaaaatattccaaaagtagctgagaatgttgcagataagaatgaagaaccctcaagcaatcatattccacatgggaaagaacaaatcaaaagaggtggtgatgcagggatgcctggaatagaagagaatgacctagcaaaagttgatgatcttccccctgtgctttaaggacctcctatttcagtttctcatcttgggagggatcctcgtcac

SEQ ID NO: 358953 - DNA, 324 bp, Homo sapiens
ggtttgagaaccaacaatggattcattgcaactgtccattctcatagcttatagagtcactttattttataaagaaattctaaacagcattagagctctgcttccttctttctcccttgtgattcattcaaagatgcaatggcttggttcaggaattgacaaaagggccacagtgttaccaattgttagtgagtgttaccaccccctttagttttttttgtaactatttaatctcattgtagatattttaaaagatttgatgattattgtgcataactcatgttggcaaactattataactctgaacttatcctgtttggttgt

SEQ ID NO: 358954 - DNA, 427 bp, Homo sapiens
ttggcctcccaaagtgctaggattacaggtgtgagtcaccgcgcccggccagaaaatatcacattttctgttgtgatactgaaaatcacaaattgtgggtgcactgggtatagtaagggcattgtttcataaaacttttgtgtctattttatgtacatgtgtgttgcaaactcggtcatgatataaaatatattttcttaccatgggtgatagtcaacaaaggttgaaaaacattgctttaatacctgcttttctcttttctgttttgcctcaaaacttcttgatacgctacttctatagaagcttggaaccaaaaaagttaatgatgataaaattgataataatgatatcaagagtaatatttactgaatatatactacgtaccaggaactgtgctgttttactttaatgatctcacttaatctgt

SEQ ID NO: 358955 - DNA, 360 bp, Homo sapiens
ggagaggagagagcactttcctctgctcctgcacttggctttgacgtgtaaagagacactttgctctagggatttaaagacttgagctatctatagaatgtgatttagagaggataccaaattatttaaaataatggtcatcctctcaagttagaaaactatagaatctaataaagttgagaacatttgcttacataaacatttaaaaattgatggttagtttcatgcatatgatacatctaagttttattagtagccagctggtaatagtttttacaacttttaaagttagctaagtacagccatacaccacataccattttggtcaacagtggtctgcatatatgcctgtatgatggt

SEQ ID NO: 358956 - DNA, 1414 bp, Homo sapiens
ttcatcaaaaacatgattacagggacatctcaggctgactgtgctgtcctgattgttgctgctggtgttggtgaatttgaagctggtatctccaagaatgggcagacccgagagcatgcccttctggcttacacactgggtgtgaaacaactaattgtcggtgttaacaaaatggattccactgagccaccctacagccagaagagatatgaggaaattgttaaggaagtcagcacttacattaagaaaattggctacaaccccgacacagtagcatttgtgccaatttctggttggaatggtgacaacatgctggagccaagtgctaacatgccttggttcaagggatggaaagtcacccgtaaggatggcaatgccagtggaaccacgctgcttgaggctctggactgcatcctaccaccaactcgtccaactgacaagcccttgcgcctgcctctccaggatgtctacaaaattggtggtattggtactgttcttgttggccgagtggagactggtgttctcaaacccggtatggtggtcacctttgctccagtcaacgttacaacggaagtaaaatctgtcgaaatgcaccatgaagctttgagtgaagctcttcctggggacaatgtgggcttcaatgtcaagaatgtgtctgtcaaggatgttcatcgtggcaacgttgctggtgacagcaaaaatgacccaccaatggaagcagctggcttcactgctcaggtgattatcctgaaccatccgggccaaataagcgccggctatgcccctgtattggattgccacacggctcacattgcatgcaagtttgctgagctgaaggaaaagattgatcgccgttctggtaaaaagctggaagatggccctaaattcttgaagtctggtgatgctgccattgctgatatggttcctggcaagcccatgtgtgttgagagcttctcagactatccacctttgggtcgctttgctgttcgtgatatgagacagacagttgcggtgggtgtcatcaaagcagtggacaagaaggctgctggagctggcaaggtcaccaagtctgcccagaaagctcagaaggctaaatgaatattatccctaatacctgccaccccactcttaatcagtggtggaagaacggtctcagaactgtttgtttcaattggccatttaagtttagtagtaaaagactggttaatgataacaatgcatcgtaaaaccttcagaaggaaaggagaatgttttgtggaccactttggttttcttttttgcgtgtggcagttttaagttattagtttttaaaatcagtactttttaatggaaacaacttgaccaaaaatttgtcacagaattttgagacccattaaaaaagttaaatgagaaaaaaaaaaaagaaatgaacaag

SEQ ID NO: 358957 - DNA, 1995 bp, Homo sapiens
ctttcttatcattcgtgtgttcattggagtagcacttttaacttccttcaagaacttttcctttgcatttacaacttggctaactgtttgccgcaggaggcctagccttcggcctatctcggcttttgacataccttcctcactcagtttaatcatttctagtttttgatttaaagtgagagatgtgcgactcttcctttcacttgagcacttagaggccattgcagagtcattaattcgcctaatctcaatattgttgtgtctcagggaatagggaggcccaagaagagggagagagatggggaacggtctgtgggtggagcggtcagaacacacacaacattaagttccacgtcttataaaagacgctgtatgtggcaccccaaaacaatgacaatagcaacatcaaagatcactgatcatagatcaccataacagacacagaaatcatgaaaaagttttaaatattttgagaattaccaaaatgtaacacagagacaccaagtgagcacatgctgttggaaaaatggcgctgatacaattgctggactcagggctgccacaaaccctccatttgttttcagaatgccctatctgcgaagcgtaataaaacgaggtatgccatagtacagtggcgccgcgaccgacaaaggaaagcctccgggaggtcaaaagagataccagagagtgcgtcccgcactggaggaagaggaaggtttttaccaagcagcgagtccagagcccgcgccgtcaacgacgcggtgctgccttttttccgagccgctgcgggagggggccaggacacgctcccttaggagagcgggcgggtcacaaggacctggacagaggcagaactgaggccagcagccagctccgccgctgagtccagccctctgcgcagccgccctgagctggcgtcccgagatagccgcttccaaaccgggcctgcgcgccgacgttccgctgcgccccgcgcaaaaccggaagtacccgggcccaaggctgagggacccggtggagcggaagtcactccctgaggcagtggcgacagcggcggcgagaggatgaacaacaagttcgacgctttgaaagatgatgacagtggggaccatgatcagaatgaagaaaacagcacacagaaagatggtgagaaggaaaaaacggaacgagacaagaatcagagcagtagcaagagaaaggctgttgtccctggaccggcagagcatcccctgcagtacaactacactttttggtactccaggagaacccccggccgtcccacgagctcacagagctatgaacagaatatcaaacagattggcacctttgcctctgtggagcagttctggaggttttatagccacatggtacgtcctggggacctgacaggccacagtgacttccatctcttcaaagaaggaattaaacccatgtgggaggatgatgcaaataaaaatggtggcaagtggattattcggctgcggaagggcttggcctcccgttgctgggagaatctcattttggccatgctgggggaacagttcatggttggggaggagatctgtggggctgtggtgtctgtccgctttcaggaagacattatttcaatatggaataagactgccagtgaccaagcaaccacagcccgaatccgggacacacttcggcgagtgcttaacctacctcccaacaccattatggaatacaaaactcacaccgacagcatcaaaatgccaggcaggctgggcccccaaaggctcctttttcaaaacctctggaagccgcggttgaatgtgccatgaccctctccctctctggatggcaccatcattgaagctggcgtcatcggagtctcttgttctgttggcgtgctacctggaagatccttctgtcctggacaagaggaattggaagagcattttatgttttaagaacaggctgacacgcagcagctacaacaacagctgagatcacttaataaatggtgctaaacta

SEQ ID NO: 358958 - DNA, 1970 bp, Homo sapiens
ctttcttatcattcgtgtgttcattggagtagcacttttaacttccttcaagaacttttcctttgcatttacaacttggctaactgtttgccgcaggaggcctagccttcggcctatctcggcttttgacataccttcctcactcagtttaatcatttctagtttttgatttaaagtgagagatgtgcgactcttcctttcacttgagcacttagaggccattgcagagtcattaattcgcctaatctcaatattgttgtgtctcagggaatagggaggcccaagaagagggagagagatggggaacggtctgtgggtggagcggtcagaacacacacaacattaagttccacgtcttataaaagacgctgtatgtggcaccccaaaacaatgacaatagcaacatcaaagatcactgatcatagatcaccataacagacacagaaatcatgaaaaagttttaaatattttgagaattaccaaaatgtaacacagagacaccaagtgagcacatgctgttggaaaaatggcgctgatacaattgctggactcagggctgccacaaaccctccatttgttttcagaatgccctatctgcgaagcgtaataaaacgaggtatgccatagtacagtggcgccgcgaccgacaaaggaaagcctccgggaggtcaaaagagataccagagagtgcgtcccgcactggaggaagaggaaggtttttaccaagcagcgagtccagagcccgcgccgtcaacgacgcggtgctgccttttttccgagccgctgcgggagggggccaggacacgctcccttaggagagcgggcgggtcacaaggacctggacagaggcagaactgaggccagcagccagctccgccgctgagtccagccctctgcgcagccgccctgagctggcgtcccgagatagccgcttccaaaccgggcctgcgcgccgacgttccgctgcgccccgcgcaaaaccggaagtacccgggcccaaggctgagggacccggtggagcggaagtcactccctgaggcagtggcgacagcggcggcgagaggatgaacaacaagttcgacgctttgaaagatgatgacagtggggaccatgatcagaatgaagaaaacagcacacagaaagatggtgagaaggaaaaaacggaacgagacaagaatcagagcagtagcaagagaaaggctgttgtccctggaccggcagagcatcccctgcagtacaactacactttttggtactccaggagaacccccggccgtcccacgagctcacagagctatgaacagaatatcaaacagattggcacctttgcctctgtggagcagttctggaggttttatagccacatggtacgtcctggggacctgacaggccacagtgacttccatctcttcaaagaaggaattaaacccatgtgggaggatgatgcaaataaaaatggtggcaagtggattattcggctgcggaagggcttggcctcccgttgctgggagaatctcattttggccatgctgggggaacagttcatggttggggaggagatctgtggggctgtggtgtctgtccgctttcaggaagacattatttcaatatggaataagactgccagtgaccaagcaaccacagcccgaatccgggacacacttcggcgagtgcttaacctacctcccaacaccattatggaatacaaaactcacaccgacagcatcaaaatgccaggcaggctggccccaaggtctttcaaactctggaagcgggtgatgtgcatgaccttcctttggatggacatcatgaactgggtcatcggagcctgtctgtgggtgcaccggaacctctgtccgcaagatggagacctttgtttaaaagtggacgcgggtcacacagtggacattagggctcaaaaaaaaccggctttgggaagaaaaggcagatctgcctttaggtcccttgtt

SEQ ID NO: 358959 - DNA, 2171 bp, Homo sapiens
  misc_feature (848)..(848): n is a, c, g, or t
  misc_feature (868)..(868): n is a, c, g, or t
  misc_feature (917)..(917): n is a, c, g, or t
  misc_feature (1210)..(1210): n is a, c, g, or t
  misc_feature (1293)..(1293): n is a, c, g, or t
  misc_feature (1305)..(1305): n is a, c, g, or t
  misc_feature (1338)..(1338): n is a, c, g, or t
  misc_feature (1511)..(1511): n is a, c, g, or t
  misc_feature (1581)..(1581): n is a, c, g, or t
  misc_feature (1645)..(1645): n is a, c, g, or t
atgaatgaatgaatgatagtctcgagctgtttaacttcatctctcttatggtttgcatataagattgtgcagtggggctgggcgcggtggctcacgcctgtaatcacaacactttggaaggccaaggcaggtggatcacctgaggtcaggagttcgagaccagcctggctaacatggtgaatggtgaaaccccatctactaaaaatacaaaaattagccaggcgtggtggtgtgtgcctgtagtcccagctactcgggaggctgaggcaggagaatcacttgaacccagaaggcagaggttgcagtgagctgaggcaggctgcaccattgcactccagcctggacaaaaagagcgaaactccatctcaaaaaaacaaacaaaaaaaagattgtgcagtgtagttgtaagattggggagaccaaactgttaaagcgattattgactggggaactggagatggttgacatactttgtcctcaccaagcccctttcagttccttattcacaatgagccactagtgggtgtacttggttctagtgggtatatgtggttttattcaactatgttagggtggataaaggtttacattattgccgattgtattcatatgaccatttactattccgagtcactacatgcagctaagcttagcagttgctgagtataaagcactgccttgaagccctatagatggcgttagttctgacttctttttaccatgtaagacatcacgtgtgcttgtgctagagaggaactaaagggacagccatttcacgcagtgtaaggctgatttctccttaggtgctccccatatctagaagtatgacctgaatctttgtctactcnatacccattgtcagctccanagttgtggtatcttgctgtatgttgatttagagcctgctcagcagtttngcagataccagctatttctcattggaatgttccgtgttttctctttcctcctaaagtgtgcctcttcactggccagtacttactacgtatcctctgtgaataaggaaataatctttcctatcaagacactagtgaacctgtagtcccagctacttgggaggctgagatgggaggatcccttgacaccaggagttagaggctgtgatgagctatgatcatactgctgcgtagaccctgtctcttttttttttctttttttaaggggagggggggtgacactaatgagaaaaacnggactactgtgatgaatacaaataagcatatacttgatggaaaaatataaatctagttttctcacgggattgtgaaggagcgncaaggagaaacntaatttttctagctaagaagagggccttaaacnctagctatgagaagctaagtcctgtatgattttggattggcctggacttagcaacagcaccatgatgtagagtggtatgtgtggtacatgtggttgattctatcacttatgcttagtaactaaacaggtctaagaggtatttacatgtggttgattctatcacttatgcttantaactaaacaggtctaagaggtatttcattcagcaaatgctatatttgccagttaaacaatctttcatcngtaagtgatttggttctaaaaaatgcattcaggctgaggctgtgtgacacttacatacctcaangctaaagagtttccattgtgcaaaaacctggtcctcttactgcatgtgatgactaccctgcagcttgagtgggagagtgcgtattaacatggtttcaccaactaaagctcctggctgaggcttgcatttctcaccaaagattttattcttgaattgcgaatgttacattttttattttgtcaaactagatggtatgtttttcctctaatatgtcttccctcacaacaccacacatgaaaatgagtcctctgaaaaggacagcctgtagtatagtgtcttccatgcttatgttcttaactaaatctcaaccttgggatgcattcaaagaaaagtaaaagacacatgttttttactctggggtcttctctctgcaggtggagcagttctggaggttttatagccacatggtacgtcctggggacctgacaggccacagtgacttccatctcttcaaagaaggaattaaacccatgtgggaggtaaggactaatggcttctgactgcttttttgagcaagtttgggttt

SEQ ID NO: 358960 - DNA, 679 bp, Homo sapiens
cgctggggctggggcggcgcaaaccctgcggcaccggcttccctgctgggatccggctgcgggacctggcctggactggcggggaggagggggctggggagcaatggataccggagtcccggagaccccagggccgtccgaaccgagggcgaagagctgggcccgggggaggggtggctgtgccgcccggtagggggagattttcggacgccccgccctggtggatgcggattgcctgcgacgtggaggggtggggacctcggcggtttgggtgtttccgcagtctggcagcgctgcctctgaatccagctttccccacacactccctctcccctctgagcctcagttttctcatctgcagagtggggacggtaacaccctttgtcgtagagtttggaggatgcaatgagtgatcagcagcaaaaccactaaaaagaaaggaagtttgaaagatgatgacagtggggaccatgatcagaatgaagaaaacagcacacagaaagatggtgagaaggaaaaaacggaacgagacaagaatcagagcagtagcaagagaaaggtaagaagatgaggcacaaacaggttaagtaacttaacagtgatgaatctcatagaggaggcagtgcttggactgggcatatgctgagataagatacaaagatgaatacctattatatga

SEQ ID NO: 358961 - DNA, 2489 bp, Homo sapiens
ctttcttatcattcgtgtgttcattggagtagcacttttaacttccttcaagaacttttcctttgcatttacaacttggctaactgtttgccgcaggaggcctagccttcggcctatctcggcttttgacataccttcctcactcagtttaatcatttctagtttttgatttaaagtgagagatgtgcgactcttcctttcacttgagcacttagaggccattgcagagtcattaattcgcctaatctcaatattgttgtgtctcagggaatagggaggcccaagaagagggagagagatggggaacggtctgtgggtggagcggtcagaacacacacaacattaagttccacgtcttataaaagacgctgtatgtggcaccccaaaacaatgacaatagcaacatcaaagatcactgatcatagatcaccataacagacacagaaatcatgaaaaagttttaaatattttgagaattaccaaaatgtaacacagagacaccaagtgagcacatgctgttggaaaaatggcgctgatacaattgctggactcagggctgccacaaaccctccatttgttttcagaatgccctatctgcgaagcgtaataaaacgaggtatgccatagtacagtggcgccgcgaccgacaaaggaaagcctccgggaggtcaaaagagataccagagagtgcgtcccgcactggaggaagaggaaggtttttaccaagcagcgagtccagagcccgcgccgtcaacgacgcggtgctgccttttttccgagccgctgcgggagggggccaggacacgctcccttaggagagcgggcgggtcacaaggacctggacagaggcagaactgaggccagcagccagctccgccgctgagtccagccctctgcgcagccgccctgagctggcgtcccgagatagccgcttccaaaccgggcctgcgcgccgacgttccgctgcgccccgcgcaaaaccggaagtacccgggcccaaggctgagggacccggtggagcggaagtcactccctgaggcagtggcgacagcggcggcgagaggatgaacaacaagttcgacgctttgaaagatgatgacagtggggaccatgatcagaatgaagaaaacagcacacagaaagatggtgagaaggaaaaaacggaacgagacaagaatcagagcagtagcaagagaaaggctgttgtccctggaccggcagagcatcccctgcagtacaactacactttttggtactccaggagaacccccggccgtcccacgagctcacagagctatgaacagaatatcaaacagattggcacctttgcctctgtggagcagttctggaggttttatagccacatggtacgtcctggggacctgacaggccacagtgacttccatctcttcaaagaaggaattaaacccatgtgggaggatgatgcaaataaaaatggtggcaagtggattattcggctgcggaagggcttggcctcccgttgctgggagaatctcattttggccatgctgggggaacagttcatggttggggaggagatctgtggggctgtggtgtctgtccgctttcaggaagacattatttcaatatggaataagactgccagtgaccaagcaaccacagcccgaatccgggacacacttcggcgagtgcttaacctacctcccaacaccattatggaatacaaaactcacaccgacagcatcaaaatgccaggcaggctgggcccccaaaggctcctttttcaaaacctctggaagccgcggttgaatgtgccatgaccctctccctctctggatggcaccatcattgaagctggcgtcatcggagtctcttgttctgttggcgtgctacctggaagatccttctgtcctggacaagaggaattggaagagcattttatgttttaagaacaggctgacacgcagcagctacaacaacagctgagatcacttaataaatggtgctaaactaaaaaaaaaaaaaaaaaaaaaacaacaaacaaaaaaagaaaaacaacaacacaccggagagacatatattgtggggggccgacaaaaagcgcatataaaataggccatgtggacacacagatattctcctgaccccaaatctgtcgtgcacacaggggtgcaaacacccggggacccccataaaggagggggcccgtaataaaattcgacgaggaaaacgccccggtggtacaccccgcggttataaggacgcggcacgatgcacacatcggaccgacacgacacacgactacgagaggaagcgcacacaaacgcgtacgacaacaaaacagcgagaacagagcgcaaccaaccaaaaaggcgggccacacaccacagagcagaacaaaaaaacacaccacaaacgacggaaagatgcagaggaagagaggacacaaccgaaccagagacccgaagaagaaggacacaaaaaaactaataaaaacgcaagcaggc

SEQ ID NO: 358962 - DNA, 2058 bp, Homo sapiens
ctttcttatcattcgtgtgttcattggagtagcacttttaacttccttcaagaacttttcctttgcatttacaacttggctaactgtttgccgcaggaggcctagccttcggcctatctcggcttttgacataccttcctcactcagtttaatcatttctagtttttgatttaaagtgagagatgtgcgactcttcctttcacttgagcacttagaggccattgcagagtcattaattcgcctaatctcaatattgttgtgtctcagggaatagggaggcccaagaagagggagagagatggggaacggtctgtgggtggagcggtcagaacacacacaacattaagttccacgtcttataaaagacgctgtatgtggcaccccaaaacaatgacaatagcaacatcaaagatcactgatcatagatcaccataacagacacagaaatcatgaaaaagttttaaatattttgagaattaccaaaatgtaacacagagacaccaagtgagcacatgctgttggaaaaatggcgctgatacaattgctggactcagggctgccacaaaccctccatttgttttcagaatgccctatctgcgaagcgtaataaaacgaggtatgccatagtacagtggcgccgcgaccgacaaaggaaagcctccgggaggtcaaaagagataccagagagtgcgtcccgcactggaggaagaggaaggtttttaccaagcagcgagtccagagcccgcgccgtcaacgacgcggtgctgccttttttccgagccgctgcgggagggggccaggacacgctcccttaggagagcgggcgggtcacaaggacctggacagaggcagaactgaggccagcagccagctccgccgctgagtccagccctctgcgcagccgccctgagctggcgtcccgagatagccgcttccaaaccgggcctgcgcgccgacgttccgctgcgccccgcgcaaaaccggaagtacccgggcccaaggctgagggacccggtggagcggaagtcactccctgaggcagtggcgacagcggcggcgagaggatgaacaacaagttcgacgctttgaaagatgatgacagtggggaccatgatcagaatgaagaaaacagcacacagaaagatggtgagaaggaaaaaacggaacgagacaagaatcagagcagtagcaagagaaaggctgttgtccctggaccggcagagcatcccctgcagtacaactacactttttggtactccaggagaacccccggccgtcccacgagctcacagagctatgaacagaatatcaaacagattggcacctttgcctctgtggagcagttctggaggttttatagccacatggtacgtcctggggacctgacaggccacagtgacttccatctcttcaaagaaggaattaaacccatgtgggaggatgatgcaaataaaaatggtggcaagtggattattcggctgcggaagggcttggcctcccgttgctgggagaatctcattttggccatgctgggggaacagttcatggttggggaggagatctgtggggctgtggtgtctgtccgctttcaggaagacattatttcaatatggaataagactgccagtgaccaagcaaccacagcccgaatccgggacacacttcggcgagtgcttaacctacctcccaacaccattatggaatacaaaactcacaccgacagcatcaaaatgccaggcaggctgggcccccaaaggctcctttttcaaaacctctggaagccgcggttgaatgtgccatgaccctctccctctctggatggcaccatcattgaagctggcgtcatcggagtctcttgttctgttggcgtgctacctggaagatccttctgtcctggacaagaggaattggaagagcattttatgttttaagaacaggctgacacgcagcagctacaacaacagctgagatcacttaataaatggtgctaaactagagagaagcgtccgcactcccccgcaaggcacctatatcggcccgcccaacaccaatcaaacg

SEQ ID NO: 358963 - DNA, 3727 bp, Homo sapiens
ctttcttatcattcgtgtgttcattggagtagcacttttaacttccttcaagaacttttcctttgcatttacaacttggctaactgtttgccgcaggaggcctagccttcggcctatctcggcttttgacataccttcctcactcagtttaatcatttctagtttttgatttaaagtgagagatgtgcgactcttcctttcacttgagcacttagaggccattgcagagtcattaattcgcctaatctcaatattgttgtgtctcagggaatagggaggcccaagaagagggagagagatggggaacggtctgtgggtggagcggtcagaacacacacaacattaagttccacgtcttataaaagacgctgtatgtggcaccccaaaacaatgacaatagcaacatcaaagatcactgatcatagatcaccataacagacacagaaatcatgaaaaagttttaaatattttgagaattaccaaaatgtaacacagagacaccaagtgagcacatgctgttggaaaaatggcgctgatacaattgctggactcagggctgccacaaaccctccatttgttttcagaatgccctatctgcgaagcgtaataaaacgaggtatgccatagtacagtggcgccgcgaccgacaaaggaaagcctccgggaggtcaaaagagataccagagagtgcgtcccgcactggaggaagaggaaggtttttaccaagcagcgagtccagagcccgcgccgtcaacgacgcggtgctgccttttttccgagccgctgcgggagggggccaggacacgctcccttaggagagcgggcgggtcacaaggacctggacagaggcagaactgaggccagcagccagctccgccgctgagtccagccctctgcgcagccgccctgagctggcgtcccgagatagccgcttccaaaccgggcctgcgcgccgacgttccgctgcgccccgcgcaaaaccggaagtacccgggcccaaggctgagggacccggtggagcggaagtcactccctgaggcagtggcgacagcggcggcgagaggatgaacaacaagttcgacgctttgaaagatgatgacagtggggaccatgatcagaatgaagaaaacagcacacagaaagatggtgagaaggaaaaaacggaacgagacaagaatcagagcagtagcaagagaaaggctgttgtccctggaccggcagagcatcccctgcagtacaactacactttttggtactccaggagaacccccggccgtcccacgagctcacagagctatgaacagaatatcaaacagattggcacctttgcctctgtggagcagttctggaggttttatagccacatggtacgtcctggggacctgacaggccacagtgacttccatctcttcaaagaaggaattaaacccatgtgggaggatgatgcaaataaaaatggtggcaagtggattattcggctgcggaagggcttggcctcccgttgctgggagaatctcattttggccatgctgggggaacagttcatggttggggaggagatctgtggggctgtggtgtctgtccgctttcaggaagacattatttcaatatggaataagactgccagtgaccaagcaaccacagcccgaatccgggacacacttcggcgagtgcttaacctacctcccaacaccattatggaatacaaaactcacaccgacagcatcaagtacgtgttggggggttatgggaggacgtgtccctaagcttagtataagtagatctgtagttgggcccagaggaatatggcggacaggagacttacttgtggagaaggacgaccagaccaggccttccctctagggcttctggctacttgctgcagttctttgtcagcgaggctccctgccacctatactaccaggtgctttgtagcagagagagcccatctgcagaaacccagttgtactacctgggcttgcttaatttctacaggctgtcttgtctttcatatgctaaccactatcttaaaatgaaagacaagtgcttttctttttcttgctgttttttaagataatttcaccctgcccaccctcaccccacttctgcatgtctttttaacttgttagcttcagtctattttctttgtcctgggatactgactacttatcaggaatgactccatttccttgtgtatagagctgactcttagaagaagggggatagtgtgtgtgtgagagagcagaatcaaagggaagcatgaaggccacagggaaaataagcttggcaatctccctaggactcagggaaatagagctctctgtccacagtgagaatcactgttaggcttgctcctcagtgattgagtgtcagaagtaagctcaggctattgtgaaaaagtgtggggagtggctgtcagattgtctcaaagctggagggtgagctagccagctaagagttaggactcttaggtttagttctctcatatggccccataccaatatgtgcctttgacaagtgtctttgcaactttgcttcagtttctccatctgtaaagtgggagacagtactttatctaacaaggctattgtgaggctgatttaatctttaactgagggtcttcagatggagaatgcttttacggggccaagtagtagtattgctatcatcatcatcatcattagtaagagtatcatcatgttgttattattgaaggctagtagtgagcccagcaattatgttcagcagacagaccatttgggaatctctttcccatgcattcatagataatgtggagtggagttggcttaaaccagctaagtgccagtttttaagtgggaacactgctatgggcgttggtccatgatcaaacggctggcatgactcatcatagtcacgaacagttattagccagccatggctgtggttgcttgccttagcagtcctgtgttagcattgctttactctgggcacatttttcttattctctattctgggatagaagtagtttctgacttctagccacgttcagtccaggctggagagatctacacctgtttctaggattctcgttttcaaggtttctgaatatcccctactcccacttacccccaaaataagctttttacctggataggagagggaaagaggtatttttcatcaattctccccttctctgctcttctccctttctaataccataaggcagttcttcgtgacttttacagaaacatatgtacacgtccttacagagtttaggagagcctgtgggctttttgccttagtctgctagaaagactggcctgctgctctctgctttatccagaggtctgcctctgggacttcagccctgtagctgtagagaccagaagaccaaccctctttgagacccagatgctactttcccttgcgtccccctctctttcctctcccaatgagccaaccttttgcacttccactagaatgccaggcaggctgggcccccaaaggctcctttttcaaaacctctggaagccgcggttgaatgtgccatgaccctctccctctctggatggcaccatcattgaagctggcgtcatcggagtctcttgttctgttggcgtgctacctggaagatccttctgtcctggacaagaggaattggaagagcattttatgttttaagaacaggctgacacgcagcagctacaacaacagctgagatcacttaataaatggtgctaaacta

SEQ ID NO: 358964 - DNA, 4418 bp, Homo sapiens
ctttcttatcattcgtgtgttcattggagtagcacttttaacttccttcaagaacttttcctttgcatttacaacttggctaactgtttgccgcaggaggcctagccttcggcctatctcggcttttgacataccttcctcactcagtttaatcatttctagtttttgatttaaagtgagagatgtgcgactcttcctttcacttgagcacttagaggccattgcagagtcattaattcgcctaatctcaatattgttgtgtctcagggaatagggaggcccaagaagagggagagagatggggaacggtctgtgggtggagcggtcagaacacacacaacattaagttccacgtcttataaaagacgctgtatgtggcaccccaaaacaatgacaatagcaacatcaaagatcactgatcatagatcaccataacagacacagaaatcatgaaaaagttttaaatattttgagaattaccaaaatgtaacacagagacaccaagtgagcacatgctgttggaaaaatggcgctgatacaattgctggactcagggctgccacaaaccctccatttgttttcagaatgccctatctgcgaagcgtaataaaacgaggtatgccatagtacagtggcgccgcgaccgacaaaggaaagcctccgggaggtcaaaagagataccagagagtgcgtcccgcactggaggaagaggaaggtttttaccaagcagcgagtccagagcccgcgccgtcaacgacgcggtgctgccttttttccgagccgctgcgggagggggccaggacacgctcccttaggagagcgggcgggtcacaaggacctggacagaggcagaactgaggccagcagccagctccgccgctgagtccagccctctgcgcagccgccctgagctggcgtcccgagatagccgcttccaaaccgggcctgcgcgccgacgttccgctgcgccccgcgcaaaaccggaagtacccgggcccaaggctgagggacccggtggagcggaagtcactccctgaggcagtggcgacagcggcggcgagaggatgaacaacaagttcgacgctttgaaagatgatgacagtggggaccatgatcagaatgaagaaaacagcacacagaaagatggtgagaaggaaaaaacggaacgagacaagaatcagagcagtagcaagagaaaggctgttgtccctggaccggcagagcatcccctgcagtacaactacactttttggtactccaggagaacccccggccgtcccacgagctcacagagctatgaacagaatatcaaacagattggcacctttgcctctgtggagcagttctggaggttttatagccacatggtacgtcctggggacctgacaggccacagtgacttccatctcttcaaagaaggaattaaacccatgtgggaggatgatgcaaataaaaatggtggcaagtggattattcggctgcggaagggcttggcctcccgttgctgggagaatctcattttggccatgctgggggaacagttcatggttggggaggagatctgtggggctgtggtgtctgtccgctttcaggaagacattatttcaatatggaataagactgccagtgaccaagcaaccacagcccgaatccgggacacacttcggcgagtgcttaacctacctcccaacaccattatggaatacaaaactcacaccgacagcatcaaggcctgggaggagtttcatggcctggtgaacagcatgcggccgctgatcggacgctccccctctgtctctcacactcaggggacaattcaagctttcgaaatacaaaaatcacattgtgagagtacacaagctggcaataatccttttctgtatgtgtgtgtttgtccgaaatggatgggaggcctccagccagtccttccattgctcactgaagggacgtccctgagccgtgcgctctccttttgcactcattcctggaggacggattccgctagacaccctccagcatcgctgactttataaagcggaaaaacggaaaacgtggccacgtgtacatgccagagctgttgatgagagttaccagtattatgaatgtctgtgcatccaggaaaagtgttctgttggagagtcccaaaatagctgtaaatgctctcttctagctctgccattaaattattgggacattttgtttctttctctcccctcctccaagcccaccactttctgaagctgtgttactgatgtgatgactgtccaggattttgtatcatcccctgccttatgccctccggtctcctctcctgtgggactctctccttcttaggcacagctgcacttagaattgtaatccagtggctctcactggtttcactgaggcagcttagagggaatgccttagtaaactgaactggagcagaatctagtttgattaggagctagattataatctaggttccaagtacagaatttggagctaaggactgtgactgaaatcattttcccatatgagcagaccctgtgtgtcaggcctgtttcccatatgagcagagcctgtgtgcaagtctgtttctggcatgtccctcattgaggaagggaagcaaaagctggttattgccaggcctattaacacttaatatgcaaattctatcatcctgaaactggggcatctgaggaaaaggtgaccttgctggatggctttatttgcatggctctgcctgtctgcagtggttgagtcctcatcacctggtatgtgtatgagcaaatgtgtgctgatcgtgatgcccaggcagaaacctcttgaagactgctgcaggcatgctttaaaaatgaccagtcactcatcagagaagctgggtgatctgactccagaaggactgaagtcagagaagtcacaagagcacctaggattcaaataaatagcgtcagagtcctatagcaacctccaagtagcaccgtcttacttggctcttgtgagcaaagactgcagtaccttaaattaaggcctctctttaaaacatatgtggaagactaggggatccttggccacctggtctcagagaaatcatatgagagtaacaggcatttccttattgtatttgtactacactcttcctacttttccattcctgaacaccctctaattaccactgttttgggggatgctttttttctgaaagaacggggagtacaggggccaaaagggaggtgcttctattacagggcaagttagatcagataagaagatctagcagtgatttaaactccaggaatatgaagagtgcattctggtgtccagacagttgtgaagggctcggcaaatataagagcaccattggctacatggagagcaaaggctgtctttgaagaccccagggaggtcttcacttttgcctaaattcagatttgccgtgaaaattccaaagagagcagatatttggatttgccctcctttgggcatctacctgactgttgtgtgtgtgggaaagtcagtgtgtatgtgtagagtgtgcttaggagtgagtgagtggtcaggcctcctggctaggtgtgttgtccatagttttgttgttgttgttgttgttgttcagagttttgaatcttacgttttctagagctgctcatgttttcccttcctttttgtcgttgtagtatttgacagttgtcttttccatcaaaaacatactggccctaggctggttagagcaaggggttatgcctgttaggcagcatcttacgcccagtgttctcccagatattctgcctaacaggtttaagtaggagattaaatagtcagtttatctaaaccctctatttttccaaactagcttgagaggtcttttcatctatttttactccatgggcctctgatatgctgagatgtggcacggttatgattatggtatcaccgttacagaggcaaagggataaaggtctaccagggccaacgtaaccagaatgtgaggagagtgaagagtcggtctccgctttgcacagtaccagaatgtgaggttgccactggagagtggagagtcggtctccactttgcacagttggagctgttctcctctaactcctttgctgggttttctgtttgaaattggcccctactcctctccagccctttactgggttttctgtttgaaattggcccctactcctctccagtgtctgctttttgaatccttctgttcgtgtgtgtgtgtgtgtgtgtgtgtgtgttccctatgatactggcagtggcaataattttccacccagagagaagcttgtggtccacaatgctcgaagaatgaatttccaagtatttgccagtggaaacggagcagaggctatgacaagagtgatttagtgttgcactttcagagcaattatctactgcagtaataaattgaaaatatcagcaagaac

SEQ ID NO: 358965 - DNA, 5181 bp, Homo sapiens
ctttcttatcattcgtgtgttcattggagtagcacttttaacttccttcaagaacttttcctttgcatttacaacttggctaactgtttgccgcaggaggcctagccttcggcctatctcggcttttgacataccttcctcactcagtttaatcatttctagtttttgatttaaagtgagagatgtgcgactcttcctttcacttgagcacttagaggccattgcagagtcattaattcgcctaatctcaatattgttgtgtctcagggaatagggaggcccaagaagagggagagagatggggaacggtctgtgggtggagcggtcagaacacacacaacattaagttccacgtcttataaaagacgctgtatgtggcaccccaaaacaatgacaatagcaacatcaaagatcactgatcatagatcaccataacagacacagaaatcatgaaaaagttttaaatattttgagaattaccaaaatgtaacacagagacaccaagtgagcacatgctgttggaaaaatggcgctgatacaattgctggactcagggctgccacaaaccctccatttgttttcagaatgccctatctgcgaagcgtaataaaacgaggtatgccatagtacagtggcgccgcgaccgacaaaggaaagcctccgggaggtcaaaagagataccagagagtgcgtcccgcactggaggaagaggaaggtttttaccaagcagcgagtccagagcccgcgccgtcaacgacgcggtgctgccttttttccgagccgctgcgggagggggccaggacacgctcccttaggagagcgggcgggtcacaaggacctggacagaggcagaactgaggccagcagccagctccgccgctgagtccagccctctgcgcagccgccctgagctggcgtcccgagatagccgcttccaaaccgggcctgcgcgccgacgttccgctgcgccccgcgcaaaaccggaagtacccgggcccaaggctgagggacccggtggagcggaagtcactccctgaggcagtggcgacagcggcggcgagaggatgaacaacaagttcgacgctttgaaagatgatgacagtggggaccatgatcagaatgaagaaaacagcacacagaaagatggtgagaaggaaaaaacggaacgagacaagaatcagagcagtagcaagagaaaggctgttgtccctggaccggcagagcatcccctgcagtacaactacactttttggtactccaggagaacccccggccgtcccacgagctcacagagctatgaacagaatatcaaacagattggcacctttgcctctgtggagcagttctggaggttttatagccacatggtacgtcctggggacctgacaggccacagtgacttccatctcttcaaagaaggaattaaacccatgtgggaggatgatgcaaataaaaatggtggcaagtggattattcggctgcggaagggcttggcctcccgttgctgggagaatctcattttggccatgctgggggaacagttcatggttggggaggagatctgtggggctgtggtgtctgtccgctttcaggaagacattatttcaatatggaataagactgccagtgaccaagcaaccacagcccgaatccgggacacacttcggcgagtgcttaacctacctcccaacaccattatggaatacaaaactcacaccgacagcatcaaggcctgggaggagtttcatggcctggtgaacagcatgcggccgctgatcggacgctccccctctgtctctcacactcaggggacaattcaagctttcgaaatacaaaaatcacattgtgagagtacacaagctggcaataatccttttctgtatgtgtgtgtttgtccgaaatggatgggaggcctccagccagtccttccattgctcactgaagggacgtccctgagccgtgcgctctccttttgcactcattcctggaggacggattccgctagacaccctccagcatcgctgactttataaagcggaaaaacggaaaacgtgactttgtaatagacaaacattgttttttaatggggttccatgggggggcgttcagcctttctgtttgctgtgtgctgtccagatgcctcttgggcgtcctgttgttctcttcccgtgttgtacgaagggtaccgtggccacgtgtacatgccagagctgttgatgagagttaccagtattatgaatgtctgtgcatccaggaaaagtgttctgttggagagtcccaaaatagctgtaaatgctctcttctagctctgccattaaattattgggacattttgtttctttctctcccctcctccaagcccaccactttctgaagctgtgttactgatgtgatgactgtccaggattttgtatcatcccctgccttatgccctccggtctcctctcctgtgggactctctccttcttaggcacagctgcacttagaattgtaatccagtggctctcactggtttcactgaggcagcttagagggaatgccttagtaaactgaactggagcagaatctagtttgattaggagctagattataatctaggttccaagtacagaatttggagctaaggactgtgactgaaatcattttcccatatgagcagaccctgtgtgtcaggcctgtttcccatatgagcagagcctgtgtgcaagtctgtttctggcatgtccctcattgaggaagggaagcaaaagctggttattgccaggcctattaacacttaatatgcaaattctatcatcctgaaactggggcatctgaggaaaaggtgaccttgctggatggctttatttgcatggctctgcctgtctgcagtggttgagtcctcatcacctggtatgtgtatgagcaaatgtgtgctgatcgtgatgcccaggcagaaacctcttgaagactgctgcaggcatgctttaaaaatgaccagtcactcatcagagaagctgggtgatctgactccagaaggactgaagtcagagaagtcacaagagcacctaggattcaaataaatagcgtcagagtcctatagcaacctccaagtagcaccgtcttacttggctcttgtgagcaaagactgcagtaccttaaattaaggcctctctttaaaacatatgtggaagactaggggatccttggccacctggtctcagagaaatcatatgagagtaacaggcatttccttattgtatttgtactacactcttcctacttttccattcctgaacaccctctaattaccactgttttgggggatgctttttttctgaaagaacggggagtacaggggccaaaagggaggtgcttctattacagggcaagttagatcagataagaagatctagcagtgatttaaactccaggaatatgaagagtgcattctggtgtccagacagttgtgaagggctcggcaaatataagagcaccattggctacatggagagcaaaggctgtctttgaagaccccagggaggtcttcacttttgcctaaattcagatttgccgtgaaaattccaaagagagcagatatttggatttgccctcctttgggcatctacctgactgttgtgtgtgtgggaaagtcagtgtgtatgtgtagagtgtgcttaggagtgagtgagtggtcaggcctcctggctaggtgtgttgtccatagttttgttgttgttgttgttgttgttcagagttttgaatcttacgttttctagagctgctcatgttttcccttcctttttgtcgttgtagtatttgacagttgtcttttccatcaaaaacatactggccctaggctggttagagcaaggggttatgcctgttaggcagcatcttacgcccagtgttctcccagatattctgcctaacaggtttaagtaggagattaaatagtcagtttatctaaaccctctatttttccaaactagcttgagaggtcttttcatctatttttactccatgggcctctgatatgctgagatgtggcacggttatgattatggtatcaccgttacagaggcaaagggataaaggtctaccagggccaacgtaaccagaatgtgaggagagtgaagagtcggtctccgctttgcacagtaccagaatgtgaggttgccactggagagtggagagtcggtctccactttgcacagttggagctgttctcctctaactcctttgctgggttttctgtttgaaattggcccctactcctctccagccctttactgggttttctgtttgaaattggcccctactcctccagccctttattgggttttctgtttgaaattggcccctactcctctctccagtgtctgctttttgaatccttctgttcgtgtgtgtgtgtgtgtgtgtgtgtgtgttccctatgatactggcagtggcaataattttccacccagagagaagcttgtggtccacaatgctcgaagaatgaatttccaagtatttgccagtggaaacggagcagaggctatgacaagagtgatttagtgttgcactttcagagctcagaaacacgcagtggttcagcactgagtcatgcttgcttctgctacgcaccgatttgttctattccagttttcacgtacatcgttttggtgacatctctgcgttatcatttatttatatggagtgtattttctccaaaattctctacgagggaatgcacctgctcattacagctgctgtctgtgtattcttcacggcaatggatcaaaccagactcacacagtcttagactaagctgaacactgggaaaaataatacatgcttaaagtctgctgttattctaaaatgaccgatatgacttcaacaaagttgatggatactttctttgactgtctacctgaatttagactaagcagtaaatagtttaataaaagatcactttaatatacaaaaaatataacatcgctactagcttctcttctgcgttcccagtagccacagagactggtcgggcgccagtccagcgctccgcagcggcaggagtccagacagccctgtgagttgcggtgcccaagcacatgtccagggcgtggcgctcacgatcaccgtgggatgggtggtcggctccgctgcgagcgtgggggcgcgcgcctctgcgtggggggttacatcgaggcgtgc

SEQ ID NO: 358966 - DNA, 5239 bp, Homo sapiens
  misc_feature (848)..(848): n is a, c, g, or t
  misc_feature (868)..(868): n is a, c, g, or t
  misc_feature (917)..(917): n is a, c, g, or t
  misc_feature (1210)..(1210): n is a, c, g, or t
  misc_feature (1293)..(1293): n is a, c, g, or t
  misc_feature (1305)..(1305): n is a, c, g, or t
  misc_feature (1338)..(1338): n is a, c, g, or t
  misc_feature (1511)..(1511): n is a, c, g, or t
  misc_feature (1581)..(1581): n is a, c, g, or t
  misc_feature (1645)..(1645): n is a, c, g, or t
atgaatgaatgaatgatagtctcgagctgtttaacttcatctctcttatggtttgcatataagattgtgcagtggggctgggcgcggtggctcacgcctgtaatcacaacactttggaaggccaaggcaggtggatcacctgaggtcaggagttcgagaccagcctggctaacatggtgaatggtgaaaccccatctactaaaaatacaaaaattagccaggcgtggtggtgtgtgcctgtagtcccagctactcgggaggctgaggcaggagaatcacttgaacccagaaggcagaggttgcagtgagctgaggcaggctgcaccattgcactccagcctggacaaaaagagcgaaactccatctcaaaaaaacaaacaaaaaaaagattgtgcagtgtagttgtaagattggggagaccaaactgttaaagcgattattgactggggaactggagatggttgacatactttgtcctcaccaagcccctttcagttccttattcacaatgagccactagtgggtgtacttggttctagtgggtatatgtggttttattcaactatgttagggtggataaaggtttacattattgccgattgtattcatatgaccatttactattccgagtcactacatgcagctaagcttagcagttgctgagtataaagcactgccttgaagccctatagatggcgttagttctgacttctttttaccatgtaagacatcacgtgtgcttgtgctagagaggaactaaagggacagccatttcacgcagtgtaaggctgatttctccttaggtgctccccatatctagaagtatgacctgaatctttgtctactcnatacccattgtcagctccanagttgtggtatcttgctgtatgttgatttagagcctgctcagcagtttngcagataccagctatttctcattggaatgttccgtgttttctctttcctcctaaagtgtgcctcttcactggccagtacttactacgtatcctctgtgaataaggaaataatctttcctatcaagacactagtgaacctgtagtcccagctacttgggaggctgagatgggaggatcccttgacaccaggagttagaggctgtgatgagctatgatcatactgctgcgtagaccctgtctcttttttttttctttttttaaggggagggggggtgacactaatgagaaaaacnggactactgtgatgaatacaaataagcatatacttgatggaaaaatataaatctagttttctcacgggattgtgaaggagcgncaaggagaaacntaatttttctagctaagaagagggccttaaacnctagctatgagaagctaagtcctgtatgattttggattggcctggacttagcaacagcaccatgatgtagagtggtatgtgtggtacatgtggttgattctatcacttatgcttagtaactaaacaggtctaagaggtatttacatgtggttgattctatcacttatgcttantaactaaacaggtctaagaggtatttcattcagcaaatgctatatttgccagttaaacaatctttcatcngtaagtgatttggttctaaaaaatgcattcaggctgaggctgtgtgacacttacatacctcaangctaaagagtttccattgtgcaaaaacctggtcctcttactgcatgtgatgactaccctgcagcttgagtgggagagtgcgtattaacatggtttcaccaactaaagctcctggctgaggcttgcatttctcaccaaagattttattcttgaattgcgaatgttacattttttattttgtcaaactagatggtatgtttttcctctaatatgtcttccctcacaacaccacacatgaaaatgagtcctctgaaaaggacagcctgtagtatagtgtcttccatgcttatgttcttaactaaatctcaaccttgggatgcattcaaagaaaagtaaaagacacatgttttttactctggggtcttctctctgcaggtggagcagttctggaggttttatagccacatggtacgtcctggggacctgacaggccacagtgacttccatctcttcaaagaaggaattaaacccatgtgggaggatgatgcaaataaaaatggtggcaagtggattattcggctgcggaagggcttggcctcccgttgctgggagaatctcattttggccatgctgggggaacagttcatggttggggaggagatctgtggggctgtggtgtctgtccgctttcaggaagacattatttcaatatggaataagactgccagtgaccaagcaaccacagcccgaatccgggacacacttcggcgagtgcttaacctacctcccaacaccattatggaatacaaaactcacaccgacagcatcaaggcctgggaggagtttcatggcctggtgaacagcatgcggccgctgatcggacgctccccctctgtctctcacactcaggggacaattcaagctttcgaaatacaaaaatcacattgtgagagtacacaagctggcaataatccttttctgtatgtgtgtgtttgtccgaaatggatgggaggcctccagccagtccttccattgctcactgaagggacgtccctgagccgtgcgctctccttttgcactcattcctggaggacggattccgctagacaccctccagcatcgctgactttataaagcggaaaaacggaaaacgtgactttgtaatagacaaacattgttttttaatggggttccatgggggggcgttcagcctttctgtttgctgtgtgctgtccagatgcctcttgggcgtcctgttgttctcttcccgtgttgtacgaagggtaccgtggccacgtgtacatgccagagctgttgatgagagttaccagtattatgaatgtctgtgcatccaggaaaagtgttctgttggagagtcccaaaatagctgtaaatgctctcttctagctctgccattaaattattgggacattttgtttctttctctcccctcctccaagcccaccactttctgaagctgtgttactgatgtgatgactgtccaggattttgtatcatcccctgccttatgccctccggtctcctctcctgtgggactctctccttcttaggcacagctgcacttagaattgtaatccagtggctctcactggtttcactgaggcagcttagagggaatgccttagtaaactgaactggagcagaatctagtttgattaggagctagattataatctaggttccaagtacagaatttggagctaaggactgtgactgaaatcattttcccatatgagcagaccctgtgtgtcaggcctgtttcccatatgagcagagcctgtgtgcaagtctgtttctggcatgtccctcattgaggaagggaagcaaaagctggttattgccaggcctattaacacttaatatgcaaattctatcatcctgaaactggggcatctgaggaaaaggtgaccttgctggatggctttatttgcatggctctgcctgtctgcagtggttgagtcctcatcacctggtatgtgtatgagcaaatgtgtgctgatcgtgatgcccaggcagaaacctcttgaagactgctgcaggcatgctttaaaaatgaccagtcactcatcagagaagctgggtgatctgactccagaaggactgaagtcagagaagtcacaagagcacctaggattcaaataaatagcgtcagagtcctatagcaacctccaagtagcaccgtcttacttggctcttgtgagcaaagactgcagtaccttaaattaaggcctctctttaaaacatatgtggaagactaggggatccttggccacctggtctcagagaaatcatatgagagtaacaggcatttccttattgtatttgtactacactcttcctacttttccattcctgaacaccctctaattaccactgttttgggggatgctttttttctgaaagaacggggagtacaggggccaaaagggaggtgcttctattacagggcaagttagatcagataagaagatctagcagtgatttaaactccaggaatatgaagagtgcattctggtgtccagacagttgtgaagggctcggcaaatataagagcaccattggctacatggagagcaaaggctgtctttgaagaccccagggaggtcttcacttttgcctaaattcagatttgccgtgaaaattccaaagagagcagatatttggatttgccctcctttgggcatctacctgactgttgtgtgtgtgggaaagtcagtgtgtatgtgtagagtgtgcttaggagtgagtgagtggtcaggcctcctggctaggtgtgttgtccatagttttgttgttgttgttgttgttgttcagagttttgaatcttacgttttctagagctgctcatgttttcccttcctttttgtcgttgtagtatttgacagttgtcttttccatcaaaaacatactggccctaggctggttagagcaaggggttatgcctgttaggcagcatcttacgcccagtgttctcccagatattctgcctaacaggtttaagtaggagattaaatagtcagtttatctaaaccctctatttttccaaactagcttgagaggtcttttcatctatttttactccatgggcctctgatatgctgagatgtggcacggttatgattatggtatcaccgttacagaggcaaagggataaaggtctaccagggccaacgtaaccagaatgtgaggagagtgaagagtcggtctccgctttgcacagtaccagaatgtgaggttgccactggagagtggagagtcggtctccactttgcacagttggagctgttctcctctaactcctttgctgggttttctgtttgaaattggcccctactcctctccagccctttactgggttttctgtttgaaattggcccctactcctctccagtgtctgctttttgaatccttctgttcgtgtgtgtgtgtgtgtgtgtgtgtgtgttccctatgatactggcagtggcaataattttccacccagagagaagcttgtggtccacaatgctcgaagaatgaatttccaagtatttgccagtggaaacggagcagaggctatgacaagagtgatttagtgttgcactttcagagcaattatctactgcagtaataaattgaaaatatcagcaagaac

SEQ ID NO: 358967 - DNA, 1321 bp, Homo sapiens
cgctggggctggggcggcgcaaaccctgcggcaccggcttccctgctgggatccggctgcgggacctggcctggactggcggggaggagggggctggggagcaatggataccggagtcccggagaccccagggccgtccgaaccgagggcgaagagctgggcccgggggaggggtggctgtgccgcccggtagggggagattttcggacgccccgccctggtggatgcggattgcctgcgacgtggaggggtggggacctcggcggtttgggtgtttccgcagtctggcagcgctgcctctgaatccagctttccccacacactccctctcccctctgagcctcagttttctcatctgcagagtggggacggtaacaccctttgtcgtagagtttggaggatgcaatgagtttgaaagatgatgacagtggggaccatgatcagaatgaagaaaacagcacacagaaagatggtgagaaggaaaaaacggaacgagacaagaatcagagcagtagcaagagaaaggctgttgtccctggaccggcagagcatcccctgcagtacaactacactttttggtactccaggagaacccccggccgtcccacgagctcacagagctatgaacagaatatcaaacagattggcacctttgcctctgtggagcagttctggaggttttatagccacatggtacgtcctggggacctgacaggccacagtgacttccatctcttcaaagaaggaattaaacccatgtgggaggatgatgcaaataaaaatggtggcaagtggattattcggctgcggaagggcttggcctcccgttgctgggagaatctcattttggccatgctgggggaacagttcatggttggggaggagatctgtggggctgtggtgtctgtccgctttcaggaagacattatttcaatatggaataagactgccagtgaccaagcaaccacagcccgaatccgggacacacttcggcgagtgcttaacctacctcccaacaccattatggaatacaaaactcacaccgacagcatcaaaatgccaggcaggctgggcccccaaaggctcctttttcaaaacctctggaagccgcggttgaatgtgccatgaccctctccctctctggatggcaccatcattgaagctggcgtcatcggagtctcttgttctgttggcgtgctacctggaagatccttctgtcctggacaagaggaattggaagagcattttatgttttaagaacaggctgacacgcagcagctacaacaacagctgagatcacttaataaatggtgctaaacta

SEQ ID NO: 358968 - DNA, 2816 bp, Homo sapiens
aacttaggcatagtgcgaggccgggggtgaatcggcaccgaggcgctccccctctgtctctcacactcaggggacaattcaagctttcgaaatacaaaaatcacattgtgagagtacacaagctggcaataatccttttctgtatgtgtgtgtttgtccgaaatggatgggaggcctccagccagtccttccattgctcactgaagggacgtccctgagccgtgcgctctccttttgcactcattcctggaggacggattccgctagacaccctccagcatcgctgactttataaagcggaaaaacggaaaacgtgactttgtaatagacaaacattgttttttaatggggttccatgggggggcgttcagcctttctgtttgctgtgtgctgtccagatgcctcttgggcgtcctgttgttctcttcccgtgttgtacgaagggtaccgtggccacgtgtacatgccagagctgttgatgagagttaccagtattatgaatgtctgtgcatccaggaaaagtgttctgttggagagtcccaaaatagctgtaaatgctctcttctagctctgccattaaattattgggacattttgtttctttctctcccctcctccaagcccaccactttctgaagctgtgttactgatgtgatgactgtccaggattttgtatcatcccctgccttatgccctccggtctcctctcctgtgggactctctccttcttaggcacagctgcacttagaattgtaatccagtggctctcactggtttcactgaggcagcttagagggaatgccttagtaaactgaactggagcagaatctagtttgattaggagctagattataatctaggttccaagtacagaatttggagctaaggactgtgactgaaatcattttcccatatgagcagaccctgtgtgtcaggcctgtttcccatatgagcagagcctgtgtgcaagtctgtttctggcatgtccctcattgaggaagggaagcaaaagctggttattgccaggcctattaacacttaatatgcaaattctatcatcctgaaactggggcatctgaggaaaaggtgaccttgctggatggctttatttgcatggctctgcctgtctgcagtggttgagtcctcatcacctggtatgtgtatgagcaaatgtgtgctgatcgtgatgcccaggcagaaacctcttgaagactgctgcaggcatgctttaaaaatgaccagtcactcatcagagaagctgggtgatctgactccagaaggactgaagtcagagaagtcacaagagcacctaggattcaaataaatagcgtcagagtcctatagcaacctccaagtagcaccgtcttacttggctcttgtgagcaaagactgcagtaccttaaattaaggcctctctttaaaacatatgtggaagactaggggatccttggccacctggtctcagagaaatcatatgagagtaacaggcatttccttattgtatttgtactacactcttcctacttttccattcctgaacaccctctaattaccactgttttgggggatgctttttttctgaaagaacggggagtacaggggccaaaagggaggtgcttctattacagggcaagttagatcagataagaagatctagcagtgatttaaactccaggaatatgaagagtgcattctggtgtccagacagttgtgaagggctcggcaaatataagagcaccattggctacatggagagcaaaggctgtctttgaagaccccagggaggtcttcacttttgcctaaattcagatttgccgtgaaaattccaaagagagcagatatttggatttgccctcctttgggcatctacctgactgttgtgtgtgtgggaaagtcagtgtgtatgtgtagagtgtgcttaggagtgagtgagtggtcaggcctcctggctaggtgtgttgtccatagttttgttgttgttgttgttgttgttcagagttttgaatcttacgttttctagagctgctcatgttttcccttcctttttgtcgttgtagtatttgacagttgtcttttccatcaaaaacatactggccctaggctggttagagcaaggggttatgcctgttaggcagcatcttacgcccagtgttctcccagatattctgcctaacaggtttaagtaggagattaaatagtcagtttatctaaaccctctatttttccaaactagcttgagaggtcttttcatctatttttactccatgggcctctgatatgctgagatgtggcacggttatgattatggtatcaccgttacagaggcaaagggataaaggtctaccagggccaacgtaaccagaatgtgaggagagtgaagagtcggtctccgctttgcacagtaccagaatgtgaggttgccactggagagtggagagtcggtctccactttgcacagttggagctgttctcctctaactcctttgctgggttttctgtttgaaattggcccctactcctctccagccctttactgggttttctgtttgaaattggcccctactcctctccagtgtctgctttttgaatccttctgttcgtgtgtgtgtgtgtgtgtgtgtgtgtgttccctatgatactggcagtggcaataattttccacccagagagaagcttgtggtccacaatgctcgaagaatgaatttccaagtatttgccagtggaaacggagcagaggctatgacaagagtgatttagtgttgcactttcagagcaattatctactgcagtaataaattgaaaatatcagcaagaac

SEQ ID NO: 358969 - DNA, 359 bp, Homo sapiens
ccgaggtcgcgccactgcactccagcctggcaacagagtgagactccgtttcaaaaaaacaaacaaagaaatatcaaagcaatcactaattcatttattctacaatattgagtaaccctccaagggtaagccattttatgctagatgctaagaggacacaaaggtgaatgagactgtggaaggggcttacgtttaatagtaccaataataatactgacatctgttgtgcacgtactctgtgccaggcactgtgctcagcattgtatatccactgattcatttgatcctctcagcagtattgggagatggttgttacaattttcctcattttgcgggtaagaagatgaggcacaaacagg

SEQ ID NO: 358970 - DNA, 2099 bp, Homo sapiens
ctttcttatcattcgtgtgttcattggagtagcacttttaacttccttcaagaacttttcctttgcatttacaacttggctaactgtttgccgcaggaggcctagccttcggcctatctcggcttttgacataccttcctcactcagtttaatcatttctagtttttgatttaaagtgagagatgtgcgactcttcctttcacttgagcacttagaggccattgcagagtcattaattcgcctaatctcaatattgttgtgtctcagggaatagggaggcccaagaagagggagagagatggggaacggtctgtgggtggagcggtcagaacacacacaacattaagttccacgtcttataaaagacgctgtatgtggcaccccaaaacaatgacaatagcaacatcaaagatcactgatcatagatcaccataacagacacagaaatcatgaaaaagttttaaatattttgagaattaccaaaatgtaacacagagacaccaagtgagcacatgctgttggaaaaatggcgctgatacaattgctggactcagggctgccacaaaccctccatttgttttcagaatgccctatctgcgaagcgtaataaaacgaggtatgccatagtacagtggcgccgcgaccgacaaaggaaagcctccgggaggtcaaaagagataccagagagtgcgtcccgcactggaggaagaggaaggtttttaccaagcagcgagtccagagcccgcgccgtcaacgacgcggtgctgccttttttccgagccgctgcgggagggggccaggacacgctcccttaggagagcgggcgggtcacaaggacctggacagaggcagaactgaggccagcagccagctccgccgctgagtccagccctctgcgcagccgccctgagctggcgtcccgagatagccgcttccaaaccgggcctgcgcgccgacgttccgctgcgccccgcgcaaaaccggaagtacccgggcccaaggctgagggacccggtggagcggaagtcactccctgaggcagtggcgacagcggcggcgagaggatgaacaacaagttcgacgctttgaaagatgatgacagtggggaccatgatcagaatgaagaaaacagcacacagaaagatggtgagaaggaaaaaacggaacgagacaagaatcagagcagtagcaagagaaaggctgttgtccctggaccggcagagcatcccctgcagtacaactacactttttggtactccaggagaacccccggccgtcccacgagctcacagagctatgaacagaatatcaaacagattggcacctttgcctctgtggagcagttctggaggttttatagccacatggtacgtcctggggacctgacaggccacagtgacttccatctcttcaaagaaggaattaaacccatgtgggaggatgatgcaaataaaaatggtggcaagtggattattcggctgcggaagggcttggcctcccgttgctgggagaatctcattttggccatgctgggggaacagttcatggttggggaggagatctgtggggctgtggtgtctgtccgctttcaggaagacattatttcaatatggaataagactgccagtgaccaagcaaccacagcccgaatccgggacacacttcggcgagtgcttaacctacctcccaacaccattatggaatacaaaactcacaccgacagcatcaaaatgccaggcaggctgggcccccaaaggctcctttttcaaaacctctggaagccgcggttgaatgtgccatgaccctctccctctctggatggcaccatcattgaagctggcgtcatcggagtctcttgttctgttggcgtgctacctggaagatccttctgtcctggacaagaggaattggaagagcattttatgttttaagaacaggctgacacgcagcagctacaacaacagctgagatcacttaataaatggtgctaaactaacacacacacacacaacaaccccacccacaccccccaacaccaccccaccacgcccccccacccaaccacaccccccacccacccacaaccaacacaccccccc

SEQ ID NO: 358971 - DNA, 4554 bp, Homo sapiens
ctttcttatcattcgtgtgttcattggagtagcacttttaacttccttcaagaacttttcctttgcatttacaacttggctaactgtttgccgcaggaggcctagccttcggcctatctcggcttttgacataccttcctcactcagtttaatcatttctagtttttgatttaaagtgagagatgtgcgactcttcctttcacttgagcacttagaggccattgcagagtcattaattcgcctaatctcaatattgttgtgtctcagggaatagggaggcccaagaagagggagagagatggggaacggtctgtgggtggagcggtcagaacacacacaacattaagttccacgtcttataaaagacgctgtatgtggcaccccaaaacaatgacaatagcaacatcaaagatcactgatcatagatcaccataacagacacagaaatcatgaaaaagttttaaatattttgagaattaccaaaatgtaacacagagacaccaagtgagcacatgctgttggaaaaatggcgctgatacaattgctggactcagggctgccacaaaccctccatttgttttcagaatgccctatctgcgaagcgtaataaaacgaggtatgccatagtacagtggcgccgcgaccgacaaaggaaagcctccgggaggtcaaaagagataccagagagtgcgtcccgcactggaggaagaggaaggtttttaccaagcagcgagtccagagcccgcgccgtcaacgacgcggtgctgccttttttccgagccgctgcgggagggggccaggacacgctcccttaggagagcgggcgggtcacaaggacctggacagaggcagaactgaggccagcagccagctccgccgctgagtccagccctctgcgcagccgccctgagctggcgtcccgagatagccgcttccaaaccgggcctgcgcgccgacgttccgctgcgccccgcgcaaaaccggaagtacccgggcccaaggctgagggacccggtggagcggaagtcactccctgaggcagtggcgacagcggcggcgagaggatgaacaacaagttcgacgctttgaaagatgatgacagtggggaccatgatcagaatgaagaaaacagcacacagaaagatggtgagaaggaaaaaacggaacgagacaagaatcagagcagtagcaagagaaaggctgttgtccctggaccggcagagcatcccctgcagtacaactacactttttggtactccaggagaacccccggccgtcccacgagctcacagagctatgaacagaatatcaaacagattggcacctttgcctctgtggagcagttctggaggttttatagccacatggtacgtcctggggacctgacaggccacagtgacttccatctcttcaaagaaggaattaaacccatgtgggaggatgatgcaaataaaaatggtggcaagtggattattcggctgcggaagggcttggcctcccgttgctgggagaatctcattttggccatgctgggggaacagttcatggttggggaggagatctgtggggctgtggtgtctgtccgctttcaggaagacattatttcaatatggaataagactgccagtgaccaagcaaccacagcccgaatccgggacacacttcggcgagtgcttaacctacctcccaacaccattatggaatacaaaactcacaccgacagcatcaaggcctgggaggagtttcatggcctggtgaacagcatgcggccgctgatcggacgctccccctctgtctctcacactcaggggacaattcaagctttcgaaatacaaaaatcacattgtgagagtacacaagctggcaataatccttttctgtatgtgtgtgtttgtccgaaatggatgggaggcctccagccagtccttccattgctcactgaagggacgtccctgagccgtgcgctctccttttgcactcattcctggaggacggattccgctagacaccctccagcatcgctgactttataaagcggaaaaacggaaaacgtgactttgtaatagacaaacattgttttttaatggggttccatgggggggcgttcagcctttctgtttgctgtgtgctgtccagatgcctcttgggcgtcctgttgttctcttcccgtgttgtacgaagggtaccgtggccacgtgtacatgccagagctgttgatgagagttaccagtattatgaatgtctgtgcatccaggaaaagtgttctgttggagagtcccaaaatagctgtaaatgctctcttctagctctgccattaaattattgggacattttgtttctttctctcccctcctccaagcccaccactttctgaagctgtgttactgatgtgatgactgtccaggattttgtatcatcccctgccttatgccctccggtctcctctcctgtgggactctctccttcttaggcacagctgcacttagaattgtaatccagtggctctcactggtttcactgaggcagcttagagggaatgccttagtaaactgaactggagcagaatctagtttgattaggagctagattataatctaggttccaagtacagaatttggagctaaggactgtgactgaaatcattttcccatatgagcagaccctgtgtgtcaggcctgtttcccatatgagcagagcctgtgtgcaagtctgtttctggcatgtccctcattgaggaagggaagcaaaagctggttattgccaggcctattaacacttaatatgcaaattctatcatcctgaaactggggcatctgaggaaaaggtgaccttgctggatggctttatttgcatggctctgcctgtctgcagtggttgagtcctcatcacctggtatgtgtatgagcaaatgtgtgctgatcgtgatgcccaggcagaaacctcttgaagactgctgcaggcatgctttaaaaatgaccagtcactcatcagagaagctgggtgatctgactccagaaggactgaagtcagagaagtcacaagagcacctaggattcaaataaatagcgtcagagtcctatagcaacctccaagtagcaccgtcttacttggctcttgtgagcaaagactgcagtaccttaaattaaggcctctctttaaaacatatgtggaagactaggggatccttggccacctggtctcagagaaatcatatgagagtaacaggcatttccttattgtatttgtactacactcttcctacttttccattcctgaacaccctctaattaccactgttttgggggatgctttttttctgaaagaacggggagtacaggggccaaaagggaggtgcttctattacagggcaagttagatcagataagaagatctagcagtgatttaaactccaggaatatgaagagtgcattctggtgtccagacagttgtgaagggctcggcaaatataagagcaccattggctacatggagagcaaaggctgtctttgaagaccccagggaggtcttcacttttgcctaaattcagatttgccgtgaaaattccaaagagagcagatatttggatttgccctcctttgggcatctacctgactgttgtgtgtgtgggaaagtcagtgtgtatgtgtagagtgtgcttaggagtgagtgagtggtcaggcctcctggctaggtgtgttgtccatagttttgttgttgttgttgttgttgttcagagttttgaatcttacgttttctagagctgctcatgttttcccttcctttttgtcgttgtagtatttgacagttgtcttttccatcaaaaacatactggccctaggctggttagagcaaggggttatgcctgttaggcagcatcttacgcccagtgttctcccagatattctgcctaacaggtttaagtaggagattaaatagtcagtttatctaaaccctctatttttccaaactagcttgagaggtcttttcatctatttttactccatgggcctctgatatgctgagatgtggcacggttatgattatggtatcaccgttacagaggcaaagggataaaggtctaccagggccaacgtaaccagaatgtgaggagagtgaagagtcggtctccgctttgcacagtaccagaatgtgaggttgccactggagagtggagagtcggtctccactttgcacagttggagctgttctcctctaactcctttgctgggttttctgtttgaaattggcccctactcctctccagccctttactgggttttctgtttgaaattggcccctactcctctccagtgtctgctttttgaatccttctgttcgtgtgtgtgtgtgtgtgtgtgtgtgtgttccctatgatactggcagtggcaataattttccacccagagagaagcttgtggtccacaatgctcgaagaatgaatttccaagtatttgccagtggaaacggagcagaggctatgacaagagtgatttagtgttgcactttcagagcaattatctactgcagtaataaattgaaaatatcagcaagaac

SEQ ID NO: 358972 - DNA, 4474 bp, Homo sapiens
ctttcttatcattcgtgtgttcattggagtagcacttttaacttccttcaagaacttttcctttgcatttacaacttggctaactgtttgccgcaggaggcctagccttcggcctatctcggcttttgacataccttcctcactcagtttaatcatttctagtttttgatttaaagtgagagatgtgcgactcttcctttcacttgagcacttagaggccattgcagagtcattaattcgcctaatctcaatattgttgtgtctcagggaatagggaggcccaagaagagggagagagatggggaacggtctgtgggtggagcggtcagaacacacacaacattaagttccacgtcttataaaagacgctgtatgtggcaccccaaaacaatgacaatagcaacatcaaagatcactgatcatagatcaccataacagacacagaaatcatgaaaaagttttaaatattttgagaattaccaaaatgtaacacagagacaccaagtgagcacatgctgttggaaaaatggcgctgatacaattgctggactcagggctgccacaaaccctccatttgttttcagaatgccctatctgcgaagcgtaataaaacgaggtatgccatagtacagtggcgccgcgaccgacaaaggaaagcctccgggaggtcaaaagagataccagagagtgcgtcccgcactggaggaagaggaaggtttttaccaagcagcgagtccagagcccgcgccgtcaacgacgcggtgctgccttttttccgagccgctgcgggagggggccaggacacgctcccttaggagagcgggcgggtcacaaggacctggacagaggcagaactgaggccagcagccagctccgccgctgagtccagccctctgcgcagccgccctgagctggcgtcccgagatagccgcttccaaaccgggcctgcgcgccgacgttccgctgcgccccgcgcaaaaccggaagtacccgggcccaaggctgagggacccggtggagcggaagtcactccctgaggcagtggcgacagcggcggcgagaggatgaacaacaagttcgacgctttgaaagatgatgacagtggggaccatgatcagaatgaagaaaacagcacacagaaagatggtgagaaggaaaaaacggaacgagacaagaatcagagcagtagcaagagaaaggctgttgtccctggaccggcagagcatcccctgcagtacaactacactttttggtactccaggagaacccccggccgtcccacgagctcacagagctatgaacagaatatcaaacagattggcacctttgcctctgtggagcagttctggaggttttatagccacatggtacgtcctggggacctgacaggccacagtgacttccatctcttcaaagaaggaattaaacccatgtgggaggatgatgcaaataaaaatggtggcaagtggattattcggctgcggaagggcttggcctcccgttgctgggagaatctcattttggccatgctgggggaacagttcatggttggggaggagatctgtggggctgtggtgtctgtccgctttcaggaagacattatttcaatatggaataagactgccagtgaccaagcaaccacagcccgaatccgggacacacttcggcgagtgcttaacctacctcccaacaccattatggaatacaaaactcacaccgacagcatcaaggacaattcaagctttcgaaatacaaaaatcacattgtgagagtacacaagctggcaataatccttttctgtatgtgtgtgtttgtccgaaatggatgggaggcctccagccagtccttccattgctcactgaagggacgtccctgagccgtgcgctctccttttgcactcattcctggaggacggattccgctagacaccctccagcatcgctgactttataaagcggaaaaacggaaaacgtgactttgtaatagacaaacattgttttttaatggggttccatgggggggcgttcagcctttctgtttgctgtgtgctgtccagatgcctcttgggcgtcctgttgttctcttcccgtgttgtacgaagggtaccgtggccacgtgtacatgccagagctgttgatgagagttaccagtattatgaatgtctgtgcatccaggaaaagtgttctgttggagagtcccaaaatagctgtaaatgctctcttctagctctgccattaaattattgggacattttgtttctttctctcccctcctccaagcccaccactttctgaagctgtgttactgatgtgatgactgtccaggattttgtatcatcccctgccttatgccctccggtctcctctcctgtgggactctctccttcttaggcacagctgcacttagaattgtaatccagtggctctcactggtttcactgaggcagcttagagggaatgccttagtaaactgaactggagcagaatctagtttgattaggagctagattataatctaggttccaagtacagaatttggagctaaggactgtgactgaaatcattttcccatatgagcagaccctgtgtgtcaggcctgtttcccatatgagcagagcctgtgtgcaagtctgtttctggcatgtccctcattgaggaagggaagcaaaagctggttattgccaggcctattaacacttaatatgcaaattctatcatcctgaaactggggcatctgaggaaaaggtgaccttgctggatggctttatttgcatggctctgcctgtctgcagtggttgagtcctcatcacctggtatgtgtatgagcaaatgtgtgctgatcgtgatgcccaggcagaaacctcttgaagactgctgcaggcatgctttaaaaatgaccagtcactcatcagagaagctgggtgatctgactccagaaggactgaagtcagagaagtcacaagagcacctaggattcaaataaatagcgtcagagtcctatagcaacctccaagtagcaccgtcttacttggctcttgtgagcaaagactgcagtaccttaaattaaggcctctctttaaaacatatgtggaagactaggggatccttggccacctggtctcagagaaatcatatgagagtaacaggcatttccttattgtatttgtactacactcttcctacttttccattcctgaacaccctctaattaccactgttttgggggatgctttttttctgaaagaacggggagtacaggggccaaaagggaggtgcttctattacagggcaagttagatcagataagaagatctagcagtgatttaaactccaggaatatgaagagtgcattctggtgtccagacagttgtgaagggctcggcaaatataagagcaccattggctacatggagagcaaaggctgtctttgaagaccccagggaggtcttcacttttgcctaaattcagatttgccgtgaaaattccaaagagagcagatatttggatttgccctcctttgggcatctacctgactgttgtgtgtgtgggaaagtcagtgtgtatgtgtagagtgtgcttaggagtgagtgagtggtcaggcctcctggctaggtgtgttgtccatagttttgttgttgttgttgttgttgttcagagttttgaatcttacgttttctagagctgctcatgttttcccttcctttttgtcgttgtagtatttgacagttgtcttttccatcaaaaacatactggccctaggctggttagagcaaggggttatgcctgttaggcagcatcttacgcccagtgttctcccagatattctgcctaacaggtttaagtaggagattaaatagtcagtttatctaaaccctctatttttccaaactagcttgagaggtcttttcatctatttttactccatgggcctctgatatgctgagatgtggcacggttatgattatggtatcaccgttacagaggcaaagggataaaggtctaccagggccaacgtaaccagaatgtgaggagagtgaagagtcggtctccgctttgcacagtaccagaatgtgaggttgccactggagagtggagagtcggtctccactttgcacagttggagctgttctcctctaactcctttgctgggttttctgtttgaaattggcccctactcctctccagccctttactgggttttctgtttgaaattggcccctactcctctccagtgtctgctttttgaatccttctgttcgtgtgtgtgtgtgtgtgtgtgtgtgtgttccctatgatactggcagtggcaataattttccacccagagagaagcttgtggtccacaatgctcgaagaatgaatttccaagtatttgccagtggaaacggagcagaggctatgacaagagtgatttagtgttgcactttcagagcaattatctactgcagtaataaattgaaaatatcagcaagaac

SEQ ID NO: 358973 - DNA, 5134 bp, Homo sapiens
ctttcttatcattcgtgtgttcattggagtagcacttttaacttccttcaagaacttttcctttgcatttacaacttggctaactgtttgccgcaggaggcctagccttcggcctatctcggcttttgacataccttcctcactcagtttaatcatttctagtttttgatttaaagtgagagatgtgcgactcttcctttcacttgagcacttagaggccattgcagagtcattaattcgcctaatctcaatattgttgtgtctcagggaatagggaggcccaagaagagggagagagatggggaacggtctgtgggtggagcggtcagaacacacacaacattaagttccacgtcttataaaagacgctgtatgtggcaccccaaaacaatgacaatagcaacatcaaagatcactgatcatagatcaccataacagacacagaaatcatgaaaaagttttaaatattttgagaattaccaaaatgtaacacagagacaccaagtgagcacatgctgttggaaaaatggcgctgatacaattgctggactcagggctgccacaaaccctccatttgttttcagaatgccctatctgcgaagcgtaataaaacgaggtatgccatagtacagtggcgccgcgaccgacaaaggaaagcctccgggaggtcaaaagagataccagagagtgcgtcccgcactggaggaagaggaaggtttttaccaagcagcgagtccagagcccgcgccgtcaacgacgcggtgctgccttttttccgagccgctgcgggagggggccaggacacgctcccttaggagagcgggcgggtcacaaggacctggacagaggcagaactgaggccagcagccagctccgccgctgagtccagccctctgcgcagccgccctgagctggcgtcccgagatagccgcttccaaaccgggcctgcgcgccgacgttccgctgcgccccgcgcaaaaccggaagtacccgggcccaaggctgagggacccggtggagcggaagtcactccctgaggcagtggcgacagcggcggcgagaggatgaacaacaagttcgacgctttgaaagatgatgacagtggggaccatgatcagaatgaagaaaacagcacacagaaagatggtgagaaggaaaaaacggaacgagacaagaatcagagcagtagcaagagaaaggctgttgtccctggaccggcagagcatcccctgcagtacaactacactttttggtactccaggagaacccccggccgtcccacgagctcacagagctatgaacagaatatcaaacagattggcacctttgcctctgtggagcagttctggaggttttatagccacatggtacgtcctggggacctgacaggccacagtgacttccatctcttcaaagaaggaattaaacccatgtgggaggatgatgcaaataaaaatggtggcaagtggattattcggctgcggaagggcttggcctcccgttgctgggagaatctcattttggccatgctgggggaacagttcatggttggggaggagatctgtggggctgtggtgtctgtccgctttcaggaagacattatttcaatatggaataagactgccagtgaccaagcaaccacagcccgaatccgggacacacttcggcgagtgcttaacctacctcccaacaccattatggaatacaaaactcacaccgacagcatcaaggcctgggaggagtttcatggcctggtgaacagcatgcggccgctgatcggacgctccccctctgtctctcacactcaggggacaattcaagctttcgaaatacaaaaatcacattgtgagagtacacaagctggcaataatccttttctgtatgtgtgtgtttgtccgaaatggatgggaggcctccagccagtccttccattgctcactgaagggacgtccctgagccgtgcgctctccttttgcactcattcctggaggacggattccgctagacaccctccagcatcgctgactttataaagcggaaaaacggaaaacgtgactttgtaatagacaaacattgttttttaatggggttccatgggggggcgttcagcctttctgtttgctgtgtgctgtccagatgcctcttgggcgtcctgttgttctcttcccgtgttgtacgaagggtaccgtggccacgtgtacatgccagagctgttgatgagagttaccagtattatgaatgtctgtgcatccaggaaaagtgttctgttggagagtcccaaaatagctgtaaatgctctcttctagctctgccattaaattattgggacattttgtttctttctctcccctcctccaagcccaccactttctgaagctgtgttactgatgtgatgactgtccaggattttgtatcatcccctgccttatgccctccggtctcctctcctgtgggactctctccttcttaggcacagctgcacttagaattgtaatccagtggctctcactggtttcactgaggcagcttagagggaatgccttagtaaactgaactggagcagaatctagtttgattaggagctagattataatctaggttccaagtacagaatttggagctaaggactgtgactgaaatcattttcccatatgagcagaccctgtgtgtcaggcctgtttcccatatgagcagagcctgtgtgcaagtctgtttctggcatgtccctcattgaggaagggaagcaaaagctggttattgccaggcctattaacacttaatatgcaaattctatcatcctgaaactggggcatctgaggaaaaggtgaccttgctggatggctttatttgcatggctctgcctgtctgcagtggttgagtcctcatcacctggtatgtgtatgagcaaatgtgtgctgatcgtgatgcccaggcagaaacctcttgaagactgctgcaggcatgctttaaaaatgaccagtcactcatcagagaagctgggtgatctgactccagaaggactgaagtcagagaagtcacaagagcacctaggattcaaataaatagcgtcagagtcctatagcaacctccaagtagcaccgtcttacttggctcttgtgagcaaagactgcagtaccttaaattaaggcctctctttaaaacatatgtggaagactaggggatccttggccacctggtctcagagaaatcatatgagagtaacaggcatttccttattgtatttgtactacactcttcctacttttccattcctgaacaccctctaattaccactgttttgggggatgctttttttctgaaagaacggggagtacaggggccaaaagggaggtgcttctattacagggcaagttagatcagataagaagatctagcagtgatttaaactccaggaatatgaagagtgcattctggtgtccagacagttgtgaagggctcggcaaatataagagcaccattggctacatggagagcaaaggctgtctttgaagaccccagggaggtcttcacttttgcctaaattcagatttgccgtgaaaattccaaagagagcagatatttggatttgccctcctttgggcatctacctgactgttgtgtgtgtgggaaagtcagtgtgtatgtgtagagtgtgcttaggagtgagtgagtggtcaggcctcctggctaggtgtgttgtccatagttttgttgttgttgttgttgttgttcagagttttgaatcttacgttttctagagctgctcatgttttcccttcctttttgtcgttgtagtatttgacagttgtcttttccatcaaaaacatactggccctaggctggttagagcaaggggttatgcctgttaggcagcatcttacgcccagtgttctcccagatattctgcctaacaggtttaagtaggagattaaatagtcagtttatctaaaccctctatttttccaaactagcttgagaggtcttttcatctatttttactccatgggcctctgatatgctgagatgtggcacggttatgattatggtatcaccgttacagaggcaaagggataaaggtctaccagggccaacgtaaccagaatgtgaggagagtgaagagtcggtctccgctttgcacagtaccagaatgtgaggttgccactggagagtggagagtcggtctccactttgcacagttggagctgttctcctctaactcctttgctgggttttctgtttgaaattggcccctactcctctccagccctttactgggttttctgtttgaaattggcccctactcctctccagtgtctgctttttgaatccttctgttcgtgtgtgtgtgtgtgtgtgtgtgtgtgttccctatgatactggcagtggcaataattttccacccagagagaagcttgtggtccacaatgctcgaagaatgaatttccaagtatttgccagtggaaacggagcagaggctatgacaagagtgatttagtgttgcactttcagagctcagaaacacgcagtggttcagcactgagtcatgcttgcttctgctacgcaccgatttgttctattccagttttcacgtacatcgttttggtgacatctctgcgttatcatttatttatatggagtgtattttctccaaaattctctacgagggaatgcacctgctcattacagctgctgtctgtgtattcttcacggcaatggatcaaaccagactcacacagtcttagactaagctgaacactgggaaaaataatacatgcttaaagtctgctgttattctaaaatgaccgatatgacttcaacaaagttgatggatactttctttgactgtctacctgaatttagactaagcagtaaatagtttaataaaagatcactttaatatacaaaaaatataacatcgctactagcttctcttctgcgttcccagtagccacagagactggtcgggcgccagtccagcgctccgcagcggcaggagtccagacagccctgtgagttgcggtgcccaagcacatgtccagggcgtggcgctcacgatcaccgtgggatgggtggtcggctccgctgcgagcgtgggggcgcgcgcctctgcgtggggggttacatcgaggcgtgc

SEQ ID NO: 358974 - DNA, 4601 bp, Homo sapiens
ctttcttatcattcgtgtgttcattggagtagcacttttaacttccttcaagaacttttcctttgcatttacaacttggctaactgtttgccgcaggaggcctagccttcggcctatctcggcttttgacataccttcctcactcagtttaatcatttctagtttttgatttaaagtgagagatgtgcgactcttcctttcacttgagcacttagaggccattgcagagtcattaattcgcctaatctcaatattgttgtgtctcagggaatagggaggcccaagaagagggagagagatggggaacggtctgtgggtggagcggtcagaacacacacaacattaagttccacgtcttataaaagacgctgtatgtggcaccccaaaacaatgacaatagcaacatcaaagatcactgatcatagatcaccataacagacacagaaatcatgaaaaagttttaaatattttgagaattaccaaaatgtaacacagagacaccaagtgagcacatgctgttggaaaaatggcgctgatacaattgctggactcagggctgccacaaaccctccatttgttttcagaatgccctatctgcgaagcgtaataaaacgaggtatgccatagtacagtggcgccgcgaccgacaaaggaaagcctccgggaggtcaaaagagataccagagagtgcgtcccgcactggaggaagaggaaggtttttaccaagcagcgagtccagagcccgcgccgtcaacgacgcggtgctgccttttttccgagccgctgcgggagggggccaggacacgctcccttaggagagcgggcgggtcacaaggacctggacagaggcagaactgaggccagcagccagctccgccgctgagtccagccctctgcgcagccgccctgagctggcgtcccgagatagccgcttccaaaccgggcctgcgcgccgacgttccgctgcgccccgcgcaaaaccggaagtacccgggcccaaggctgagggacccggtggagcggaagtcactccctgaggcagtggcgacagcggcggcgagaggatgaacaacaagttcgacgctttgaaagatgatgacagtggggaccatgatcagaatgaagaaaacagcacacagaaagatggtgagaaggaaaaaacggaacgagacaagaatcagagcagtagcaagagaaaggctgttgtccctggaccggcagagcatcccctgcagtacaactacactttttggtactccaggagaacccccggccgtcccacgagctcacagagctatgaacagaatatcaaacagattggcacctttgcctctgtggagcagttctggaggttttatagccacatggtacgtcctggggacctgacaggccacagtgacttccatctcttcaaagaaggaattaaacccatgtgggaggatgatgcaaataaaaatggtggcaagtggattattcggctgcggaagggcttggcctcccgttgctgggagaatctcattttggccatgctgggggaacagttcatggttggggaggagatctgtggggctgtggtgtctgtccgctttcaggaagacattatttcaatatggaataagactgccagtgaccaagcaaccacagcccgaatccgggacacacttcggcgagtgcttaacctacctcccaacaccattatggaatacaaaactcacaccgacagcatcaaggcctgggaggagtttcatggcctggtgaacagcatgcggccgctgatcggacgctccccctctgtctctcacactcaggggacaattcaagctttcgaaatacaaaaatcacattgtgagagtacacaagctggcaataatccttttctgtatgtgtgtgtttgtccgaaatggatgggaggcctccagccagtccttccattgctcactgaagggacgtccctgagccgtgcgctctccttttgcactcattcctggaggacggattccgctagacaccctccagcatcgctgactttataaagcggaaaaacggaaaacgtgactttgtaatagacaaacattgttttttaatggggttccatgggggggcgttcagcctttctgtttgctgtgtgctgtccagatgcctcttgggcgtcctgttgttctcttcccgtgttgtacgaagggtaccgtggccacgtgtacatgccagagctgttgatgagagttaccagtattatgaatgtctgtgcatccaggaaaagtgttctgttggagagtcccaaaatagctgtaaatgctctcttctagctctgccattaaattattgggacattttgtttctttctctcccctcctccaagcccaccactttctgaagctgtgttactgatgtgatgactgtccaggattttgtatcatcccctgccttatgccctccggtctcctctcctgtgggactctctccttcttaggcacagctgcacttagaattgtaatccagtggctctcactggtttcactgaggcagcttagagggaatgccttagtaaactgaactggagcagaatctagtttgattaggagctagattataatctaggttccaagtacagaatttggagctaaggactgtgactgaaatcattttcccatatgagcagaccctgtgtgtcaggcctgtttcccatatgagcagagcctgtgtgcaagtctgtttctggcatgtccctcattgaggaagggaagcaaaagctggttattgccaggcctattaacacttaatatgcaaattctatcatcctgaaactggggcatctgaggaaaaggtgaccttgctggatggctttatttgcatggctctgcctgtctgcagtggttgagtcctcatcacctggtatgtgtatgagcaaatgtgtgctgatcgtgatgcccaggcagaaacctcttgaagactgctgcaggcatgctttaaaaatgaccagtcactcatcagagaagctgggtgatctgactccagaaggactgaagtcagagaagtcacaagagcacctaggattcaaataaatagcgtcagagtcctatagcaacctccaagtagcaccgtcttacttggctcttgtgagcaaagactgcagtaccttaaattaaggcctctctttaaaacatatgtggaagactaggggatccttggccacctggtctcagagaaatcatatgagagtaacaggcatttccttattgtatttgtactacactcttcctacttttccattcctgaacaccctctaattaccactgttttgggggatgctttttttctgaaagaacggggagtacaggggccaaaagggaggtgcttctattacagggcaagttagatcagataagaagatctagcagtgatttaaactccaggaatatgaagagtgcattctggtgtccagacagttgtgaagggctcggcaaatataagagcaccattggctacatggagagcaaaggctgtctttgaagaccccagggaggtcttcacttttgcctaaattcagatttgccgtgaaaattccaaagagagcagatatttggatttgccctcctttgggcatctacctgactgttgtgtgtgtgggaaagtcagtgtgtatgtgtagagtgtgcttaggagtgagtgagtggtcaggcctcctggctaggtgtgttgtccatagttttgttgttgttgttgttgttgttcagagttttgaatcttacgttttctagagctgctcatgttttcccttcctttttgtcgttgtagtatttgacagttgtcttttccatcaaaaacatactggccctaggctggttagagcaaggggttatgcctgttaggcagcatcttacgcccagtgttctcccagatattctgcctaacaggtttaagtaggagattaaatagtcagtttatctaaaccctctatttttccaaactagcttgagaggtcttttcatctatttttactccatgggcctctgatatgctgagatgtggcacggttatgattatggtatcaccgttacagaggcaaagggataaaggtctaccagggccaacgtaaccagaatgtgaggagagtgaagagtcggtctccgctttgcacagtaccagaatgtgaggttgccactggagagtggagagtcggtctccactttgcacagttggagctgttctcctctaactcctttgctgggttttctgtttgaaattggcccctactcctctccagccctttactgggttttctgtttgaaattggcccctactcctccagccctttattgggttttctgtttgaaattggcccctactcctctctccagtgtctgctttttgaatccttctgttcgtgtgtgtgtgtgtgtgtgtgtgtgtgttccctatgatactggcagtggcaataattttccacccagagagaagcttgtggtccacaatgctcgaagaatgaatttccaagtatttgccagtggaaacggagcagaggctatgacaagagtgatttagtgttgcactttcagagcaattatctactgcagtaataaattgaaaatatcagcaagaac

SEQ ID NO: 358975 - DNA, 4507 bp, Homo sapiens
ctttcttatcattcgtgtgttcattggagtagcacttttaacttccttcaagaacttttcctttgcatttacaacttggctaactgtttgccgcaggaggcctagccttcggcctatctcggcttttgacataccttcctcactcagtttaatcatttctagtttttgatttaaagtgagagatgtgcgactcttcctttcacttgagcacttagaggccattgcagagtcattaattcgcctaatctcaatattgttgtgtctcagggaatagggaggcccaagaagagggagagagatggggaacggtctgtgggtggagcggtcagaacacacacaacattaagttccacgtcttataaaagacgctgtatgtggcaccccaaaacaatgacaatagcaacatcaaagatcactgatcatagatcaccataacagacacagaaatcatgaaaaagttttaaatattttgagaattaccaaaatgtaacacagagacaccaagtgagcacatgctgttggaaaaatggcgctgatacaattgctggactcagggctgccacaaaccctccatttgttttcagaatgccctatctgcgaagcgtaataaaacgaggtatgccatagtacagtggcgccgcgaccgacaaaggaaagcctccgggaggtcaaaagagataccagagagtgcgtcccgcactggaggaagaggaaggtttttaccaagcagcgagtccagagcccgcgccgtcaacgacgcggtgctgccttttttccgagccgctgcgggagggggccaggacacgctcccttaggagagcgggcgggtcacaaggacctggacagaggcagaactgaggccagcagccagctccgccgctgagtccagccctctgcgcagccgccctgagctggcgtcccgagatagccgcttccaaaccgggcctgcgcgccgacgttccgctgcgccccgcgcaaaaccggaagtacccgggcccaaggctgagggacccggtggagcggaagtcactccctgaggcagtggcgacagcggcggcgagaggatgaacaacaagttcgacgctttgaaagatgatgacagtggggaccatgatcagaatgaagaaaacagcacacagaaagatggtgagaaggaaaaaacggaacgagacaagaatcagagcagtagcaagagaaaggctgttgtccctggaccggcagagcatcccctgcagtacaactacactttttggtactccaggagaacccccggccgtcccacgagctcacagagctatgaacagaatatcaaacagattggcacctttgcctctgtggagcagttctggaggttttatagccacatggtacgtcctggggacctgacaggccacagtgacttccatctcttcaaagaaggaattaaacccatgtgggaggatgatgcaaataaaaatggtggcaagtggattattcggctgcggaagggcttggcctcccgttgctgggagaatctcattttggccatgctgggggaacagttcatggttggggaggagatctgtggggctgtggtgtctgtccgctttcaggaagacattatttcaatatggaataagactgccagtgaccaagcaaccacagcccgaatccgggacacacttcggcgagtgcttaacctacctcccaacaccattatggaatacaaaactcacaccgacagcatcaaggcctgggaggagtttcatggcctggtgaacagcatgcggccgctgatcggacgctccccctctgtctctcacactcaggggacaattcaagctttcgaaatacaaaaatcacattgtgagagtacacaagctggcaataatccttttctgtatgtgtgtgtttgtccgaaatggatgggaggcctccagccagtccttccattgctcactgaagggacgtccctgagccgtgcgctctccttttgcactcattcctggaggacggattccgctagacaccctccagcatcgctgactttataaagcggaaaaacggaaaacgtgactttgtaatagacaaacattgttttttaatggggttccatgggggggcgttcagcctttctgtttgctgtgtgctgtccagatgcctcttgggcgtcctgttgttctcttcccgtgttgtacgaagggtaccgtggccacgtgtacatgccagagctgttgatgagagttaccagtattatgaatgtctgtgcatccaggaaaagtgttctgttggagagtcccaaaatagctgtaaatgctctcttctagctctgccattaaattattgggacattttgtttctttctctcccctcctccaagcccaccactttctgaagctgtgttactgatgtgatgactgtccaggattttgtatcatcccctgccttatgccctccggtctcctctcctgtgggactctctccttcttaggcacagctgcacttagaattgtaatccagtggctctcactggtttcactgaggcagcttagagggaatgccttagtaaactgaactggagcagaatctagtttgattaggagctagattataatctaggttccaagtacagaatttggagctaaggactgtgactgaaatcattttcccatatgagcagaccctgtgtgtcaggcctgtttcccatatgagcagagcctgtgtgcaagtctgtttctggcatgtccctcattgaggaagggaagcaaaagctggttattgccaggcctattaacacttaatatgcaaattctatcatcctgaaactggggcatctgaggaaaaggtgaccttgctggatggctttatttgcatggctctgcctgtctgcagtggttgagtcctcatcacctggtatgtgtatgagcaaatgtgtgctgatcgtgatgcccaggcagaaacctcttgaagactgctgcaggcatgctttaaaaatgaccagtcactcatcagagaagctgggtgatctgactccagaaggactgaagtcagagaagtcacaagagcacctaggattcaaataaatagcgtcagagtcctatagcaacctccaagtagcaccgtcttacttggctcttgtgagcaaagactgcagtaccttaaattaaggcctctctttaaaacatatgtggaagactaggggatccttggccacctggtctcagagaaatcatatgagagtaacaggcatttccttattgtatttgtactacactcttcctacttttccattcctgaacaccctctaattaccactgttttgggggatgctttttttctgaaagaacggggagtacaggggccaaaagggaggtgcttctattacagggcaagttagatcagataagaagatctagcagtgatttaaactccaggaatatgaagagtgcattctggtgtccagacagttgtgaagggctcggcaaatataagagcaccattggctacatggagagcaaaggctgtctttgaagaccccagggaggtcttcacttttgcctaaattcagatttgccgtgaaaattccaaagagagcagatatttggatttgccctcctttgggcatctacctgactgttgtgtgtgtgggaaagtcagtgtgtatgtgtagagtgtgcttaggagtgagtgagtggtcaggcctcctggctaggtgtgttgtccatagttttgttgttgttgttgttgttgttcagagttttgaatcttacgttttctagagctgctcatgttttcccttcctttttgtcgttgtagtatttgacagttgtcttttccatcaaaaacatactggccctaggctggttagagcaaggggttatgcctgttaggcagcatcttacgcccagtgttctcccagatattctgcctaacaggtttaagtaggagattaaatagtcagtttatctaaaccctctatttttccaaactagcttgagaggtcttttcatctatttttactccatgggcctctgatatgctgagatgtggcacggttatgattatggtatcaccgttacagaggcaaagggataaaggtctaccagggccaacgtaaccagaatgtgaggagagtgaagagtcggtctccgctttgcacagtaccagaatgtgaggttgccactggagagtggagagtcggtctccactttgcacagttggagctgttctcctctaactcctttgctgggttttctgtttgaaattggcccctactcctctccagtgtctgctttttgaatccttctgttcgtgtgtgtgtgtgtgtgtgtgtgtgtgttccctatgatactggcagtggcaataattttccacccagagagaagcttgtggtccacaatgctcgaagaatgaatttccaagtatttgccagtggaaacggagcagaggctatgacaagagtgatttagtgttgcactttcagagcaattatctactgcagtaataaattgaaaatatcagcaagaac

SEQ ID NO: 358976 - DNA, 3511 bp, Homo sapiens
ctttcttatcattcgtgtgttcattggagtagcacttttaacttccttcaagaacttttcctttgcatttacaacttggctaactgtttgccgcaggaggcctagccttcggcctatctcggcttttgacataccttcctcactcagtttaatcatttctagtttttgatttaaagtgagagatgtgcgactcttcctttcacttgagcacttagaggccattgcagagtcattaattcgcctaatctcaatattgttgtgtctcagggaatagggaggcccaagaagagggagagagatggggaacggtctgtgggtggagcggtcagaacacacacaacattaagttccacgtcttataaaagacgctgtatgtggcaccccaaaacaatgacaatagcaacatcaaagatcactgatcatagatcaccataacagacacagaaatcatgaaaaagttttaaatattttgagaattaccaaaatgtaacacagagacaccaagtgagcacatgctgttggaaaaatggcgctgatacaattgctggactcagggctgccacaaaccctccatttgttttcagaatgccctatctgcgaagcgtaataaaacgaggtatgccatagtacagtggcgccgcgaccgacaaaggaaagcctccgggaggtcaaaagagataccagagagtgcgtcccgcactggaggaagaggaaggtttttaccaagcagcgagtccagagcccgcgccgtcaacgacgcggtgctgccttttttccgagccgctgcgggagggggccaggacacgctcccttaggagagcgggcgggtcacaaggacctggacagaggcagaactgaggccagcagccagctccgccgctgagtccagccctctgcgcagccgccctgagctggcgtcccgagatagccgcttccaaaccgggcctgcgcgccgacgttccgctgcgccccgcgcaaaaccggaagtacccgggcccaaggctgagggacccggtggagcggaagtcactccctgaggcagtggcgacagcggcggcgagaggatgaacaacaagttcgacgctttgaaagatgatgacagtggggaccatgatcagaatgaagaaaacagcacacagaaagatggtgagaaggaaaaaacggaacgagacaagaatcagagcagtagcaagagaaaggctgttgtccctggaccggcagagcatcccctgcagtacaactacactttttggtactccaggagaacccccggccgtcccacgagctcacagagctatgaacagaatatcaaacagattggcacctttgcctctgtggagcagttctggaggttttatagccacatggtacgtcctggggacctgacaggccacagtgacttccatctcttcaaagaaggaattaaacccatgtgggaggatgatgcaaataaaaatggtggcaagtggattattcggctgcggaagggcttggcctcccgttgctgggagaatctcattttggccatgctgggggaacagttcatggttggggaggagatctgtggggctgtggtgtctgtccgctttcaggaagacattatttcaatatggaataagactgccagtgaccaagcaaccacagcccgaatccgggacacacttcggcgagtgcttaacctacctcccaacaccattatggaatacaaaactcacaccgacagcatcaaggcctgggaggagtttcatggcctggtgaacagcatgcggccgctgatcggacgctccccctctgtctctcacactcaggggacaattcaagctttcgaaatacaaaaatcacattgtgagagtacacaagctggcaataatccttttctgtatgtgtgtgtttgtccgaaatggatgggaggcctccagccagtccttccattgctcactgaagggacgtccctgagccgtgcgctctccttttgcactcattcctggaggacggattccgctagacaccctccagcatcgctgactttataaagcggaaaaacggaaaacgtgactttgtaatagacaaacattgttttttaatggggttccatgggggggcgttcagcctttctgtttgctgtgtgctgtccagatgcctcttgggcgtcctgttgttctcttcccgtgttgtacgaagggtaccgtggccacgtgtacatgccagagctgttgatgagagttaccagtattatgaatgtctgtgcatccaggaaaagtgttctgttggagagtcccaaaatagctgtaaatgctctcttctagctctgccattaaattattgggacattttgtttctttctctcccctcctccaagcccaccactttctgaagctgtgttactgatgtgatgactgtccaggattttgtatcatcccctgccttatgccctccggtctcctctcctgtgggactctctccttcttaggcacagctgcacttagaattgtaatccagtggctctcactggtttcactgaggcagcttagagggaatgccttagtaaactgaactggagcagaatctagtttgattaggagctagattataatctaggttccaagtacagaatttggagctaaggactgtgactgaaatcattttcccatatgagcagaccctgtgtgtcaggcctgtttcccatatgagcagagcctgtgtgcaagtctgtttctggcatgtccctcattgaggaagggaagcaaaagctggttattgccaggcctattaacacttaatatgcaaattctatcatcctgaaactggggcatctgaggaaaaggtgaccttgctggatggctttatttgcatggctctgcctgtctgcagtggttgagtcctcatcacctggtatgtgtatgagcaaatgtgtgctgatcgtgatgcccaggcagaaacctcttgaagactgctgcaggcatgctttaaaaatgaccagtcactcatcagagaagctgggtgatctgactccagaaggactgaagtcagagaagtcacaagagcacctaggattcaaataaatagcgtcagagtcctatagcaacctccaagtagcaccgtcttacttggctcttgtgagcaaagactgcagtaccttaaattaaggcctctctttaaaacatatgtggaagactaggggatccttggccacctggtctcagagaaatcatatgagagtaacaggcatttccttattgtatttgtactacactcttcctatctccagtgtctgctttttgaatccttctgttcgtgtgtgtgtgtgtgtgtgtgtgtgtgttccctatgatactggcagtggcaataattttccacccagagagaagcttgtggtccacaatgctcgaagaatgaatttccaagtatttgccagtggaaacggagcagaggctatgacaagagtgatttagtgttgcactttcagagcaattatctactgcagtaataaattgaaaatatcagcaagaac

SEQ ID NO: 358977 - DNA, 1822 bp, Homo sapiens
ctttcttatcattcgtgtgttcattggagtagcacttttaacttccttcaagaacttttcctttgcatttacaacttggctaactgtttgccgcaggaggcctagccttcggcctatctcggcttttgacataccttcctcactcagtttaatcatttctagtttttgatttaaagtgagagatgtgcgactcttcctttcacttgagcacttagaggccattgcagagtcattaattcgcctaatctcaatattgttgtgtctcagggaatagggaggcccaagaagagggagagagatggggaacggtctgtgggtggagcggtcagaacacacacaacattaagttccacgtcttataaaagacgctgtatgtggcaccccaaaacaatgacaatagcaacatcaaagatcactgatcatagatcaccataacagacacagaaatcatgaaaaagttttaaatattttgagaattaccaaaatgtaacacagagacaccaagtgagcacatgctgttggaaaaatggcgctgatacaattgctggactcagggctgccacaaaccctccatttgttttcagaatgccctatctgcgaagcgtaataaaacgaggtatgccatagtacagtggcgccgcgaccgacaaaggaaagcctccgggaggtcaaaagagataccagagagtgcgtcccgcactggaggaagaggaaggtttttaccaagcagcgagtccagagcccgcgccgtcaacgacgcggtgctgccttttttccgagccgctgcgggagggggccaggacacgctcccttaggagagcgggcgggtcacaaggacctggacagaggcagaactgaggccagcagccagctccgccgctgagtccagccctctgcgcagccgccctgagctggcgtcccgagatagccgcttccaaaccgggcctgcgcgccgacgttccgctgcgccccgcgcaaaaccggaagtacccgggcccaaggctgagggacccggtggagcggaagtcactccctgaggcagtggcgacagcggcggcgagaggatgaacaacaagttcgacgctttgaaagatgatgacagtggggaccatgatcagaatgaagaaaacagcacacagaaagatggtgagaaggaaaaaacggaacgagacaagaatcagagcagtagcaagagaaaggctgttgtccctggaccggcagagcatcccctgcagtacaactacactttttggtactccaggagaacccccggccgtcccacgagctcacagagctatgaacagaatatcaaacagattggcacctttgcctctgtggagcagttctggaggttttatagccacatggtacgtcctggggacctgacaggccacagtgacttccatctcttcaaagaaggaattaaacccatgtgggaggatgatgcaaataaaaatggtggcaagtggattattcggctgcggaagggcttggcctcccgttgctgggagaatctcattttggccatgctgggggaacagttcatggttggggaggagatctgtggggctgtggtgtctgtccgctttcaggaagacattatttcaatatggaataagactgccagtgaccaagcaaccacagcccgaatccgggacacacttcggcgagtgcttaacctacctcccaacaccattatggaatacaaaactcacaccgacagcatcaaagccaggtcatcttcctctttgagtcagccctgcttgcaagatctcagggttacagcccttccctttctcctgggcccggtgttactgcacat

SEQ ID NO: 358978 - DNA, 3880 bp, Homo sapiens
cgctggggctggggcggcgcaaaccctgcggcaccggcttccctgctgggatccggctgcgggacctggcctggactggcggggaggagggggctggggagcaatggataccggagtcccggagaccccagggccgtccgaaccgagggcgaagagctgggcccgggggaggggtggctgtgccgcccggtagggggagattttcggacgccccgccctggtggatgcggattgcctgcgacgtggaggggtggggacctcggcggtttgggtgtttccgcagtctggcagcgctgcctctgaatccagctttccccacacactccctctcccctctgagcctcagttttctcatctgcagagtggggacggtaacaccctttgtcgtagagtttggaggatgcaatgagtttgaaagatgatgacagtggggaccatgatcagaatgaagaaaacagcacacagaaagatggtgagaaggaaaaaacggaacgagacaagaatcagagcagtagcaagagaaaggctgttgtccctggaccggcagagcatcccctgcagtacaactacactttttggtactccaggagaacccccggccgtcccacgagctcacagagctatgaacagaatatcaaacagattggcacctttgcctctgtggagcagttctggaggttttatagccacatggtacgtcctggggacctgacaggccacagtgacttccatctcttcaaagaaggaattaaacccatgtgggaggatgatgcaaataaaaatggtggcaagtggattattcggctgcggaagggcttggcctcccgttgctgggagaatctcattttggccatgctgggggaacagttcatggttggggaggagatctgtggggctgtggtgtctgtccgctttcaggaagacattatttcaatatggaataagactgccagtgaccaagcaaccacagcccgaatccgggacacacttcggcgagtgcttaacctacctcccaacaccattatggaatacaaaactcacaccgacagcatcaaggcctgggaggagtttcatggcctggtgaacagcatgcggccgctgatcggacgctccccctctgtctctcacactcaggggacaattcaagctttcgaaatacaaaaatcacattgtgagagtacacaagctggcaataatccttttctgtatgtgtgtgtttgtccgaaatggatgggaggcctccagccagtccttccattgctcactgaagggacgtccctgagccgtgcgctctccttttgcactcattcctggaggacggattccgctagacaccctccagcatcgctgactttataaagcggaaaaacggaaaacgtgactttgtaatagacaaacattgttttttaatggggttccatgggggggcgttcagcctttctgtttgctgtgtgctgtccagatgcctcttgggcgtcctgttgttctcttcccgtgttgtacgaagggtaccgtggccacgtgtacatgccagagctgttgatgagagttaccagtattatgaatgtctgtgcatccaggaaaagtgttctgttggagagtcccaaaatagctgtaaatgctctcttctagctctgccattaaattattgggacattttgtttctttctctcccctcctccaagcccaccactttctgaagctgtgttactgatgtgatgactgtccaggattttgtatcatcccctgccttatgccctccggtctcctctcctgtgggactctctccttcttaggcacagctgcacttagaattgtaatccagtggctctcactggtttcactgaggcagcttagagggaatgccttagtaaactgaactggagcagaatctagtttgattaggagctagattataatctaggttccaagtacagaatttggagctaaggactgtgactgaaatcattttcccatatgagcagaccctgtgtgtcaggcctgtttcccatatgagcagagcctgtgtgcaagtctgtttctggcatgtccctcattgaggaagggaagcaaaagctggttattgccaggcctattaacacttaatatgcaaattctatcatcctgaaactggggcatctgaggaaaaggtgaccttgctggatggctttatttgcatggctctgcctgtctgcagtggttgagtcctcatcacctggtatgtgtatgagcaaatgtgtgctgatcgtgatgcccaggcagaaacctcttgaagactgctgcaggcatgctttaaaaatgaccagtcactcatcagagaagctgggtgatctgactccagaaggactgaagtcagagaagtcacaagagcacctaggattcaaataaatagcgtcagagtcctatagcaacctccaagtagcaccgtcttacttggctcttgtgagcaaagactgcagtaccttaaattaaggcctctctttaaaacatatgtggaagactaggggatccttggccacctggtctcagagaaatcatatgagagtaacaggcatttccttattgtatttgtactacactcttcctacttttccattcctgaacaccctctaattaccactgttttgggggatgctttttttctgaaagaacggggagtacaggggccaaaagggaggtgcttctattacagggcaagttagatcagataagaagatctagcagtgatttaaactccaggaatatgaagagtgcattctggtgtccagacagttgtgaagggctcggcaaatataagagcaccattggctacatggagagcaaaggctgtctttgaagaccccagggaggtcttcacttttgcctaaattcagatttgccgtgaaaattccaaagagagcagatatttggatttgccctcctttgggcatctacctgactgttgtgtgtgtgggaaagtcagtgtgtatgtgtagagtgtgcttaggagtgagtgagtggtcaggcctcctggctaggtgtgttgtccatagttttgttgttgttgttgttgttgttcagagttttgaatcttacgttttctagagctgctcatgttttcccttcctttttgtcgttgtagtatttgacagttgtcttttccatcaaaaacatactggccctaggctggttagagcaaggggttatgcctgttaggcagcatcttacgcccagtgttctcccagatattctgcctaacaggtttaagtaggagattaaatagtcagtttatctaaaccctctatttttccaaactagcttgagaggtcttttcatctatttttactccatgggcctctgatatgctgagatgtggcacggttatgattatggtatcaccgttacagaggcaaagggataaaggtctaccagggccaacgtaaccagaatgtgaggagagtgaagagtcggtctccgctttgcacagtaccagaatgtgaggttgccactggagagtggagagtcggtctccactttgcacagttggagctgttctcctctaactcctttgctgggttttctgtttgaaattggcccctactcctctccagccctttactgggttttctgtttgaaattggcccctactcctctccagtgtctgctttttgaatccttctgttcgtgtgtgtgtgtgtgtgtgtgtgtgtgttccctatgatactggcagtggcaataattttccacccagagagaagcttgtggtccacaatgctcgaagaatgaatttccaagtatttgccagtggaaacggagcagaggctatgacaagagtgatttagtgttgcactttcagagcaattatctactgcagtaataaattgaaaatatcagcaagaac

SEQ ID NO: 358979 - DNA, 3540 bp, Homo sapiens
ttcgaattcataagaacaggcaggttagaagcaggatcttggtgaggaggatgaacaacaagttcgacgctttgaaagatgatgacagtggggaccatgatcagaatgaagaaaacagcacacagaaagatggtgagaaggaaaaaacggaacgagacaagaatcagagcagtagcaagagaaaggctgttgtccctggaccggcagagcatcccctgcagtacaactacactttttggtactccaggagaacccccggccgtcccacgagctcacagagctatgaacagaatatcaaacagattggcacctttgcctctgtggagcagttctggaggttttatagccacatggtacgtcctggggacctgacaggccacagtgacttccatctcttcaaagaaggaattaaacccatgtgggaggatgatgcaaataaaaatggtggcaagtggattattcggctgcggaagggcttggcctcccgttgctgggagaatctcattttggccatgctgggggaacagttcatggttggggaggagatctgtggggctgtggtgtctgtccgctttcaggaagacattatttcaatatggaataagactgccagtgaccaagcaaccacagcccgaatccgggacacacttcggcgagtgcttaacctacctcccaacaccattatggaatacaaaactcacaccgacagcatcaaggcctgggaggagtttcatggcctggtgaacagcatgcggccgctgatcggacgctccccctctgtctctcacactcaggggacaattcaagctttcgaaatacaaaaatcacattgtgagagtacacaagctggcaataatccttttctgtatgtgtgtgtttgtccgaaatggatgggaggcctccagccagtccttccattgctcactgaagggacgtccctgagccgtgcgctctccttttgcactcattcctggaggacggattccgctagacaccctccagcatcgctgactttataaagcggaaaaacggaaaacgtgactttgtaatagacaaacattgttttttaatggggttccatgggggggcgttcagcctttctgtttgctgtgtgctgtccagatgcctcttgggcgtcctgttgttctcttcccgtgttgtacgaagggtaccgtggccacgtgtacatgccagagctgttgatgagagttaccagtattatgaatgtctgtgcatccaggaaaagtgttctgttggagagtcccaaaatagctgtaaatgctctcttctagctctgccattaaattattgggacattttgtttctttctctcccctcctccaagcccaccactttctgaagctgtgttactgatgtgatgactgtccaggattttgtatcatcccctgccttatgccctccggtctcctctcctgtgggactctctccttcttaggcacagctgcacttagaattgtaatccagtggctctcactggtttcactgaggcagcttagagggaatgccttagtaaactgaactggagcagaatctagtttgattaggagctagattataatctaggttccaagtacagaatttggagctaaggactgtgactgaaatcattttcccatatgagcagaccctgtgtgtcaggcctgtttcccatatgagcagagcctgtgtgcaagtctgtttctggcatgtccctcattgaggaagggaagcaaaagctggttattgccaggcctattaacacttaatatgcaaattctatcatcctgaaactggggcatctgaggaaaaggtgaccttgctggatggctttatttgcatggctctgcctgtctgcagtggttgagtcctcatcacctggtatgtgtatgagcaaatgtgtgctgatcgtgatgcccaggcagaaacctcttgaagactgctgcaggcatgctttaaaaatgaccagtcactcatcagagaagctgggtgatctgactccagaaggactgaagtcagagaagtcacaagagcacctaggattcaaataaatagcgtcagagtcctatagcaacctccaagtagcaccgtcttacttggctcttgtgagcaaagactgcagtaccttaaattaaggcctctctttaaaacatatgtggaagactaggggatccttggccacctggtctcagagaaatcatatgagagtaacaggcatttccttattgtatttgtactacactcttcctacttttccattcctgaacaccctctaattaccactgttttgggggatgctttttttctgaaagaacggggagtacaggggccaaaagggaggtgcttctattacagggcaagttagatcagataagaagatctagcagtgatttaaactccaggaatatgaagagtgcattctggtgtccagacagttgtgaagggctcggcaaatataagagcaccattggctacatggagagcaaaggctgtctttgaagaccccagggaggtcttcacttttgcctaaattcagatttgccgtgaaaattccaaagagagcagatatttggatttgccctcctttgggcatctacctgactgttgtgtgtgtgggaaagtcagtgtgtatgtgtagagtgtgcttaggagtgagtgagtggtcaggcctcctggctaggtgtgttgtccatagttttgttgttgttgttgttgttgttcagagttttgaatcttacgttttctagagctgctcatgttttcccttcctttttgtcgttgtagtatttgacagttgtcttttccatcaaaaacatactggccctaggctggttagagcaaggggttatgcctgttaggcagcatcttacgcccagtgttctcccagatattctgcctaacaggtttaagtaggagattaaatagtcagtttatctaaaccctctatttttccaaactagcttgagaggtcttttcatctatttttactccatgggcctctgatatgctgagatgtggcacggttatgattatggtatcaccgttacagaggcaaagggataaaggtctaccagggccaacgtaaccagaatgtgaggagagtgaagagtcggtctccgctttgcacagtaccagaatgtgaggttgccactggagagtggagagtcggtctccactttgcacagttggagctgttctcctctaactcctttgctgggttttctgtttgaaattggcccctactcctctccagccctttactgggttttctgtttgaaattggcccctactcctctccagtgtctgctttttgaatccttctgttcgtgtgtgtgtgtgtgtgtgtgtgtgtgttccctatgatactggcagtggcaataattttccacccagagagaagcttgtggtccacaatgctcgaagaatgaatttccaagtatttgccagtggaaacggagcagaggctatgacaagagtgatttagtgttgcactttcagagcaattatctactgcagtaataaattgaaaatatcagcaagaac

SEQ ID NO: 358980 - DNA, 1968 bp, Homo sapiens
caggaaggtagtgacgtcataggtaaacaggctctgtatccgtggcagcggccgtggcaggctggctgggtaccggctgtcgctgacccaggagaagctgcctgtctacatcagcctgggctgcagcgcgctgccgccgcggggccggcagccatggccaaggacatcctgggtgaagcagggctacactttgatgaactgaacaagctgagggtgttggacccagaggttacccagcagaccatagagctgaaggaagagtgcaaagactttgtggacaaaattggccagtttcagaaaatagttggtggtttaattgagcttgttgatcaacttgcaaaagaagcagaaaatgaaaagatgaaggccatcggtgctcggaacttgctcaaatctatagcaaagcagagagaagctcaacagcagcaacttcaagccctaatagcagaaaagaaaatgcagctagaaaggtatcgggttgaatatgaagctttgtgtaaagtagaagcagaacaaaatgaatttattgaccaatttatttttcagaaatgaactgaaaatttcgcttttatagtaggaaggcaaaacaaaaaaaagcctctcaaaaccaaaaaaacctctgtagcattccagcggcttgaccaatgacctatgtcacaagaggtggcgtgtaaggaatgcagccccctgaagacagcactacaagtctgggggagccagttttaacatcagtgcacagctgctgctggtggccctgcagtgtacgttctcacctcttatgcttagttggaactaagcagtttgtaaactttcatccttttttttgtaaattcacaaagctttggaaggagaagcaataaatttttgttttcaaatggcttgatgtaccttttttcctgttgctcttgaaatatgtttaactcctcatgagagaaccctggattctctatcccctagtccacaaaacaaaccaggcagtggtcagcagctacctttatttggatcacacacgtgagtcagacagtaccactaatcgggccaatatggcttgtgagcaaaatgggtgaaaatagagggaactgactgggacctgttgtctaacatcattttaaggttgaacttgagcaaagacttagagaaagctgatggaatgccaagcatcaacgtgaagagaccctctatgcacacagtggatatgttatgcctggctgtagccaccttctcttctgaaaacaagatgggaatgacggaactgtattaaaagattaagttatccactagggagcatactagcacacttccagatcagccttgagatgctagacttcagatacagggacttgtgtcaggtggcctctagaaatgtggaagactaagatttagaaataaactaatttaaaagcaaacaaacaaaaaaaactttcgcctaggatgatctgtttacaacagaaacaaaaacattttccagtttaatccatttgactgaaagtcattgttgggctgacccttaaggaaaacttaagtttaaacttcctttgcatagtatgttttctcttttttccttgggttagaggtgggaacaagaaaacattgatatagttttgaattaacattaaagaggcaaaatttcacatttaaaatggcccaaaatatcccactattcattttgctgacaggtgatacactcttgagaatcaggagtggagggtttagtcataagcatatatgctgtgggtcaggtgactcatgaacatgtcaaacaggccatgttctttagcagtttctggtctggtcctgcttttagtaatcttgcggtggaactcaggcacacagttatttggtaccacttccttataacctagcccacacccctttgcccaccctcaagccgatcggtctgttcatcccagtgcccttagaaggtgaaggtttgggctgggcccagtggttcacgtctgtaatcccagc

SEQ ID NO: 358981 - DNA, 753 bp, Homo sapiens
caggaaggtagtgacgtcataggtaaacaggctctgtatccgtggcagcggccgtggcaggctggctgggtaccggctgtcgctgacccaggagaagctgcctgtctacatcagcctgggctgcagcgcgctgccgccgcggggccggcagccatggccaaggacatcctgggtgaagcagggctacactttgatgaactgaacaagctgagggtgttggacccagaggttacccagcagaccatagagctgaaggaagagtgcaaagactttgtggacagtgagtattggggagatacagtgccactcagctttgagctgccatttcaactgtaccccaggctcatcttggccctgccacagtggagctgctggctccctggaggttgaatctggcgtctgtgagttcccacgtgccacccttttctgtctgccctcttgtgctctcatgtgtccccaacagggcaccagtcaaaccaaacaccgggatggggaggggagggtgtctttagatatgccatctttcatttcttgctcttagaaaccttaaactttctgggaacacaaccatggcttgggtgtgggaaatagaattatgtactcatgatttgatttcttcagagaaagtcttctcaggggcaggttctctgttatttggagttagaagtgataggtgaagtttctagaagcagctcaacagacttactgaagtcatcttttggctggaaatcttcaggaagcctcctgtcccag

SEQ ID NO: 358982 - DNA, 2004 bp, Homo sapiens
caggaaggtagtgacgtcataggtaaacaggctctgtatccgtggcagcggccgtggcaggctggctgggtaccggctgtcgctgacccaggagaagctgcctgtctacatcagcctgggctgcagcgcgctgccgccgcggggccggcagagcagaactcctctagggaacctggatgggaaacagccatggccaaggacatcctgggtgaagcagggctacactttgatgaactgaacaagctgagggtgttggacccagaggttacccagcagaccatagagctgaaggaagagtgcaaagactttgtggacaaaattggccagtttcagaaaatagttggtggtttaattgagcttgttgatcaacttgcaaaagaagcagaaaatgaaaagatgaaggccatcggtgctcggaacttgctcaaatctatagcaaagcagagagaagctcaacagcagcaacttcaagccctaatagcagaaaagaaaatgcagctagaaaggtatcgggttgaatatgaagctttgtgtaaagtagaagcagaacaaaatgaatttattgaccaatttatttttcagaaatgaactgaaaatttcgcttttatagtaggaaggcaaaacaaaaaaaagcctctcaaaaccaaaaaaacctctgtagcattccagcggcttgaccaatgacctatgtcacaagaggtggcgtgtaaggaatgcagccccctgaagacagcactacaagtctgggggagccagttttaacatcagtgcacagctgctgctggtggccctgcagtgtacgttctcacctcttatgcttagttggaactaagcagtttgtaaactttcatccttttttttgtaaattcacaaagctttggaaggagaagcaataaatttttgttttcaaatggcttgatgtaccttttttcctgttgctcttgaaatatgtttaactcctcatgagagaaccctggattctctatcccctagtccacaaaacaaaccaggcagtggtcagcagctacctttatttggatcacacacgtgagtcagacagtaccactaatcgggccaatatggcttgtgagcaaaatgggtgaaaatagagggaactgactgggacctgttgtctaacatcattttaaggttgaacttgagcaaagacttagagaaagctgatggaatgccaagcatcaacgtgaagagaccctctatgcacacagtggatatgttatgcctggctgtagccaccttctcttctgaaaacaagatgggaatgacggaactgtattaaaagattaagttatccactagggagcatactagcacacttccagatcagccttgagatgctagacttcagatacagggacttgtgtcaggtggcctctagaaatgtggaagactaagatttagaaataaactaatttaaaagcaaacaaacaaaaaaaactttcgcctaggatgatctgtttacaacagaaacaaaaacattttccagtttaatccatttgactgaaagtcattgttgggctgacccttaaggaaaacttaagtttaaacttcctttgcatagtatgttttctcttttttccttgggttagaggtgggaacaagaaaacattgatatagttttgaattaacattaaagaggcaaaatttcacatttaaaatggcccaaaatatcccactattcattttgctgacaggtgatacactcttgagaatcaggagtggagggtttagtcataagcatatatgctgtgggtcaggtgactcatgaacatgtcaaacaggccatgttctttagcagtttctggtctggtcctgcttttagtaatcttgcggtggaactcaggcacacagttatttggtaccacttccttataacctagcccacacccctttgcccaccctcaagccgatcggtctgttcatcccagtgcccttagaaggtgaaggtttgggctgggcccagtggttcacgtctgtaatcccagc

SEQ ID NO: 358983 - DNA, 3641 bp, Homo sapiens
caggaaggtagtgacgtcataggtaaacaggctctgtatccgtggcagcggccgtggcaggctggctgggtaccggctgtcgctgacccaggagaagctgcctgtctacatcagcctgggctgcagcgcgctgccgccgcggggccggcagctgaactatgtgctcttcagggcgggcaccgtgttgcattcatctttgtacccccagcatctagcagtgttggcatgtagtaggcactcaagaaatgtgtgttgaatgaacgatgcctgtgacaagcaagcggactttattctttcctgacccttgctcctatgacacacctcctcctgactgccactgtcactccttcagagcagaactcctctagggaacctggatgggaaacagccatggccaaggacatcctgggtgaagcagggctacactttgatgaactgaacaagctgagggtgttggacccagaggttacccagcagaccatagagctgaaggaagagtgcaaagactttgtggacaaaattggccagtttcagaaaatagttggtggtttaattgagcttgttgatcaacttgcaaaagaagcagaaaatgaaaagatgaaggtaagatcagcatgtcttccgcctacatcttggcctgggaccctagttcactaccctctcatccctcttccctcttgatttatttagaggggtagagggctgggtgggtgaatttttatttaagattttaataacttctggtccacttaacctactgaacttttgccaatctttatttcctttaatctttattttttttttttttttgagacagagtcttgctgtgtcacccaggctggagtgcactggtgcaatctcggctcactgcaagctctgcctctcagattcaagcgattctcccacctcaccctcccgagtaggtgggactgggattacaggcatgtgccaccatgcctggctaattttgtatttttagtagagacagggtttctccatgttggtcaggctggtctcaaactcccaaccttaggtgatccgcccgcctcagcctcccaaagtgctgggattaaggcgtgagtgactgcgcccggccatttttttgtatttttagtaaagatggggtttcaccatgttggccaggctggttgcaaactcctggcctcaagtgaactgcctaccttggcctcccaaagtgctgggattgcaggtgtgagccaccacacctggcctcgtttcatcttcatatcagcactgatgtagatggtcttatcctcattttataaatgaagaaatgaaggcttacatagtatgattggtgaaaggcacaaggctgaatggcaccaccaaatgtgctattgtgcctgtgtccctggctctaggaatactcctagacctgcctcaaagctgccgtctagttcttgaggcactttgtgatcagtaggttaatccttctgacttaacccaaaagctttggggctccactttcttttcctctctgaagactgacacagctcccagataacccctccccactttgaggacttgatgctgtagatggttttaatgaagccatggccttctctggcaatactgtaggccatcggtgctcggaacttgctcaaatctatagcaaagcagagagaagctcaacagcagcaacttcaagccctaatagcagaaaagaaaatgcagctagaaaggtaagaagtcatgatgtaaagcaagttctttacacagctgaatttccactcttccttctggaatgatcacttcttgtccttattcttcatcattgttttcccaggaatagcatctcacttgtcatcctgatttgaagattttaaaaaataaaattacatttgatgggaaggaaatagaaaacttgttaatatcaaaccacctctagtagtttgagcatgaaagggtccacgaagttggctggctctctgaaagaagactttcctagggctggagatttctcatgggtggctctgggtagggctttgcctctttctttcttcattctgaactcacaccatttcttgaaatcatttaaacctctatatccttctctagaagaattaggtctgtggtttacttcatctttttttcagggcctctaacaattttgtttttcagggtatcgggttgaatatgaagctttgtgtaaagtagaagcagaacaaaatgaatttattgaccaatttatttttcagaaatgaactgaaaatttcgcttttatagtaggaaggcaaaacaaaaaaaagcctctcaaaaccaaaaaaacctctgtagcattccagcggcttgaccaatgacctatgtcacaagaggtggcgtgtaaggaatgcagccccctgaagacagcactacaagtctgggggagccagttttaacatcagtgcacagctgctgctggtggccctgcagtgtacgttctcacctcttatgcttagttggaactaagcagtttgtaaactttcatccttttttttgtaaattcacaaagctttggaaggagaagcaataaatttttgttttcaaatggcttgatgtaccttttttcctgttgctcttgaaatatgtttaactcctcatgagagaaccctggattctctatcccctagtccacaaaacaaaccaggcagtggtcagcagctacctttatttggatcacacacgtgagtcagacagtaccactaatcgggccaatatggcttgtgagcaaaatgggtgaaaatagagggaactgactgggacctgttgtctaacatcattttaaggttgaacttgagcaaagacttagagaaagctgatggaatgccaagcatcaacgtgaagagaccctctatgcacacagtggatatgttatgcctggctgtagccaccttctcttctgaaaacaagatgggaatgacggaactgtattaaaagattaagttatccactagggagcatactagcacacttccagatcagccttgagatgctagacttcagatacagggacttgtgtcaggtggcctctagaaatgtggaagactaagatttagaaataaactaatttaaaagcaaacaaacaaaaaaaactttcgcctaggatgatctgtttacaacagaaacaaaaacattttccagtttaatccatttgactgaaagtcattgttgggctgacccttaaggaaaacttaagtttaaacttcctttgcatagtatgttttctcttttttccttgggttagaggtgggaacaagaaaacattgatatagttttgaattaacattaaagaggcaaaatttcacatttaaaatggcccaaaatatcccactattcattttgctgacaggtgatacactcttgagaatcaggagtggagggtttagtcataagcatatatgctgtgggtcaggtgactcatgaacatgtcaaacaggccatgttctttagcagtttctggtctggtcctgcttttagtaatcttgcggtggaactcaggcacacagttatttggtaccacttccttataacctagcccacacccctttgcccaccctcaagccgatcggtctgttcatcccagtgcccttagaaggtgaaggtttgggctgggcccagtggttcacgtctgtaatcccagc

SEQ ID NO: 358984 - DNA, 2645 bp, Homo sapiens
caggaaggtagtgacgtcataggtaaacaggctctgtatccgtggcagcggccgtggcaggctggctgggtaccggctgtcgctgacccaggagaagctgcctgtctacatcagcctgggctgcagcgcgctgccgccgcggggccggcagctgaactatgtgctcttcagggcgggcaccgtgttgcattcatctttgtacccccagcatctagcagtgttggcatgtagtaggcactcaagaaatgtgtgttgaatgaacgatgcctgtgacaagcaagcggactttattctttcctgacccttgctcctatgacacacctcctcctgactgccactgtcactccttcagagcagaactcctctagggaacctggatgggaaacagccatggccaaggacatcctgggtgaagcagggctacactttgatgaactgaacaagctgagggtgttggacccagaggttacccagcagaccatagagctgaaggaagagtgcaaagactttgtggacaaaattggccagtttcagaaaatagttggtggtttaattgagcttgttgatcaacttgcaaaagaagcagaaaatgaaaagatgaaggccatcggtgctcggaacttgctcaaatctatagcaaagcagagagaagctcaacagcagcaacttcaagccctaatagcagaaaagaaaatgcagctagaaaggtaagaagtcatgatgtaaagcaagttctttacacagctgaatttccactcttccttctggaatgatcacttcttgtccttattcttcatcattgttttcccaggaatagcatctcacttgtcatcctgatttgaagattttaaaaaataaaattacatttgatgggaaggaaatagaaaacttgttaatatcaaaccacctctagtagtttgagcatgaaagggtccacgaagttggctggctctctgaaagaagactttcctagggctggagatttctcatgggtggctctgggtagggctttgcctctttctttcttcattctgaactcacaccatttcttgaaatcatttaaacctctatatccttctctagaagaattaggtctgtggtttacttcatctttttttcagggcctctaacaattttgtttttcagggtatcgggttgaatatgaagctttgtgtaaagtagaagcagaacaaaatgaatttattgaccaatttatttttcagaaatgaactgaaaatttcgcttttatagtaggaaggcaaaacaaaaaaaagcctctcaaaaccaaaaaaacctctgtagcattccagcggcttgaccaatgacctatgtcacaagaggtggcgtgtaaggaatgcagccccctgaagacagcactacaagtctgggggagccagttttaacatcagtgcacagctgctgctggtggccctgcagtgtacgttctcacctcttatgcttagttggaactaagcagtttgtaaactttcatccttttttttgtaaattcacaaagctttggaaggagaagcaataaatttttgttttcaaatggcttgatgtaccttttttcctgttgctcttgaaatatgtttaactcctcatgagagaaccctggattctctatcccctagtccacaaaacaaaccaggcagtggtcagcagctacctttatttggatcacacacgtgagtcagacagtaccactaatcgggccaatatggcttgtgagcaaaatgggtgaaaatagagggaactgactgggacctgttgtctaacatcattttaaggttgaacttgagcaaagacttagagaaagctgatggaatgccaagcatcaacgtgaagagaccctctatgcacacagtggatatgttatgcctggctgtagccaccttctcttctgaaaacaagatgggaatgacggaactgtattaaaagattaagttatccactagggagcatactagcacacttccagatcagccttgagatgctagacttcagatacagggacttgtgtcaggtggcctctagaaatgtggaagactaagatttagaaataaactaatttaaaagcaaacaaacaaaaaaaactttcgcctaggatgatctgtttacaacagaaacaaaaacattttccagtttaatccatttgactgaaagtcattgttgggctgacccttaaggaaaacttaagtttaaacttcctttgcatagtatgttttctcttttttccttgggttagaggtgggaacaagaaaacattgatatagttttgaattaacattaaagaggcaaaatttcacatttaaaatggcccaaaatatcccactattcattttgctgacaggtgatacactcttgagaatcaggagtggagggtttagtcataagcatatatgctgtgggtcaggtgactcatgaacatgtcaaacaggccatgttctttagcagtttctggtctggtcctgcttttagtaatcttgcggtggaactcaggcacacagttatttggtaccacttccttataacctagcccacacccctttgcccaccctcaagccgatcggtctgttcatcccagtgcccttagaaggtgaaggtttgggctgggcccagtggttcacgtctgtaatcccagc

SEQ ID NO: 358985 - DNA, 2408 bp, Homo sapiens
caggaaggtagtgacgtcataggtaaacaggctctgtatccgtggcagcggccgtggcaggctggctgggtaccggctgtcgctgacccaggagaagctgcctgtctacatcagcctgggctgcagcgcgctgccgccgcggggccggcagccatggccaaggacatcctgggtgaagcagggctacactttgatgaactgaacaagctgagggtgttggacccagaggttacccagcagaccatagagctgaaggaagagtgcaaagactttgtggacaaaattggccagtttcagaaaatagttggtggtttaattgagcttgttgatcaacttgcaaaagaagcagaaaatgaaaagatgaaggccatcggtgctcggaacttgctcaaatctatagcaaagcagagagaagctcaacagcagcaacttcaagccctaatagcagaaaagaaaatgcagctagaaaggtaagaagtcatgatgtaaagcaagttctttacacagctgaatttccactcttccttctggaatgatcacttcttgtccttattcttcatcattgttttcccaggaatagcatctcacttgtcatcctgatttgaagattttaaaaaataaaattacatttgatgggaaggaaatagaaaacttgttaatatcaaaccacctctagtagtttgagcatgaaagggtccacgaagttggctggctctctgaaagaagactttcctagggctggagatttctcatgggtggctctgggtagggctttgcctctttctttcttcattctgaactcacaccatttcttgaaatcatttaaacctctatatccttctctagaagaattaggtctgtggtttacttcatctttttttcagggcctctaacaattttgtttttcagggtatcgggttgaatatgaagctttgtgtaaagtagaagcagaacaaaatgaatttattgaccaatttatttttcagaaatgaactgaaaatttcgcttttatagtaggaaggcaaaacaaaaaaaagcctctcaaaaccaaaaaaacctctgtagcattccagcggcttgaccaatgacctatgtcacaagaggtggcgtgtaaggaatgcagccccctgaagacagcactacaagtctgggggagccagttttaacatcagtgcacagctgctgctggtggccctgcagtgtacgttctcacctcttatgcttagttggaactaagcagtttgtaaactttcatccttttttttgtaaattcacaaagctttggaaggagaagcaataaatttttgttttcaaatggcttgatgtaccttttttcctgttgctcttgaaatatgtttaactcctcatgagagaaccctggattctctatcccctagtccacaaaacaaaccaggcagtggtcagcagctacctttatttggatcacacacgtgagtcagacagtaccactaatcgggccaatatggcttgtgagcaaaatgggtgaaaatagagggaactgactgggacctgttgtctaacatcattttaaggttgaacttgagcaaagacttagagaaagctgatggaatgccaagcatcaacgtgaagagaccctctatgcacacagtggatatgttatgcctggctgtagccaccttctcttctgaaaacaagatgggaatgacggaactgtattaaaagattaagttatccactagggagcatactagcacacttccagatcagccttgagatgctagacttcagatacagggacttgtgtcaggtggcctctagaaatgtggaagactaagatttagaaataaactaatttaaaagcaaacaaacaaaaaaaactttcgcctaggatgatctgtttacaacagaaacaaaaacattttccagtttaatccatttgactgaaagtcattgttgggctgacccttaaggaaaacttaagtttaaacttcctttgcatagtatgttttctcttttttccttgggttagaggtgggaacaagaaaacattgatatagttttgaattaacattaaagaggcaaaatttcacatttaaaatggcccaaaatatcccactattcattttgctgacaggtgatacactcttgagaatcaggagtggagggtttagtcataagcatatatgctgtgggtcaggtgactcatgaacatgtcaaacaggccatgttctttagcagtttctggtctggtcctgcttttagtaatcttgcggtggaactcaggcacacagttatttggtaccacttccttataacctagcccacacccctttgcccaccctcaagccgatcggtctgttcatcccagtgcccttagaaggtgaaggtttgggctgggcccagtggttcacgtctgtaatcccagc

SEQ ID NO: 358986 - DNA, 1864 bp, Homo sapiens
caggaaggtagtgacgtcataggtaaacaggctctgtatccgtggcagcggccgtggcaggctggctgggtaccggctgtcgctgacccaggagaagctgcctgtctacatcagcctgggctgcagcgcgctgccgccgcggggccggcagccatggccaaggacatcctgggtgaagcagggctacactttgatgaactgaacaagctgagggtgttggacccagaggttacccagcagaccatagagctgaaggaagagtgcaaagactttgtggacaaaattggccagtttcagaaaatagttggtggtttaattgagcttgttgatcaacttgcaaaagaagcagaaaatgaaaagatgaaggtatcgggttgaatatgaagctttgtgtaaagtagaagcagaacaaaatgaatttattgaccaatttatttttcagaaatgaactgaaaatttcgcttttatagtaggaaggcaaaacaaaaaaaagcctctcaaaaccaaaaaaacctctgtagcattccagcggcttgaccaatgacctatgtcacaagaggtggcgtgtaaggaatgcagccccctgaagacagcactacaagtctgggggagccagttttaacatcagtgcacagctgctgctggtggccctgcagtgtacgttctcacctcttatgcttagttggaactaagcagtttgtaaactttcatccttttttttgtaaattcacaaagctttggaaggagaagcaataaatttttgttttcaaatggcttgatgtaccttttttcctgttgctcttgaaatatgtttaactcctcatgagagaaccctggattctctatcccctagtccacaaaacaaaccaggcagtggtcagcagctacctttatttggatcacacacgtgagtcagacagtaccactaatcgggccaatatggcttgtgagcaaaatgggtgaaaatagagggaactgactgggacctgttgtctaacatcattttaaggttgaacttgagcaaagacttagagaaagctgatggaatgccaagcatcaacgtgaagagaccctctatgcacacagtggatatgttatgcctggctgtagccaccttctcttctgaaaacaagatgggaatgacggaactgtattaaaagattaagttatccactagggagcatactagcacacttccagatcagccttgagatgctagacttcagatacagggacttgtgtcaggtggcctctagaaatgtggaagactaagatttagaaataaactaatttaaaagcaaacaaacaaaaaaaactttcgcctaggatgatctgtttacaacagaaacaaaaacattttccagtttaatccatttgactgaaagtcattgttgggctgacccttaaggaaaacttaagtttaaacttcctttgcatagtatgttttctcttttttccttgggttagaggtgggaacaagaaaacattgatatagttttgaattaacattaaagaggcaaaatttcacatttaaaatggcccaaaatatcccactattcattttgctgacaggtgatacactcttgagaatcaggagtggagggtttagtcataagcatatatgctgtgggtcaggtgactcatgaacatgtcaaacaggccatgttctttagcagtttctggtctggtcctgcttttagtaatcttgcggtggaactcaggcacacagttatttggtaccacttccttataacctagcccacacccctttgcccaccctcaagccgatcggtctgttcatcccagtgcccttagaaggtgaaggtttgggctgggcccagtggttcacgtctgtaatcccagc

SEQ ID NO: 358987 - DNA, 1596 bp, Homo sapiens
  misc_feature (43)..(43): n is a, c, g, or t
  misc_feature (45)..(45): n is a, c, g, or t
  misc_feature (88)..(88): n is a, c, g, or t
gttccccccttccccacagtgaaccgagatggcaacactgcantncagacgggaccacagagcaagaatccatttccaaaaaaaaaanatacataaaagtatcgggttgaatatgaagctttgtgtaaagtagaagcagaacaaaatgaatttattgaccaatttatttttcagaaatgaactgaaaatttcgcttttatagtaggaaggcaaaacaaaaaaaagcctctcaaaaccaaaaaaacctctgtagcattccagcggcttgaccaatgacctatgtcacaagaggtggcgtgtaaggaatgcagccccctgaagacagcactacaagtctgggggagccagttttaacatcagtgcacagctgctgctggtggccctgcagtgtacgttctcacctcttatgcttagttggaactaagcagtttgtaaactttcatccttttttttgtaaattcacaaagctttggaaggagaagcaataaatttttgttttcaaatggcttgatgtaccttttttcctgttgctcttgaaatatgtttaactcctcatgagagaaccctggattctctatcccctagtccacaaaacaaaccaggcagtggtcagcagctacctttatttggatcacacacgtgagtcagacagtaccactaatcgggccaatatggcttgtgagcaaaatgggtgaaaatagagggaactgactgggacctgttgtctaacatcattttaaggttgaacttgagcaaagacttagagaaagctgatggaatgccaagcatcaacgtgaagagaccctctatgcacacagtggatatgttatgcctggctgtagccaccttctcttctgaaaacaagatgggaatgacggaactgtattaaaagattaagttatccactagggagcatactagcacacttccagatcagccttgagatgctagacttcagatacagggacttgtgtcaggtggcctctagaaatgtggaagactaagatttagaaataaactaatttaaaagcaaacaaacaaaaaaaactttcgcctaggatgatctgtttacaacagaaacaaaaacattttccagtttaatccatttgactgaaagtcattgttgggctgacccttaaggaaaacttaagtttaaacttcctttgcatagtatgttttctcttttttccttgggttagaggtgggaacaagaaaacattgatatagttttgaattaacattaaagaggcaaaatttcacatttaaaatggcccaaaatatcccactattcattttgctgacaggtgatacactcttgagaatcaggagtggagggtttagtcataagcatatatgctgtgggtcaggtgactcatgaacatgtcaaacaggccatgttctttagcagtttctggtctggtcctgcttttagtaatcttgcggtggaactcaggcacacagttatttggtaccacttccttataacctagcccacacccctttgcccaccctcaagccgatcggtctgttcatcccagtgcccttagaaggtgaaggtttgggctgggcccagtggttcacgtctgtaatcccagc

SEQ ID NO: 358988 - DNA, 998 bp, Homo sapiens
caggaaggtagtgacgtcataggtaaacaggctctgtatccgtggcagcggccgtggcaggctggctgggtaccggctgtcgctgacccaggagaagctgcctgtctacatcagcctgggctgcagcgcgctgccgccgcggggccggcagctgaactatgtgctcttcagggcgggcaccgtgttgcattcatctttgtacccccagcatctagcagtgttggcatgtagtaggcactcaagaaatgtgtgttgaatgaacgatgcctgtgacaagcaagcggactttattctttcctgacccttgctcctatgacacacctcctcctgactgccactgtcactccttcagagcagaactcctctagggaacctggatgggaaacagccatggccaaggacatcctgggtgaagcagggctacactttgatgaactgaacaagctgagggtgttggacccagaggttacccagcagaccatagagctgaaggaagagtgcaaagactttgtggacaaaattggccagtttcagaaaatagttggtggtttaattgagcttgttgatcaacttgcaaaagaagcagaaaatgaaaagatgaaggtaagatcagcatgtcttccgcctacatcttggcctgggaccctagttcactaccctctcatccctcttccctcttgatttatttagaggggtagagggctgggtgggtgaatttttatttaagattttaataacttctggtccacttaacctactgaacttttgccaatctttatttcctttaatctttattttttttttttttttgagacagagtcttgctgtgtcacccaggctggagtgcactggtgcaatctcggctcactgcaagctctgcctctcagattcaagcgattctcccacctcaccctcccgagtaggtgggactacaggtgtgtgccaccacacccagctgaggtttttgtatttttttttttttttttgagacggagttt

SEQ ID NO: 358989 - DNA, 2080 bp, Homo sapiens
caggaaggtagtgacgtcataggtaaacaggctctgtatccgtggcagcggccgtggcaggctggctgggtaccggctgtcgctgacccaggagaagctgcctgtctacatcagcctgggctgcagcgcgctgccgccgcggggccggcagccatggccaaggacatcctgggtgaagcagggctacactttgatgaactgaacaagctgagggtgttggacccagaggttacccagcagaccatagagctgaaggaagagtgcaaagactttgtggacaaaattggccagtttcagaaaatagttggtggtttaattgagcttgttgatcaacttgcaaaagaagcagaaaatgaaaagatgaagagtcttgctgtgtcacccaggctggagtgcactggtgcaatctcggctcactgcaagctctgcctctcagattcaagcgattctcccacctcaccctcccgagtaggtgggagccatcggtgctcggaacttgctcaaatctatagcaaagcagagagaagctcaacagcagcaacttcaagccctaatagcagaaaagaaaatgcagctagaaaggtatcgggttgaatatgaagctttgtgtaaagtagaagcagaacaaaatgaatttattgaccaatttatttttcagaaatgaactgaaaatttcgcttttatagtaggaaggcaaaacaaaaaaaagcctctcaaaaccaaaaaaacctctgtagcattccagcggcttgaccaatgacctatgtcacaagaggtggcgtgtaaggaatgcagccccctgaagacagcactacaagtctgggggagccagttttaacatcagtgcacagctgctgctggtggccctgcagtgtacgttctcacctcttatgcttagttggaactaagcagtttgtaaactttcatccttttttttgtaaattcacaaagctttggaaggagaagcaataaatttttgttttcaaatggcttgatgtaccttttttcctgttgctcttgaaatatgtttaactcctcatgagagaaccctggattctctatcccctagtccacaaaacaaaccaggcagtggtcagcagctacctttatttggatcacacacgtgagtcagacagtaccactaatcgggccaatatggcttgtgagcaaaatgggtgaaaatagagggaactgactgggacctgttgtctaacatcattttaaggttgaacttgagcaaagacttagagaaagctgatggaatgccaagcatcaacgtgaagagaccctctatgcacacagtggatatgttatgcctggctgtagccaccttctcttctgaaaacaagatgggaatgacggaactgtattaaaagattaagttatccactagggagcatactagcacacttccagatcagccttgagatgctagacttcagatacagggacttgtgtcaggtggcctctagaaatgtggaagactaagatttagaaataaactaatttaaaagcaaacaaacaaaaaaaactttcgcctaggatgatctgtttacaacagaaacaaaaacattttccagtttaatccatttgactgaaagtcattgttgggctgacccttaaggaaaacttaagtttaaacttcctttgcatagtatgttttctcttttttccttgggttagaggtgggaacaagaaaacattgatatagttttgaattaacattaaagaggcaaaatttcacatttaaaatggcccaaaatatcccactattcattttgctgacaggtgatacactcttgagaatcaggagtggagggtttagtcataagcatatatgctgtgggtcaggtgactcatgaacatgtcaaacaggccatgttctttagcagtttctggtctggtcctgcttttagtaatcttgcggtggaactcaggcacacagttatttggtaccacttccttataacctagcccacacccctttgcccaccctcaagccgatcggtctgttcatcccagtgcccttagaaggtgaaggtttgggctgggcccagtggttcacgtctgtaatcccagc

SEQ ID NO: 358990 - DNA, 2205 bp, Homo sapiens
caggaaggtagtgacgtcataggtaaacaggctctgtatccgtggcagcggccgtggcaggctggctgggtaccggctgtcgctgacccaggagaagctgcctgtctacatcagcctgggctgcagcgcgctgccgccgcggggccggcagctgaactatgtgctcttcagggcgggcaccgtgttgcattcatctttgtacccccagcatctagcagtgttggcatgtagtaggcactcaagaaatgtgtgttgaatgaacgatgcctgtgacaagcaagcggactttattctttcctgacccttgctcctatgacacacctcctcctgactgccactgtcactccttcagagcagaactcctctagggaacctggatgggaaacagccatggccaaggacatcctgggtgaagcagggctacactttgatgaactgaacaagctgagggtgttggacccagaggttacccagcagaccatagagctgaaggaagagtgcaaagactttgtggacaaaattggccagtttcagaaaatagttggtggtttaattgagcttgttgatcaacttgcaaaagaagcagaaaatgaaaagatgaaggccatcggtgctcggaacttgctcaaatctatagcaaagcagagagaagctcaacagcagcaacttcaagccctaatagcagaaaagaaaatgcagctagaaaggtatcgggttgaatatgaagctttgtgtaaagtagaagcagaacaaaatgaatttattgaccaatttatttttcagaaatgaactgaaaatttcgcttttatagtaggaaggcaaaacaaaaaaaagcctctcaaaaccaaaaaaacctctgtagcattccagcggcttgaccaatgacctatgtcacaagaggtggcgtgtaaggaatgcagccccctgaagacagcactacaagtctgggggagccagttttaacatcagtgcacagctgctgctggtggccctgcagtgtacgttctcacctcttatgcttagttggaactaagcagtttgtaaactttcatccttttttttgtaaattcacaaagctttggaaggagaagcaataaatttttgttttcaaatggcttgatgtaccttttttcctgttgctcttgaaatatgtttaactcctcatgagagaaccctggattctctatcccctagtccacaaaacaaaccaggcagtggtcagcagctacctttatttggatcacacacgtgagtcagacagtaccactaatcgggccaatatggcttgtgagcaaaatgggtgaaaatagagggaactgactgggacctgttgtctaacatcattttaaggttgaacttgagcaaagacttagagaaagctgatggaatgccaagcatcaacgtgaagagaccctctatgcacacagtggatatgttatgcctggctgtagccaccttctcttctgaaaacaagatgggaatgacggaactgtattaaaagattaagttatccactagggagcatactagcacacttccagatcagccttgagatgctagacttcagatacagggacttgtgtcaggtggcctctagaaatgtggaagactaagatttagaaataaactaatttaaaagcaaacaaacaaaaaaaactttcgcctaggatgatctgtttacaacagaaacaaaaacattttccagtttaatccatttgactgaaagtcattgttgggctgacccttaaggaaaacttaagtttaaacttcctttgcatagtatgttttctcttttttccttgggttagaggtgggaacaagaaaacattgatatagttttgaattaacattaaagaggcaaaatttcacatttaaaatggcccaaaatatcccactattcattttgctgacaggtgatacactcttgagaatcaggagtggagggtttagtcataagcatatatgctgtgggtcaggtgactcatgaacatgtcaaacaggccatgttctttagcagtttctggtctggtcctgcttttagtaatcttgcggtggaactcaggcacacagttatttggtaccacttccttataacctagcccacacccctttgcccaccctcaagccgatcggtctgttcatcccagtgcccttagaaggtgaaggtttgggctgggcccagtggttcacgtctgtaatcccagc

SEQ ID NO: 358991 - DNA, 3404 bp, Homo sapiens
caggaaggtagtgacgtcataggtaaacaggctctgtatccgtggcagcggccgtggcaggctggctgggtaccggctgtcgctgacccaggagaagctgcctgtctacatcagcctgggctgcagcgcgctgccgccgcggggccggcagccatggccaaggacatcctgggtgaagcagggctacactttgatgaactgaacaagctgagggtgttggacccagaggttacccagcagaccatagagctgaaggaagagtgcaaagactttgtggacaaaattggccagtttcagaaaatagttggtggtttaattgagcttgttgatcaacttgcaaaagaagcagaaaatgaaaagatgaaggtaagatcagcatgtcttccgcctacatcttggcctgggaccctagttcactaccctctcatccctcttccctcttgatttatttagaggggtagagggctgggtgggtgaatttttatttaagattttaataacttctggtccacttaacctactgaacttttgccaatctttatttcctttaatctttattttttttttttttttgagacagagtcttgctgtgtcacccaggctggagtgcactggtgcaatctcggctcactgcaagctctgcctctcagattcaagcgattctcccacctcaccctcccgagtaggtgggactgggattacaggcatgtgccaccatgcctggctaattttgtatttttagtagagacagggtttctccatgttggtcaggctggtctcaaactcccaaccttaggtgatccgcccgcctcagcctcccaaagtgctgggattaaggcgtgagtgactgcgcccggccatttttttgtatttttagtaaagatggggtttcaccatgttggccaggctggttgcaaactcctggcctcaagtgaactgcctaccttggcctcccaaagtgctgggattgcaggtgtgagccaccacacctggcctcgtttcatcttcatatcagcactgatgtagatggtcttatcctcattttataaatgaagaaatgaaggcttacatagtatgattggtgaaaggcacaaggctgaatggcaccaccaaatgtgctattgtgcctgtgtccctggctctaggaatactcctagacctgcctcaaagctgccgtctagttcttgaggcactttgtgatcagtaggttaatccttctgacttaacccaaaagctttggggctccactttcttttcctctctgaagactgacacagctcccagataacccctccccactttgaggacttgatgctgtagatggttttaatgaagccatggccttctctggcaatactgtaggccatcggtgctcggaacttgctcaaatctatagcaaagcagagagaagctcaacagcagcaacttcaagccctaatagcagaaaagaaaatgcagctagaaaggtaagaagtcatgatgtaaagcaagttctttacacagctgaatttccactcttccttctggaatgatcacttcttgtccttattcttcatcattgttttcccaggaatagcatctcacttgtcatcctgatttgaagattttaaaaaataaaattacatttgatgggaaggaaatagaaaacttgttaatatcaaaccacctctagtagtttgagcatgaaagggtccacgaagttggctggctctctgaaagaagactttcctagggctggagatttctcatgggtggctctgggtagggctttgcctctttctttcttcattctgaactcacaccatttcttgaaatcatttaaacctctatatccttctctagaagaattaggtctgtggtttacttcatctttttttcagggcctctaacaattttgtttttcagggtatcgggttgaatatgaagctttgtgtaaagtagaagcagaacaaaatgaatttattgaccaatttatttttcagaaatgaactgaaaatttcgcttttatagtaggaaggcaaaacaaaaaaaagcctctcaaaaccaaaaaaacctctgtagcattccagcggcttgaccaatgacctatgtcacaagaggtggcgtgtaaggaatgcagccccctgaagacagcactacaagtctgggggagccagttttaacatcagtgcacagctgctgctggtggccctgcagtgtacgttctcacctcttatgcttagttggaactaagcagtttgtaaactttcatccttttttttgtaaattcacaaagctttggaaggagaagcaataaatttttgttttcaaatggcttgatgtaccttttttcctgttgctcttgaaatatgtttaactcctcatgagagaaccctggattctctatcccctagtccacaaaacaaaccaggcagtggtcagcagctacctttatttggatcacacacgtgagtcagacagtaccactaatcgggccaatatggcttgtgagcaaaatgggtgaaaatagagggaactgactgggacctgttgtctaacatcattttaaggttgaacttgagcaaagacttagagaaagctgatggaatgccaagcatcaacgtgaagagaccctctatgcacacagtggatatgttatgcctggctgtagccaccttctcttctgaaaacaagatgggaatgacggaactgtattaaaagattaagttatccactagggagcatactagcacacttccagatcagccttgagatgctagacttcagatacagggacttgtgtcaggtggcctctagaaatgtggaagactaagatttagaaataaactaatttaaaagcaaacaaacaaaaaaaactttcgcctaggatgatctgtttacaacagaaacaaaaacattttccagtttaatccatttgactgaaagtcattgttgggctgacccttaaggaaaacttaagtttaaacttcctttgcatagtatgttttctcttttttccttgggttagaggtgggaacaagaaaacattgatatagttttgaattaacattaaagaggcaaaatttcacatttaaaatggcccaaaatatcccactattcattttgctgacaggtgatacactcttgagaatcaggagtggagggtttagtcataagcatatatgctgtgggtcaggtgactcatgaacatgtcaaacaggccatgttctttagcagtttctggtctggtcctgcttttagtaatcttgcggtggaactcaggcacacagttatttggtaccacttccttataacctagcccacacccctttgcccaccctcaagccgatcggtctgttcatcccagtgcccttagaaggtgaaggtttgggctgggcccagtggttcacgtctgtaatcccagc

SEQ ID NO: 358992 - DNA, 2541 bp, Homo sapiens
caggaaggtagtgacgtcataggtaaacaggctctgtatccgtggcagcggccgtggcaggctggctgggtaccggctgtcgctgacccaggagaagctgcctgtctacatcagcctgggctgcagcgcgctgccgccgcggggccggcagctgaactatgtgctcttcagggcgggcaccgtgttgcattcatctttgtacccccagcatctagcagtgttggcatgtagtaggcactcaagaaatgtgtgttgaatgaacgatgcctgtgacaagcaagcggactttattctttcctgacccttgctcctatgacacacctcctcctgactgccactgtcactccttcagagcagaactcctctagggaacctggatgggaaacagccatggccaaggacatcctgggtgaagcagggctacactttgatgaactgaacaagctgagggtgttggacccagaggttacccagcagaccatagagctgaaggaagagtgcaaagactttgtggacaaaattggccagtttcagaaaatagttggtggtttaattgagcttgttgatcaacttgcaaaagaagcagaaaatgaaaagatgaaggccatcggtgctcggaacttgctcaaatctatagcaaagcagagagaagctcaacagcagcaacttcaagccctaatagcagaaaagaaaatgcagctagaaaggaatagcatctcacttgtcatcctgatttgaagattttaaaaaataaaattacatttgatgggaaggaaatagaaaacttgttaatatcaaaccacctctagtagtttgagcatgaaagggtccacgaagttggctggctctctgaaagaagactttcctagggctggagatttctcatgggtggctctgggtagggctttgcctctttctttcttcattctgaactcacaccatttcttgaaatcatttaaacctctatatccttctctagaagaattaggtctgtggtttacttcatctttttttcagggcctctaacaattttgtttttcagggtatcgggttgaatatgaagctttgtgtaaagtagaagcagaacaaaatgaatttattgaccaatttatttttcagaaatgaactgaaaatttcgcttttatagtaggaaggcaaaacaaaaaaaagcctctcaaaaccaaaaaaacctctgtagcattccagcggcttgaccaatgacctatgtcacaagaggtggcgtgtaaggaatgcagccccctgaagacagcactacaagtctgggggagccagttttaacatcagtgcacagctgctgctggtggccctgcagtgtacgttctcacctcttatgcttagttggaactaagcagtttgtaaactttcatccttttttttgtaaattcacaaagctttggaaggagaagcaataaatttttgttttcaaatggcttgatgtaccttttttcctgttgctcttgaaatatgtttaactcctcatgagagaaccctggattctctatcccctagtccacaaaacaaaccaggcagtggtcagcagctacctttatttggatcacacacgtgagtcagacagtaccactaatcgggccaatatggcttgtgagcaaaatgggtgaaaatagagggaactgactgggacctgttgtctaacatcattttaaggttgaacttgagcaaagacttagagaaagctgatggaatgccaagcatcaacgtgaagagaccctctatgcacacagtggatatgttatgcctggctgtagccaccttctcttctgaaaacaagatgggaatgacggaactgtattaaaagattaagttatccactagggagcatactagcacacttccagatcagccttgagatgctagacttcagatacagggacttgtgtcaggtggcctctagaaatgtggaagactaagatttagaaataaactaatttaaaagcaaacaaacaaaaaaaactttcgcctaggatgatctgtttacaacagaaacaaaaacattttccagtttaatccatttgactgaaagtcattgttgggctgacccttaaggaaaacttaagtttaaacttcctttgcatagtatgttttctcttttttccttgggttagaggtgggaacaagaaaacattgatatagttttgaattaacattaaagaggcaaaatttcacatttaaaatggcccaaaatatcccactattcattttgctgacaggtgatacactcttgagaatcaggagtggagggtttagtcataagcatatatgctgtgggtcaggtgactcatgaacatgtcaaacaggccatgttctttagcagtttctggtctggtcctgcttttagtaatcttgcggtggaactcaggcacacagttatttggtaccacttccttataacctagcccacacccctttgcccaccctcaagccgatcggtctgttcatcccagtgcccttagaaggtgaaggtttgggctgggcccagtggttcacgtctgtaatcccagc

SEQ ID NO: 358993 - DNA, 2101 bp, Homo sapiens
caggaaggtagtgacgtcataggtaaacaggctctgtatccgtggcagcggccgtggcaggctggctgggtaccggctgtcgctgacccaggagaagctgcctgtctacatcagcctgggctgcagcgcgctgccgccgcggggccggcagctgaactatgtgctcttcagggcgggcaccgtgttgcattcatctttgtacccccagcatctagcagtgttggcatgtagtaggcactcaagaaatgtgtgttgaatgaacgatgcctgtgacaagcaagcggactttattctttcctgacccttgctcctatgacacacctcctcctgactgccactgtcactccttcagagcagaactcctctagggaacctggatgggaaacagccatggccaaggacatcctgggtgaagcagggctacactttgatgaactgaacaagctgagggtgttggacccagaggttacccagcagaccatagagctgaaggaagagtgcaaagactttgtggacaaaattggccagtttcagaaaatagttggtggtttaattgagcttgttgatcaacttgcaaaagaagcagaaaatgaaaagatgaaggtatcgggttgaatatgaagctttgtgtaaagtagaagcagaacaaaatgaatttattgaccaatttatttttcagaaatgaactgaaaatttcgcttttatagtaggaaggcaaaacaaaaaaaagcctctcaaaaccaaaaaaacctctgtagcattccagcggcttgaccaatgacctatgtcacaagaggtggcgtgtaaggaatgcagccccctgaagacagcactacaagtctgggggagccagttttaacatcagtgcacagctgctgctggtggccctgcagtgtacgttctcacctcttatgcttagttggaactaagcagtttgtaaactttcatccttttttttgtaaattcacaaagctttggaaggagaagcaataaatttttgttttcaaatggcttgatgtaccttttttcctgttgctcttgaaatatgtttaactcctcatgagagaaccctggattctctatcccctagtccacaaaacaaaccaggcagtggtcagcagctacctttatttggatcacacacgtgagtcagacagtaccactaatcgggccaatatggcttgtgagcaaaatgggtgaaaatagagggaactgactgggacctgttgtctaacatcattttaaggttgaacttgagcaaagacttagagaaagctgatggaatgccaagcatcaacgtgaagagaccctctatgcacacagtggatatgttatgcctggctgtagccaccttctcttctgaaaacaagatgggaatgacggaactgtattaaaagattaagttatccactagggagcatactagcacacttccagatcagccttgagatgctagacttcagatacagggacttgtgtcaggtggcctctagaaatgtggaagactaagatttagaaataaactaatttaaaagcaaacaaacaaaaaaaactttcgcctaggatgatctgtttacaacagaaacaaaaacattttccagtttaatccatttgactgaaagtcattgttgggctgacccttaaggaaaacttaagtttaaacttcctttgcatagtatgttttctcttttttccttgggttagaggtgggaacaagaaaacattgatatagttttgaattaacattaaagaggcaaaatttcacatttaaaatggcccaaaatatcccactattcattttgctgacaggtgatacactcttgagaatcaggagtggagggtttagtcataagcatatatgctgtgggtcaggtgactcatgaacatgtcaaacaggccatgttctttagcagtttctggtctggtcctgcttttagtaatcttgcggtggaactcaggcacacagttatttggtaccacttccttataacctagcccacacccctttgcccaccctcaagccgatcggtctgttcatcccagtgcccttagaaggtgaaggtttgggctgggcccagtggttcacgtctgtaatcccagc

SEQ ID NO: 358994 - DNA, 903 bp, Homo sapiens
  misc_feature (865)..(865): n is a, c, g, or t
caggaaggtagtgacgtcataggtaaacaggctctgtatccgtggcagcggccgtggcaggctggctgggtaccggctgtcgctgacccaggagaagctgcctgtctacatcagcctgggctgcagcgcgctgccgccgcggggccggcagccatggccaaggacatcctgggtgaagcagggctacactttgatgaactgaacaagctgagggtgttggacccagaggttacccagcagaccatagagctgaaggaagagtgcaaagactttgtggacaaaattggccagtttcagaaaatagttggtggtttaattgagcttgttgatcaacttgcaaaagaagcagaaaatgaaaagatgaaggccatcggtgctcggaacttgctcaaatctatagcaaagcagagagaagctcaacagcagcaacttcaagccctaatagcagaaaagaaaatgcagctagaaaggtatcgggttgaatatgaagctttgtgtaaagtagaagcagaacaaaatgaatttattgaccaatttatttttcagaaatgaactgaaaatttcgcttttatagtaggaaggcaaaacaaaaaaaagcctctcaaaaccaaaaaaacctctgtagcattccagcggcttgaccaatgacctatgtcacaagaggtggcgtgtaaggaatgcagccccctgaagacagcactacaagtctgggggagccagttttaacatcagtgcacagctgctgctggtggccctgcagtgtacgttctcacctcttatgcttagttggaactaagcagtttgtaaactttcatccttttttttgtaaattcacaaagctttggaaggagaagcaataaatttnggtctgcacacccagaccaatattggtctgcacacggg

SEQ ID NO: 358995 - DNA, 436 bp, Homo sapiens
aatgttctgtgtatgtctattaggtccattttgcttaaagtgtagttcaagtttaatatttctttattgattatctcattggatgatctatctattaccaaaagtgagatattgaagccccctactattattgcattgttgtctgtttttgccttcatgtctgttaatatttggttaatatatttaggtcctctggttttgggtgcatatatgattattatatcctccagataaattgacccctttattttaaaattctatcttgtttttctatgtatttctttctgactagacttgtgatatgcgtgtgtttatgtacagaaatttttagtgtttttgttatgttctgttattgacccaaaggccatctttattttctataactgttcaaaatttatattaaaatctacttaggagataatttctttagaaccta

SEQ ID NO: 358996 - DNA, 1570 bp, Homo sapiens
atcacgaccggcggtggcacatgcgcaatagcgagacgctggagcgcggcgtaggtggctgccgagtcttttcctgtttagggtcttatcctggcattgagggcgccggactggcgcttttggccggcttggcattgggtgggcggcttcttgggacccacatgagccagtggcatcatccccgcagtggctggggccggagacgcgacttttcaggacgctcctcagccaagaagaagggcggaaaccacatccccgaaaggtggaaagactatctcccagttggacagcggatgcctgggactcgtttcattgctttcaaagttcctttgcaaaagagttttgaaaagaaacttgctccagaagaatgcttttcccctttggatctttttaacaaaatccgagaacaaaatgaagaacttggactgattattgatttaacatatactcaacgctattataaaccagaggatttgccagaaactgttccttacttaaaaatttttacagttggacatcaagtgcctgatgatgagactatttttaaattcaaacacgctgttaatgggtttttgaaagaaaataaagataatgataaacttattggtgtccactgtacccatggtttaaacaggactggctacctcatttgcagtattcaataggtgccggggacattgcttagaaagacaaaactacattgaagaccttcagaatggtcctatcagaaagaattggaattccagtgtacccaggtcaagtgattttgaagactcagcacatctcatgcaaccagtccacaataagcctgttaaacaaggacctaggtataatctacatcagatccagggtcactcagctcctcgacatttccacacccagacccaaagtttgcaacaatcagtcagaaaattttcagagaatccacatgtttaccagagacaccatctccctcctcctggtccccctggagaggactattcacacaggaggtattcttggaatgtgaagcccaatgccagtcgggcagcccaggatagaagaaggtggtatccttataattactccagactctcctatccagcctgttgggaatggacccagtgatacaaacctgtcctggaattctacctggagaccagagctggcctgaaaattactggtgtgacttttaattagttcaggtctaatcaggtttctttattgttcccttatgtattcaagcttaaggaaaaattgcattgctgtttacctctttgctgataaatttgcagtaattacagcattgcaggaaaaacaatctgttattccagtcttaaatttttctaaaagaagacaatattttagaactgaagcattgagaacttcccttgcaaattatttttaaaattctatcttgtttttctatgtatttctttctgactagacttgtgatatgcgtgtgtttatgtacagaaatttttagtgtttttgttatgttctgttattgacccaaaggccatctttattttctataactgttcaaaatttatattaaaatctacttaggagataatttctttagaaccta

SEQ ID NO: 358997 - DNA, 1211 bp, Homo sapiens
ggatgacggagggcgggcgggggtaatgtcatcgacgaggctcagcgctattataaaccagagggatttgccagaaactgttccttacttaaaaatttttacagttggacatcaagtgcctgatgatgagactatttttaaattcaaacacgctgttaatgggtttttgaaagaaaataaagataatgataaacttattggtgtccactgtacccatggtttaaacaggactggctacctcatttgcagatatttgattgatgtagaaggcgtgaggccagatgatgcaattgaattattcaataggtgccggggacattgcttagaaagacaaaactacattgaagaccttcagaatggtcctatcagaaagaattggaattccagtgtacccaggtcaagtgattttgaagactcagcacatctcatgcaaccagtccacaataagcctgttaaacaaggacctaggtataatctacatcagatccagggtcactcagctcctcgacatttccacacccagacccaaagtttgcaacaatcagtcagaaaattttcagagaatccacatgtttaccagagacaccatctccctcctcctggtccccctggagaggactattcacacaggaggtattcttggaatgtgaagcccaatgccagtcgggcagcccaggatagaagaaggtggtatccttataattactccagactctcctatccagcctgttgggaatggacccagtgatacaaacctgtcctggaattctacctggagaccagagctggcctgaaaattactggtgtgacttttaattagttcaggtctaatcaggtttctttattgttcccttatgtattcaagcttaaggaaaaattgcattgctgtttacctctttgctgataaatttgcagtaattacagcattgcaggaaaaacaatctgttattccagtcttaaatttttctaaaagaagacaatattttagaactgaagcattgagaacttcccttgcaaattatttttaaaattctatcttgtttttctatgtatttctttctgactagacttgtgatatgcgtgtgtttatgtacagaaatttttagtgtttttgttatgttctgttattgacccaaaggccatctttattttctataactgttcaaaatttatattaaaatctacttaggagataatttctttagaaccta

SEQ ID NO: 358998 - DNA, 1801 bp, Homo sapiens
atcacgaccggcggtggcacatgcgcaatagcgagacgctggagcgcggcgtaggtggctgccgagtcttttcctgtttagggtcttatcctggcattgagggcgccggactggcgcttttggccggcttggcattgggtgggcggcttcttgggacccacatgagccagtggcatcatccccgcagtggctggggccggagacgcgacttttcaggacgctcctcagccaagaagaagggcggaaaccacatccccgaaaggtggaaagactatctcccagttggacagcggatgcctgggactcgtttcattgctttcaaagttcctttgcaaaagagttttgaaaagaaacttgctccagaagaatgcttttcccctttggatctttttaacaaaatccgagaacaaaatgaagaacttggactgattattgatttaacatatactcaacgctattataaaccagaggatttgccagaaactgttccttacttaaaaatttttacagttggacatcaagtgcctgatgatgagactatttttaaattcaaacacgctgttaatgggtttttgaaagaaaataaagataatgataaacttattggtgtccactgtacccatggtttaaacaggactggctacctcatttgcagatatttgattgatgtagaaggcgtgaggccagatgatgcaattgaattattcaataggtgccggggacattgcttagaaagacaaaactacattgaagaccttcagaatggtcctatcagaaagaattggaattccagtgtacccaggtcaagtgattttgaagactcagcacatctcatgcaaccagtccacaataagcctgttaaacaaggacctaggtataatctacatcagatccagggtcactcagctcctcgacatttccacacccagacccaaagtttgcaacaatcagtcagaaaattttcagagaatccacatgtttaccagagacaccatctccctcctcctggtccccctggagaggactattcacacaggaggtattcttggaatgtgaagcccaatgccagtcgggcagcccaggatagaagaaggtggtatccttataattactccagactctcctatccagcctgttgggaatggacccagtgatacaaacctgtcctggaattctacctggagaccagagctggcctgaaaattactggtgtgacttttaattagttcaggtctaatcaggtttctttattgttcccttatgtattcaagcttaaggaaaaattgcattgctgtttacctctttgctgataaatttgcagtaattacagcattgcaggaaaaacaatctgttattccagtcttaaatttttctaaaagaagacaatattttagaactgaagcattgagaacttcccttgcaaattatttttaaaattctatcttgtttttctatgtatttctttctgactagacttgtgatatgcgtgtgtttatgtacagaaatttttagtgtttttgttatgttctgttattgacccaaaggccatctttattttctataactgttcaaaatttatattaaaatctacttaggagataatttctttagaacctaaaaaaaaaaaagggggcgcctaaagtttcctcgagggccagttacgcgtcccagctttttgtccagggccttaagggagcgattaagaggaggcgggttacaaggggaggaaacagcgtggactgggagcctcctcggggatattggaccaccagattggcggataaatgggttggacagatcg

SEQ ID NO: 358999 - DNA, 1617 bp, Homo sapiens
atcacgaccggcggtggcacatgcgcaatagcgagacgctggagcgcggcgtaggtggctgccgagtcttttcctgtttagggtcttatcctggcattgagggcgccggactggcgcttttggccggcttggcattgggtgggcggcttcttgggacccacatgagccagtggcatcatccccgcagtggctggggccggagacgcgacttttcaggacgctcctcagccaagaagaagggcggaaaccacatccccgaaaggtggaaagactatctcccagttggacagcggatgcctgggactcgtttcattgctttcaaagttcctttgcaaaagagttttgaaaagaaacttgctccagaagaatgcttttcccctttggatctttttaacaaaatccgagaacaaaatgaagaacttggactgattattgatttaacatatactcaacgctattataaaccagaggatttgccagaaactgttccttacttaaaaatttttacagttggacatcaagtgcctgatgatgagactatttttaaattcaaacacgctgttaatgggtttttgaaagaaaataaagataatgataaacttattggtgtccactgtacccatggtttaaacaggactggctacctcatttgcagatatttgattgatgtagaaggcgtgaggccagatgatgcaattgaattattcaataggtgccggggacattgcttagaaagacaaaactacattgaagaccttcagaatggtcctatcagaaagaattggaattccagtgtacccaggtcaagtgattttgaagactcagcacatctcatgcaaccagtccacaataagcctgttaaacaaggacctaggtataatctacatcagatccagggtcactcagctcctcgacatttccacacccagacccaaagtttgcaacaatcagtcagaaaattttcagagaatccacatgtttaccagagacaccatctccctcctcctggtccccctggagaggactattcacacaggaggtattcttggaatgtgaagcccaatgccagtcgggcagcccaggatagaagaaggtggtatccttataattactccagactctcctatccagcctgttgggaatggacccagtgatacaaacctgtcctggaattctacctggagaccagagctggcctgaaaattactggtgtgacttttaattagttcaggtctaatcaggtttctttattgttcccttatgtattcaagcttaaggaaaaattgcattgctgtttacctctttgctgataaatttgcagtaattacagcattgcaggaaaaacaatctgttattccagtcttaaatttttctaaaagaagacaatattttagaactgaagcattgagaacttcccttgcaaattatttttaaaattctatcttgtttttctatgtatttctttctgactagacttgtgatatgcgtgtgtttatgtacagaaatttttagtgtttttgttatgttctgttattgacccaaaggccatctttattttctataactgttcaaaatttatattaaaatctacttaggagataatttctttagaaccta

SEQ ID NO: 359000 - DNA, 1440 bp, Homo sapiens
atcacgaccggcggtggcacatgcgcaatagcgagacgctggagcgcggcgtaggtggctgccgagtcttttcctgtttagggtcttatcctggcattgagggcgccggactggcgcttttggccggcttggcattgggtgggcggcttcttgggacccacatgagccagtggcatcatccccgcagtggctggggccggagacgcgacttttcaggacgctcctcagccaagaagaagggcggaaaccacatccccgaaaggtggaaagactatctcccagttggacagcggatgcctgggactcgtttcattgctttcaaagttcctttgcaaaagagttttgaaaagaaacttgctccagaagaatgcttttcccctttggatctttttaacaaaatccgagaacaaaatgaagaacttggactgattattgatttaacatatactcaacgctattataaaccagaggatttgccagaaactgttccttacttaaaaatttttacagttggacatcaagtgcctgatgatgagactatttttaaattcaaacacgctgttaatgggtttttgaaagaaaataaagataatgataaacttattggtgtccactgtacccatggtttaaacaggactggctacctcatttgcagatatttgattgatgtagaaggcgtgaggccagatgatgcaattgaattattcaataggtgccggggacattgcttagaaagacaaaactacattgaagaccttcagaatggtcctatcagaaaaaaattttcagagaatccacatgtttaccagagacaccatctccctcctcctggtccccctggagaggactattcacacaggaggtattcttggaatgtgaagcccaatgccagtcgggcagcccaggatagaagaaggtggtatccttataattactccagactctcctatccagcctgttgggaatggacccagtgatacaaacctgtcctggaattctacctggagaccagagctggcctgaaaattactggtgtgacttttaattagttcaggtctaatcaggtttctttattgttcccttatgtattcaagcttaaggaaaaattgcattgctgtttacctctttgctgataaatttgcagtaattacagcattgcaggaaaaacaatctgttattccagtcttaaatttttctaaaagaagacaatattttagaactgaagcattgagaacttcccttgcaaattatttttaaaattctatcttgtttttctatgtatttctttctgactagacttgtgatatgcgtgtgtttatgtacagaaatttttagtgtttttgttatgttctgttattgacccaaaggccatctttattttctataactgttcaaaatttatattaaaatctacttaggagataatttctttagaaccta

SEQ ID NO: 359001 - DNA, 1482 bp, Homo sapiens
atcacgaccggcggtggcacatgcgcaatagcgagacgctggagcgcggcgtaggtggctgccgagtcttttcctgtttagggtcttatcctggcattgagggcgccggactggcgcttttggccggcttggcattgggtgggcggcttcttgggacccacatgagccagtggcatcatccccgcagtggctggggccggagacgcgacttttcaggacgctcctcagccaagaagaagggcggaaaccacatccccgaaaggtggaaagactatctcccagttggacagcggatgcctgggactcgtttcattgctttcaaagttcctttgcaaaagagttttgaaaagaaacttgctccagaagaatgcttttcccctttggatctttttaacaaaatccgagaacaaaatgaagaacttggactgattattgatttaacatatactcaacgctattataaaccagaggatttgccagaaactgttccttacttaaaaatttttacagttggacatcaagtgcctgatgatgagactatttttaaattcaaacacgctgttaatgggtttttgaaagaaaataaagataatgataaacttattggtgtccactgtacccatggtttaaacaggactggctacctcatttgcagacggagtcttgctctgtcacccaggctggagtgcagtggcaccatctcgactcactccaagttctgcttcccaggttcacgccgttctcctgcctcagcctcccaagtagctgggactacaggtgcccgccaccacgcccggctaattttttgtatttttagtagagatgtggtttcaccgtgttagccaggatggtcttgatctcctgaccttgtgatccacccgcctcggcctcccaaagtgctggtattacaggagtgagccaccgcgcctggccagactccttattctttttaaggcctgcgttgttctttgcacaccgatgaacacaaaagtcagaagtttttgatattataaaacattgaagtagtgaacatttctatgtaaatatttttgaatgcatatctcatagccccggaggtaatttcactcaaaatagaatttcttaatcaaatagtatgtgtcgttatgctttttatggatgttgccacactgtactgagttatgtttgttcattcagaaaatatctcctgagcatctattatgtgtaagcagtgtgctgcgtgttagcaaagagactttagctgccctttgtgcgtcctaacagtctagggagggagtagatattaaagaatcacacaaatgcctatacaattacaattccaacaagtgctgagaaggggagtgacatggtacaatgagagcatagaatagggaggatttgacttcaacaagaggactagaggtttctgtggggaggtctctgctgatccttacgttcagaattctctccacaacatccctacctggttaacacctacttata

SEQ ID NO: 359002 - DNA, 529 bp, Homo sapiens
  misc_feature (44)..(44): n is a, c, g, or t
ctcccccaccccccccctctcccacccccccacccccggcccantaggctagtacgaggcctggtgttgctgagagtggtgatggccctcacgtatgaggagaagccgccctacgccatgctgaggaacaacctagaagctttgctgcaggatctgcgtgtgtctccatatgaccccattggcctcccgatggtgccctaggtggaatccagaactttccatttgcagtgtgcaacagaaaaaaaaaaatgaagtaatgtgactcaaggcctgctgtttaatcacagataagcttctagaacaagccctggaatgtgcattcctgccactggtttcaggatactcatcagtcctgattagcctcccggagggccccagtttccctcccgtgaatgtgaagttccccatcttggtggcctgcccttcagccagtgtcctagcaaagctggatggggttgggccggcccacaggggggacccctcctacccttgacacctctgtgctttggtaataaattgttttaccaga

SEQ ID NO: 359003 - DNA, 953 bp, Homo sapiens
  misc_feature (23)..(23): n is a, c, g, or t
  misc_feature (28)..(28): n is a, c, g, or t
  misc_feature (31)..(31): n is a, c, g, or t
  misc_feature (34)..(34): n is a, c, g, or t
aaaaatataactgtgcctaaggntagcnganggnccctcgcgggtgtgttgagatgtggtgatggccctcacgtatgaggagaagccgccctacgccatgctgaggaacaacctagaagctttgctgcaggatctgcgtgtgtctccatatgaccccattggcctcccgatggtgccctaggtggaatccagaactttccatttgcagtgtgcaacagaaaaaaaaaaatgaagtaatgtgactcaaggcctgctgtttaatcacagataagcttctagaacaagccctggaatgtgcattcctgccactggtttcaggatactcatcagtcctgattagcctcccggagggccccagtttccctcccgtgaatgtgaagttccccatcttggtggcctgcccttcagccagtgtcctagcaaagctggatggggttgggccggcccacaggggggacccctcctacccttgacacctctgtgctttggtaataaattgttttaccagaaaaaaaaaaaaaaaaaaaaaaaaaaaaaaaaaaaaaaaaaacccaaaaaaaaaaaaaaaaaaaaaaaaaaaaacccttgtgggccgcttgggcccattcaattttaaactggaccaagtttatgcttgcggccgaatttcgggctcattgggccaattccccctatagggggtcgttttacaatccactggccggcgtttaaaacgtcgggactggaaaaaccctggggttaccaaattaaatccccttgaaggaaatcccctttttcccagttggggtaatagcaaaaaggcccgaaccgatcccctttccaaacagtggcccaacctgattgggaaatggaaattgtaagctgttaattttttgaaaaattcgcggtaaattttgggaaaataacctattttttaaccaaagggccaaatcgggaaatcccctattaattaa

SEQ ID NO: 359004 - DNA, 842 bp, Homo sapiens
tgaaggtcatcttgcctgtgctccacagcagctccttgccttggcccgaggccgagctcccttcctcccccgtgcacgatgcaccagccacacccccgcccctctgattctagaccaggccaagctggaccccaccccggaacctttgcacctgccatcccgagttctggaaagctcccctcatcctggctttatgtacctgctgcttctcaagacccgaggccttccccatcctccatgaggcatcctcactgcctccccacccacttgctcatcatgtcacctgttttccacacagcccttgttcccatctggagggaagcgtgtgtttagtgtgtagtctccacccgcctcctcctcatcctaagcccagcaggggctcctcatcccgtatggtcatgatgacatccccagtacctagaagatgacatccccagaacctagaaggtgcttggcatgaagtgaaggcatagagggtgttccttgaatgaatgagacactaacagcatttttattgtcttccagaactttccatttgcagtgtgcaacagaaaaaaaaaaatgaagtaatgtgactcaaggcctgctgtttaatcacagataagcttctagaacaagccctggaatgtgcattcctgccactggtttcaggatactcatcagtcctgattagcctcccggagggccccagtttccctcccgtgaatgtgaagttccccatcttggtggcctgcccttcagccagtgtcctagcaaagctggatggggttgggccggcccacaggggggacccctcctacccttgacacctctgtgctttggtaataaattgttttaccaga

SEQ ID NO: 359005 - DNA, 727 bp, Homo sapiens
ccctgtgtaagtgaaggtagtgaaatgctccctcacacactctaatgggttagttcaggacagggctgagctgttctcacaaggagaccccaaaacactgcagcttccatgagggagggttcactcctctcactaacagtcccaaggcagctggccatctacgtctgaagtgcaggagtgaagtctaaagggagactcagaccccgggaatatctccggagccatcagctgaagccccaggagaggatgagattatctgggaaggcatatagagtgggaagagggtgaaccctccagtaaatggcgttgagtccctcatgtttccctgtccttagtgtgccgtgaagtccttcccagtccttccctcacatgaagcctttctcgttttattttactcccttcgtgtctcccaacttccttctctcaaccatggacagctgctcaagcacacttaacatgtgttctgatgtgttcacttagatgtatttgtaccctcaaaatcgcatgctggccgtggtgctgtgtgtgatttgcgtaagtgatgttccactctgcgtctcatctgtctctggctctcttcagctttaaccctatccctacatgtggaccgagttcactgcttctgactccggcttctaaatcaattttctatagacatgtctgtgtccttaaactatatatggtggtactgtgtgttaatttgtataaatggcactatgctctaaac

SEQ ID NO: 359006 - DNA, 2424 bp, Homo sapiens
agggctgtgcgggcgacttctttcgccttcccatctcctcctgcttcttcagccttagcactgtgggagtagagtagaaagagaatcaggaccaggcggcatcagtttgtagtccagatttttaccttgttaaagaatcatctaattagcttcttgcctttactagaagtcagggagtgttaaccttttccgaagagcaagcggtaggttgccatggaaacgcgttgtgacgggtttctgagaaaacaagcggaagtaaggggcggagttgaggcagaagtttaggtaatgtgacctctgattggtggagaggtacctcacggtgcattccgattggtctgacactgacacatgcgcagtagaaccagaaggcgttccaaagcggctagaacggaggggagggggatgagcaatgagggaataatccccattccgtctggaatcagagggcgggcctgccgcggaggcatctgggaaacggagttcccaggcaggcgaagcccaggggccgtcaggaagtcagcggcgcctgcgcgggcgcctcagattcaggatgcgcgcgcagcgctctccgcccagcggaagttttcgctgggcaactgagaaggtcgctgtcaagatggagtttccaacccagtaaatccaagggccagaccgtgacctcataaagcatgatctccttctgtccagactgtggcaaaagtatccaagcggcattcaaattctgcccctactgtggaaattctttgcctgtagaggagcatgtagggtcccagacctttgtcaatccacatgtgtcatccttccaaggctcaaagagagggctgaactccagttttgaaacctctcctaagaaagtgaaatggtccagcaccgtcacctctccccgattatccctcttctcagatggtgacagttctgagtctgaagatactctgagttcctctgagagatccaaaggctccgggagcagacccccaacccccaaaagcagccctcagaagaccaggaagagccctcaggtgaccaggggtagccctcagaagaccagctgtagccctcagaagaccaggcagagccctcagacgctgaagcggagccgagtgaccacctcacttgaagctttgcccacagggacagtgctgacagacaagagtgggcgacagtggaagctgaagtccttccagaccagggacaaccagggcattctctatgaagctgcacccacctccaccctcacctgtgactcaggaccacagaagcaaaagttctcactcaaactggatgccaaggatgggcgcttgttcaatgagcagaacttcttccagcgggccgccaagcctctgcaagtcaacaagtggaagaagctgtactcgaccccactgctggccatccctacctgcatgggtttcggtgttcaccaggacaaatacaggttcttggtgttacccagcctggggaggagccttcagtcggccctggatgtcagcccaaagcatgtgctgtcagagaggtctgtgctgcaggtggcctgccggctgctggatgccctggagttcctccatgagaatgagtatgttcatggaaatgtgacagctgaaaatatctttgtggatccagaggaccagagtcaggtgactttggcaggctatggcttcgccttccgctattgcccaagtggcaaacacgtggcctacgtggaaggcagcaggagccctcacgagggggaccttgagttcattagcatggacctgcacaagggatgcgggccctcccgccgcagcgacctccagagcctgggctactgcatgctgaagtggctctacgggtttctgccatggacaaattgccttcccaacactgaggacatcatgaagcaaaaacagaagtttgttgataagccggggcccttcgtgggaccctgcggtcactggatcaggccctcagagaccctgcagaagtacctgaaggtggtgatggccctcacgtatgaggagaagccgccctacgccatgctgaggaacaacctagaagctttgctgcaggatctgcgtgtgtctccatatgaccccattggcctcccgatggtgccctaggtggaatccagaactttccatttgcagtgtgcaacagaaaaaaaaaaatgaagtaatgtgactcaaggcctgctgtttaatcacagataagcttctagaacaagccctggaatgtgcattcctgccactggtttcaggatactcatcagtcctgattagcctcccggagggccccagtttccctcccgtgaatgtgaagttccccatcttggtggcctgcccttcagccagtgtcctagcaaagctggatggggttgggccggcccacaggggggacccctcctacccttgacacctctgtgctttggtaataaattgttttaccaga

SEQ ID NO: 359007 - DNA, 2868 bp, Homo sapiens
agggctgtgcgggcgacttctttcgccttcccatctcctcctgcttcttcagccttagcactgtgggagtagagtagaaagagaatcaggaccaggcggcatcagtttgtagtccagatttttaccttgttaaagaatcatctaattagcttcttgcctttactagaagtcagggagtgttaaccttttccgaagagcaagcggtaggttgccatggaaacgcgttgtgacgggtttctgagaaaacaagcggaagtaaggggcggagttgaggcagaagtttaggtaatgtgacctctgattggtggagaggtacctcacggtgcattccgattggtctgacactgacacatgcgcagtagaaccagaaggcgttccaaagcggctagaacggaggggagggggatgagcaatgagggaataatccccattccgtctggaatcagagggcgggcctgccgcggaggcatctgggaaacggagttcccaggcaggcgaagcccaggggccgtcaggaagtcagcggcgcctgcgcgggcgcctcagattcaggatgcgcgcgcagcgctctccgcccagcggaagttttcgctgggcaactgagaaggtcgctgtcaagatggagtttccaacccagtaaatccaagggccagaccgtgacctcataaagcatgatctccttctgtccagactgtggcaaaagtatccaagcggcattcaaattctgcccctactgtggaaattctttgcctgtagaggagcatgtagggtcccagacctttgtcaatccacatgtgtcatccttccaaggctcaaagagagggctgaactccagttttgaaacctctcctaagaaagtgaaatggtccagcaccgtcacctctccccgattatccctcttctcagatggtgacagttctgagtctgaagatactctgagttcctctgagagatccaaaggctccgggagcagacccccaacccccaaaagcagccctcagaagaccaggaagagccctcaggtgaccaggggtagccctcagaagaccagctgtagccctcagaagaccaggcagagccctcagacgctgaagcggagccgagtgaccacctcacttgaagctttgcccacagggacagtgctgacagacaagagtgggcgacagtggaagctgaagtccttccagaccagggacaaccagggcattctctatgaagctgcacccacctccaccctcacctgtgactcaggaccacagaagcaaaagttctcactcaaactggatgccaaggatgggcgcttgttcaatgagcagaacttcttccagcgggccgccaagcctctgcaagtcaacaagtggaagaagctgtactcgaccccactgctggccatccctacctgcatgggtttcggtgttcaccaggacaaatacaggttcttggtgttacccagcctggggaggagccttcagtcggccctggatgtcagcccaaagcatgtgctgtcagagaggtctgtgctgcaggtggcctgccggctgctggatgccctggagttcctccatgagaatgagtatgttcatggaaatgtgacagctgaaaatatctttgtggatccagaggaccagagtcaggtgactttggcaggctatggcttcgccttccgctattgcccaagtggcaaacacgtggcctacgtggaaggcagcaggagccctcacgagggggaccttgagttcattagcatggacctgcacaagggatgcgggccctcccgccgcagcgacctccagagcctgggctactgcatgctgaagtggctctacgggtttctgccatggacaaattgccttcccaacactgaggacatcatgaagcaaaaacagaagtttgttgataagccggggcccttcgtgggaccctgcggtcactggatcaggccctcagagaccctgcagaagtacctgaaggtggtgatggccctcacgtatgaggagaagccgccctacgccatgctgaggaacaacctagaagctttgctgcaggatctgcgtgtgtctccatatgaccccattggcctcccgatggtgccctaggtggaatccagaactttccatttgcagtgtgcaacagaaaaaaaaaaatgaagtaatgtgactcaaggcctgctgtttaatcacagataagcttctagaacaagccctggaatgtgcattcctgccactggtttcaggatactcatcagtcctgattagcctcccggagggccccagtttccctcccgtgaatgtgaagttccccatcttggtggcctgcccttcagccagtgtcctagcaaagctggatggggttgggccggcccacaggggggacccctcctacccttgacacctctgtgctttggtaataaattgttttaccagaaaaaaaaaaaaaaaaaaaaaaaaaaaaaaaaaaaaaaaaaacccaaaaaaaaaaaaaaaaaaaaaaaaaaaaacccttgtgggccgcttgggcccattcaattttaaactggaccaagtttatgcttgcggccgaatttcgggctcattgggccaattccccctatagggggtcgttttacaatccactggccggcgtttaaaacgtcgggactggaaaaaccctggggttaccaaattaaatccccttgaaggaaatcccctttttcccagttggggtaatagcaaaaaggcccgaaccgatcccctttccaaacagtggcccaacctgattgggaaatggaaattgtaagctgttaattttttgaaaaattcgcggtaaattttgggaaaataacctattttttaaccaaagggccaaatcgggaaatcccctattaattaa

SEQ ID NO: 359008 - DNA, 2503 bp, Homo sapiens
agggctgtgcgggcgacttctttcgccttcccatctcctcctgcttcttcagccttagcactgtgggagtagagtagaaagagaatcaggaccaggcggcatcagtttgtagtccagatttttaccttgttaaagaatcatctaattagcttcttgcctttactagaagtcagggagtgttaaccttttccgaagagcaagcggtaggttgccatggaaacgcgttgtgacgggtttctgagaaaacaagcggaagtaaggggcggagttgaggcagaagtttaggtaatgtgacctctgattggtggagaggtacctcacggtgcattccgattggtctgacactgacacatgcgcagtagaaccagaaggcgttccaaagcggctagaacggaggggagggggatgagcaatgagggaataatccccattccgtctggaatcagagggcgggcctgccgcggaggcatctgggaaacggagttcccaggcaggcgaagcccaggggccgtcaggaagtcagcggcgcctgcgcgggcgcctcagattcaggatgcgcgcgcagcgctctccgcccagcggaagttttcgctgggcaactgagaaggtgagtccgggtaactgcggaggatccgagggtcaggctgcagaagcccagaatcccaccccagtccccaagtacagaggtcgctgtcaagatggagtttccaacccagtaaatccaagggccagaccgtgacctcataaagcatgatctccttctgtccagactgtggcaaaagtatccaagcggcattcaaattctgcccctactgtggaaattctttgcctgtagaggagcatgtagggtcccagacctttgtcaatccacatgtgtcatccttccaaggctcaaagagagggctgaactccagttttgaaacctctcctaagaaagtgaaatggtccagcaccgtcacctctccccgattatccctcttctcagatggtgacagttctgagtctgaagatactctgagttcctctgagagatccaaaggctccgggagcagacccccaacccccaaaagcagccctcagaagaccaggaagagccctcaggtgaccaggggtagccctcagaagaccagctgtagccctcagaagaccaggcagagccctcagacgctgaagcggagccgagtgaccacctcacttgaagctttgcccacagggacagtgctgacagacaagagtgggcgacagtggaagctgaagtccttccagaccagggacaaccagggcattctctatgaagctgcacccacctccaccctcacctgtgactcaggaccacagaagcaaaagttctcactcaaactggatgccaaggatgggcgcttgttcaatgagcagaacttcttccagcgggccgccaagcctctgcaagtcaacaagtggaagaagctgtactcgaccccactgctggccatccctacctgcatgggtttcggtgttcaccaggacaaatacaggttcttggtgttacccagcctggggaggagccttcagtcggccctggatgtcagcccaaagcatgtgctgtcagagaggtctgtgctgcaggtggcctgccggctgctggatgccctggagttcctccatgagaatgagtatgttcatggaaatgtgacagctgaaaatatctttgtggatccagaggaccagagtcaggtgactttggcaggctatggcttcgccttccgctattgcccaagtggcaaacacgtggcctacgtggaaggcagcaggagccctcacgagggggaccttgagttcattagcatggacctgcacaagggatgcgggccctcccgccgcagcgacctccagagcctgggctactgcatgctgaagtggctctacgggtttctgccatggacaaattgccttcccaacactgaggacatcatgaagcaaaaacagaagtttgttgataagccggggcccttcgtgggaccctgcggtcactggatcaggccctcagagaccctgcagaagtacctgaaggtggtgatggccctcacgtatgaggagaagccgccctacgccatgctgaggaacaacctagaagctttgctgcaggatctgcgtgtgtctccatatgaccccattggcctcccgatggtgccctaggtggaatccagaactttccatttgcagtgtgcaacagaaaaaaaaaaatgaagtaatgtgactcaaggcctgctgtttaatcacagataagcttctagaacaagccctggaatgtgcattcctgccactggtttcaggatactcatcagtcctgattagcctcccggagggccccagtttccctcccgtgaatgtgaagttccccatcttggtggcctgcccttcagccagtgtcctagcaaagctggatggggttgggccggcccacaggggggacccctcctacccttgacacctctgtgctttggtaataaattgttttaccaga

SEQ ID NO: 359009 - DNA, 2795 bp, Homo sapiens
agggctgtgcgggcgacttctttcgccttcccatctcctcctgcttcttcagccttagcactgtgggagtagagtagaaagagaatcaggaccaggcggcatcagtttgtagtccagatttttaccttgttaaagaatcatctaattagcttcttgcctttactagaagtcagggagtgttaaccttttccgaagagcaagcggtaggttgccatggaaacgcgttgtgacgggtttctgagaaaacaagcggaagtaaggggcggagttgaggcagaagtttaggtaatgtgacctctgattggtggagaggtacctcacggtgcattccgattggtctgacactgacacatgcgcagtagaaccagaaggcgttccaaagcggctagaacggaggggagggggatgagcaatgagggaataatccccattccgtctggaatcagagggcgggcctgccgcggaggcatctgggaaacggagttcccaggcaggcgaagcccaggggccgtcaggaagtcagcggcgcctgcgcgggcgcctcagattcaggatgcgcgcgcagcgctctccgcccagcggaagttttcgctgggcaactgagaaggtcgctgtcaagatggagtttccaacccagtaaatccaagggccagaccgtgacctcataaagcatgatctccttctgtccagactgtggcaaaagtatccaagcggcattcaaattctgcccctactgtggaaattctttgcctgtagaggagcatgtagggtcccagacctttgtcaatccacatgtgtcatccttccaaggctcaaagagagggctgaactccagttttgaaacctctcctaagaaagtgaaatggtccagcaccgtcacctctccccgattatccctcttctcagatggtgacagttctgagtctgaagatactctgagttcctctgagagatccaaaggctccgggagcagacccccaacccccaaaagcagccctcagaagaccaggaagagccctcaggtgaccaggggtagccctcagaagaccagctgtagccctcagaagaccaggcagagccctcagacgctgaagcggagccgagtgaccacctcacttgaagctttgcccacagggacagtgctgacagacaagagtgggcgacagtggaagctgaagtccttccagaccagggacaaccagggcattctctatgaagctgcacccacctccaccctcacctgtgactcaggaccacagaagcaaaagttctcactcaaactggatgccaaggatgggcgcttgttcaatgagcagaacttcttccagcgggccgccaagcctctgcaagtcaacaagtggaagaagctgtactcgaccccactgctggccatccctacctgcatgggtttcggtgttcaccaggacaaatacaggttcttggtgttacccagcctggggaggagccttcagtcggccctggatgtcagcccaaagcatgtgctgtcagagaggtctgtgctgcaggtggcctgccggctgctggatgccctggagttcctccatgagaatgagtatgttcatggaaatgtgacagctgaaaatatctttgtggatccagaggaccagagtcaggtgactttggcaggctatggcttcgccttccgctattgcccaagtggcaaacacgtggcctacgtggaaggcagcaggagccctcacgagggggaccttgagttcattagcatggacctgcacaagggatgcgggccctcccgccgcagcgacctccagagcctgggctactgcatgctgaagtggctctacgggtttctgccatggacaaattgccttcccaacactgaggacatcatgaagcaaaaacagaagttgccttgggattcattttaatgtaagctggactttgtcatgccagaaacaaggctcggtcaccgtcagcagtttgcagttttccacctcctcccagttcctccgtgtggttgacccagatatctccgttatgcagccgcctccgggggaccacctccctccctttgagtcagccacagacagcctacttgacggccccgctggcccccacattccactgaactgtgcggatgccacagtgaccccctctcaggcacagcatgacctcctgaagtcgagcctgcttgctttgaacctaccagttaaaatctcctcaaaatgtttggataccgcccattggcccctcacagccacgagctccctgaccagtgtttgttgataagccggggcccttcgtgggaccctgcggtcactggatcaggccctcagagaccctgcagaagtacctgaaggtggtgatggccctcacgtatgaggagaagccgccctacgccatgctgaggaacaacctagaagctttgctgcaggatctgcgtgtgtctccatatgaccccattggcctcccgatggtgccctaggtggaatccagaactttccatttgcagtgtgcaacagaaaaaaaaaaatgaagtaatgtgactcaaggcctgctgtttaatcacagataagcttctagaacaagccctggaatgtgcattcctgccactggtttcaggatactcatcagtcctgattagcctcccggagggccccagtttccctcccgtgaatgtgaagttccccatcttggtggcctgcccttcagccagtgtcctagcaaagctggatggggttgggccggcccacaggggggacccctcctacccttgacacctctgtgctttggtaataaattgttttaccaga

SEQ ID NO: 359010 - DNA, 2748 bp, Homo sapiens
agggctgtgcgggcgacttctttcgccttcccatctcctcctgcttcttcagccttagcactgtgggagtagagtagaaagagaatcaggaccaggcggcatcagtttgtagtccagatttttaccttgttaaagaatcatctaattagcttcttgcctttactagaagtcagggagtgttaaccttttccgaagagcaagcggtaggttgccatggaaacgcgttgtgacgggtttctgagaaaacaagcggaagtaaggggcggagttgaggcagaagtttaggtaatgtgacctctgattggtggagaggtacctcacggtgcattccgattggtctgacactgacacatgcgcagtagaaccagaaggcgttccaaagcggctagaacggaggggagggggatgagcaatgagggaataatccccattccgtctggaatcagagggcgggcctgccgcggaggcatctgggaaacggagttcccaggcaggcgaagcccaggggccgtcaggaagtcagcggcgcctgcgcgggcgcctcagattcaggatgcgcgcgcagcgctctccgcccagcggaagttttcgctgggcaactgagaaggtcgctgtcaagatggagtttccaacccagtaaatccaagggccagaccgtgacctcataaagcatgatctccttctgtccagactgtggcaaaagtatccaagcggcattcaaattctgcccctactgtggaaattctttgcctgtagaggagcatgtagggtcccagacctttgtcaatccacatgtgtcatccttccaaggctcaaagagagggctgaactccagttttgaaacctctcctaagaaagtgaaatggtccagcaccgtcacctctccccgattatccctcttctcagatggtgacagttctgagtctgaagatactctgagttcctctgagagatccaaaggctccgggagcagacccccaacccccaaaagcagccctcagaagaccaggaagagccctcaggtgaccaggggtagccctcagaagaccagctgtagccctcagaagaccaggcagagccctcagacgctgaagcggagccgagtgaccacctcacttgaagctttgcccacagggacagtgctgacagacaagagtgggcgacagtggaagctgaagtccttccagaccagggacaaccagggcattctctatgaagctgcacccacctccaccctcacctgtgactcaggaccacagaagcaaaagttctcactcaaactggatgccaaggatgggcgcttgttcaatgagcagaacttcttccagcgggccgccaagcctctgcaagtcaacaagtggaagaagctgtactcgaccccactgctggccatccctacctgcatgggtttcggtgttcaccaggacaaatacaggttcttggtgttacccagcctggggaggagccttcagtcggccctggatgtcagcccaaagcatgtgctgtcagagaggtctgtgctgcaggtggcctgccggctgctggatgccctggagttcctccatgagaatgagtatgttcatggaaatgtgacagctgaaaatatctttgtggatccagaggaccagagtcaggtgactttggcaggctatggcttcgccttccgctattgcccaagtggcaaacacgtggcctacgtggaaggcagcaggagccctcacgagggggaccttgagttcattagcatggacctgcacaagggatgcgggccctcccgccgcagcgacctccagagcctgggctactgcatgctgaagtggctctacgggtttctgccatggacaaattgccttcccaacactgaggacatcatgaagcaaaaacagaaaaacaaggctcggtcaccgtcagcagtttgcagttttccacctcctcccagttcctccgtgtggttgacccagatatctccgttatgcagccgcctccgggggaccacctccctccctttgagtcagccacagacagcctacttgacggccccgctggcccccacattccactgaactgtgcggatgccacagtgaccccctctcaggcacagcatgacctcctgaagtcgagcctgcttgctttgaacctaccagttaaaatctcctcaaaatgtttggataccgcccattggcccctcacagccacgagctccctgaccagtgtttgttgataagccggggcccttcgtgggaccctgcggtcactggatcaggccctcagagaccctgcagaagtacctgaaggtggtgatggccctcacgtatgaggagaagccgccctacgccatgctgaggaacaacctagaagctttgctgcaggatctgcgtgtgtctccatatgaccccattggcctcccgatggtgccctaggtggaatccagaactttccatttgcagtgtgcaacagaaaaaaaaaaatgaagtaatgtgactcaaggcctgctgtttaatcacagataagcttctagaacaagccctggaatgtgcattcctgccactggtttcaggatactcatcagtcctgattagcctcccggagggccccagtttccctcccgtgaatgtgaagttccccatcttggtggcctgcccttcagccagtgtcctagcaaagctggatggggttgggccggcccacaggggggacccctcctacccttgacacctctgtgctttggtaataaattgttttaccaga

SEQ ID NO: 359011 - DNA, 1892 bp, Homo sapiens
  misc_feature (44)..(44): n is a, c, g, or t
ctcccccaccccccccctctcccacccccccacccccggcccantaggctagtacgaggcctggtgttgctgagagtcgctgtcaagatggagtttccaacccagtaaatccaagggccagaccgtgacctcataaagcatgatctccttctgtccagactgtggcaaaagtatccaagcggcattcaaattctgcccctactgtggaaattctttgcctgtagaggagcatgtagggtcccagacctttgtcaatccacatgtgtcatccttccaaggctcaaagagagggctgaactccagttttgaaacctctcctaagaaagtgaaatggtccagcaccgtcacctctccccgattatccctcttctcagatggtgacagttctgagtctgaagatactctgagttcctctgagagatccaaaggctccgggagcagacccccaacccccaaaagcagccctcagaagaccaggaagagccctcaggtgaccaggggtagccctcagaagaccagctgtagccctcagaagaccaggcagagccctcagacgctgaagcggagccgagtgaccacctcacttgaagctttgcccacagggacagtgctgacagacaagagtgggcgacagtggaagctgaagtccttccagaccagggacaaccagggcattctctatgaagctgcacccacctccaccctcacctgtgactcaggaccacagaagcaaaagttctcactcaaactggatgccaaggatgggcgcttgttcaatgagcagaacttcttccagcgggccgccaagcctctgcaagtcaacaagtggaagaagctgtactcgaccccactgctggccatccctacctgcatgggtttcggtgttcaccaggacaaatacaggttcttggtgttacccagcctggggaggagccttcagtcggccctggatgtcagcccaaagcatgtgctgtcagagaggtctgtgctgcaggtggcctgccggctgctggatgccctggagttcctccatgagaatgagtatgttcatggaaatgtgacagctgaaaatatctttgtggatccagaggaccagagtcaggtgactttggcaggctatggcttcgccttccgctattgcccaagtggcaaacacgtggcctacgtggaaggcagcaggagccctcacgagggggaccttgagttcattagcatggacctgcacaagggatgcgggccctcccgccgcagcgacctccagagcctgggctactgcatgctgaagtggctctacgggtttctgccatggacaaattgccttcccaacactgaggacatcatgaagcaaaaacagaagtttgttgataagccggggcccttcgtgggaccctgcggtcactggatcaggccctcagagaccctgcagaagtacctgaaggtggtgatggccctcacgtatgaggagaagccgccctacgccatgctgaggaacaacctagaagctttgctgcaggatctgcgtgtgtctccatatgaccccattggcctcccgatggtgccctaggtggaatccagaactttccatttgcagtgtgcaacagaaaaaaaaaaatgaagtaatgtgactcaaggcctgctgtttaatcacagataagcttctagaacaagccctggaatgtgcattcctgccactggtttcaggatactcatcagtcctgattagcctcccggagggccccagtttccctcccgtgaatgtgaagttccccatcttggtggcctgcccttcagccagtgtcctagcaaagctggatggggttgggccggcccacaggggggacccctcctacccttgacacctctgtgctttggtaataaattgttttaccaga

SEQ ID NO: 359012 - DNA, 1869 bp, Homo sapiens
  misc_feature (1)..(1): n is a, c, g, or t
  misc_feature (13)..(13): n is a, c, g, or t
nattcggcacgangggcagaagcaggaatcccaccccagtccccaagtacaggtcgctgtcaagatggagtttccaacccagtaaatccaagggccagaccgtgacctcataaagcatgatctccttctgtccagactgtggcaaaagtatccaagcggcattcaaattctgcccctactgtggaaattctttgcctgtagaggagcatgtagggtcccagacctttgtcaatccacatgtgtcatccttccaaggctcaaagagagggctgaactccagttttgaaacctctcctaagaaagtgaaatggtccagcaccgtcacctctccccgattatccctcttctcagatggtgacagttctgagtctgaagatactctgagttcctctgagagatccaaaggctccgggagcagacccccaacccccaaaagcagccctcagaagaccaggaagagccctcaggtgaccaggggtagccctcagaagaccagctgtagccctcagaagaccaggcagagccctcagacgctgaagcggagccgagtgaccacctcacttgaagctttgcccacagggacagtgctgacagacaagagtgggcgacagtggaagctgaagtccttccagaccagggacaaccagggcattctctatgaagctgcacccacctccaccctcacctgtgactcaggaccacagaagcaaaagttctcactcaaactggatgccaaggatgggcgcttgttcaatgagcagaacttcttccagcgggccgccaagcctctgcaagtcaacaagtggaagaagctgtactcgaccccactgctggccatccctacctgcatgggtttcggtgttcaccaggacaaatacaggttcttggtgttacccagcctggggaggagccttcagtcggccctggatgtcagcccaaagcatgtgctgtcagagaggtctgtgctgcaggtggcctgccggctgctggatgccctggagttcctccatgagaatgagtatgttcatggaaatgtgacagctgaaaatatctttgtggatccagaggaccagagtcaggtgactttggcaggctatggcttcgccttccgctattgcccaagtggcaaacacgtggcctacgtggaaggcagcaggagccctcacgagggggaccttgagttcattagcatggacctgcacaagggatgcgggccctcccgccgcagcgacctccagagcctgggctactgcatgctgaagtggctctacgggtttctgccatggacaaattgccttcccaacactgaggacatcatgaagcaaaaacagaagtttgttgataagccggggcccttcgtgggaccctgcggtcactggatcaggccctcagagaccctgcagaagtacctgaaggtggtgatggccctcacgtatgaggagaagccgccctacgccatgctgaggaacaacctagaagctttgctgcaggatctgcgtgtgtctccatatgaccccattggcctcccgatggtgccctaggtggaatccagaactttccatttgcagtgtgcaacagaaaaaaaaaaatgaagtaatgtgactcaaggcctgctgtttaatcacagataagcttctagaacaagccctggaatgtgcattcctgccactggtttcaggatactcatcagtcctgattagcctcccggagggccccagtttccctcccgtgaatgtgaagttccccatcttggtggcctgcccttcagccagtgtcctagcaaagctggatggggttgggccggcccacaggggggacccctcctacccttgacacctctgtgctttggtaataaattgttttaccaga

SEQ ID NO: 359013 - DNA, 2387 bp, Homo sapiens
agggctgtgcgggcgacttctttcgccttcccatctcctcctgcttcttcagccttagcactgtgggagtagagtagaaagagaatcaggaccaggcggcatcagtttgtagtccagatttttaccttgttaaagaatcatctaattagcttcttgcctttactagaagtcagggagtgttaaccttttccgaagagcaagcggtaggttgccatggaaacgcgttgtgacgggtttctgagaaaacaagcggaagtaaggggcggagttgaggcagaagtttaggtaatgtgacctctgattggtggagaggtacctcacggtgcattccgattggtctgacactgacacatgcgcagtagaaccagaaggcgttccaaagcggctagaacggaggggagggggatgagcaatgagggaataatccccattccgtctggaatcagagggcgggcctgccgcggaggcatctgggaaacggagttcccaggcaggcgaagcccaggggccgtcaggaagtcagcggcgcctgcgcgggcgcctcagattcaggatgcgcgcgcagcgctctccgcccagcggaagttttcgctgggcaactgagaaggtcgctgtcaagatggagtttccaacccagtaaatccaagggccagaccgtgacctcataaagcatgatctccttctgtccagactgtggcaaaagtatccaagcggcattcaaattctgcccctactgtggaaattctttgcctgtagaggagcatgtagggtcccagacctttgtcaatccacatgtgtcatccttccaaggctcaaagagagggctgaactccagttttgaaacctctcctaagaaagtgaaatggtccagcaccgtcacctctccccgattatccctcttctcagatggtgacagttctgagtctgaagatactctgagttcctctgagagatccaaaggctccgggagcagacccccaacccccaaaagcagccctcagaagaccaggaagagccctcaggtgaccaggggtagccctcagaagaccagctgtagccctcagaagaccaggcagagccctcagacgctgaagcggagccgagtgaccacctcacttgaagctttgcccacagggacagtgctgacagacaagagtgggcgacagtggaagctgaagtccttccagaccagggacaaccagggcattctctatgaagctgcacccacctccaccctcacctgtgactcaggaccacagaagcaaaagttctcactcaaactggatgccaaggatgggcgcttgttcaatgagcagaacttcttccagcgggccgccaagcctctgcaagtcaacaagtggaagaagctgtactcgaccccactgctggccatccctacctgcatgggtttcggtgttcaccaggacaaatacaggttcttggtgttacccagcctggggaggagccttcagtcggccctggatgtcagcccaaagcatgtgctgtcagagaggtctgtgctgcaggtggcctgccggctgctggatgccctggagttcctccatgagaatgagtatgttcatggaaatgtgacagctgaaaatatctttgtggatccagaggaccagagtcaggtgactttggcaggctatggcttcgccttccgctattgcccaagtggcaaacacgtggcctacgtggaaggcagcaggagccctcacgagggggaccttgagttcattagcatggacctgcacaagggatgcgggccctcccgccgcagcgacctccagagcctgggctactgcatgctgaagtggctctacgggtttctgccatggacaaattgccttcccaacactgaggacatcatgaagcaaaaacagaagttgccttgggattcattttaatgtaagctggactttgtcatgccagaaacaaggctcggtcaccgtcagcagtttgcagttttccacctcctcccagttcctccgtgtggttgacccagatatctccgttatgcagccgcctccgggggaccacctccctccctttgagtcagccacagacagcctacttgacggccccgctggcccccacattccactgaactgtgcggatgccacagtgaccccctctcaggcacagcatgacctcctgaagtcgagcctgcttgctttgaacctaccagttaaaatctcctcaaaatgtttggataccgcccattggcccctcacagccacgagctccctgaccagtgtgcgtgtgtgtgtgtgtgtgtgtctgtgtgtgtgcttgggacgggtggggaggtcacctttgggtgtgcggtgtgcccccaggacctgtaagtaataaaatctttatttccatcttggatctttcct

SEQ ID NO: 359014 - DNA, 2640 bp, Homo sapiens
agggctgtgcgggcgacttctttcgccttcccatctcctcctgcttcttcagccttagcactgtgggagtagagtagaaagagaatcaggaccaggcggcatcagtttgtagtccagatttttaccttgttaaagaatcatctaattagcttcttgcctttactagaagtcagggagtgttaaccttttccgaagagcaagcggtaggttgccatggaaacgcgttgtgacgggtttctgagaaaacaagcggaagtaaggggcggagttgaggcagaagtttaggtaatgtgacctctgattggtggagaggtacctcacggtgcattccgattggtctgacactgacacatgcgcagtagaaccagaaggcgttccaaagcggctagaacggaggggagggggatgagcaatgagggaataatccccattccgtctggaatcagagggcgggcctgccgcggaggcatctgggaaacggagttcccaggcaggcgaagcccaggggccgtcaggaagtcagcggcgcctgcgcgggcgcctcagattcaggatgcgcgcgcagcgctctccgcccagcggaagttttcgctgggcaactgagaaggtcgctgtcaagatggagtttccaacccagtaaatccaagggccagaccgtgacctcataaagcatgatctccttctgtccagactgtggcaaaagtatccaagcggcattcaaattctgcccctactgtggaaattctttgcctgtagaggagcatgtagggtcccagacctttgtcaatccacatgtgtcatccttccaaggctcaaagagagggctgaactccagttttgaaacctctcctaagaaagtgaaatggtccagcaccgtcacctctccccgattatccctcttctcagatggtgacagttctgagtctgaagatactctgagttcctctgagagatccaaaggctccgggagcagacccccaacccccaaaagcagccctcagaagaccaggaagagccctcaggtgaccaggggtagccctcagaagaccagctgtagccctcagaagaccaggcagagccctcagacgctgaagcggagccgagtgaccacctcacttgaagctttgcccacagggacagtgctgacagacaagagtgggcgacagtggaagctgaagtccttccagaccagggacaaccagggcattctctatgaagctgcacccacctccaccctcacctgtgactcaggaccacagaagcaaaagttctcactcaaactggatgccaaggatgggcgcttgttcaatgagcagaacttcttccagcgggccgccaagcctctgcaagtcaacaagtggaagaagctgtactcgaccccactgctggccatccctacctgcatgggtttcggtgttcaccaggacaaatacaggttcttggtgttacccagcctggggaggagccttcagtcggccctggatgtcagcccaaagcatgtgctgtcagagaggtctgtgctgcaggtggcctgccggctgctggatgccctggagttcctccatgagaatgagtatgttcatggaaatgtgacagctgaaaatatctttgtggatccagaggaccagagtcaggtgactttggcaggctatggcttcgccttccgctattgcccaagtggcaaacacgtggcctacgtggaaggcagcaggagccctcacgagggggaccttgagttcattagcatggacctgcacaagggatgcgggccctcccgccgcagcgacctccagagcctgggctactgcatgctgaagtggctctacgggtttctgccatggacaaattgccttcccaacactgaggacatcatgaagcaaaaacagaagttgccttgggattcattttaatgtaagctggactttgtcatgccagaaacaaggctcggtcaccgtcagcagtttgcagttttccacctcctcccagttcctccgtgtggttgacccagatatctccgttatgcagccgcctccgggggaccacctccctccctttgagtcagccacagacagcctacttgacggccccgctggcccccacattccactgaactgtgcggatgccacagtgaccccctctcaggcacagcatgacctcctgaagtcgagcctgcttgctttgaacctaccagttaaaatctcctcaaaatgtttggataccgcccattggcccctcacagccacgagctccctgaccagtgtgcgtgtgtgtgtgtgtgtgtgtctgtgtgtgtgcttgggacgggtggggaggtcacctttgggtgtgcggtgtgcccccaggacctgtaagtaataaaatctttatttccatcttggatctttcctcatcatcaaagggatcctctccgtcttaaggatcacagattaaaagagttcaatgctaaaaaaaaaacagaaaaagaacaaacgaagacgacaacaaacagggggggcgcgaccagaggagataccccacgggaggcgccagaacagagcgcggaaacacaggaacatcatggacgaacaaggggggccccaagaaggcgaacgcgataacacacacggaccacaggtggcagagtgaacacgccgcgcaaat

SEQ ID NO: 359015 - DNA, 2524 bp, Homo sapiens
agggctgtgcgggcgacttctttcgccttcccatctcctcctgcttcttcagccttagcactgtgggagtagagtagaaagagaatcaggaccaggcggcatcagtttgtagtccagatttttaccttgttaaagaatcatctaattagcttcttgcctttactagaagtcagggagtgttaaccttttccgaagagcaagcggtaggttgccatggaaacgcgttgtgacgggtttctgagaaaacaagcggaagtaaggggcggagttgaggcagaagtttaggtaatgtgacctctgattggtggagaggtacctcacggtgcattccgattggtctgacactgacacatgcgcagtagaaccagaaggcgttccaaagcggctagaacggaggggagggggatgagcaatgagggaataatccccattccgtctggaatcagagggcgggcctgccgcggaggcatctgggaaacggagttcccaggcaggcgaagcccaggggccgtcaggaagtcagcggcgcctgcgcgggcgcctcagattcaggatgcgcgcgcagcgctctccgcccagcggaagttttcgctgggcaactgagaaggtcgctgtcaagatggagtttccaacccagtaaatccaagggccagaccgtgacctcataaagcatgatctccttctgtccagactgtggcaaaagtatccaagcggcattcaaattctgcccctactgtggaaattctttgcctgtagaggagcatgtagggtcccagacctttgtcaatccacatgtgtcatccttccaaggctcaaagagagggctgaactccagttttgaaacctctcctaagaaagtgaaatggtccagcaccgtcacctctccccgattatccctcttctcagatggtgacagttctgagtctgaagatactctgagttcctctgagagatccaaaggctccgggagcagacccccaacccccaaaagcagccctcagaagaccaggaagagccctcaggtgaccaggggtagccctcagaagaccagctgtagccctcagaagaccaggcagagccctcagacgctgaagcggagccgagtgaccacctcacttgaagctttgcccacagggacagtgctgacagacaagagtgggcgacagtggaagctgaagtccttccagaccagggacaaccagggcattctctatgaagctgcacccacctccaccctcacctgtgactcaggaccacagaagcaaaagttctcactcaaactggatgccaaggatgggcgcttgttcaatgagcagaacttcttccagcgggccgccaagcctctgcaagtcaacaagtggaagaagctgtactcgaccccactgctggccatccctacctgcatgggtttcggtgttcaccaggacaaatacaggttcttggtgttacccagcctggggaggagccttcagtcggccctggatgtcagcccaaagcatgtgctgtcagagaggtctgtgctgcaggtggcctgccggctgctggatgccctggagttcctccatgagaatgagtatgttcatggaaatgtgacagctgaaaatatctttgtggatccagaggaccagagtcaggtgactttggcaggctatggcttcgccttccgctattgcccaagtggcaaacacgtggcctacgtggaaggcagcaggagccctcacgagggggaccttgagttcattagcatggacctgcacaagggatgcgggccctcccgccgcagcgacctccagagcctgggctactgcatgctgaagtggctctacgggtttctgccatggacaaattgccttcccaacactgaggacatcatgaagcaaaaacagaacctgggtgacaaagcaagactccgtcttggacttgttgcccaagtcatctgggaggcagctggccatctacgtctgaagtgcaggagtgaagtctaaagggagactcagaccccgggaatatctccggagccatcagctgaagccccaggagaggatgagattatctgggaaggcatatagagtgggaagagggtgaaccctccagtaaatggcgttgagtccctcatgtttccctgtccttagtgtgccgtgaagtccttcccagtccttccctcacatgaagcctttctcgttttattttactcccttcgtgtctcccaacttccttctctcaaccatggacagctgctcaagcacacttaacatgtgttctgatgtgttcacttagatgtatttgtaccctcaaaatcgcatgctggccgtggtgctgtgtgtgatttgcgtaagtgatgttccactctgcgtctcatctgtctctggctctcttcagctttaaccctatccctacatgtggaccgagttcactgcttctgactccggcttctaaatcaattttctatagacatgtctgtgtccttaaactatatatggtggtactgtgtgttaatttgtataaatggcactatgctctaaac

SEQ ID NO: 359016 - DNA, 2274 bp, Homo sapiens
agggctgtgcgggcgacttctttcgccttcccatctcctcctgcttcttcagccttagcactgtgggagtagagtagaaagagaatcaggaccaggcggcatcagtttgtagtccagatttttaccttgttaaagaatcatctaattagcttcttgcctttactagaagtcagggagtgttaaccttttccgaagagcaagcggtaggttgccatggaaacgcgttgtgacgggtttctgagaaaacaagcggaagtaaggggcggagttgaggcagaagtttaggtaatgtgacctctgattggtggagaggtacctcacggtgcattccgattggtctgacactgacacatgcgcagtagaaccagaaggcgttccaaagcggctagaacggaggggagggggatgagcaatgagggaataatccccattccgtctggaatcagagggcgggcctgccgcggaggcatctgggaaacggagttcccaggcaggcgaagcccaggggccgtcaggaagtcagcggcgcctgcgcgggcgcctcagattcaggatgcgcgcgcagcgctctccgcccagcggaagttttcgctgggcaactgagaaggtcgctgtcaagatggagtttccaacccagtaaatccaagggccagaccgtgacctcataaagcatgatctccttctgtccagactgtggcaaaagtatccaagcggcattcaaattctgcccctactgtggaaattctttgcctgtagaggagcatgtagggtcccagacctttgtcaatccacatgtgtcatccttccaaggctccgggagcagacccccaacccccaaaagcagccctcagaagaccaggaagagccctcaggtgaccaggggtagccctcagaagaccagctgtagccctcagaagaccaggcagagccctcagacgctgaagcggagccgagtgaccacctcacttgaagctttgcccacagggacagtgctgacagacaagagtgggcgacagtggaagctgaagtccttccagaccagggacaaccagggcattctctatgaagctgcacccacctccaccctcacctgtgactcaggaccacagaagcaaaagttctcactcaaactggatgccaaggatgggcgcttgttcaatgagcagaacttcttccagcgggccgccaagcctctgcaagtcaacaagtggaagaagctgtactcgaccccactgctggccatccctacctgcatgggtttcggtgttcaccaggacaaatacaggttcttggtgttacccagcctggggaggagccttcagtcggccctggatgtcagcccaaagcatgtgctgtcagagaggtctgtgctgcaggtggcctgccggctgctggatgccctggagttcctccatgagaatgagtatgttcatggaaatgtgacagctgaaaatatctttgtggatccagaggaccagagtcaggtgactttggcaggctatggcttcgccttccgctattgcccaagtggcaaacacgtggcctacgtggaaggcagcaggagccctcacgagggggaccttgagttcattagcatggacctgcacaagggatgcgggccctcccgccgcagcgacctccagagcctgggctactgcatgctgaagtggctctacgggtttctgccatggacaaattgccttcccaacactgaggacatcatgaagcaaaaacagaagtttgttgataagccggggcccttcgtgggaccctgcggtcactggatcaggccctcagagaccctgcagaagtacctgaaggtggtgatggccctcacgtatgaggagaagccgccctacgccatgctgaggaacaacctagaagctttgctgcaggatctgcgtgtgtctccatatgaccccattggcctcccgatggtgccctaggtggaatccagaactttccatttgcagtgtgcaacagaaaaaaaaaaatgaagtaatgtgactcaaggcctgctgtttaatcacagataagcttctagaacaagccctggaatgtgcattcctgccactggtttcaggatactcatcagtcctgattagcctcccggagggccccagtttccctcccgtgaatgtgaagttccccatcttggtggcctgcccttcagccagtgtcctagcaaagctggatggggttgggccggcccacaggggggacccctcctacccttgacacctctgtgctttggtaataaattgttttaccaga

SEQ ID NO: 359017 - DNA, 2353 bp, Homo sapiens
agggctgtgcgggcgacttctttcgccttcccatctcctcctgcttcttcagccttagcactgtgggagtagagtagaaagagaatcaggaccaggcggcatcagtttgtagtccagatttttaccttgttaaagaatcatctaattagcttcttgcctttactagaagtcagggagtgttaaccttttccgaagagcaagcggtaggttgccatggaaacgcgttgtgacgggtttctgagaaaacaagcggaagtaaggggcggagttgaggcagaagtttaggtaatgtgacctctgattggtggagaggtacctcacggtgcattccgattggtctgacactgacacatgcgcagtagaaccagaaggcgttccaaagcggctagaacggaggggagggggatgagcaatgagggaataatccccattccgtctggaatcagagggcgggcctgccgcggaggcatctgggaaacggagttcccaggcaggcgaagcccaggggccgtcaggaagtcagcggcgcctgcgcgggcgcctcagattcaggatgcgcgcgcagcgctctccgcccagcggaagttttcgctgggcaactgagaaggtgagtccgggtaactgcggaggatccgagggtcaggctgcagaagcccagaatcccaccccagtccccaagtacagaggtcgctgtcaagatggagtttccaacccagtaaatccaagggccagaccgtgacctcataaagcatgatctccttctgtccagactgtggcaaaagtatccaagcggcattcaaattctgcccctactgtggaaattctttgcctgtagaggagcatgtagggtcccagacctttgtcaatccacatgtgtcatccttccaaggctccgggagcagacccccaacccccaaaagcagccctcagaagaccaggaagagccctcaggtgaccaggggtagccctcagaagaccagctgtagccctcagaagaccaggcagagccctcagacgctgaagcggagccgagtgaccacctcacttgaagctttgcccacagggacagtgctgacagacaagagtgggcgacagtggaagctgaagtccttccagaccagggacaaccagggcattctctatgaagctgcacccacctccaccctcacctgtgactcaggaccacagaagcaaaagttctcactcaaactggatgccaaggatgggcgcttgttcaatgagcagaacttcttccagcgggccgccaagcctctgcaagtcaacaagtggaagaagctgtactcgaccccactgctggccatccctacctgcatgggtttcggtgttcaccaggacaaatacaggttcttggtgttacccagcctggggaggagccttcagtcggccctggatgtcagcccaaagcatgtgctgtcagagaggtctgtgctgcaggtggcctgccggctgctggatgccctggagttcctccatgagaatgagtatgttcatggaaatgtgacagctgaaaatatctttgtggatccagaggaccagagtcaggtgactttggcaggctatggcttcgccttccgctattgcccaagtggcaaacacgtggcctacgtggaaggcagcaggagccctcacgagggggaccttgagttcattagcatggacctgcacaagggatgcgggccctcccgccgcagcgacctccagagcctgggctactgcatgctgaagtggctctacgggtttctgccatggacaaattgccttcccaacactgaggacatcatgaagcaaaaacagaagtttgttgataagccggggcccttcgtgggaccctgcggtcactggatcaggccctcagagaccctgcagaagtacctgaaggtggtgatggccctcacgtatgaggagaagccgccctacgccatgctgaggaacaacctagaagctttgctgcaggatctgcgtgtgtctccatatgaccccattggcctcccgatggtgccctaggtggaatccagaactttccatttgcagtgtgcaacagaaaaaaaaaaatgaagtaatgtgactcaaggcctgctgtttaatcacagataagcttctagaacaagccctggaatgtgcattcctgccactggtttcaggatactcatcagtcctgattagcctcccggagggccccagtttccctcccgtgaatgtgaagttccccatcttggtggcctgcccttcagccagtgtcctagcaaagctggatggggttgggccggcccacaggggggacccctcctacccttgacacctctgtgctttggtaataaattgttttaccaga

SEQ ID NO: 359018 - DNA, 1825 bp, Homo sapiens
agcgggtctccgggtcgcggggttcactggcctcctcttgagcttcccaagccaccttgggctccgtgttgggcatggctaaggcggagatgggcggaacttgtgggaagttcgacagctcctccgctgtgaaacttggcgtctaagtcatcccgtggtttctatggaggtgcggccgaagggaggctctgtcgtcgcctaggcaatcgccccacctgcgctgaggtcgctgtcaagatggagtttccaacccagtaaatccaagggccagaccgtgacctcataaagcatgatctccttctgtccagactgtggcaaaagtatccaagcggcattcaaattctgcccctactgtggaaattctttgcctgtagaggagcatgtagggtcccagacctttgtcaatccacatgtgtcatccttccaaggctccgggagcagacccccaacccccaaaagcagccctcagaagaccaggaagagccctcaggtgaccaggggtagccctcagaagaccagctgtagccctcagaagaccaggcagagccctcagacgctgaagcggagccgagtgaccacctcacttgaagctttgcccacagggacagtgctgacagacaagagtgggcgacagtggaagctgaagtccttccagaccagggacaaccagggcattctctatgaagctgcacccacctccaccctcacctgtgactcaggaccacagaagcaaaagttctcactcaaactgtcaacaagtggaagaagctgtactcgaccccactgctggccatccctacctgcatgggtttcggtgttcaccaggacaaatacaggttcttggtgttacccagcctggggaggagccttcagtcggccctggatgtcagcccaaagcatgtgctgtcagagaggtctgtgctgcaggtggcctgccggctgctggatgccctggagttcctccatgagaatgagtatgttcatggaaatgtgacagctgaaaatatctttgtggatccagaggaccagagtcaggtgactttggcaggctatggcttcgccttccgctattgcccaagtggcaaacacgtggcctacgtggaaggcagcaggagccctcacgagggggaccttgagttcattagcatggacctgcacaagggatgcgggccctcccgccgcagcgacctccagagcctgggctactgcatgctgaagtggctctacgggtttctgccatggacaaattgccttcccaacactgaggacatcatgaagcaaaaacagaagtttgttgataagccggggcccttcgtgggaccctgcggtcactggatcaggccctcagagaccctgcagaagtacctgaaggtggtgatggccctcacgtatgaggagaagccgccctacgccatgctgaggaacaacctagaagctttgctgcaggatctgcgtgtgtctccatatgaccccattggcctcccgatggtgccctaggtggaatccagaactttccatttgcagtgtgcaacagaaaaaaaaaaatgaagtaatgtgactcaaggcctgctgtttaatcacagataagcttctagaacaagccctggaatgtgcattcctgccactggtttcaggatactcatcagtcctgattagcctcccggagggccccagtttccctcccgtgaatgtgaagttccccatcttggtggcctgcccttcagccagtgtcctagcaaagctggatggggttgggccggcccacaggggggacccctcctacccttgacacctctgtgctttggtaataaattgttttaccaga

SEQ ID NO: 359019 - DNA, 1433 bp, Homo sapiens
agggctgtgcgggcgacttctttcgccttcccatctcctcctgcttcttcagccttagcactgtgggagtagagtagaaagagaatcaggaccaggcggcatcagtttgtagtccagatttttaccttgttaaagaatcatctaattagcttcttgcctttactagaagtcagggagtgttaaccttttccgaagagcaagcggtaggttgccatggaaacgcgttgtgacgggtttctgagaaaacaagcggaagtaaggggcggagttgaggcagaagtttaggtaatgtgacctctgattggtggagaggtacctcacggtgcattccgattggtctgacactgacacatgcgcagtagaaccagaaggcgttccaaagcggctagaacggaggggagggggatgagcaatgagggaataatccccattccgtctggaatcagagggcgggcctgccgcggaggcatctgggaaacggagttcccaggcaggcgaagcccaggggccgtcaggaagtcagcggcgcctgcgcgggcgcctcagattcaggatgcgcgcgcagcgctctccgcccagcggaagttttcgctgggcaactgagaaggtcgctgtcaagatggagtttccaacccagtaaatccaagggccagaccgtgacctcataaagcatgatctccttctgtccagactgtggcaaaagtatccaagcggcattcaaattctgcccctactgtggaaattctttgcctgtagaggagcatgtagggtcccagacctttgtcaatccacatgtgtcatccttccaaggctcaaagagagggctgaactccagttttgaaacctctcctaagaaagtgaaatggtccagcaccgtcacctctccccgattatccctcttctcagatggtgacagttctgagtctgaagatactctgagttcctctgagagatccaaaggctccgggagcagacccccaacccccaaaagcagccctcagaagaccaggaagagccctcaggtgaccaggggtagccctcagaagaccagctgtagccctcagaagaccaggcagagccctcagacgctgaagcggagccgagtgaccacctcacttgaagctttgcccacagggacagtgctgacagacaagagtgggcgacagtggaagctgaagtccttccagaccagggacaaccagggcattctctatgaagctgcacccacctccaccctcacctgtgactcaggaccacagaagcaaaagttctcactcaaactgtcaacaagtggaagaagctgtactcgaccccactgctggccatccctacctgcatgggtttcggtgttcaccaggacaaatacagcttccaggtctggtggtacccaacctggggaggagctcaacggcctggtgttcgccaaacatgtc

SEQ ID NO: 359020 - DNA, 900 bp, Homo sapiens
cggccgctccaaaacaaggtgtattgatcggggaaaatcgtgtggccagaggtgacctgaggccagtcacaaagcatgggagggatgctgccaagtgggcaagggtgaaggagttacaggtagagagaacaggagggcaaagaaatggaaaccctggcacatggcgtgtttgaaaaagcagaagaggtttgaataatggattggttgattcagtgttcacagtgactttaagaacataacttccctggatggcagaggggactgtgtatatatcttaggctgtgtatatatcttaggcattctgttttaaaaggttgctctcctttccctaagagacctttcacatgtgtttctgtcccttcaggtttgttgataagccggggcccttcgtgggaccctgcggtcactggatcaggccctcagagaccctgcagaagtacctgaaggtggtgatggccctcacgtatgaggagaagccgccctacgccatgctgaggaacaacctagaagctttgctgcaggatctgcgtgtgtctccatatgaccccattggcctcccgatggtgccctaggtggaatccagaactttccatttgcagtgtgcaacagaaaaaaaaaaatgaagtaatgtgactcaaggcctgctgtttaatcacagataagcttctagaacaagccctggaatgtgcattcctgccactggtttcaggatactcatcagtcctgattagcctcccggagggccccagtttccctcccgtgaatgtgaagttccccatcttggtggcctgcccttcagccagtgtcctagcaaagctggatggggttgggccggcccacaggggggacccctcctacccttgacacctctgtgctttggtaataaattgttttaccaga

SEQ ID NO: 359021 - DNA, 1029 bp, Homo sapiens
agcgggtctccgggtcgcggggttcactggcctcctcttgagcttcccaagccaccttgggctccgtgttgggcatggctaaggcggagatgggcggaacttgtgggaagttcgacagctcctccgctgtgaaacttggcgtctaagtcatcccgtggtttctatggaggtgcggccgaagggaggctctgtcgtcgcctaggcaatcgccccacctgcgctgaggtcgctgtcaagatggagtttccaacccagtaaatccaagggccagaccgtgacctcataaagcatgatctccttctgtccagactgtggcaaaagtatccaagcggcattcaaattctgcccctactgtggaaattctttgcctgtagaggagcatgtagggtcccagacctttgtcaatccacatgtgtcatccttccaaggctcaaagagagggctgaactccagttttgaaacctctcctaagaaagtgaaatggtccagcaccgtcacctctccccgattatccctcttctcagatggtgacagttctgagtctgaagatactctgagttcctctgagagatccaaaggctccgggagcagacccccaacccccaaaagcagccctcagaagaccaggaagagccctcaggtgaccaggggtagccctcagaagaccagctgtagccctcagaagaccaggcagagccctcagacgctgaagcggagccgagtgaccacctcacttgaagctttgcccacagggacagtgctgacagacaagagtgggcgacagtggaagctgaagtccttccagacctggaatgtgcattcctgccactggtttcaggatactcatcagtcctgattagcctcccggagggccccagtttccctcccgtgaatgtgaagttccccatcttggtggcctgcccttcagccagtgtcctagcaaagctggatggggttgggccggcccacaggggggacccctcctacccttgacacctctgtgctttggtaataaattgttttaccaga

SEQ ID NO: 359022 - DNA, 657 bp, Homo sapiens
gtgttcagcaccaagaacagcaggcagcgggacacaaaagggaagtgctagggatgtgggttcagcaccagggacagcggagcacaaaagggaagcgctgtgggtatgagttcagcaccaaggacagtgggcagctgatcctagcgggcgtgctaggcatgcacttcagacatgaatatcagttgcccaggccgggcacggtggttcacgccttaatcccagcactttgggaggccaaggcagatggatctcgaggtcagcagttcgagaccagcctggccaacatagtgaaactctgtctctactgaaaataacaaaaattagccgaagcagtggtgggcacctgtaatccctgctgaggcaggaaaattgcttgaacccgggaggtggaggttgcagtgagccgagctctcgccactgcattccagcctgggtgacaaagcaagactccgtcttggacttgttgcccaagtcatctgggaggcagctggccatctacgtctgaagtgcaggagtgaagtctaaagggagactcagaccccgggaatatctccggagccatcagctgaagccccaggagaggatgagattatctgggaaggcatatagagtgggaagagggtgaaccctccagtaaatggcgttgagtccctcatg

SEQ ID NO: 359023 - DNA, 2102 bp, Homo sapiens
agggctgtgcgggcgacttctttcgccttcccatctcctcctgcttcttcagccttagcactgtgggagtagagtagaaagagaatcaggaccaggcggcatcagtttgtagtccagatttttaccttgttaaagaatcatctaattagcttcttgcctttactagaagtcagggagtgttaaccttttccgaagagcaagcggtaggttgccatggaaacgcgttgtgacgggtttctgagaaaacaagcggaagtaaggggcggagttgaggcagaagtttaggtcgctgtcaagatggagtttccaacccagtaaatccaagggccagaccgtgacctcataaagcatgatctccttctgtccagactgtggcaaaagtatccaagcggcattcaaattctgcccctactgtggaaattctttgcctgtagaggagcatgtagggtcccagacctttgtcaatccacatgtgtcatccttccaaggctcaaagagagggctgaactccagttttgaaacctctcctaagaaagtgaaatggtccagcaccgtcacctctccccgattatccctcttctcagatggtgacagttctgagtctgaagatactctgagttcctctgagagatccaaaggctccgggagcagacccccaacccccaaaagcagccctcagaagaccaggaagagccctcaggtgaccaggggtagccctcagaagaccagctgtagccctcagaagaccaggcagagccctcagacgctgaagcggagccgagtgaccacctcacttgaagctttgcccacagggacagtgctgacagacaagagtgggcgacagtggaagctgaagtccttccagaccagggacaaccagggcattctctatgaagctgcacccacctccaccctcacctgtgactcaggaccacagaagcaaaagttctcactcaaactggatgccaaggatgggcgcttgttcaatgagcagaacttcttccagcgggccgccaagcctctgcaagtcaacaagtggaagaagctgtactcgaccccactgctggccatccctacctgcatgggtttcggtgttcaccaggacaaatacaggttcttggtgttacccagcctggggaggagccttcagtcggccctggatgtcagcccaaagcatgtgctgtcagagaggtctgtgctgcaggtggcctgccggctgctggatgccctggagttcctccatgagaatgagtatgttcatggaaatgtgacagctgaaaatatctttgtggatccagaggaccagagtcaggtgactttggcaggctatggcttcgccttccgctattgcccaagtggcaaacacgtggcctacgtggaaggcagcaggagccctcacgagggggaccttgagttcattagcatggacctgcacaagggatgcgggccctcccgccgcagcgacctccagagcctgggctactgcatgctgaagtggctctacgggtttctgccatggacaaattgccttcccaacactgaggacatcatgaagcaaaaacagaagtttgttgataagccggggcccttcgtgggaccctgcggtcactggatcaggccctcagagaccctgcagaagtacctgaaggtggtgatggccctcacgtatgaggagaagccgccctacgccatgctgaggaacaacctagaagctttgctgcaggatctgcgtgtgtctccatatgaccccattggcctcccgatggtgccctaggtggaatccagaactttccatttgcagtgtgcaacagaaaaaaaaaaatgaagtaatgtgactcaaggcctgctgtttaatcacagataagcttctagaacaagccctggaatgtgcattcctgccactggtttcaggatactcatcagtcctgattagcctcccggagggccccagtttccctcccgtgaatgtgaagttccccatcttggtggcctgcccttcagccagtgtcctagcaaagctggatggggttgggccggcccacaggggggacccctcctacccttgacacctctgtgctttggtaataaattgttttaccaga

SEQ ID NO: 359024 - DNA, 2042 bp, Homo sapiens
agcgggtctccgggtcgcggggttcactggcctcctcttgagcttcccaagccaccttgggctccgtgttgggcatggctaaggcggagatgggcggaacttgtgggaagttcgacagctcctccgctgtgaaacttggcgtctaagtcatcccgtggtttctatggaggtgcggccgaagggaggctctgtcgtcgcctaggcaatcgccccacctgcgctgaggtcgctgtcaagatggagtttccaacccagtaaatccaagggccagaccgtgacctcataaagcatgatctccttctgtccagactgtggcaaaagtatccaagcggcattcaaattctgcccctactgtggaaattctttgcctgtagaggagcatgtagggtcccagacctttgtcaatccacatgtgtcatccttccaaggctcaaagagagggctgaactccagttttgaaacctctcctaagaaagtgaaatggtccagcaccgtcacctctccccgattatccctcttctcagatggtgacagttctgagtctgaagatactctgagttcctctgagagatccaaaggctccgggagcagacccccaacccccaaaagcagccctcagaagaccaggaagagccctcaggtgaccaggggtagccctcagaagaccagctgtagccctcagaagaccaggcagagccctcagacgctgaagcggagccgagtgaccacctcacttgaagctttgcccacagggacagtgctgacagacaagagtgggcgacagtggaagctgaagtccttccagaccagggacaaccagggcattctctatgaagctgcacccacctccaccctcacctgtgactcaggaccacagaagcaaaagttctcactcaaactggatgccaaggatgggcgcttgttcaatgagcagaacttcttccagcgggccgccaagcctctgcaagtcaacaagtggaagaagctgtactcgaccccactgctggccatccctacctgcatgggtttcggtgttcaccaggacaaatacaggttcttggtgttacccagcctggggaggagccttcagtcggccctggatgtcagcccaaagcatgtgctgtcagagaggtctgtgctgcaggtggcctgccggctgctggatgccctggagttcctccatgagaatgagtatgttcatggaaatgtgacagctgaaaatatctttgtggatccagaggaccagagtcaggtgactttggcaggctatggcttcgccttccgctattgcccaagtggcaaacacgtggcctacgtggaaggcagcaggagccctcacgagggggaccttgagttcattagcatggacctgcacaagggatgcgggccctcccgccgcagcgacctccagagcctgggctactgcatgctgaagtggctctacgggtttctgccatggacaaattgccttcccaacactgaggacatcatgaagcaaaaacagaagtttgttgataagccggggcccttcgtgggaccctgcggtcactggatcaggccctcagagaccctgcagaagtacctgaaggtggtgatggccctcacgtatgaggagaagccgccctacgccatgctgaggaacaacctagaagctttgctgcaggatctgcgtgtgtctccatatgaccccattggcctcccgatggtgccctaggtggaatccagaactttccatttgcagtgtgcaacagaaaaaaaaaaatgaagtaatgtgactcaaggcctgctgtttaatcacagataagcttctagaacaagccctggaatgtgcattcctgccactggtttcaggatactcatcagtcctgattagcctcccggagggccccagtttccctcccgtgaatgtgaagttccccatcttggtggcctgcccttcagccagtgtcctagcaaagctggatggggttgggccggcccacaggggggacccctcctacccttgacacctctgtgctttggtaataaattgttttaccaga

SEQ ID NO: 359025 - DNA, 2131 bp, Homo sapiens
agggctgtgcgggcgacttctttcgccttcccatctcctcctgcttcttcagccttagcactgtgggagtagagtagaaagagaatcaggaccaggcggcatcagtttgtagtccagatttttaccttgttaaagaatcatctaattagcttcttgcctttactagaagtcagggagtgttaaccttttccgaagagcaagcggtaggttgccatggaaacgcgttgtgacgggtttctgagaaaacaagcggaagtaaggggcggagttgaggcagaagtttaggtaatgtgacctctgattggtggagaggtacctcacggtgcattccgattggtctgacactgacacatgcgcagtagaaccagaaggcgttccaaagcggctagaacggaggggagggggatgagcaatgagggaataatccccattccgtctggaatcagagggcgggcctgccgcggaggcatctgggaaacggagttcccaggcaggcgaagcccaggggccgtcaggaagtcagcggcgcctgcgcgggcgcctcagattcaggatgcgcgcgcagcgctctccgcccagcggaagttttcgctgggcaactgagaaggtcgctgtcaagatggagtttccaacccagtaaatccaagggccagaccgtgacctcataaagcatgatctccttctgtccagactgtggcaaaagtatccaagcggcattcaaattctgcccctactgtggaaattctttgcctgtagaggagcatgtagggtcccagacctttgtcaatccacatgtgtcatccttccaaggctcaaagagagggctgaactccagttttgaaacctctcctaagaaagtgaaatggtccagcaccgtcacctctccccgattatccctcttctcagatggtgacagttctgagtctgaagatactctgagttcctctgagagatccaaaggctccgggagcagacccccaacccccaaaagcagccctcagaagaccaggaagagccctcaggtgaccaggggtagccctcagaagaccagctgtagccctcagaagaccaggcagagccctcagacgctgaagcggagccgagtgaccacctcacttgaagctttgcccacagggacagtgctgacagacaagagtgggcgacagtggaagctgaagtccttccagaccagggacaaccagggcattctctatgaagctgcacccacctccaccctcacctgtgactcaggaccacagaagcaaaagttctcactcaaactggatgccaaggatgggcgcttgttcaatgagcagaacttcttccagcgggccgccaagcctctgcaagtcaacaagtggaagaagctgtactcgaccccactgctggccatccctacctgcatgggtttcggtgttcaccaggacaaatacaggttcttggtgttacccagcctggggaggagccttcagtcggccctggatgtcagcccaaagcatgtgctgtcagagaggtctgtgctgcaggtggcctgccggctgctggatgccctggagttcctccatgagaatgagtatgttcatggaaatgtgacagctgaaaatatctttgtggatccagaggaccagagtcaggtgactttggcaggctatggcttcgccttccgctattgcccaagtggcaaacacgtggcctacgtggaaggcagcaggagccctcacgagggggaccttgagttcattagcatggacctgcacaagggatgcgggccctcccgccgcagcgacctccagagcctgggctactgcatgctgaagtggctctacgggtttctgccatggacaaattgccttcccaacactgaggacatcatgaagcaaaaacagaagtttgttgataagccggggcccttcgtgggaccctgcggtcactggatcaggccctcagagaccctgcagaagtacctgaaggtggtgatggccctcacgtatgaggagaagccgccctacgccatgctgaggaacaacctagaagctttgctgcaggatctgcgtgtgtctccatatgaccccattggcctcccgatggtgccctaggtggaatccagtcgatacacagctcctccgtgtac

SEQ ID NO: 359026 - DNA, 2420 bp, Homo sapiens
agggctgtgcgggcgacttctttcgccttcccatctcctcctgcttcttcagccttagcactgtgggagtagagtagaaagagaatcaggaccaggcggcatcagtttgtagtccagatttttaccttgttaaagaatcatctaattagcttcttgcctttactagaagtcagggagtgttaaccttttccgaagagcaagcggtaggttgccatggaaacgcgttgtgacgggtttctgagaaaacaagcggaagtaaggggcggagttgaggcagaagtttaggtaatgtgacctctgattggtggagaggtacctcacggtgcattccgattggtctgacactgacacatgcgcagtagaaccagaaggcgttccaaagcggctagaacggaggggagggggatgagcaatgagggaataatccccattccgtctggaatcagagggcgggcctgccgcggaggcatctgggaaacggagttcccaggcaggcgaagcccaggggccgtcaggaagtcagcggcgcctgcgcgggcgcctcagattcaggatgcgcgcgcagcgctctccgcccagcggaagttttcgctgggcaactgagaaggtcgctgtcaagatggagtttccaacccagtaaatccaagggccagaccgtgacctcataaagcatgatctccttctgtccagactgtggcaaaagtatccaagcggcattcaaattctgcccctactgtggaaattctttgcctgtagaggagcatgtagggtcccagacctttgtcaatccacatgtgtcatccttccaaggctcaaagagagggctgaactccagttttgaaacctctcctaagaaagtgaaatggtccagcaccgtcacctctccccgattatccctcttctcagatggtgacagttctgagtctgaagatactctgagttcctctgagagatccaaaggctccgggagcagacccccaacccccaaaagcagccctcagaagaccaggaagagccctcaggtgaccaggggtagccctcagaagaccagctgtagccctcagaagaccaggcagagccctcagacgctgaagcggagccgagtgaccacctcacttgaagctttgcccacagggacagtgctgacagacaagagtgggcgacagtggaagctgaagtccttccagaccagggacaaccagggcattctctatgaagctgcacccacctccaccctcacctgtgactcaggaccacagaagcaaaagttctcactcaaactggatgccaaggatgggcgcttgttcaatgagcagaacttcttccagcgggccgccaagcctctgcaagtcaacaagtggaagaagctgtactcgaccccactgctggccatccctacctgcatgggtttcggtgttcaccaggacaaatacaggttcttggtgttacccagcctggggaggagccttcagtcggccctggatgtcagcccaaagcatgtgctgtcagagaggtctgtgctgcaggtggcctgccggctgctggatgccctggagttcctccatgagaatgagtatgttcatggaaatgtgacagctgaaaatatctttgtggatccagaggaccagagtcaggtgactttggcaggctatggcttcgccttccgctattgcccaagtggcaaacacgtggcctacgtggaaggcagcaggagccctcacgagggggaccttgagttcattagcatggacctgcacaagggatgcgggccctcccgccgcagcgacctccagagcctgggctactgcatgctgaagtggctctacgggtttctgccatggacaaattgccttcccaacactgaggacatcatgaagcaaaaacagaagttgccttgggattcattttaatgtaagctggactttgtcatgccagaaacaaggctcggtcaccgtcagcagtttgcagttttccacctcctcccagttcctccgtgtggttgacccagatatctccgttatgcagccgcctccgggggaccacctccctccctttgagtcagccacagacagcctacttgacggccccgctggcccccacattccactgaactgtgcggatgccacagtgaccccctctcaggcacagcatgacctcctgaagtcgagcctgcttgctttgaacctaccagttaaaatctcctcaaaatgtttggataccgcccattggcccctcacagccacgagctccctgaccagtgtgcgtgtgtgtgtgtgtgtgtgtctgtgtgtgtgcttgggacgggtggggaggtcacctttgggtgtgcggtgtgcccccaggacctgtaagtaataaaatctttatttccatcttggatctttcctccagcctgggcaacataggtgagaccctgtctc

SEQ ID NO: 359027 - DNA, 2272 bp, Homo sapiens
agggctgtgcgggcgacttctttcgccttcccatctcctcctgcttcttcagccttagcactgtgggagtagagtagaaagagaatcaggaccaggcggcatcagtttgtagtccagatttttaccttgttaaagaatcatctaattagcttcttgcctttactagaagtcagggagtgttaaccttttccgaagagcaagcggtaggttgccatggaaacgcgttgtgacgggtttctgagaaaacaagcggaagtaaggggcggagttgaggcagaagtttaggtaatgtgacctctgattggtggagaggtacctcacggtgcattccgattggtctgacactgacacatgcgcagtagaaccagaaggcgttccaaagcggctagaacggaggggagggggatgagcaatgagggaataatccccattccgtctggaatcagagggcgggcctgccgcggaggcatctgggaaacggagttcccaggcaggcgaagcccaggggccgtcaggaagtcagcggcgcctgcgcgggcgcctcagattcaggatgcgcgcgcagcgctctccgcccagcggaagttttcgctgggcaactgagaaggtcgctgtcaagatggagtttccaacccagtaaatccaagggccagaccgtgacctcataaagcatgatctccttctgtccagactgtggcaaaagtatccaagcggcattcaaattctgcccctactgtggaaattctttgcctgtagaggagcatgtagggtcccagacctttgtcaatccacatgtgtcatccttccaaggctcaaagagagggctgaactccagttttgaaacctctcctaagaaagtgaaatggtccagcaccgtcacctctccccgattatccctcttctcagatggtgacagttctgagtctgaagatactctgagttcctctgagagatccaaaggctccgggagcagacccccaacccccaaaagcagccctcagaagaccaggaagagccctcaggtgaccaggggtagccctcagaagaccagctgtagccctcagaagaccaggcagagccctcagacgctgaagcggagccgagtgaccacctcacttgaagctttgcccacagggacagtgctgacagacaagagtgggcgacagtggaagctgaagtccttccagaccagggacaaccagggcattctctatgaagctgcacccacctccaccctcacctgtgactcaggaccacagaagcaaaagttctcactcaaactggttcttggtgttacccagcctggggaggagccttcagtcggccctggatgtcagcccaaagcatgtgctgtcagagaggtctgtgctgcaggtggcctgccggctgctggatgccctggagttcctccatgagaatgagtatgttcatggaaatgtgacagctgaaaatatctttgtggatccagaggaccagagtcaggtgactttggcaggctatggcttcgccttccgctattgcccaagtggcaaacacgtggcctacgtggaaggcagcaggagccctcacgagggggaccttgagttcattagcatggacctgcacaagggatgcgggccctcccgccgcagcgacctccagagcctgggctactgcatgctgaagtggctctacgggtttctgccatggacaaattgccttcccaacactgaggacatcatgaagcaaaaacagaagtttgttgataagccggggcccttcgtgggaccctgcggtcactggatcaggccctcagagaccctgcagaagtacctgaaggtggtgatggccctcacgtatgaggagaagccgccctacgccatgctgaggaacaacctagaagctttgctgcaggatctgcgtgtgtctccatatgaccccattggcctcccgatggtgccctaggtggaatccagaactttccatttgcagtgtgcaacagaaaaaaaaaaatgaagtaatgtgactcaaggcctgctgtttaatcacagataagcttctagaacaagccctggaatgtgcattcctgccactggtttcaggatactcatcagtcctgattagcctcccggagggccccagtttccctcccgtgaatgtgaagttccccatcttggtggcctgcccttcagccagtgtcctagcaaagctggatggggttgggccggcccacaggggggacccctcctacccttgacacctctgtgctttggtaataaattgttttaccaga

SEQ ID NO: 359028 - DNA, 1843 bp, Homo sapiens
tgtgtgttttttgtttctcgtatgtgtacttcctcaagacgcgtcgtagagagttcaccagtaatcagtgcggaccgtgaccctctaagcatgatctccttctgtccagactgtggcaaaagtatccaagcggcattcaaattctgcccctactgtggaaattctttgcctgtagaggagcatgtagggtcccagacctttgtcaatccacatgtgtcatccttccaaggctcaaagagagggctgaactccagttttgaaacctctcctaagaaagtgaaatggtccagcaccgtcacctctccccgattatccctcttctcagatggtgacagttctgagtctgaagatactctgagttcctctgagagatccaaaggctccgggagcagacccccaacccccaaaagcagccctcagaagaccaggaagagccctcaggtgaccaggggtagccctcagaagaccagctgtagccctcagaagaccaggcagagccctcagacgctgaagcggagccgagtgaccacctcacttgaagctttgcccacagggacagtgctgacagacaagagtgggcgacagtggaagctgaagtccttccagaccagggacaaccagggcattctctatgaagctgcacccacctccaccctcacctgtgactcaggaccacagaagcaaaagttctcactcaaactggatgccaaggatgggcgcttgttcaatgagcagaacttcttccagcgggccgccaagcctctgcaagtcaacaagtggaagaagctgtactcgaccccactgctggccatccctacctgcatgggtttcggtgttcaccaggacaaatacaggttcttggtgttacccagcctggggaggagccttcagtcggccctggatgtcagcccaaagcatgtgctgtcagagaggtctgtgctgcaggtggcctgccggctgctggatgccctggagttcctccatgagaatgagtatgttcatggaaatgtgacagctgaaaatatctttgtggatccagaggaccagagtcaggtgactttggcaggctatggcttcgccttccgctattgcccaagtggcaaacacgtggcctacgtggaaggcagcaggagccctcacgagggggaccttgagttcattagcatggacctgcacaagggatgcgggccctcccgccgcagcgacctccagagcctgggctactgcatgctgaagtggctctacgggtttctgccatggacaaattgccttcccaacactgaggacatcatgaagcaaaaacagaagtttgttgataagccggggcccttcgtgggaccctgcggtcactggatcaggccctcagagaccctgcagaagtacctgaaggtggtgatggccctcacgtatgaggagaagccgccctacgccatgctgaggaacaacctagaagctttgctgcaggatctgcgtgtgtctccatatgaccccattggcctcccgatggtgccctaggtggaatccagaactttccatttgcagtgtgcaacagaaaaaaaaaaatgaagtaatgtgactcaaggcctgctgtttaatcacagataagcttctagaacaagccctggaatgtgcattcctgccactggtttcaggatactcatcagtcctgattagcctcccggagggccccagtttccctcccgtgaatgtgaagttccccatcttggtggcctgcccttcagccagtgtcctagcaaagctggatggggttgggccggcccacaggggggacccctcctacccttgacacctctgtgctttggtaataaattgttttaccaga

SEQ ID NO: 359029 - DNA, 1591 bp, Homo sapiens
agggctgtgcgggcgacttctttcgccttcccatctcctcctgcttcttcagccttagcactgtgggagtagagtagaaagagaatcaggaccaggcggcatcagtttgtagtccagatttttaccttgttaaagaatcatctaattagcttcttgcctttactagaagtcagggagtgttaaccttttccgaagagcaagcggtaggttgccatggaaacgcgttgtgacgggtttctgagaaaacaagcggaagtaaggggcggagttgaggcagaagtttaggtaatgtgacctctgattggtggagaggtacctcacggtgcattccgattggtctgacactgacacatgcgcagtagaaccagaaggcgttccaaagcggctagaacggaggggagggggatgagcaatgagggaataatccccattccgtctggaatcagagggcgggcctgccgcggaggcatctgggaaacggagttcccaggcaggcgaagcccaggggccgtcaggaagtcagcggcgcctgcgcgggcgcctcagattcaggatgcgcgcgcagcgctctccgcccagcggaagttttcgctgggcaactgagaaggtcgctgtcaagatggagtttccaacccagtaaatccaagggccagaccgtgacctcataaagcatgatctccttctgtccagactgtggcaaaagtatccaagcggcattcaaattctgcccctactgtggaaattctttgcctgtagaggagcatgtagggtcccagacctttgtcaatccacatgtgtcatccttccaaggctcaaagagagggctgaactccagttttgaaacctctcctaagaaagtgaaatggtccagcaccgtcacctctccccgattatccctcttctcagatggtgacagttctgagtctgaagatactctgagttcctctgagagatccaaaggctccgggagcagacccccaacccccaaaagcagccctcagaagaccaggaagagccctcaggtgaccaggggtagccctcagaagaccagctgtagccctcagaagaccaggcagagccctcagacgctgaagcggagccgagtgaccacctcacttgaagctttgcccacagggacagtgctgacagacaagagtgggcgacagtggaagctgaagtccttccagaccagggacaaccagggcattctctatgaagctgcacccacctccaccctcacctgtgactcaggaccacagaagcaaaagttctcactcaaactggatgccaaggatgggcgcttgttcaatgagcagaacttcttccagcgggccgccaagcctctgcaagtcaacaagtggaagaagctgtactcgaccccactgctggccatccctacctgcatgggtttcggtgttcaccaggacaaatacagtacgttctggtgtaccagctggggagaagctcagtcggctggttaggccaaagattgtgaaaagttgcttgaggtggcgcggggggagccggtccctcgatgagttttggaatgcatgcaattgggccacacgaagagagtgagataagatgagaa

SEQ ID NO: 359030 - DNA, 1411 bp, Homo sapiens
agggctgtgcgggcgacttctttcgccttcccatctcctcctgcttcttcagccttagcactgtgggagtagagtagaaagagaatcaggaccaggcggcatcagtttgtagtccagatttttaccttgttaaagaatcatctaattagcttcttgcctttactagaagtcagggagtgttaaccttttccgaagagcaagcggtaggttgccatggaaacgcgttgtgacgggtttctgagaaaacaagcggaagtaaggggcggagttgaggcagaagtttaggtaatgtgacctctgattggtggagaggtacctcacggtgcattccgattggtctgacactgacacatgcgcagtagaaccagaaggcgttccaaagcggctagaacggaggggagggggatgagcaatgagggaataatccccattccgtctggaatcagagggcgggcctgccgcggaggcatctgggaaacggagttcccaggcaggcgaagcccaggggccgtcaggaagtcagcggcgcctgcgcgggcgcctcagattcaggatgcgcgcgcagcgctctccgcccagcggaagttttcgctgggcaactgagaaggtcgctgtcaagatggagtttccaacccagtaaatccaagggccagaccgtgacctcataaagcatgatctccttctgtccagactgtggcaaaagtatccaagcggcattcaaattctgcccctactgtggaaattctttgcctgtagaggagcatgtagggtcccagacctttgtcaatccacatgtgtcatccttccaaggctcaaagagagggctgaactccagttttgaaacctctcctaagaaagtgaaatggtccagcaccgtcacctctccccgattatccctcttctcagatggtgacagttctgagtctgaagatactctgagttcctctgagagatccaaaggctccgggagcagacccccaacccccaaaagcagccctcagaagaccaggaagagccctcaggtgaccaggggtagccctcagaagaccagctgtagccctcagaagaccaggcagagccctcagacgctgaagcggagccgagtgaccacctcacttgaagctttgcccacagggacagtgctgacagacaagagtgggcgacagtggaagctgaagtccttccagacctggaatgtgcattcctgccactggtttcaggatactcatcagtcctgattagcctcccggagggccccagtttccctcccgtgaatgtgaagttccccatcttggtggcctgcccttcagccagtgtcctagcaaagctggatggggttgggccggcccacaggggggacccctcctacccttgacacctctgtgctttggtaataaattgttttaccaga

SEQ ID NO: 359031 - DNA, 309 bp, Homo sapiens
gtgagtgcttggggggtggttgccctgatgggtgtgtgagtgtgagtgtgggggctggctgccctgctgggtgtgtgagtgtgagtgtggggggtggttgcattgctgggtggatgagtgtgagagtgtgggtagctgccctgctaggtgtgtgaatatacgagtgtgaggtggttgctctattgggtgtgtgctctgggtatggctagggctgagttagtgacatgtgcagagctgttagggatgtaggtgtggctgggtaagagacatgggcggggctgggtgaaggacgtgggtggtgctggatta

SEQ ID NO: 359032 - DNA, 1964 bp, Homo sapiens
  misc_feature (1655)..(1655): n is a, c, g, or t
  misc_feature (1760)..(1760): n is a, c, g, or t
acttccgctcctgcgcgctgaggctccggcggacctctggtggacatggctgcttcccgcttacccccagcgacgctaacgttaaagcagttcgtaagaaggcaacaagttcttctcctctacagaaggattttgcaaacaattcggcaagttccaaatgattctgatcgcaaatacctgaaagattgggcaagagaagaattcagaagaaacaaaagtgccaccgaagaggcttcgcccacgactgaagcgcaagacctgaaggaggcaaacggcattgttacaaccactggtgtgcgcagcatctgtgtgagagaattctccttggacctggggctctgacctaatggaatttacagcttagagggtgagagcaggtgttcacatcaagcaagcacctctggaccacctaccatcctcctaggtcttgtcctgggcaccacggggactcggagacagggcacacccttcgtggatgagcgccgcgatgatctccgtgttccccaccactgtggcccggtgcaaggcggtctggtccccctgcaaagtgacacaaaggcaggaacagcagtcagctcccctgcaccccctgcttgcactactcacttgacacttggacacaaggacccctcccgtccccacacagagcagagcggttattcgcagaagggcttggttaccacaggcaaggcgggctttgtggtcttgttagtagacaacgcacgctggcagagaaattttgttcataaactaagagggggaccttaagccgacagcaagaatagccctcggccacagagccaacctcaaaatgagggtcaggctctctcctgccatccaggggctatgactatcacaggtgtgaagagtgggtgtgagggcaggtgtgtgctatgcaattaaagcagcaatgcctggaatctctactgcctgccgagtttccagcttgcagggggaccactgtccagctctgccagttagcagcactcatgatttgatgacaggcgggtcatttgttcattgacctgtactagtcaacggcaatgcaggggtttgccctatttcatctgaggactccagggactgcagctatcactgcatatttctaagaagcctcttcagagagttcatgacaacatcctcactgatttatgctgcactctgagccctcttctctatgatcggattcctgggattgccggccgttgttctcctttaggcgccaaagggaacttgactcttcctaattgcagttgagtgaaggatgaaacactcccagaggtaagcaggtcaagactgtaacaggagagttctgaagtctctaagagcaccctttatctctgacaggtcctcaggaagctaagttgaggtaaatcaagctgagcctgtggtccagccttgaaagggaggatgggtgggcagtgtggaaatgttctggtggaaagcaatgagcacgagacaaggggtcaggaggcctgggctgtgcatggcttgctagaagcctgtcaccctgctggacctcaggtgtgtcaccctggatgatcccagggtccctccattgccttcttggattctatgatgtggctggtcagagttttgtgaagtttcctggcagagcaccagaggggcaaagaaaacattctggggcgtccctngtgcttggcccaaaagaggacagaggccatcataagataaaacagattttttaaaagaaggatgcactgctacctataaacaaccttaacgaaatactgattctncttactaaactccccagatctgtaacaaacaatgcacattaaaaacatgtaatctgaaacaaagttctaaagatagatggtggtgatggttgcacaacaatgtgagtgtacttaatgccactgaaccgtatacgtaaatatgttcagacagtaaatttaatgctatgtatattttattacaataaaaaatcctagttaaaactc

SEQ ID NO: 359033 - DNA, 2587 bp, Homo sapiens
acttccgctcctgcgcgctgaggctccggcggacctctggtggacatggctgcttcccgcttacccccagcgacgctaacgttaaagcagttcgtaagaaggcaacaagttcttctcctctacagaaggattttgcaaacaattcggcaagttccaaatgattctgatcgcaaatacctgaaagattgggcaagagaagaattcagaagaaacaaaagtgccaccgaagaggatacaatccggatgatgattactcaaggcaatatgcagctcaaggagttagaaaaaacacttgctttagcaaaatcttaactatagcattattctgaaggattttcaaagtctccatgtgttttgttgcatttaggattaacaatggacaacacaaagcccagtcttactatttatatgtacagtatttggtgatagagagcaaaggaaaaacacatcagaacagttgccttaacactgaaaaacataccctgcattttgaaaatgtttatggatgtctcagcagttcttaaaagaagaaaaaaaccactaacaaatggccagtagatgctggacacaatcattagggaagtgtaaatcaaaactactatgaggtcgggtgtagtggctcatgcttgtaatcccagtactttaggaggctgtggtaggtggatcacttgaggtcaggagttcaagaccagcctggccaacatggtgaaacctcatctctactaaaaatacaaaaattagcttggtgtggtggtgcattgcctgtagtcccagctacttgggaggctgaggcaggagaatcacttgaacccaggaagtggaggttgcagtgagctgaggtcgtgccactgcacttcagcctgggtgacagagtgagacagtctctaaaaaaaaaaaaaaaaaaacaaccctgagattcacattcactagaatggctgtaattaaaaagagaaataataataagtcttggtgaagatgtacagaaattacagaaccctcatacattgctggtgggaatgtaaaatggtgtagccacttcagaaaacagacggtcagttcctcaaaagatgaaacagctgctgtatgagttagcacttctaccccatgcccatagccattatttggcactaaaaagaaacgaaggacttatatatactaaacatggataaaccttgaaaacgttaagtgaaagaagccggtcacaaaagatcacatgatgattccattcatacgaaatgtccagaataggcagaaagattagtggttgcctaggctggctgtagatggaatggagtaactgctaatgggtgtagggttccttttcagggtgatgaaaatatcctacagttagcttgtggtgtaggctgcacaactcttgaatatattcaaatccactgaactgtacattttaaatgtaaggtatgaattgtatctcaataaagctgttattaaaaaactcttgaggtgtaggactgaaagtatactgacaccaggagataccctggaactttctcgaaaaatcctgcattatccctgagggttgttcaggtacgttcttcagatgtgtcatagtttgatagagaactcatcaaaaagatcaccactgggaatctagatctttgttgaaaagggaagagaaagagaagcttaatgagcacattgaagcacttaccagaaagaagagggaagacttctggatgaaacctctgtgagtaccttaacattcacatggaagtagtaaaaataagattctgggtgcagttctccaatgacaggaaaaaaaacaaagagaatttgaagaatacgtcagagacaaatacattacaaccaaaattgacttcaaggcacttttgaaggagatcaaatttataacaaaataatttagtgaaagtgaaagcttgtggaagatgttggaatcatccatcctgaaaattgaagtcttctgtttatcaacagaacagctaagaagctaatctaagaatgaccagcacctgaaagatgtagacaacattttgcagaatgataaatggtatccagtactggactgtgtctgagaggcatcaactgaatgtggatgttaatgacctggactgtcagggtccacctctacctcccagagcctcagagcccacaagacaaaataattctgaatactgttccatgggggtaatctactaattcaaaatgcctgcctgtgccaattttcaggtttttatgtagataagtattagttaacctgttgcaaaatgatctgacaaacagaagcatttgtgacgtttctgaacagagaacactttggaaatattttttgtgtgacatgattgatagatacatgctatctctagtaaatctaaaatcttgaaactcaaaatcatccttttatgggtgtagaagtcagtgatttaatgatgctcttcctaacagtggtgtgcatggaaaggttttcattaaagagcgtatgtggtttgcatttgcaagattcaactagcacagactccaagaaaacctaagtttttttgttttttaaagcaggtaaggccgggcactgtggcttacacaagtaatccacacactttgggaggctgag

SEQ ID NO: 359034 - DNA, 2639 bp, Homo sapiens
ctcaacgctttatacttcattgggtaaatggttggctaaggtggtctggtagtaaggtggagtggtttggtgcgatcgcgtgagacagcgtcaggcgcttgatttccctgagtcccggtgcctcagctgcccagtgcccacgttcgtaagaaggcaacaagttcttctcctctacagaaggattttgcaaacaattcggcaagttccaaatgattctgatcgcaaatacctgaaagattgggcaagagaagaattcagaagaaacaaaagtgccaccgaagaggatacaatccggatgatgattactcaaggcaatatgcagctcaaggagttagaaaaaacacttgctttagcaaaatcttaactatagcattattctgaaggattttcaaagtctccatgtgttttgttgcatttaggattaacaatggacaacacaaagcccagtcttactatttatatgtacagtatttggtgatagagagcaaaggaaaaacacatcagaacagttgccttaacactgaaaaacataccctgcattttgaaaatgtttatggatgtctcagcagttcttaaaagaagaaaaaaaccactaacaaatggccagtagatgctggacacaatcattagggaagtgtaaatcaaaactactatgaggtcgggtgtagtggctcatgcttgtaatcccagtactttaggaggctgtggtaggtggatcacttgaggtcaggagttcaagaccagcctggccaacatggtgaaacctcatctctactaaaaatacaaaaattagcttggtgtggtggtgcattgcctgtagtcccagctacttgggaggctgaggcaggagaatcacttgaacccaggaagtggaggttgcagtgagctgaggtcgtgccactgcacttcagcctgggtgacagagtgagacagtctctaaaaaaaaaaaaaaaaaaacaaccctgagattcacattcactagaatggctgtaattaaaaagagaaataataataagtcttggtgaagatgtacagaaattacagaaccctcatacattgctggtgggaatgtaaaatggtgtagccacttcagaaaacagacggtcagttcctcaaaagatgaaacagctgctgtatgagttagcacttctaccccatgcccatagccattatttggcactaaaaagaaacgaaggacttatatatactaaacatggataaaccttgaaaacgttaagtgaaagaagccggtcacaaaagatcacatgatgattccattcatacgaaatgtccagaataggcagaaagattagtggttgcctaggctggctgtagatggaatggagtaactgctaatgggtgtagggttccttttcagggtgatgaaaatatcctacagttagcttgtggtgtaggctgcacaactcttgaatatattcaaatccactgaactgtacattttaaatgtaaggtatgaattgtatctcaataaagctgttattaaaaaactcttgaggtgtaggactgaaagtatactgacaccaggagataccctggaactttctcgaaaaatcctgcattatccctgagggttgttcaggtacgttcttcagatgtgtcatagtttgatagagaactcatcaaaaagatcaccactgggaatctagatctttgttgaaaagggaagagaaagagaagcttaatgagcacattgaagcacttaccagaaagaagagggaagacttctggatgaaacctctgtgagtaccttaacattcacatggaagtagtaaaaataagattctgggtgcagttctccaatgacaggaaaaaaaacaaagagaatttgaagaatacgtcagagacaaatacattacaaccaaaattgacttcaaggcacttttgaaggagatcaaatttataacaaaataatttagtgaaagtgaaagcttgtggaagatgttggaatcatccatcctgaaaattgaagtcttctgtttatcaacagaacagctaagaagctaatctaagaatgaccagcacctgaaagatgtagacaacattttgcagaatgataaatggtatccagtactggactgtgtctgagaggcatcaactgaatgtggatgttaatgacctggactgtcagggtccacctctacctcccagagcctcagagcccacaagacaaaataattctgaatactgttccatgggggtaatctactaattcaaaatgcctgcctgtgccaattttcaggtttttatgtagataagtattagttaacctgttgcaaaatgatctgacaaacagaagcatttgtgacgtttctgaacagagaacactttggaaatattttttgtgtgacatgattgatagatacatgctatctctagtaaatctaaaatcttgaaactcaaaatcatccttttatgggtgtagaagtcagtgatttaatgatgctcttcctaacagtggtgtgcatggaaaggttttcattaaagagcgtatgtggtttgcatttgcaagattcaactagcacagactccaagaaaacctaagtttttttgttttttaaagcaggtaaggccgggcactgtggcttacacaagtaatccacacactttgggaggctgag

SEQ ID NO: 359035 - DNA, 2771 bp, Homo sapiens
ctcaacgctttatacttcattgggtaaatggttggctaaggtggtctggtagtaaggtggagtggtttggtgcgatcgcgtgagacagcgtcaggcgcttgatttccctgagtcccggtgcctcagctgcccagtgcccacggtaaaagtctattgcactgagctgtggcaaacagcaaatgagattaccaaagatttgaacaactgttaatttagaaaaagtgctgtcgttgtaataacaacttctaggagaccggcagcccttttcagcccgttcgtaagaaggcaacaagttcttctcctctacagaaggattttgcaaacaattcggcaagttccaaatgattctgatcgcaaatacctgaaagattgggcaagagaagaattcagaagaaacaaaagtgccaccgaagaggatacaatccggatgatgattactcaaggcaatatgcagctcaaggagttagaaaaaacacttgctttagcaaaatcttaactatagcattattctgaaggattttcaaagtctccatgtgttttgttgcatttaggattaacaatggacaacacaaagcccagtcttactatttatatgtacagtatttggtgatagagagcaaaggaaaaacacatcagaacagttgccttaacactgaaaaacataccctgcattttgaaaatgtttatggatgtctcagcagttcttaaaagaagaaaaaaaccactaacaaatggccagtagatgctggacacaatcattagggaagtgtaaatcaaaactactatgaggtcgggtgtagtggctcatgcttgtaatcccagtactttaggaggctgtggtaggtggatcacttgaggtcaggagttcaagaccagcctggccaacatggtgaaacctcatctctactaaaaatacaaaaattagcttggtgtggtggtgcattgcctgtagtcccagctacttgggaggctgaggcaggagaatcacttgaacccaggaagtggaggttgcagtgagctgaggtcgtgccactgcacttcagcctgggtgacagagtgagacagtctctaaaaaaaaaaaaaaaaaaacaaccctgagattcacattcactagaatggctgtaattaaaaagagaaataataataagtcttggtgaagatgtacagaaattacagaaccctcatacattgctggtgggaatgtaaaatggtgtagccacttcagaaaacagacggtcagttcctcaaaagatgaaacagctgctgtatgagttagcacttctaccccatgcccatagccattatttggcactaaaaagaaacgaaggacttatatatactaaacatggataaaccttgaaaacgttaagtgaaagaagccggtcacaaaagatcacatgatgattccattcatacgaaatgtccagaataggcagaaagattagtggttgcctaggctggctgtagatggaatggagtaactgctaatgggtgtagggttccttttcagggtgatgaaaatatcctacagttagcttgtggtgtaggctgcacaactcttgaatatattcaaatccactgaactgtacattttaaatgtaaggtatgaattgtatctcaataaagctgttattaaaaaactcttgaggtgtaggactgaaagtatactgacaccaggagataccctggaactttctcgaaaaatcctgcattatccctgagggttgttcaggtacgttcttcagatgtgtcatagtttgatagagaactcatcaaaaagatcaccactgggaatctagatctttgttgaaaagggaagagaaagagaagcttaatgagcacattgaagcacttaccagaaagaagagggaagacttctggatgaaacctctgtgagtaccttaacattcacatggaagtagtaaaaataagattctgggtgcagttctccaatgacaggaaaaaaaacaaagagaatttgaagaatacgtcagagacaaatacattacaaccaaaattgacttcaaggcacttttgaaggagatcaaatttataacaaaataatttagtgaaagtgaaagcttgtggaagatgttggaatcatccatcctgaaaattgaagtcttctgtttatcaacagaacagctaagaagctaatctaagaatgaccagcacctgaaagatgtagacaacattttgcagaatgataaatggtatccagtactggactgtgtctgagaggcatcaactgaatgtggatgttaatgacctggactgtcagggtccacctctacctcccagagcctcagagcccacaagacaaaataattctgaatactgttccatgggggtaatctactaattcaaaatgcctgcctgtgccaattttcaggtttttatgtagataagtattagttaacctgttgcaaaatgatctgacaaacagaagcatttgtgacgtttctgaacagagaacactttggaaatattttttgtgtgacatgattgatagatacatgctatctctagtaaatctaaaatcttgaaactcaaaatcatccttttatgggtgtagaagtcagtgatttaatgatgctcttcctaacagtggtgtgcatggaaaggttttcattaaagagcgtatgtggtttgcatttgcaagattcaactagcacagactccaagaaaacctaagtttttttgttttttaaagcaggtaaggccgggcactgtggcttacacaagtaatccacacactttgggaggctgag

SEQ ID NO: 359036 - DNA, 2440 bp, Homo sapiens
acttccgctcctgcgcgctgaggctccggcggacctctggtggacatggctgcttcccgcttacccccagcgacgctaacgttaaagcagttcgtaagaaggcaacaagttcttctcctctacagaaggattttgcaaacaattcggcaagttccaaatgattctgatcgcaaatacctgaaagattgggcaagagaagaattcagaagaaacaaaagtgccaccgaagaggatacaatccggatgatgattactcaaggcaatatgcagctcaaggagttagaaaaaacacttgctttagcaaaatcttaactatagcattattctgaaggattttcaaagtctccatgtgttttgttgcatttaggattaacaatggacaacacaaagcccagtcttactatttatatgtacagtatttggtgatagagagcaaaggaaaaacacatcagaacagttgccttaacactgaaaaacataccctgcattttgaaaatgtttatggatgtctcagcagttcttaaaagaagaaaaaaaccactaacaaatggccacatggtgaaacctcatctctactaaaaatacaaaaattagcttggtgtggtggtgcattgcctgtagtcccagctacttgggaggctgaggcaggagaatcacttgaacccaggaagtggaggttgcagtgagctgaggtcgtgccactgcacttcagcctgggtgacagagtgagacagtctctaaaaaaaaaaaaaaaaaaacaaccctgagattcacattcactagaatggctgtaattaaaaagagaaataataataagtcttggtgaagatgtacagaaattacagaaccctcatacattgctggtgggaatgtaaaatggtgtagccacttcagaaaacagacggtcagttcctcaaaagatgaaacagctgctgtatgagttagcacttctaccccatgcccatagccattatttggcactaaaaagaaacgaaggacttatatatactaaacatggataaaccttgaaaacgttaagtgaaagaagccggtcacaaaagatcacatgatgattccattcatacgaaatgtccagaataggcagaaagattagtggttgcctaggctggctgtagatggaatggagtaactgctaatgggtgtagggttccttttcagggtgatgaaaatatcctacagttagcttgtggtgtaggctgcacaactcttgaatatattcaaatccactgaactgtacattttaaatgtaaggtatgaattgtatctcaataaagctgttattaaaaaactcttgaggtgtaggactgaaagtatactgacaccaggagataccctggaactttctcgaaaaatcctgcattatccctgagggttgttcaggtacgttcttcagatgtgtcatagtttgatagagaactcatcaaaaagatcaccactgggaatctagatctttgttgaaaagggaagagaaagagaagcttaatgagcacattgaagcacttaccagaaagaagagggaagacttctggatgaaacctctgtgagtaccttaacattcacatggaagtagtaaaaataagattctgggtgcagttctccaatgacaggaaaaaaaacaaagagaatttgaagaatacgtcagagacaaatacattacaaccaaaattgacttcaaggcacttttgaaggagatcaaatttataacaaaataatttagtgaaagtgaaagcttgtggaagatgttggaatcatccatcctgaaaattgaagtcttctgtttatcaacagaacagctaagaagctaatctaagaatgaccagcacctgaaagatgtagacaacattttgcagaatgataaatggtatccagtactggactgtgtctgagaggcatcaactgaatgtggatgttaatgacctggactgtcagggtccacctctacctcccagagcctcagagcccacaagacaaaataattctgaatactgttccatgggggtaatctactaattcaaaatgcctgcctgtgccaattttcaggtttttatgtagataagtattagttaacctgttgcaaaatgatctgacaaacagaagcatttgtgacgtttctgaacagagaacactttggaaatattttttgtgtgacatgattgatagatacatgctatctctagtaaatctaaaatcttgaaactcaaaatcatccttttatgggtgtagaagtcagtgatttaatgatgctcttcctaacagtggtgtgcatggaaaggttttcattaaagagcgtatgtggtttgcatttgcaagattcaactagcacagactccaagaaaacctaagtttttttgttttttaaagcaggtaaggccgggcactgtggcttacacaagtaatccacacactttgggaggctgag

SEQ ID NO: 359037 - DNA, 670 bp, Homo sapiens
ctcaacgctttatacttcattgggtaaatggttggctaaggtggtctggtagtaaggtggagtggtttggtgcgatcgcgtgagacagcgtcaggcgcttgatttccctgagtcccggtgcctcagctgcccagtgcccacggtaaaagtctattgcactgagctgtggcaaacagcaaatgagattaccaaagatttgaacaactgttaatttagaaaaagtgctgtcgttgtaataacaacttctaggagaccggcagcccttttcagcccgttcgtaagaaggcaacaagttcttctcctctacagaaggattttgcaaacaattcggcaagttccaaatgattctgatcgcaaatacctgaaagattgggcaagagaagaattcagaagaaacaaaagtgccaccgaagagagaacaaaatcatggtgaggacagatcctaaccctttttattgatcagtgaatttttttttttaagtttagcagacatcttggaatatagtgccactgagctggtatatcttgatcattgcttgtaatgttaccgattttaaattattattttaaaatttagtattttaaaatatgtagataaaagagtatctacactcttcagcatcatcacttgacttttatgttgtacattttatatgtatgtatgtggaac

SEQ ID NO: 359038 - DNA, 486 bp, Homo sapiens
tggtgtgcgcagcatctgtgtgagagaattctccttggacctggggctctgacctaatggaatttacagcttagagggtgagagcaggtgttcacatcaagcaagcacctctggaccacctaccatcctcctaggtcttgtcctgggcaccacggggactcggagacaggtaggatattatccctgacctcaagaagcttaaagtctatgatgataataactacagacactgatgctgggccgggactgccaactacatgcacagagactgtgctccagggagtgccattcacataaactaggatatgaatggcgtctcctggagttgtgcaacgcagcagccccgtgtgaggcacagtctcactctccatcttggtacactggacttgagctagcccagcagatgttcccttggccaaactgtgtccaagtcacatcaatttgattcaaaatattattaaagtgtatctatgagccatagtacca

SEQ ID NO: 359039 - DNA, 2011 bp, Homo sapiens
  misc_feature (2007)..(2011): n is a, c, g, or t
gtcctgaacgcccatcaagcccatggcccttgtgatccaggtggggaaactaaggcccagagaagtgaggaccccgcagactatcaatcccagtctcttcccctcactccctgtgaagctctccagcatcatcgaggtcccatcagcccttgccctgttggatgaataggcacctctggaagagccaactgtgtgagatggtgcagcccagtggtggcccggcagcagatcaggacgtactgggcgaagagtctcctctggggaagccagccatgctgcacctgccttcagaacagggcgctcctgagaccctccagcgctgcctggaggagaatcaagagctccgagatgccatccggcagagcaaccagattctgcgggagcgctgcgaggagcttctgcatttccaagccagccagagggaggagaaggagttcctcatgtgcaagttccaggaggccaggaaactggtggagagactcggcctggagaagctcgatctgaagaggcagaaggagcaggctctgcgggaggtggagcacctgaagagatgccagcagcagatggctgaggacaaggcctctgtgaaagcccaggtgacgtccttgctcggggagctgcaggagagccagagtcgcttggaggctgccactaaggaatgccaggctctggagggtcgggcccgggcggccagcgagcaggcgcggcagctggagagtgagcgcgaggcgctgcagcagcagcacagcgtgcaggtggaccagctgcgcatgcagggccagagcgtggaggccgcgctccgcatggagcgccaggccgcctcggaggagaagaggaagctggcccagttgcaggtggcctatcaccagctcttccaagaatacgacaaccacatcaagagcagcgtggtgggcagtgagcggaagcgaggaatgcagctggaagatctcaaacagcagctccagcaggccgaggaggccctggtggccaaacaggaggtgatcgataagctgaaggaggaggccgagcagcacaagattgtgatggagaccgttccggtgctgaaggcccaggcggatatctacaaggcggacttccaggctgagaggcaggcccgggagaagctggccgagaagaaggagctcctgcaggagcagctggagcagctgcagagggagtacagcaaactgaaggccagctgtcaggagtcggccaggatcgaggacatgaggaagcggcatgtcgaggtctcccaggcccccttgccccccgcccctgcctacctctcctctcccctggccctgcccagccagaggaggagcccccccgaggagccacctgacttctgctgtcccaagtgccagtatcaggcccctgatatggacaccctgcagatacatgtcatggagtgcattgagtagggccggccagtgcaaggccactgcctgccgaggacgtgcccgggaccgtgcagtctgcgctttcctctcccgcctgcctagcccaggatgaagggctgggtggccacaactgggatgccacctggagccccacccaggagctggccgcggcaccttacgcttcagctgttgatccgctggtcccctcttttggggtagatgcggccccgatcaggcctgactcgctgctctttttgttcccttctgtctgctcgaaccacttgcctcgggctaatccctccctcttcctccacccggcactggggaagtcaagaatggggcctggggctctcagggagaactgcttcccctggcagagctgggtggcagctcttcctcccaccggacaccgacccgcccgctgctgtgccctgggagtgctgccctcttaccatgcacacgggtgctctccttttgggctgcatgctattccattttgcagccagaccgatgtgtatttaaccagtcactattgatggacatttgggttgtttcccatctttttgttaccataaataatggcatagtaaaaatccttgtgcattannnnn

SEQ ID NO: 359040 - DNA, 561 bp, Homo sapiens
  misc_feature (1)..(1): n is a, c, g, or t
nagcccgttcctgctccgcgcttctggagcactggccaaggcgggccgattcaggacccaggttacttgggcggcgagctggactgtttctactcctccctcctcctccactgcggggtctgaccctactccttgtgtgaggactcctctagttcagagacatattctgttcaccaaacttgactgcgctctatcgaggtcgttaaattcttcggaaatgcctcacatatagtttggcagctaggtatctgatttcatatgcctgtttgctcgttttgcaagacaacatctgcctatcgtcatactgtttctgtgatctgagaatgaatgggctctcctggcacattagaggaatagcacggaggtcactatagctggagcagagtgagggaggggagcacagttggagaggaagggatggggaacccgatggtacagggccttgtaggccgttgtagggagattggcttttacgcagaaggcaacggggatccctggtagggttctcagtagaggaggaatgtgatcggaattacgtcttacactgatcgttctagcagt

SEQ ID NO: 359041 - DNA, 2122 bp, Homo sapiens
  misc_feature (2118)..(2122): n is a, c, g, or t
ggttcgcgggtcaagccggccctatgggcagtctcttcttgattcctcccccggagagggcggggcggccgagcgccccgaggctagacgccgccgtccgagagacgagggggcgtgtaggcggtgacgccctgcaaagtggccggcgtgcttatcattaccgagcttccgcgggcctgcagagcctggcggactcagacttctctccggagcgggatgcggccctaccgcggcctcacacttctcgccggcttcccgagttctcgggggcggggcttgtgtttttacttccggatcccacagctatgacaccggaagccggaagcgtggtagggaagggcgaccgcgaaactgggactttctcggagcgccggggccctaccagcgttcacagtccgccgctcccacccttctcacgtctgacggactctgctgacagcccttgccctgttggatgaataggcacctctggaagagccaactgtgtgagatggtgcagcccagtggtggcccggcagcagatcaggacgtactgggcgaagagtctcctctggggaagccagccatgctgcacctgccttcagaacagggcgctcctgagaccctccagcgctgcctggaggagaatcaagagctccgagatgccatccggcagagcaaccagattctgcgggagcgctgcgaggagcttctgcatttccaagccagccagagggaggagaaggagttcctcatgtgcaagttccaggaggccaggaaactggtggagagactcggcctggagaagctcgatctgaagaggcagaaggagcaggctctgcgggaggtggagcacctgaagagatgccagcagcagatggctgaggacaaggcctctgtgaaagcccaggtgacgtccttgctcggggagctgcaggagagccagagtcgcttggaggctgccactaaggaatgccaggctctggagggtcgggcccgggcggccagcgagcaggcgcggcagctggagagtgagcgcgaggcgctgcagcagcagcacagcgtgcaggtggaccagctgcgcatgcagggccagagcgtggaggccgcgctccgcatggagcgccaggccgcctcggaggagaagaggaagctggcccagttgcaggtggcctatcaccagctcttccaagaatacgacaaccacatcaagagcagcgtggtgggcagtgagcggaagcgaggaatgcagctggaagatctcaaacagcagctccagcaggccgaggaggccctggtggccaaacaggaggtgatcgataagctgaaggaggaggccgagcagcacaagattgtgatggagaccgttccggtgctgaaggcccaggcggatatctacaaggcggacttccaggctgagaggcaggcccgggagaagctggccgagaagaaggagctcctgcaggagcagctggagcagctgcagagggagtacagcaaactgaaggccagctgtcaggagtcggccaggatcgaggacatgaggaagcggcatgtcgaggtctcccaggcccccttgccccccgcccctgcctacctctcctctcccctggccctgcccagccagaggaggagcccccccgaggagccacctgacttctgctgtcccaagtgccagtatcaggcccctgatatggacaccctgcagatacatgtcatggagtgcattgagtagggccggccagtgcaaggccactgcctgccgaggacgtgcccgggaccgtgcagtctgcgctttcctctcccgcctgcctagcccaggatgaagggctgggtggccacaactgggatgccacctggagccccacccaggagctggccgcggcaccttacgcttcagctgttgatccgctggtcccctcttttggggtagatgcggccccgacccgcccgctgctgtgccctgggagtgctgccctcttaccatgcacacgggtgctctccttttgggctgcatgctattccattttgcagccagaccgatgtgtatttaaccagtcactattgatggacatttgggttgtttcccatctttttgttaccataaataatggcatagtaaaaatccttgtgcattannnnn

SEQ ID NO: 359042 - DNA, 2007 bp, Homo sapiens
  misc_feature (2003)..(2007): n is a, c, g, or t
ggttcgcgggtcaagccggccctatgggcagtctcttcttgattcctcccccggagagggcggggcggccgagcgccccgaggctagacgccgccgtccgagagacgagggggcgtgtaggcggtgacgccctgcaaagtggccggcgtgcttatcattaccgagcttccgcgggcctgcagagcctggcggactcagacttctctccggagcgggatgcggccctaccgcggcctcacacttctcgccggcttcccgagttctcgggggcggggcttgtgtttttacttccggatcccacagctatgacaccggaagccggaagcgtggtagggaagggcgaccgcgaaactgggactttctcggagcgccggggccctaccagcgttcacagtccgccgctcccacccttctcacgtctgacggactctgctgacagcccttgccctgttggatgaataggcacctctggaagagccaactgtgtgagatggtgcagcccagtggtggcccggcagcagatcaggacgtactgggcgaagagtctcctctggggaagccagccatgctgcacctgccttcagaacagggcgctcctgagaccctccagcgctgcctggaggagaatcaagagctccgagatgccatccggcagagcaaccagattctgcgggagcgctgcgaggagcttctgcatttccaagccagccagagggaggagaaggagttcctcatgtgcaagttccaggaggccaggaaactggtggagagactcggcctggagaagctcgatctgaagaggcagaaggagcaggctctgcgggaggtggagcacctgaagagatgccagcagcagatggctgaggacaaggcctctgtgaaagcccaggtgacgtccttgctcggggagctgcaggagagccagagtcgcttggaggctgccactaaggaatgccaggctctggagggtcggaggaagctggcccagttgcaggtggcctatcaccagctcttccaagaatacgacaaccacatcaagagcagcgtggtgggcagtgagcggaagcgagcggatatctacaaggcggacttccaggctgagaggcaggcccgggagaagctggccgagaagaaggagctcctgcaggagcagctggagcagctgcagagggagtacagcaaactgaaggccagctgtcaggagtcggccaggatcgaggacatgaggaagcggcatgtcgaggtctcccaggcccccttgccccccgcccctgcctacctctcctctcccctggccctgcccagccagaggaggagcccccccgaggagccacctgacttctgctgtcccaagtgccagtatcaggcccctgatatggacaccctgcagatacatgtcatggagtgcattgagtagggccggccagtgcaaggccactgcctgccgaggacgtgcccgggaccgtgcagtctgcgctttcctctcccgcctgcctagcccaggatgaagggctgggtggccacaactgggatgccacctggagccccacccaggagctggccgcggcaccttacgcttcagctgttgatccgctggtcccctcttttggggtagatgcggccccgatcaggcctgactcgctgctctttttgttcccttctgtctgctcgaaccacttgcctcgggctaatccctccctcttcctccacccggcactggggaagtcaagaatggggcctggggctctcagggagaactgcttcccctggcagagctgggtggcagctcttcctcccaccggacaccgacccgcccgctgctgtgccctgggagtgctgccctcttaccatgcacacgggtgctctccttttgggctgcatgctattccattttgcagccagaccgatgtgtatttaaccagtcactattgatggacatttgggttgtttcccatctttttgttaccataaataatggcatagtaaaaatccttgtgcattannnnn

SEQ ID NO: 359043 - DNA, 2172 bp, Homo sapiens
  misc_feature (2168)..(2172): n is a, c, g, or t
aggagatagcaggcggtcccggttgtaatttcatcacgcagggacgaggagttgcagggtgtaaccatgtagctggccgatgggctagacgccgccgtccgagagacgagggggcgtgtaggcggtgacgccctgcaaagtggccggcgtgcttatcattaccgagcttccgcgggcctgcagagcctggcggactcagacttctctccggagcgggatgcggccctaccgcggcctcacacttctcgccggcttcccgagttctcgggggcggggcttgtgtttttacttccggatcccacagctatgacaccggaagccggaagcgtggcacctctggaagagccaactgtgtgagatggtgcagcccagtggtggcccggcagcagatcaggacgtactgggcgaagagtctcctctggggaagccagccatgctgcacctgccttcagaacagggcgctcctgagaccctccagcgctgcctggaggagaatcaagagctccgagatgccatccggcagagcaaccagattctgcgggagcgctgcgaggagcttctgcatttccaagccagccagagggaggagaaggagttcctcatgtgcaagttccaggaggccaggaaactggtggagagactcggcctggagaagctcgatctgaagaggcagaaggagcaggctctgcgggaggtggagcacctgaagagatgccagcagcagatggctgaggacaaggcctctgtgaaagcccaggtgacgtccttgctcggggagctgcaggagagccagagtcgcttggaggctgccactaaggaatgccaggctctggagggtcgggcccgggcggccagcgagcaggcgcggcagctggagagtgagcgcgaggcgctgcagcagcagcacagcgtgcaggtggaccagctgcgcatgcagggccagagcgtggaggccgcgctccgcatggagcgccaggccgcctcggaggagaagaggaagctggcccagttgcaggtggcctatcaccagctcttccaagaatacgacaaccacatcaagagcagcgtggtgggcagtgagcggaagcgaggaatgcagctggaagatctcaaacagcagctccagcaggccgaggaggccctggtggccaaacaggaggtgatcgataagctgaaggaggaggccgagcagcacaagattgtgatggagaccgttccggtgctgaaggcccaggcggatatctacaaggcggacttccaggctgagaggcaggcccgggagaagctggccgagaagaaggagctcctgcaggagcagctggagcagctgcagagggagtacagcaaactgaaggccagctgtcaggagtcggccaggatcgaggacatgaggaagcggcatgtcgaggtctcccaggcccccttgccccccgcccctgcctacctctcctctcccctggccctgcccagccagaggaggagcccccccgaggagccacctgacttctgctgtcccaagtgccagtatcaggcccctgatatggacaccctgcagatacatgtcatggagtgcattgagtagggccggccagtgcaaggccactgcctgccgaggacgtgcccgggaccgtgcagtctgcgctttcctctcccgcctgcctagcccaggatgaagggctgggtggccacaactgggatgccacctggagccccacccaggagctggccgcggcaccttacgcttcagctgttgatccgctggtcccctcttttggggtagatgcggccccgatcaggcctgactcgctgctctttttgttcccttctgtctgctcgaaccacttgcctcgggctaatccctccctcttcctccacccggcactggggaagtcaagaatggggcctggggctctcagggagaactgcttcccctggcagagctgggtggcagctcttcctcccaccggacaccgacccgcccgctgctgtgccctgggagtgctgccctcttaccatgcacacgggtgctctccttttgggctgcatgctattccattttgcagccagaccgatgtgtatttaaccagtcactattgatggacatttgggttgtttcccatctttttgttaccataaataatggcatagtaaaaatccttgtgcattannnnn

SEQ ID NO: 359044 - DNA, 1336 bp, Homo sapiens
ggttcgcgggtcaagccggccctatgggcagtctcttcttgattcctcccccggagagggcggggcggccgagcgccccgaggctagacgccgccgtccgagagacgagggggcgtgtaggcggtgacgccctgcaaagtggccggcgtgcttatcattaccgagcttccgcgggcctgcagagcctggcggactcagacttctctccggagcgggatgcggccctaccgcggcctcacacttctcgccggcttcccgagttctcgggggcggggcttgtgtttttacttccggatcccacagctatgacaccggaagccggaagcgtggtagggaagggcgaccgcgaaactgggactttctcggagcgccggggccctaccagcgttcacagtccgccgctcccacccttctcacgtctgacggactctgctgacagcccttgccctgttggatgaataggcacctctggaagagccaactgtgtgagatggtgcagcccagtggtggcccggcagcagatcaggacgtactgggcgaagagtctcctctggggaagccagccatgctgcacctgccttcagaacagggcgctcctgagaccctccagcgctgcctggaggagaatcaagagctccgagatgccatccggcagagcaaccagattctgcgggagcgctgcgaggagcttctgcatttccaagccagccagagggaggagaaggagttcctcatgtgcaagttccaggaggccaggaaactggtggagagactcggcctggagaagctcgatctgaagaggcagaaggagcaggctctgcgggaggtggagcacctgaagagatgccagcagcagatggctgaggacaaggcctctgtgaaagcccaggtgacgtccttgctcggggagctgcaggagagccagagtcgcttggaggctgccactaaggaatgccaggctctggagggtcggcccgggcggccacgcagccggccccggccgctgcaccgtgcgcgcgagcgctgcgacacccccaccccgcgctcgtgcacccacctgacatcagggccccaaccgtggacggtcggccccggcatgacgagtcagggccgcctgcgcaccaagggaagcggcccaatcgccgcgcccatccccgtccagcatcgcaccacttcgcacccgcggccgacggccccgccgcctgatatcaacccccgcgccgccccggccaccggccaaccaccgaggcccatcacacgcacccatcacgccccgcaccccgtacccgccccacaccagacaacaccccgaaaccccccccccaccccccccacg

SEQ ID NO: 359045 - DNA, 1587 bp, Homo sapiens
ggttcgcgggtcaagccggccctatgggcagtctcttcttgattcctcccccggagagggcggggcggccgagcgccccgaggctagacgccgccgtccgagagacgagggggcgtgtaggcggtgacgccctgcaaagtggccggcgtgcttatcattaccgagcttccgcgggcctgcagagcctggcggactcagacttctctccggagcgggatgcggccctaccgcggcctcacacttctcgccggcttcccgagttctcgggggcggggcttgtgtttttacttccggatcccacagctatgacaccggaagccggaagcgtggtagggaagggcgaccgcgaaactgggactttctcggagcgccggggccctaccagcgttcacagtccgccgctcccacccttctcacgtctgacggactctgctgacagcccttgccctgttggatgaataggcacctctggaagagccaactgtgtgagatggtgcagcccagtggtggcccggcagcagatcaggacgtactgggcgaagagtctcctctggggaagccagccatgctgcacctgccttcagaacagggcgctcctgagaccctccagcgctgcctggaggagaatcaagagctccgagatgccatccggcagagcaaccagattctgcgggagcgctgcgaggagcttctgcatttccaagccagccagagggaggagaaggagttcctcatgtgcaagttccaggaggccaggaaactggtggagagactcggcctggagaagctcgatctgaagaggcagaaggagcaggctctgcgggaggtggagcacctgaagagatgccagcagcagatggctgaggacaaggcctctgtgaaagcccaggtgacgtccttgctcggggagctgcaggagagccagagtcgcttggaggctgccactaaggaatgccaggctctggagggtcggcccgggcggactctctgaagccctgcgctcctggcacttgactccaagcagccctctggagccagcacccctcagggaggccggccagacctcagggggacacggcaggagaatcgagctgggggagaggcccaggatcccggaccacagccgtgacaacgactggcccttggaagctctgcatcatcgtcgccagagccaccgccagatcatcatcaaccacagaccgacagaagatggtccagaagctggcacagacagaggatgcggccctggacagcctggagcggctggcgaccacgcatcgctccaggctcgggccggaaacaggacaggcaggggccgaagacaagtgatcgaacaccaagcgcaggtgccacctgggagatccccaaacccggcagcacagacaccagggccgaaggacctcggggcagaactcccacgccaccgccgcacgagggggtgggccagcacagaggaaaacgcacggcgaagaggcgccggggcacacgcccaagagcggcgcaggaccgaggcaaagagcacacacagcaggcacacggagcgtgaccaccgagacgagcgtcacgcaccacaccacggcagcagca

SEQ ID NO: 359046 - DNA, 711 bp, Homo sapiens
aggagatagcaggcggtcccggttgtaatttcatcacgcagggacgaggagttgcagggtgtaaccatgtagctggccgatgggctagacgccgccgtccgagagacgagggggcgtgtaggcggtgacgccctgcaaagtggccggcgtgcttatcattaccgagcttccgcgggcctgcagagcctggcggactcagacttctctccggagcgggatgcggccctaccgcggcctcacacttctcgccggcttcccgagttctcgggggcggggcttgtgtttttacttccggatcccacagctatgacaccggaagccggaagcgtggtagggaagggcgaccgcgaaactgggactttctcggagcgccggggccctaccagcgttcacagtccgccgctcccacccttctcacgtctgacggactctgctgacagcccttgccctgttggatgaataggcacctctggaagagccaactgtgtgagatggtgcagcccagtggtggcccggcagcagatcaggacgtactgggcgaagagtctcctctggggaagccagccatgctgcacctgccttcagaacagggcgctcctgagaccctccagcgctgcctggaggagaatcaagagctccgaggaatgtgggtgccggcaggacaggcgattggtggctatggaccgccccctgcaggaagaggagccccca

SEQ ID NO: 359047 - DNA, 2109 bp, Homo sapiens
  misc_feature (1)..(1): n is a, c, g, or t
  misc_feature (2105)..(2109): n is a, c, g, or t
nagcccgttcctgctccgcgcttctggagcactggccaaggcgggccgattcaggacccaggttacttgggcggcgagctggactgtttctactcctccctcctcctccactgcggggtctgaccctactccttgtgtgaggactcctctagttcagagacatattctgttcaccaaacttgactgcgctctatcgaggtcgttaaattcttcggaaatgcctcacatatagtttggcagctagcccttgccctgttggatgaataggcacctctggaagagccaactgtgtgagatggtgcagcccagtggtggcccggcagcagatcaggacgtactgggcgaagagtctcctctggggaagccagccatgctgcacctgccttcagaacagggcgctcctgagaccctccagcgctgcctggaggagaatcaagagctccgagatgccatccggcagagcaaccagattctgcgggagcgctgcgaggagcttctgcatttccaagccagccagagggaggagaaggagttcctcatgtgcaagttccaggaggccaggaaactggtggagagactcggcctggagaagctcgatctgaagaggcagaaggagcaggctctgcgggaggtggagcacctgaagagatgccagcagcagatggctgaggacaaggcctctgtgaaagcccaggtgacgtccttgctcggggagctgcaggagagccagagtcgcttggaggctgccactaaggaatgccaggctctggagggtcgggcccgggcggccagcgagcaggcgcggcagctggagagtgagcgcgaggcgctgcagcagcagcacagcgtgcaggtggaccagctgcgcatgcagggccagagcgtggaggccgcgctccgcatggagcgccaggccgcctcggaggagaagaggaagctggcccagttgcaggtggcctatcaccagctcttccaagaatacgacaaccacatcaagagcagcgtggtgggcagtgagcggaagcgaggaatgcagctggaagatctcaaacagcagctccagcaggccgaggaggccctggtggccaaacaggaggtgatcgataagctgaaggaggaggccgagcagcacaagattgtgatggagaccgttccggtgctgaaggcccaggcggatatctacaaggcggacttccaggctgagaggcaggcccgggagaagctggccgagaagaaggagctcctgcaggagcagctggagcagctgcagagggagtacagcaaactgaaggccagctgtcaggagtcggccaggatcgaggacatgaggaagcggcatgtcgaggtctcccaggcccccttgccccccgcccctgcctacctctcctctcccctggccctgcccagccagaggaggagcccccccgaggagccacctgacttctgctgtcccaagtgccagtatcaggcccctgatatggacaccctgcagatacatgtcatggagtgcattgagtagggccggccagtgcaaggccactgcctgccgaggacgtgcccgggaccgtgcagtctgcgctttcctctcccgcctgcctagcccaggatgaagggctgggtggccacaactgggatgccacctggagccccacccaggagctggccgcggcaccttacgcttcagctgttgatccgctggtcccctcttttggggtagatgcggccccgatcaggcctgactcgctgctctttttgttcccttctgtctgctcgaaccacttgcctcgggctaatccctccctcttcctccacccggcactggggaagtcaagaatggggcctggggctctcagggagaactgcttcccctggcagagctgggtggcagctcttcctcccaccggacaccgacccgcccgctgctgtgccctgggagtgctgccctcttaccatgcacacgggtgctctccttttgggctgcatgctattccattttgcagccagaccgatgtgtatttaaccagtcactattgatggacatttgggttgtttcccatctttttgttaccataaataatggcatagtaaaaatccttgtgcattannnnn

SEQ ID NO: 359048 - DNA, 2076 bp, Homo sapiens
  misc_feature (2072)..(2076): n is a, c, g, or t
gtcctgaacgcccatcaagcccatggcccttgtgatccaggtggggaaactaaggcccagagaagtgaggaccccgcagactatcaatcccagtctcttcccctcactccctgtgaagctctccagcatcatcgaggtcccatcaggtggggaaggatgctgttccaggcgcacactagtctacaaggccagagctttctggaagggggcacccttgccctgttggatgaataggcacctctggaagagccaactgtgtgagatggtgcagcccagtggtggcccggcagcagatcaggacgtactgggcgaagagtctcctctggggaagccagccatgctgcacctgccttcagaacagggcgctcctgagaccctccagcgctgcctggaggagaatcaagagctccgagatgccatccggcagagcaaccagattctgcgggagcgctgcgaggagcttctgcatttccaagccagccagagggaggagaaggagttcctcatgtgcaagttccaggaggccaggaaactggtggagagactcggcctggagaagctcgatctgaagaggcagaaggagcaggctctgcgggaggtggagcacctgaagagatgccagcagcagatggctgaggacaaggcctctgtgaaagcccaggtgacgtccttgctcggggagctgcaggagagccagagtcgcttggaggctgccactaaggaatgccaggctctggagggtcgggcccgggcggccagcgagcaggcgcggcagctggagagtgagcgcgaggcgctgcagcagcagcacagcgtgcaggtggaccagctgcgcatgcagggccagagcgtggaggccgcgctccgcatggagcgccaggccgcctcggaggagaagaggaagctggcccagttgcaggtggcctatcaccagctcttccaagaatacgacaaccacatcaagagcagcgtggtgggcagtgagcggaagcgaggaatgcagctggaagatctcaaacagcagctccagcaggccgaggaggccctggtggccaaacaggaggtgatcgataagctgaaggaggaggccgagcagcacaagattgtgatggagaccgttccggtgctgaaggcccaggcggatatctacaaggcggacttccaggctgagaggcaggcccgggagaagctggccgagaagaaggagctcctgcaggagcagctggagcagctgcagagggagtacagcaaactgaaggccagctgtcaggagtcggccaggatcgaggacatgaggaagcggcatgtcgaggtctcccaggcccccttgccccccgcccctgcctacctctcctctcccctggccctgcccagccagaggaggagcccccccgaggagccacctgacttctgctgtcccaagtgccagtatcaggcccctgatatggacaccctgcagatacatgtcatggagtgcattgagtagggccggccagtgcaaggccactgcctgccgaggacgtgcccgggaccgtgcagtctgcgctttcctctcccgcctgcctagcccaggatgaagggctgggtggccacaactgggatgccacctggagccccacccaggagctggccgcggcaccttacgcttcagctgttgatccgctggtcccctcttttggggtagatgcggccccgatcaggcctgactcgctgctctttttgttcccttctgtctgctcgaaccacttgcctcgggctaatccctccctcttcctccacccggcactggggaagtcaagaatggggcctggggctctcagggagaactgcttcccctggcagagctgggtggcagctcttcctcccaccggacaccgacccgcccgctgctgtgccctgggagtgctgccctcttaccatgcacacgggtgctctccttttgggctgcatgctattccattttgcagccagaccgatgtgtatttaaccagtcactattgatggacatttgggttgtttcccatctttttgttaccataaataatggcatagtaaaaatccttgtgcattannnnn

SEQ ID NO: 359049 - DNA, 2304 bp, Homo sapiens
  misc_feature (2300)..(2304): n is a, c, g, or t
ggttcgcgggtcaagccggccctatgggcagtctcttcttgattcctcccccggagagggcggggcggccgagcgccccgaggctagacgccgccgtccgagagacgagggggcgtgtaggcggtgacgccctgcaaagtggccggcgtgcttatcattaccgagcttccgcgggcctgcagagcctggcggactcagacttctctccggagcgggatgcggccctaccgcggcctcacacttctcgccggcttcccgagttctcgggggcggggcttgtgtttttacttccggatcccacagctatgacaccggaagccggaagcgtggtagggaagggcgaccgcgaaactgggactttctcggagcgccggggccctaccagcgttcacagtccgccgctcccacccttctcacgtctgacggactctgctgacagcccttgccctgttggatgaataggcacctctggaagagccaactgtgtgagatggtgcagcccagtggtggcccggcagcagatcaggacgtactgggcgaagagtctcctctggggaagccagccatgctgcacctgccttcagaacagggcgctcctgagaccctccagcgctgcctggaggagaatcaagagctccgagatgccatccggcagagcaaccagattctgcgggagcgctgcgaggagcttctgcatttccaagccagccagagggaggagaaggagttcctcatgtgcaagttccaggaggccaggaaactggtggagagactcggcctggagaagctcgatctgaagaggcagaaggagcaggctctgcgggaggtggagcacctgaagagatgccagcagcagatggctgaggacaaggcctctgtgaaagcccaggtgacgtccttgctcggggagctgcaggagagccagagtcgcttggaggctgccactaaggaatgccaggctctggagggtcgggcccgggcggccagcgagcaggcgcggcagctggagagtgagcgcgaggcgctgcagcagcagcacagcgtgcaggtggaccagctgcgcatgcagggccagagcgtggaggccgcgctccgcatggagcgccaggccgcctcggaggagaagaggaagctggcccagttgcaggtggcctatcaccagctcttccaagaatacgacaaccacatcaagagcagcgtggtgggcagtgagcggaagcgaggaatgcagctggaagatctcaaacagcagctccagcaggccgaggaggccctggtggccaaacaggaggtgatcgataagctgaaggaggaggccgagcagcacaagattgtgatggagaccgttccggtgctgaaggcccaggcggatatctacaaggcggacttccaggctgagaggcaggcccgggagaagctggccgagaagaaggagctcctgcaggagcagctggagcagctgcagagggagtacagcaaactgaaggccagctgtcaggagtcggccaggatcgaggacatgaggaagcggcatgtcgaggtctcccaggcccccttgccccccgcccctgcctacctctcctctcccctggccctgcccagccagaggaggagcccccccgaggagccacctgacttctgctgtcccaagtgccagtatcaggcccctgatatggacaccctgcagatacatgtcatggagtgcattgagtagggccggccagtgcaaggccactgcctgccgaggacgtgcccgggaccgtgcagtctgcgctttcctctcccgcctgcctagcccaggatgaagggctgggtggccacaactgggatgccacctggagccccacccaggagctggccgcggcaccttacgcttcagctgttgatccgctggtcccctcttttggggtagatgcggccccgatcaggcctgactcgctgctctttttgttcccttctgtctgctcgaaccacttgcctcgggctaatccctccctcttcctccacccggcactggggaagtcaagaatggggcctggggctctcagggagaactgcttcccctggcagagctgggtggcagctcttcctcccaccggacaccgacccgcccgctgctgtgccctgggagtgctgccctcttaccatgcacacgggtgctctccttttgggctgcatgctattccattttgcagccagaccgatgtgtatttaaccagtcactattgatggacatttgggttgtttcccatctttttgttaccataaataatggcatagtaaaaatccttgtgcattannnnn

SEQ ID NO: 359050 - DNA, 2171 bp, Homo sapiens
  misc_feature (2167)..(2171): n is a, c, g, or t
ggttcgcgggtcaagccggccctatgggcagtctcttcttgattcctcccccggagagggcggggcggccgagcgccccgaggctagacgccgccgtccgagagacgagggggcgtgtaggcggtgacgccctgcaaagtggccggcgtgcttatcattaccgagcttccgcgggcctgcagagcctggcggactcagacttctctccggagcgggatgcggccctaccgcggcctcacacttctcgccggcttcccgagttctcgggggcggggcttgtgtttttacttccggatcccacagctatgacaccggaagccggaagcgtggcacctctggaagagccaactgtgtgagatggtgcagcccagtggtggcccggcagcagatcaggacgtactgggcgaagagtctcctctggggaagccagccatgctgcacctgccttcagaacagggcgctcctgagaccctccagcgctgcctggaggagaatcaagagctccgagatgccatccggcagagcaaccagattctgcgggagcgctgcgaggagcttctgcatttccaagccagccagagggaggagaaggagttcctcatgtgcaagttccaggaggccaggaaactggtggagagactcggcctggagaagctcgatctgaagaggcagaaggagcaggctctgcgggaggtggagcacctgaagagatgccagcagcagatggctgaggacaaggcctctgtgaaagcccaggtgacgtccttgctcggggagctgcaggagagccagagtcgcttggaggctgccactaaggaatgccaggctctggagggtcgggcccgggcggccagcgagcaggcgcggcagctggagagtgagcgcgaggcgctgcagcagcagcacagcgtgcaggtggaccagctgcgcatgcagggccagagcgtggaggccgcgctccgcatggagcgccaggccgcctcggaggagaagaggaagctggcccagttgcaggtggcctatcaccagctcttccaagaatacgacaaccacatcaagagcagcgtggtgggcagtgagcggaagcgaggaatgcagctggaagatctcaaacagcagctccagcaggccgaggaggccctggtggccaaacaggaggtgatcgataagctgaaggaggaggccgagcagcacaagattgtgatggagaccgttccggtgctgaaggcccaggcggatatctacaaggcggacttccaggctgagaggcaggcccgggagaagctggccgagaagaaggagctcctgcaggagcagctggagcagctgcagagggagtacagcaaactgaaggccagctgtcaggagtcggccaggatcgaggacatgaggaagcggcatgtcgaggtctcccaggcccccttgccccccgcccctgcctacctctcctctcccctggccctgcccagccagaggaggagcccccccgaggagccacctgacttctgctgtcccaagtgccagtatcaggcccctgatatggacaccctgcagatacatgtcatggagtgcattgagtagggccggccagtgcaaggccactgcctgccgaggacgtgcccgggaccgtgcagtctgcgctttcctctcccgcctgcctagcccaggatgaagggctgggtggccacaactgggatgccacctggagccccacccaggagctggccgcggcaccttacgcttcagctgttgatccgctggtcccctcttttggggtagatgcggccccgatcaggcctgactcgctgctctttttgttcccttctgtctgctcgaaccacttgcctcgggctaatccctccctcttcctccacccggcactggggaagtcaagaatggggcctggggctctcagggagaactgcttcccctggcagagctgggtggcagctcttcctcccaccggacaccgacccgcccgctgctgtgccctgggagtgctgccctcttaccatgcacacgggtgctctccttttgggctgcatgctattccattttgcagccagaccgatgtgtatttaaccagtcactattgatggacatttgggttgtttcccatctttttgttaccataaataatggcatagtaaaaatccttgtgcattannnnn

SEQ ID NO: 359051 - DNA, 1508 bp, Homo sapiens
  misc_feature (1504)..(1508): n is a, c, g, or t
gtgcacctctgaccaggtggcagagtggaaggactgagggctctcagctgagctgtgcacatggcgggcacaggaccggctggctgtgagtgggtgtggcctgtggcctgtgaagggtgggaggagggctgtggagctggggattctgggaagggaatgtcggcccagctgggaggttgtaccagatgacctcagcggcctcttcagtcctgaaaaaaacctcagcatctcctctgtcgttttgggccgtgacaggacgcagccatctccctgtgcacgctgagatcctgcaatgggccctcaaatcaggggctggcatcacccagcctggtcagccagggccactctttcatccttctcagttcttctcagccagcctcgccctgggctgacgaggctccgtcagctccccttgcccgtccttagggaatgcagctggaagatctcaaacagcagctccagcaggccgaggaggccctggtggccaaacaggaggtgatcgataagctgaaggaggaggccgagcagcacaagattgtgatggagaccgttccggtgctgaaggcccaggcggatatctacaaggcggacttccaggctgagaggcaggcccgggagaagctggccgagaagaaggagctcctgcaggagcagctggagcagctgcagagggagtacagcaaactgaaggccagctgtcaggagtcggccaggatcgaggacatgaggaagcggcatgtcgaggtctcccaggcccccttgccccccgcccctgcctacctctcctctcccctggccctgcccagccagaggaggagcccccccgaggagccacctgacttctgctgtcccaagtgccagtatcaggcccctgatatggacaccctgcagatacatgtcatggagtgcattgagtagggccggccagtgcaaggccactgcctgccgaggacgtgcccgggaccgtgcagtctgcgctttcctctcccgcctgcctagcccaggatgaagggctgggtggccacaactgggatgccacctggagccccacccaggagctggccgcggcaccttacgcttcagctgttgatccgctggtcccctcttttggggtagatgcggccccgatcaggcctgactcgctgctctttttgttcccttctgtctgctcgaaccacttgcctcgggctaatccctccctcttcctccacccggcactggggaagtcaagaatggggcctggggctctcagggagaactgcttcccctggcagagctgggtggcagctcttcctcccaccggacaccgacccgcccgctgctgtgccctgggagtgctgccctcttaccatgcacacgggtgctctccttttgggctgcatgctattccattttgcagccagaccgatgtgtatttaaccagtcactattgatggacatttgggttgtttcccatctttttgttaccataaataatggcatagtaaaaatccttgtgcattannnnn

SEQ ID NO: 359052 - DNA, 1275 bp, Homo sapiens
  misc_feature (1224)..(1224): n is a, c, g, or t
ggttcgcgggtcaagccggccctatgggcagtctcttcttgattcctcccccggagagggcggggcggccgagcgccccgaggctagacgccgccgtccgagagacgagggggcgtgtaggcggtgacgccctgcaaagtggccggcgtgcttatcattaccgagcttccgcgggcctgcagagcctggcggactcagacttctctccggagcgggatgcggccctaccgcggcctcacacttctcgccggcttcccgagttctcgggggcggggcttgtgtttttacttccggatcccacagctatgacaccggaagccggaagcgtggtagggaagggcgaccgcgaaactgggactttctcggagcgccggggccctaccagcgttcacagtccgccgctcccacccttctcacgtctgacggactctgctgacagcccttgccctgttggatgaataggcacctctggaagagccaactgtgtgagatggtgcagcccagtggtggcccggcagcagatcaggacgtactgggcgaagagtctcctctggggaagccagccatgctgcacctgccttcagaacagggcgctcctgagaccctccagcgctgcctggaggagaatcaagagctccgagatgccatccggcagagcaaccagattctgcgggagcgctgcgaggagcttctgcatttccaagccagccagagggaggagaaggagttcctcatgtgcaagttccaggaggccaggaaactggtggagagactcggcctggagaagctcgatctgaagaggcagaaggagcaggctctgcgggaggtggagcacctgaagagatgccagcagcagatggctgaggacaaggcctctgtgaaagcccaggtgacgtccttgctcggggagctgcaggagagccagagtcgcttggaggctgccactaaggaatgccaggctctggagggtcggaggaagctggcccagttgcaggtggcctatcaccagctcttccaagaatacgacaaccacatcaagagcagcgtggtgggcagtgagcggaagcgaggaatgcagctggaagatctcaaacagcagctccagcaggccgaggaggccctggtggccaaacaggaggtgatcgataagctgaaggaggaggccgagcagcacaagattgtgatggagaccgttccggtgctgaaggcccagcggatatctanaagcggacttcaagctgagagcaggccgggaaaactggcgaaaaaaagagc

SEQ ID NO: 359053 - DNA, 426 bp, Homo sapiens
ctctgctccagccacactggcctcgctcttcctttagcataccacatgtgctttgccttggtggcttcttctgcctgtactgctcttcctccagatattcaaatggcttactctttgacctcctttgagtgtttgttcaaatgcctctatctcaattaggccactttgatcacccatttaattacaacccacacctcacaggtaatccccagccctcttaccctgttttcttcatagcactcatactgtactatactatgtaatttacctatttattatgcttcctatcaagtttctttctcctaggatgtaagctaatgaaagcagagattattgtctcatttcctggtgtacccccagcacctagaacactgtttggcacatggtagaggctcaataaacatttgttgggcgaatacatgaacg

SEQ ID NO: 359054 - DNA, 3226 bp, Homo sapiens
actgggggcgctgcggcgacccctccgccgccccgtagaaatctccgcggccccgaggccgcttgcttcctgtttgtccgacgaggagacatggcggcggcgccggtagcggctgggtctggagccggccgagggagacggtcggcagccacagtggcggcttggggcggatggggcggccggccgcggcctggtaacattctgctgcagctgcggcagggccagctgaccggccggggcctggtccgggcggtgcagttcactgagacttttttgacggagagggacaaacaatccaagtggagtggaattcctcagctgctcctcaagctgcacaccaccagccacctccacagtgactttgttgagtgtcaaaacatcctcaaggaaatttctcctcttctctccatggaggctatggcatttgttactgaagagaggaaacttacccaagaaaccacttatccaaatacttatatttttgacttgtttggaggtgttgatcttcttgtagaaattcttatgaggcctacgatctctatccggggacagaaactgaaaataagtgatgaaatgtccaaggactgcttgagtatcctgtataatacctgtgtctgtacagagggagttacaaagcgtttggcagaaaagaatgactttgtgatcttcctgtttacattgatgacaagtaagaagacattcttacaaacagcaaccctcattgaagatattttgggtgttaaaaaggaaatgatccgactagatgaagtccccaatctgagttccttagtatccaatttcgatcagcagcagctcgctaatttctgccggattctggctgtcaccatttcagagatggatacagggaatgatgacaagcacacgcttcttgccaaaaatgctcaacagaagaagagcttgagtttggggccttctgcagctgaaatcaatcaagcggcccttctcagcattcctggctttgttgagcggctttgcaaactggcgactcgaaaggtgtcagagtcaacgggcacagccagcttccttcaggagttggaagagtggtacacatggctagacaatgctttggtgctagatgccctgatgcgagtggccaatgaggagtcagagcacaatcaagcctccattgtgttccctcctccaggggcttctgaggagaatggcctgcctcacacgtcagccagaacccagctgccccagtcaatgaagattatgcatgagatcatgtacaaactggaagtgctctatgtcctctgcgtgctgctgatggggcgtcagcgaaaccaggttcacagaatgattgcagagttcaagctgatccctggacttaataatttgtttgacaaactgatttggaggaagcattcagcatctgcccttgtcctccatggtcacaaccagaactgtgactgtagcccggacatcaccttgaagatacagtttttgaggcttcttcagagcttcagtgaccaccacgagaacaagtacttgttactcaacaaccaggagctgaatgaactcagtgccatctctctcaaggccaacatccctgaggtggaagctgtcctcaacaccgacaggagtttggtgtgtgatgggaagaggggcttattaactcgtctgctgcaggtcatgaagaaggagccagcagagtcgtctttcaggttttggcaagctcgggctgtggagagtttcctccgagggaccacctcctatgcagaccagatgttcctgctgaagcgaggcctcttggagcacatcctttactgcattgtggacagcgagtgtaagtcaagggatgtgctccagagttactttgacctcctgggggagctgatgaagttcaacgttgatgcattcaagagattcaataaatatatcaacaccgatgcaaagttccaggtattcctgaagcagatcaacagctccctggtggactccaacatgctggtgcgctgtgtcactctgtccctggaccgatttgaaaaccaggtggatatgaaagttgccgaggtactgtctgaatgccgcctgctcgcctacatatcccaggtgcccacgcagatgtccttcctcttccgcctcatcaacatcatccacgtgcagacgctgacccaggagaacgtcagctgcctcaacaccagcctggtgatcctgatgctggcccgacggaaagagcggctgcccctgtacctgcggctgctgcagcggatggagcacagcaagaagtaccccggcttcctgctcaacaacttccacaacctgctgcgcttctggcagcagcactacctgcacaaggacaaggacagcacctgcctagagaacagctcctgcatcagcttctcatactggaaggagacagtgtccatcctgttgaacccggaccggcagtcaccctctgctctcgttagctacattgaggagccctacatggacatagacagggacttcactgaggagtgaccttgggccaggcctcgggaggctgctgggccagtgtgggtgagcgtgggtacgatgccacacgccctgccctgttcccgttcctccctgctgctctctgcctgccccaggtctttgggtacaggcttggtgggagggaagtcctagaagcccttggtccccctgggtctgagggccctaggtcatggagagcctcagtccccataatgaggacagggtaccatgcccacctttccttcagaaccctggggcccagggccacccagaggtaagaggacatttagcattagctctgtgtgagctcctgccggtttcttggctgtcagtcagtcccagagtggggaggaagatatgggtgacccccaccccccatctgtgagccaagcctcccttgtccctggcctttggacccaggcaaaggcttctgagccctgggcaggggtggtgggtaccagagaatgctgccttcccccaagcctgcccctctgcctcattttcctgtagctcctctggttctgtttgctcattggctgctgtgttcatccaagggggttctcccagaagtgaggggcctttccctccatcccttggggcacggggcagctgtgcctgccctgcctctgcctgaggcagccgctcctgcctgagcctggacatggggcccttccttgtgttgccaatttattaacagcaaataaaccaattaaatggagactattaaataactttattttaaaaatga

SEQ ID NO: 359055 - DNA, 979 bp, Homo sapiens
  misc_feature (29)..(29): n is a, c, g, or t
  misc_feature (876)..(876): n is a, c, g, or t
  misc_feature (884)..(886): n is a, c, g, or t
  misc_feature (893)..(893): n is a, c, g, or t
  misc_feature (897)..(897): n is a, c, g, or t
  misc_feature (905)..(905): n is a, c, g, or t
  misc_feature (910)..(910): n is a, c, g, or t
  misc_feature (914)..(914): n is a, c, g, or t
  misc_feature (921)..(921): n is a, c, g, or t
  misc_feature (928)..(928): n is a, c, g, or t
ccggctaggtacgaggctcgggtggtgcnaccatttcagagatggatacagggaatgatgacaagcacacgcttcttgccaaaaatgctcaacagaagaagagcttgagtttggggccttctgcagctgaaatcaatcaagcggcccttctcagcattcctggctttgttgagcggctttgcaaactggcgactcgaaaggtgtcagagtcaacgggcacagccagcttccttcaggagttggaagagtggtacacatggctagacaatgctttggtgctagatgccctgatgcgagtggccaatgaggagtcagagcacaatcaagcctccattgtgttccctcctccaggggcttctgaggagaatggcctgcctcacacgtcagccagaacccagctgccccagtcaatgaagattatgcatgagatcatgtacaaactggaagtgctctatgtcctctgcgtgctgctgatggggcgtcagcgaaaccaggttcacagaatgattgcagagttcaagctgatccctggacttaataatttgtttgacaaactgatttggaggaagcattcagcatctgcccttgtcctccatggtcacaaccagaactgtgactgtagcccggacatcaccttgaagatacagtttttgaggcttcttcagagcttcagtgaccaccacgagaacaagtacttgttactcaacaaccaggagctgaatgaactcagtgccatctctctcaaggccaacatccctgaggtggaagctgtcctcaacaccgacaggagtttggtgtgtgatgggaagaggggcttattaactcgtctgctgcaggtcatgaagaaggagccagcagagtcgtctttcagttggnaagccggnnngggagtncccnggggcccncttgngacnagtctgngaagggnctggggaacctagaggggagaggggcaggggggccgaatgcccggggggaa

SEQ ID NO: 359056 - DNA, 4401 bp, Homo sapiens
  misc_feature (1)..(1): n is a, c, g, or t
  misc_feature (900)..(900): n is a, c, g, or t
  misc_feature (945)..(945): n is a, c, g, or t
  misc_feature (1277)..(1277): n is a, c, g, or t
nctcagtgcttaggcagtggcctgtgttttagacctggtgatgacagctcccctcacctaggagctgagcaccccggccatcttggtgaccacagagcaggtcacaggcttcagctgtacgccctgggcaggggagagattgtgctgcattcccagtctgctccacctcctggtgaggtctgtcaggcctggtcctgtccttggagccaccagcatcctcagacaagaatctagacagtgttgccagttccatccccaggatgcttgctcaaagccaatgcatggtctgagctccatgccaggccctggtgggggcagccacgttgacaccttcaccctgtccctcctcacccagcacatcctttactgcattgtggacagcgagtgtaagtcaagggatgtgctccagagttactttgacctcctgggggagctgatgaagttcaacgttgatgcattcaagagattcaataaatatatcaacaccgatgcaaaggtaaagttaacccagggctctgtggagtgtgctgggttgtccagaagttcacctggagtcctggtctgccaggctttaggcacaggttttacgttagagacgacgggggagtctgggcagtctttggcaaacattcattggaacctgctctgtctggctttgtgctagaccctgggaatgcagggatgaaaaccggggctgcttgtgggtagggagtgagggtgggaatgggtggcttgtgcgcctgccgtgacgcagcatggtgggtgccacggtgggagccgctgtagggagggactgggcctggtgtgttaggctcaccgagtgtgtgtgacagaaacccagctcaggctagctgaagtaaaattaaaagtaaaaattaaaggaatccagcacccttgagngtaaaaccactggagagagtgtcggatctgtgctgaattccgggnagtgcctcttagtacctgggtggtgaggggaggtccctcagcttatctgagcctctgtcttcctatctgaagcagtggggctggtagaggtcgctgatgccccttgtagtgactgtccccccgggccatggccatacctggccagcagcccactgcctgctgtgagcttggtttctgtatagttccaggtattcctgaagcagatcaacagctccctggtggactccaacatgctggtgcgctgtgtcactctgtccctggaccgatttgaaaaccaggtggatatgaaaggtacatgaaaggcaggctgtcaaggcaagtcatgcagggtnagaatgctggcatcagacaccctgtctccagcagggagacaagaatgactgagggagctgcaccagatgcccacgtggccggcctcaaggtggcggcttccagggcaattggctttgctgccttgttcaacactttaataaggtgaaaatccattgttgctagcaagatgcaaagaaaaccagaaaaagaccttcctcttctgggctggtattgcctggcacgatgagttggccccctcgtcctcagtgtgctgtgcgtggcatcgcaggtgccctgtggtgcagcaggcatctgaaccctcctggacttgctaacgcacttccatgtgtatgcgcacgcgtttcctttttttcctaggagagggcttgtggcatccagcagattctcctgagggtttgtgacccccccacacccccaaaaagtcaggcacttgttccttgtcacggtcactgtcattgatagcaagaagtatcccggttgttggtaatttagccgtttgcttcctttttctgccccagagggtctgtttcaggggaacagccacacagattttggtaccttcggttattgccctgcctcccagttgtgcgggaagcagttgctccgacactagtggacggagcagaacctgtgccttgtggtctcagcactgggccggactcacctgagagctggtgtggaaaaccagttgcgctaggacctctgcagaaggagtggaacttttgcgttgtttttcttaatgcagcgtcatggatccatcttcctgtggagggaactcttctgtgtgtgatatggagggcacgggtctggagccagtctggggagggctgagggagagctgccctgagcttggttctggaggatgaggtggggtgctcctgggcactctgagaacatggctttgcctggtagcaggacagctggaggtccttctttctgccacagtcagctttcgttgaagctgttttgatgatgagctcccagcttcagagtcaggacccaagcggggctccacgaaaggcctgggcgacccagccactgggcctaagcctgacctgctgcacccctgcctccctccacagttgccgaggtactgtctgaatgccgcctgctcgcctacatatcccaggtgcccacgcagatgtccttcctcttccgcctcatcaacatcatccacgtgcagacgctgacccaggtgagaggccccggcagacacacagcagggaaggtcgattggaaaccacttcctttgtcctggtgcccagcaggtttctgtcccccactccagaagtgcgtctctggagacccagctcttctgaggactgtgctcaggaggaatcagtgtcccattgtacagacagggcctaaggaaggagggctcgcaagtgccctcaggtcacaggctgacttgcaggccagtgctctccccgcctcccccatgtccacgtccctcacaccttctgccctgctgggctttggaatcggacctgaggctgcccaactccctcactgaatagtcatgcagccttcccttctctgagcctcctgcccctcttttctagagtgagggtgatcttagcacctctcagaggtggtctttggttccgttctgaggtgaagcaccaggtgggagtgcatggtgagtggggcagaactctttccccaccgaggcgcgcaggctagtgctgaatggcacttctgaagcgggataaccgccccaacacacgcacccagccctgcctgggacggaccttccggaaggagtgatgcttgagcccaggtctggacagggacaggtgttgttgcctcaggtggggtgggaggtgggcgtggggaagaggaaggtgctcagtcaggaaactggggctgctgggggcccccttcccccagtcctatctcacctctgtgcagggagagctctgtgggtggcccgaggcctggggccactctcctccctgcctgatggctacccaggttcaccaggggccactggggctcccaccagcccctgaccctgtgggcctgtggccttgcaggagaacgtcagctgcctcaacaccagcctggtgatcctgatgctggcccgacggaaagagcggctgcccctgtacctgcggctgctgcagcggatggagcacagcaagaagtaccccggcttcctgctcaacaacttccacaacctgctgcgcttctggcagcagcactacctgcacaaggacaaggacagcacctgcctagagaacagctcctgcatcagcttctcatactggaaggagacagtgtccatcctgttgaacccggaccggcagtcaccctctgctctcgttagctacattgaggagccctacatggacatagacagggacttcactgaggagtgaccttgggccaggcctcgggaggctgctgggccagtgtgggtgagcgtgggtacgatgccacacgccctgccctgttcccgttcctccctgctgctctctgcctgccccaggtctttgggtacaggcttggtgggagggaagtcctagaagcccttggtccccctgggtctgagggccctaggtcatggagagcctcagtccccataatgaggacagggtaccatgcccacctttccttcagaaccctggggcccagggccacccagaggtaagaggacatttagcattagctctgtgtgagctcctgccggtttcttggctgtcagtcagtcccagagtggggaggaagatatgggtgacccccaccccccatctgtgagccaagcctcccttgtccctggcctttggacccaggcaaaggcttctgagccctgggcaggggtggtgggtaccagagaatgctgccttcccccaagcctgcccctctgcctcattttcctgtagctcctctggttctgtttgctcattggctgctgtgttcatccaagggggttctcccagaagtgaggggcctttccctccatcccttggggcacggggcagctgtgcctgccctgcctctgcctgaggcagccgctcctgcctgagcctggacatggggcccttccttgtgttgccaatttattaacagcaaataaaccaattaaatggagactattaaataactttattttaaaaatga

SEQ ID NO: 359057 - DNA, 2877 bp, Homo sapiens
  misc_feature (5)..(5): n is a, c, g, or t
  misc_feature (25)..(25): n is a, c, g, or t
aacanaagacaaagacggctaggtncgaggcctgggtggaaatttctcctcttctctccatggaggctatggcatttgttactgaagagaggaaacttacccaagaaaccacttatccaaatacttatatttttgacttgtttggaggtgttgatcttcttgtagaaattcttatgaggcctacgatctctatccggggacagaaactgaaaataagtgatgaaatgtccaaggactgcttgagtatcctgtataatacctgtgtctgtacagagggagttacaaagcgtttggcagaaaagaatgactttgtgatcttcctgtttacattgatgacaagtaagaagacattcttacaaacagcaaccctcattgaagatattttgggtgttaaaaaggaaatgatccgactagatgaagtccccaatctgagttccttagtatccaatttcgatcagcagcagctcgctaatttctgccggattctggctgtcaccatttcagagatggatacagggaatgatgacaagcacacgcttcttgccaaaaatgctcaacagaagaagagcttgagtttggggccttctgcagctgaaatcaatcaagcggcccttctcagcattcctggctttgttgagcggctttgcaaactggcgactcgaaaggtgtcagagtcaacgggcacagccagcttccttcaggagttggaagagtggtacacatggctagacaatgctttggtgctagatgccctgatgcgagtggccaatgaggagtcagagcacaatcaagcctccattgtgttccctcctccaggggcttctgaggagaatggcctgcctcacacgtcagccagaacccagctgccccagtcaatgaagattatgcatgagatcatgtacaaactggaagtgctctatgtcctctgcgtgctgctgatggggcgtcagcgaaaccaggttcacagaatgattgcagagttcaagctgatccctggacttaataatttgtttgacaaactgatttggaggaagcattcagcatctgcccttgtcctccatggtcacaaccagaactgtgactgtagcccggacatcaccttgaagatacagtttttgaggcttcttcagagcttcagtgaccaccacgagaacaagtacttgttactcaacaaccaggagctgaatgaactcagtgccatctctctcaaggccaacatccctgaggtggaagctgtcctcaacaccgacaggagtttggtgtgtgatgggaagaggggcttattaactcgtctgctgcaggtcatgaagaaggagccagcagagtcgtctttcaggttttggcaagctcgggctgtggagagtttcctccgagggaccacctcctatgcagaccagatgttcctgctgaagcgaggcctcttggagcacatcctttactgcattgtggacagcgagtgtaagtcaagggatgtgctccagagttactttgacctcctgggggagctgatgaagttcaacgttgatgcattcaagagattcaataaatatatcaacaccgatgcaaagttccaggtattcctgaagcagatcaacagctccctggtggactccaacatgctggtgcgctgtgtcactctgtccctggaccgatttgaaaaccaggtggatatgaaagttgccgaggtactgtctgaatgccgcctgctcgcctacatatcccaggtgcccacgcagatgtccttcctcttccgcctcatcaacatcatccacgtgcagacgctgacccaggagaacgtcagctgcctcaacaccagcctggtgatcctgatgctggcccgacggaaagagcggctgcccctgtacctgcggctgctgcagcggatggagcacagcaagaagtaccccggcttcctgctcaacaacttccacaacctgctgcgcttctggcagcagcactacctgcacaaggacaaggacagcacctgcctagagaacagctcctgcatcagcttctcatactggaaggagacagtgtccatcctgttgaacccggaccggcagtcaccctctgctctcgttagctacattgaggagccctacatggacatagacagggacttcactgaggagtgaccttgggccaggcctcgggaggctgctgggccagtgtgggtgagcgtgggtacgatgccacacgccctgccctgttcccgttcctccctgctgctctctgcctgccccaggtctttgggtacaggcttggtgggagggaagtcctagaagcccttggtccccctgggtctgagggccctaggtcatggagagcctcagtccccataatgaggacagggtaccatgcccacctttccttcagaaccctggggcccagggccacccagaggtaagaggacatttagcattagctctgtgtgagctcctgccggtttcttggctgtcagtcagtcccagagtggggaggaagatatgggtgacccccaccccccatctgtgagccaagcctcccttgtccctggcctttggacccaggcaaaggcttctgagccctgggcaggggtggtgggtaccagagaatgctgccttcccccaagcctgcccctctgcctcattttcctgtagctcctctggttctgtttgctcattggctgctgtgttcatccaagggggttctcccagaagtgaggggcctttccctccatcccttggggcacggggcagctgtgcctgccctgcctctgcctgaggcagccgctcctgcctgagcctggacatggggcccttccttgtgttgccaatttattaacagcaaataaaccaattaaatggagactattaaataactttattttaaaaatga

SEQ ID NO: 359058 - DNA, 3059 bp, Homo sapiens
actgggggcgctgcggcgacccctccgccgccccgtagaaatctccgcggccccgaggccgcttgcttcctgtttgtccgacgaggagacatggcggcggcgccggtagcggctgggtctggagccggccgagggagacggtcggcagccacagtggcggcttggggcggatggggcggccggccgcggcctggtaacattctgctgcagctgcggcagggccagctgaccggccggggcctggtccgggcggtgcagttcactgagacttttttgacggagagggacaaacaatccaagtggagtggaattcctcagctgctcctcaagctgcacaccaccagccacctccacagtgactttgttgagtgtcaaaacatcctcaaggaaatttctcctcttctctccatggaggctatggcatttgttactgaagagaggaaacttacccaagaaaccacttatccaaatacttatatttttgacttgtttggaggtgttgatcttcttgtagaaattcttatgaggcctacgatctctatccggggacagaaactgaaaataagtgatgaaatgtccaaggactgcttgagtatcctgtataatacctgtgtctgtacagagggagttacaaagcgtttggcagaaaagaatgactttgtgatcttcctgtttacattgatgacaagtaagaagacattcttacaaacagcaaccctcattgaagatattttgggtgttaaaaaggaaatgatccgactagatgaagtccccaatctgagttccttagtatccaatttcgatcagcagcagctcgctaatttctgccggattctggctgtcaccatttcagagatggatacagggaatgatgacaagcacacgcttcttgccaaaaatgctcaacagaagaagagcttgagtttggggccttctgcagctgaaatcaatcaagcggcccttctcagcattcctggctttgttgagcggctttgcaaactggcgactcgaaaggtgtcagagtcaacgggcacagccagcttccttcaggagttggaagagtggtacacatggctagacaatgctttggtgctagatgccctgatgcgagtggccaatgaggagtcagagcacaatcaaggttcacagaatgattgcagagttcaagctgatccctggacttaataatttgtttgacaaactgatttggaggaagcattcagcatctgcccttgtcctccatggtcacaaccagaactgtgactgtagcccggacatcaccttgaagatacagtttttgaggcttcttcagagcttcagtgaccaccacgagaacaagtacttgttactcaacaaccaggagctgaatgaactcagtgccatctctctcaaggccaacatccctgaggtggaagctgtcctcaacaccgacaggagtttggtgtgtgatgggaagaggggcttattaactcgtctgctgcaggtcatgaagaaggagccagcagagtcgtctttcaggttttggcaagctcgggctgtggagagtttcctccgagggaccacctcctatgcagaccagatgttcctgctgaagcgaggcctcttggagcacatcctttactgcattgtggacagcgagtgtaagtcaagggatgtgctccagagttactttgacctcctgggggagctgatgaagttcaacgttgatgcattcaagagattcaataaatatatcaacaccgatgcaaagttccaggtattcctgaagcagatcaacagctccctggtggactccaacatgctggtgcgctgtgtcactctgtccctggaccgatttgaaaaccaggtggatatgaaagttgccgaggtactgtctgaatgccgcctgctcgcctacatatcccaggtgcccacgcagatgtccttcctcttccgcctcatcaacatcatccacgtgcagacgctgacccaggagaacgtcagctgcctcaacaccagcctggtgatcctgatgctggcccgacggaaagagcggctgcccctgtacctgcggctgctgcagcggatggagcacagcaagaagtaccccggcttcctgctcaacaacttccacaacctgctgcgcttctggcagcagcactacctgcacaaggacaaggacagcacctgcctagagaacagctcctgcatcagcttctcatactggaaggagacagtgtccatcctgttgaacccggaccggcagtcaccctctgctctcgttagctacattgaggagccctacatggacatagacagggacttcactgaggagtgaccttgggccaggcctcgggaggctgctgggccagtgtgggtgagcgtgggtacgatgccacacgccctgccctgttcccgttcctccctgctgctctctgcctgccccaggtctttgggtacaggcttggtgggagggaagtcctagaagcccttggtccccctgggtctgagggccctaggtcatggagagcctcagtccccataatgaggacagggtaccatgcccacctttccttcagaaccctggggcccagggccacccagaggtaagaggacatttagcattagctctgtgtgagctcctgccggtttcttggctgtcagtcagtcccagagtggggaggaagatatgggtgacccccaccccccatctgtgagccaagcctcccttgtccctggcctttggacccaggcaaaggcttctgagccctgggcaggggtggtgggtaccagagaatgctgccttcccccaagcctgcccctctgcctcattttcctgtagctcctctggttctgtttgctcattggctgctgtgttcatccaagggggttctcccagaagtgaggggcctttccctccatcccttggggcacggggcagctgtgcctgccctgcctctgcctgaggcagccgctcctgcctgagcctggacatggggcccttccttgtgttgccaatttattaacagcaaataaaccaattaaatggagactattaaataactttattttaaaaatga

SEQ ID NO: 359059 - DNA, 3742 bp, Homo sapiens
actgggggcgctgcggcgacccctccgccgccccgtagaaatctccgcggccccgaggccgcttgcttcctgtttgtccgacgaggagacatggcggcggcgccggtagcggctgggtctggagccggccgagggagacggtcggcagccacagtggcggcttggggcggatggggcggccggccgcggcctggtaacattctgctgcagctgcggcagggccagctgaccggccggggcctggtccgggcggtgcagttcactgagacttttttgacggagagggacaaacaatccaagtggagtggaattcctcagctgctcctcaagctgcacaccaccagccacctccacagtgactttgttgagtgtcaaaacatcctcaaggaaatttctcctcttctctccatggaggctatggcatttgttactgaagagaggaaacttacccaagaaaccacttatccaaatacttatatttttgacttgtttggaggtgttgatcttcttgtagaaattcttatgaggcctacgatctctatccggggacagaaactgaaaataagtgatgaaatgtccaaggactgcttgagtatcctgtataatacctgtgtctgtacagagggagttacaaagcgtttggcagaaaagaatgactttgtgatcttcctgtttacattgatgacaagtaagaagacattcttacaaacagcaaccctcattgaagatattttgggtgttaaaaaggaaatgatccgactagatgaagtccccaatctgagttccttagtatccaatttcgatcagcagcagctcgctaatttctgccggattctggctgtcaccatttcagagatggatacagggaatgatgacaagcacacgcttcttgccaaaaatgctcaacagaagaagagcttgagtttggggccttctgcagctgaaatcaatcaagcggcccttctcagcattcctggctttgttgagcggctttgcaaactggcgactcgaaaggtgtcagagtcaacgggcacagccagcttccttcaggagttggaagagtggtacacatggctagacaatgctttggtgctagatgccctgatgcgagtggccaatgaggagtcagagcacaatcaagcctccattgtgttccctcctccaggggcttctgaggagaatggcctgcctcacacgtcagccagaacccagctgccccagtcaatgaagattatgcatgagatcatgtacaaactggaagtgctctatgtcctctgcgtgctgctgatggggcgtcagcgaaaccaggttcacagaatgattgcagagttcaagctgatccctggacttaataatttgtttgacaaactgatttggaggaagcattcagcatctgcccttgtcctccatggtcacaaccagaactgtgactgtagcccggtaagcaggagacccccggggacagatggggcctcactggcttggagtagttgtttcaagacctgctgctgaccctttgaccttttttcctttgggagtagagcagaaactaaaatcatatcttatagtcccctaattggaagctaccttggagtaggatctgagtgaactccactccccaccccaacctatgcagaaatcccttttaagatcttcctaggctgggcacagtgactcggcctcccaaagtgctgtgattacaggtgtaaccaccacgccccgccttattttttattgagtgtgatggcatgtttttagcaggaagggggccacattagcttaatctgctgttgatcagatgtggaagtgaacagatggttttctaactaaagaaaagtcctcatggtacatgaggacagaggcttagagaagcaggctcccaccagagtgtctgcttgtgttattttggaaccttgtggctgtggtcctaacattgaggctgtgcatgtgtttcaggacatcaccttgaagatacagtttttgaggcttcttcagagcttcagtgaccaccacgagaacaagtacttgttactcaacaaccaggagctgaatgaactcagtgccatctctctcaaggccaacatccctgaggtggaagctgtcctcaacaccgacaggagtttggtgtgtgatgggaagaggggcttattaactcgtctgctgcaggtcatgaagaaggagccagcagagtcgtctttcaggttttggcaagctcgggctgtggagagtttcctccgagggaccacctcctatgcagaccagatgttcctgctgaagcgaggcctcttggagcacatcctttactgcattgtggacagcgagtgtaagtcaagggatgtgctccagagttactttgacctcctgggggagctgatgaagttcaacgttgatgcattcaagagattcaataaatatatcaacaccgatgcaaagttccaggtattcctgaagcagatcaacagctccctggtggactccaacatgctggtgcgctgtgtcactctgtccctggaccgatttgaaaaccaggtggatatgaaagttgccgaggtactgtctgaatgccgcctgctcgcctacatatcccaggtgcccacgcagatgtccttcctcttccgcctcatcaacatcatccacgtgcagacgctgacccaggagaacgtcagctgcctcaacaccagcctggtgatcctgatgctggcccgacggaaagagcggctgcccctgtacctgcggctgctgcagcggatggagcacagcaagaagtaccccggcttcctgctcaacaacttccacaacctgctgcgcttctggcagcagcactacctgcacaaggacaaggacagcacctgcctagagaacagctcctgcatcagcttctcatactggaaggagacagtgtccatcctgttgaacccggaccggcagtcaccctctgctctcgttagctacattgaggagccctacatggacatagacagggacttcactgaggagtgaccttgggccaggcctcgggaggctgctgggccagtgtgggtgagcgtgggtacgatgccacacgccctgccctgttcccgttcctccctgctgctctctgcctgccccaggtctttgggtacaggcttggtgggagggaagtcctagaagcccttggtccccctgggtctgagggccctaggtcatggagagcctcagtccccataatgaggacagggtaccatgcccacctttccttcagaaccctggggcccagggccacccagaggtaagaggacatttagcattagctctgtgtgagctcctgccggtttcttggctgtcagtcagtcccagagtggggaggaagatatgggtgacccccaccccccatctgtgagccaagcctcccttgtccctggcctttggacccaggcaaaggcttctgagccctgggcaggggtggtgggtaccagagaatgctgccttcccccaagcctgcccctctgcctcattttcctgtagctcctctggttctgtttgctcattggctgctgtgttcatccaagggggttctcccagaagtgaggggcctttccctccatcccttggggcacggggcagctgtgcctgccctgcctctgcctgaggcagccgctcctgcctgagcctggacatggggcccttccttgtgttgccaatttattaacagcaaataaaccaattaaatggagactattaaataactttattttaaaaatga

SEQ ID NO: 359060 - DNA, 2340 bp, Homo sapiens
gcctactactactactactactactaaattagcggccgctcgacccttctgcagctgaaatcaatcaagcggcccttctcagcattcctggctttgttgagcggctttgcaaactggcgactcgaaaggtgtcagagtcaacgggcacagccagcttccttcaggagttggaagagtggtacacatggctagacaatgctttggtgctagatgccctgatgcgagtggccaatgaggagtcagagcacaatcaagcctccattgtgttccctcctccaggggcttctgaggagaatggcctgcctcacacgtcagccagaacccagctgccccagtcaatgaagattatgcatgagatcatgtacaaactggaagtgctctatgtcctctgcgtgctgctgatggggcgtcagcgaaaccaggttcacagaatgattgcagagttcaagctgatccctggacttaataatttgtttgacaaactgatttggaggaagcattcagcatctgcccttgtcctccatggtcacaaccagaactgtgactgtagcccggacatcaccttgaagatacagtttttgaggcttcttcagagcttcagtgaccaccacgagaacaagtacttgttactcaacaaccaggagctgaatgaactcagtgccatctctctcaaggccaacatccctgaggtggaagctgtcctcaacaccgacaggagtttggtgtgtgatgggaagaggggcttattaactcgtctgctgcaggtcatgaagaaggagccagcagagtcgtctttcaggttttggcaagctcgggctgtggagagtttcctccgagggaccacctcctatgcagaccagatgttcctgctgaagcgaggcctcttggagcacatcctttactgcattgtggacagcgagtgtaagtcaagggatgtgctccagagttactttgacctcctgggggagctgatgaagttcaacgttgatgcattcaagagattcaataaatatatcaacaccgatgcaaagttccaggtattcctgaagcagatcaacagctccctggtggactccaacatgctggtgcgctgtgtcactctgtccctggaccgatttgaaaaccaggtggatatgaaagttgccgaggtactgtctgaatgccgcctgctcgcctacatatcccaggtgcccacgcagatgtccttcctcttccgcctcatcaacatcatccacgtgcagacgctgacccaggagaacgtcagctgcctcaacaccagcctggtgatcctgatgctggcccgacggaaagagcggctgcccctgtacctgcggctgctgcagcggatggagcacagcaagaagtaccccggcttcctgctcaacaacttccacaacctgctgcgcttctggcagcagcactacctgcacaaggacaaggacagcacctgcctagagaacagctcctgcatcagcttctcatactggaaggagacagtgtccatcctgttgaacccggaccggcagtcaccctctgctctcgttagctacattgaggagccctacatggacatagacagggacttcactgaggagtgaccttgggccaggcctcgggaggctgctgggccagtgtgggtgagcgtgggtacgatgccacacgccctgccctgttcccgttcctccctgctgctctctgcctgccccaggtctttgggtacaggcttggtgggagggaagtcctagaagcccttggtccccctgggtctgagggccctaggtcatggagagcctcagtccccataatgaggacagggtaccatgcccacctttccttcagaaccctggggcccagggccacccagaggtaagaggacatttagcattagctctgtgtgagctcctgccggtttcttggctgtcagtcagtcccagagtggggaggaagatatgggtgacccccaccccccatctgtgagccaagcctcccttgtccctggcctttggacccaggcaaaggcttctgagccctgggcaggggtggtgggtaccagagaatgctgccttcccccaagcctgcccctctgcctcattttcctgtagctcctctggttctgtttgctcattggctgctgtgttcatccaagggggttctcccagaagtgaggggcctttccctccatcccttggggcacggggcagctgtgcctgccctgcctctgcctgaggcagccgctcctgcctgagcctggacatggggcccttccttgtgttgccaatttattaacagcaaataaaccaattaaatggagactattaaataactttattttaaaaatga

SEQ ID NO: 359061 - DNA, 4935 bp, Homo sapiens
  misc_feature (2067)..(2067): n is a, c, g, or t
actgggggcgctgcggcgacccctccgccgccccgtagaaatctccgcggccccgaggccgcttgcttcctgtttgtccgacgaggagacatggcggcggcgccggtagcggctgggtctggagccggccgagggagacggtcggcagccacagtggcggcttggggcggatggggcggccggccgcggcctggtaacattctgctgcagctgcggcagggccagctgaccggccggggcctggtccgggcggtgcagttcactgagacttttttgacggagagggacaaacaatccaagtggagtggaattcctcagctgctcctcaagctgcacaccaccagccacctccacagtgactttgttgagtgtcaaaacatcctcaaggaaatttctcctcttctctccatggaggctatggcatttgttactgaagagaggaaacttacccaagaaaccacttatccaaatacttatatttttgacttgtttggaggtgttgatcttcttgtagaaattcttatgaggcctacgatctctatccggggacagaaactgaaaataagtgatgaaatgtccaaggactgcttgagtatcctgtataatacctgtgtctgtacagagggagttacaaagcgtttggcagaaaagaatgactttgtgatcttcctgtttacattgatgacaagtaagaagacattcttacaaacagcaaccctcattgaagatattttgggtgttaaaaaggaaatgatccgactagatgaagtccccaatctgagttccttagtatccaatttcgatcagcagcagctcgctaatttctgccggattctggctgtcaccatttcagagatggatacagggaatgatgacaagcacacgcttcttgccaaaaatgctcaacagaagaagagcttgagtttggggccttctgcagctgaaatcaatcaagcggcccttctcagcattcctggctttgttgagcggctttgcaaactggcgactcgaaaggtgtcagagtcaacgggcacagccagcttccttcaggagttggaagagtggtacacatggctagacaatgctttggtgctagatgccctgatgcgagtggccaatgaggagtcagagcacaatcaagcctccattgtgttccctcctccaggggcttctgaggagaatggcctgcctcacacgtcagccagaacccagctgccccagtcaatgaagattatgcatgagatcatgtacaaactggaagtgctctatgtcctctgcgtgctgctgatggggcgtcagcgaaaccaggttcacagaatgattgcagagttcaagctgatccctggacttaataatttgtttgacaaactgatttggaggaagcattcagcatctgcccttgtcctccatggtcacaaccagaactgtgactgtagcccggacatcaccttgaagatacagtttttgaggcttcttcagagcttcagtgaccaccacgagaacaagtacttgttactcaacaaccaggagctgaatgaactcagtgccatctctctcaaggccaacatccctgaggtggaagctgtcctcaacaccgacaggagtttggtgtgtgatgggaagaggggcttattaactcgtctgctgcaggtcatgaagaaggagccagcagagtcgtctttcaggttttggcaagctcgggctgtggagagtttcctccgagggaccacctcctatgcagaccagatgttcctgctgaagcgaggcctcttggagcacatcctttactgcattgtggacagcgagtgtaagtcaagggatgtgctccagagttactttgacctcctgggggagctgatgaagttcaacgttgatgcattcaagagattcaataaatatatcaacaccgatgcaaagttccaggtattcctgaagcagatcaacagctccctggtggactccaacatgctggtgcgctgtgtcactctgtccctggaccgatttgaaaaccaggtggatatgaaaggtacatgaaaggcaggctgtcaaggcaagtcatgcagggtnagaatgctggcatcagacaccctgtctccagcagggagacaagaatgactgagggagctgcaccagatgcccacgtggccggcctcaaggtggcggcttccagggcaattggctttgctgccttgttcaacactttaataaggtgaaaatccattgttgctagcaagatgcaaagaaaaccagaaaaagaccttcctcttctgggctggtattgcctggcacgatgagttggccccctcgtcctcagtgtgctgtgcgtggcatcgcaggtgccctgtggtgcagcaggcatctgaaccctcctggacttgctaacgcacttccatgtgtatgcgcacgcgtttcctttttttcctaggagagggcttgtggcatccagcagattctcctgagggtttgtgacccccccacacccccaaaaagtcaggcacttgttccttgtcacggtcactgtcattgatagcaagaagtatcccggttgttggtaatttagccgtttgcttcctttttctgccccagagggtctgtttcaggggaacagccacacagattttggtaccttcggttattgccctgcctcccagttgtgcgggaagcagttgctccgacactagtggacggagcagaacctgtgccttgtggtctcagcactgggccggactcacctgagagctggtgtggaaaaccagttgcgctaggacctctgcagaaggagtggaacttttgcgttgtttttcttaatgcagcgtcatggatccatcttcctgtggagggaactcttctgtgtgtgatatggagggcacgggtctggagccagtctggggagggctgagggagagctgccctgagcttggttctggaggatgaggtggggtgctcctgggcactctgagaacatggctttgcctggtagcaggacagctggaggtccttctttctgccacagtcagctttcgttgaagctgttttgatgatgagctcccagcttcagagtcaggacccaagcggggctccacgaaaggcctgggcgacccagccactgggcctaagcctgacctgctgcacccctgcctccctccacagttgccgaggtactgtctgaatgccgcctgctcgcctacatatcccaggtgcccacgcagatgtccttcctcttccgcctcatcaacatcatccacgtgcagacgctgacccaggtgagaggccccggcagacacacagcagggaaggtcgattggaaaccacttcctttgtcctggtgcccagcaggtttctgtcccccactccagaagtgcgtctctggagacccagctcttctgaggactgtgctcaggaggaatcagtgtcccattgtacagacagggcctaaggaaggagggctcgcaagtgccctcaggtcacaggctgacttgcaggccagtgctctccccgcctcccccatgtccacgtccctcacaccttctgccctgctgggctttggaatcggacctgaggctgcccaactccctcactgaatagtcatgcagccttcccttctctgagcctcctgcccctcttttctagagtgagggtgatcttagcacctctcagaggtggtctttggttccgttctgaggtgaagcaccaggtgggagtgcatggtgagtggggcagaactctttccccaccgaggcgcgcaggctagtgctgaatggcacttctgaagcgggataaccgccccaacacacgcacccagccctgcctgggacggaccttccggaaggagtgatgcttgagcccaggagaacgtcagctgcctcaacaccagcctggtgatcctgatgctggcccgacggaaagagcggctgcccctgtacctgcggctgctgcagcggatggagcacagcaagaagtaccccggcttcctgctcaacaacttccacaacctgctgcgcttctggcagcagcactacctgcacaaggacaaggacagcacctgcctagagaacagctcctgcatcagcttctcatactggaaggagacagtgtccatcctgttgaacccggaccggcagtcaccctctgctctcgttagctacattgaggagccctacatggacatagacagggacttcactgaggagtgaccttgggccaggcctcgggaggctgctgggccagtgtgggtgagcgtgggtacgatgccacacgccctgccctgttcccgttcctccctgctgctctctgcctgccccaggtctttgggtacaggcttggtgggagggaagtcctagaagcccttggtccccctgggtctgagggccctaggtcatggagagcctcagtccccataatgaggacagggtaccatgcccacctttccttcagaaccctggggcccagggccacccagaggtaagaggacatttagcattagctctgtgtgagctcctgccggtttcttggctgtcagtcagtcccagagtggggaggaagatatgggtgacccccaccccccatctgtgagccaagcctcccttgtccctggcctttggacccaggcaaaggcttctgagccctgggcaggggtggtgggtaccagagaatgctgccttcccccaagcctgcccctctgcctcattttcctgtagctcctctggttctgtttgctcattggctgctgtgttcatccaagggggttctcccagaagtgaggggcctttccctccatcccttggggcacggggcagctgtgcctgccctgcctctgcctgaggcagccgctcctgcctgagcctggacatggggcccttccttgtgttgccaatttattaacagcaaataaaccaattaaatggagactattaaataactttattttaaaaatga

SEQ ID NO: 359062 - DNA, 2985 bp, Homo sapiens
agggccatttgcgacttgaagagcggtccccataatttgctgtcatacatctgcctgggcacttcctgggggtctggttggtggcaggagaagggcataagcagggagggatgggtcatgttactgtattggctgtgtccgaatatttttactttatgttaaagttgatgaggcacaactattgcagagtccatttttccgagtctctgcgctcacctggctcctgggattgtggagggagttttgcagctttcagagtctgtgttttgggctcatggcccagccgaatggccatgctacaagtctgttcagagcaggttcgaggggcagaaacgtgtttcctcacaagctgtgactcaatcctgtctccggtggctgtgtcagcctccattgtgttccctcctccaggggcttctgaggagaatggcctgcctcacacgtcagccagaacccagctgccccagtcaatgaagattatgcatgagatcatgtacaaactggaagtgctctatgtcctctgcgtgctgctgatggggcgtcagcgaaaccaggttcacagaatgattgcagagttcaagctgatccctggacttaataatttgtttgacaaactgatttggaggaagcattcagcatctgcccttgtcctccatggtcacaaccagaactgtgactgtagcccggtaagcaggagacccccggggacagatggggcctcactggcttggagtagttgtttcaagacctgctgctgaccctttgaccttttttcctttgggagtagagcagaaactaaaatcatatcttatagtcccctaattggaagctaccttggagtaggatctgagtgaactccactccccaccccaacctatgcagaaatcccttttaagatcttcctaggctgggcacagtgactcggcctcccaaagtgctgtgattacaggtgtaaccaccacgccccgccttattttttattgagtgtgatggcatgtttttagcaggaagggggccacattagcttaatctgctgttgatcagatgtggaagtgaacagatggttttctaactaaagaaaagtcctcatggtacatgaggacagaggcttagagaagcaggctcccaccagagtgtctgcttgtgttattttggaaccttgtggctgtggtcctaacattgaggctgtgcatgtgtttcaggacatcaccttgaagatacagtttttgaggcttcttcagagcttcagtgaccaccacgagaacaagtacttgttactcaacaaccaggagctgaatgaactcagtgccatctctctcaaggccaacatccctgaggtggaagctgtcctcaacaccgacaggagtttggtgtgtgatgggaagaggggcttattaactcgtctgctgcaggtcatgaagaaggagccagcagagtcgtctttcaggttttggcaagctcgggctgtggagagtttcctccgagggaccacctcctatgcagaccagatgttcctgctgaagcgaggcctcttggagcacatcctttactgcattgtggacagcgagtgtaagtcaagggatgtgctccagagttactttgacctcctgggggagctgatgaagttcaacgttgatgcattcaagagattcaataaatatatcaacaccgatgcaaagttccaggtattcctgaagcagatcaacagctccctggtggactccaacatgctggtgcgctgtgtcactctgtccctggaccgatttgaaaaccaggtggatatgaaagttgccgaggtactgtctgaatgccgcctgctcgcctacatatcccaggtgcccacgcagatgtccttcctcttccgcctcatcaacatcatccacgtgcagacgctgacccaggagaacgtcagctgcctcaacaccagcctggtgatcctgatgctggcccgacggaaagagcggctgcccctgtacctgcggctgctgcagcggatggagcacagcaagaagtaccccggcttcctgctcaacaacttccacaacctgctgcgcttctggcagcagcactacctgcacaaggacaaggacagcacctgcctagagaacagctcctgcatcagcttctcatactggaaggagacagtgtccatcctgttgaacccggaccggcagtcaccctctgctctcgttagctacattgaggagccctacatggacatagacagggacttcactgaggagtgaccttgggccaggcctcgggaggctgctgggccagtgtgggtgagcgtgggtacgatgccacacgccctgccctgttcccgttcctccctgctgctctctgcctgccccaggtctttgggtacaggcttggtgggagggaagtcctagaagcccttggtccccctgggtctgagggccctaggtcatggagagcctcagtccccataatgaggacagggtaccatgcccacctttccttcagaaccctggggcccagggccacccagaggtaagaggacatttagcattagctctgtgtgagctcctgccggtttcttggctgtcagtcagtcccagagtggggaggaagatatgggtgacccccaccccccatctgtgagccaagcctcccttgtccctggcctttggacccaggcaaaggcttctgagccctgggcaggggtggtgggtaccagagaatgctgccttcccccaagcctgcccctctgcctcattttcctgtagctcctctggttctgtttgctcattggctgctgtgttcatccaagggggttctcccagaagtgaggggcctttccctccatcccttggggcacggggcagctgtgcctgccctgcctctgcctgaggcagccgctcctgcctgagcctggacatggggcccttccttgtgttgccaatttattaacagcaaataaaccaattaaatggagactattaaataactttattttaaaaatga

SEQ ID NO: 359063 - DNA, 2884 bp, Homo sapiens
actgggggcgctgcggcgacccctccgccgccccgtagaaatctccgcggccccgaggccgcttgcttcctgtttgtccgacgaggagacatggcggcggcgccggtagcggctgggtctggagccggccgagggagacggtcggcagccacagtggcggcttggggcggatggggcggccggccgcggcctggtaacattctgctgcagctgcggcagggccagctgaccggccggggcctggtccgggcggtgcagttcactgagacttttttgacggagagggacaaacaatccaagtggagtggaattcctcagctgctcctcaagctgcacaccaccagccacctccacagtgactttgttgagtgtcaaaacatcctcaaggaaatttctcctcttctctccatggaggctatggcatttgttactgaagagaggaaacttacccaagaaaccacttatccaaatacttatatttttgacttgtttggaggtgttgatcttcttgtagaaattcttatgaggcctacgatctctatccggggacagaaactgaaaataagtgatgaaatgtccaaggactgcttgagtatcctgtataatacctgtgtctgtacagagggagttacaaagcgtttggcagaaaagaatgactttgtgatcttcctgtttacattgatgacaagtaagaagacattcttacaaacagcaaccctcattgaagatattttgggtgttaaaaaggaaatgatccgactagatgaagtccccaatctgagttccttagtatccaatttcgatcagcagcagctcgctaatttctgccggattctggctgtcaccatttcagagatggatacagggaatgatgacaagcacacgcttcttgccaaaaatgctcaacagaagaagagcttgagtttggggccttctgcagctgaaatcaatcaagcggcccttctcagcattcctggctttgttgagcggctttgcaaactggcgactcgaaaggtgtcagagtcaacgggcacagccagcttccttcaggagttggaagagtggtacacatggctagacaatgctttggtgctagatgccctgatgcgagtggccaatgaggagtcagagcacaatcaagcctccattgtgttccctcctccaggggcttctgaggagaatggcctgcctcacacgtcagccagaacccagctgccccagtcaatgaagattatgcatgagatcatgtacaaactggaagtgctctatgtcctctgcgtgctgctgatggggcgtcagcgaaaccaggttcacagaatgattgcagagttcaagctgatccctggacttaataatttgtttgacaaactgatttggaggaagcattcagcatctgcccttgtcctccatggtcacaaccagaactgtgactgtagcccggacatcaccttgaagatacagtttttgaggcttcttcagagcttcagtgaccaccacgagaacaagtacttgttactcaacaaccaggagctgaatgaactcagtgccatctctctcaaggccaacatccctgaggtggaagctgtcctcaacaccgacaggagtttggtgtgtgatgggaagaggggcttattaactcgtctgctgcaggtcatgaagaaggagccagcagagtcgtctttcaggttttggcaagctcgggctgtggagagtttcctccgagggaccacctcctatgcagaccagatgttcctgctgaagcgaggcctcttggagcacatcctttactgcattgtggacagcgagtgtaagtcaagggatgtgctccagagttactttgacctcctgggggagctgatgaagttcaacgttgatgcattcaagagattcaataaatatatcaacaccgatgcaaagttccaggtattcctgaagcagatcaacagctccctggtggactccaacatgctggtgcgctgtgtcactctgtccctggaccgatttgaaaaccaggtggatatgaaagttgccgaggtactgtctgaatgccgcctgctcgcctacatatcccaggtgcccacgcagatgtccttcctcttccgcctcatcaacatcatccacgtgcagacgctgacccaggagaacgtcagctgcctcaacaccagcctggtgatcctgatgctggcccgacggaaagagcggctgcccctgtacctgcggctgctgcagcggatggagcacagcaagaagtaccccggcttcctgctcaacaacttccacaacctgctgcgcttctggcagcagcactacctgcacaaggacaaggacagcacctgcctagagaacagctcctgcatcagcttctcatactggaaggagacagtgtccatcctgttgaacccggaccggcagtcaccctctgctctcattagctctgtgtgagctcctgccggtttcttggctgtcagtcagtcccagagtggggaggaagatatgggtgacccccaccccccatctgtgagccaagcctcccttgtccctggcctttggacccaggcaaaggcttctgagccctgggcaggggtggtgggtaccagagaatgctgccttcccccaagcctgcccctctgcctcattttcctgtagctcctctggttctgtttgctcattggctgctgtgttcatccaagggggttctcccagaagtgaggggcctttccctccatcccttggggcacggggcagctgtgcctgccctgcctctgcctgaggcagccgctcctgcctgagcctggacatggggcccttccttgtgttgccaatttattaacagcaaataaaccaattaaatggagactattaaataactttattttaaaaatga

SEQ ID NO: 359064 - DNA, 3552 bp, Homo sapiens
actgggggcgctgcggcgacccctccgccgccccgtagaaatctccgcggccccgaggccgcttgcttcctgtttgtccgacgaggagacatggcggcggcgccggtagcggctgggtctggagccggccgagggagacggtcggcagccacagtggcggcttggggcggatggggcggccggccgcggcctggtaacattctgctgcagctgcggcagggccagctgaccggccggggcctggtccgggcggtgcagttcactgagacttttttgacggagagggacaaacaatccaagtggagtggaattcctcagctgctcctcaagctgcacaccaccagccacctccacagtgactttgttgagtgtcaaaacatcctcaaggaaatttctcctcttctctccatggaggctatggcatttgttactgaagagaggaaacttacccaagaaaccacttatccaaatacttatatttttgacttgtttggaggtgttgatcttcttgtagaaattcttatgaggcctacgatctctatccggggacagaaactgaaaataagtgatgaaatgtccaaggactgcttgagtatcctgtataatacctgtgtctgtacagagggagttacaaagcgtttggcagaaaagaatgactttgtgatcttcctgtttacattgatgacaagtaagaagacattcttacaaacagcaaccctcattgaagatattttgggtgttaaaaaggaaatgatccgactagatgaagtccccaatctgagttccttagtatccaatttcgatcagcagcagctcgctaatttctgccggattctggctgtcaccatttcagagatggatacagggaatgatgacaagcacacgcttcttgccaaaaatgctcaacagaagaagagcttgagtttggggccttctgcagctgaaatcaatcaagcggcccttctcagcattcctggctttgttgagcggctttgcaaactggcgactcgaaaggtgtcagagtcaacgggcacagccagcttccttcaggagttggaagagtggtacacatggctagacaatgctttggtgctagatgccctgatgcgagtggccaatgaggagtcagagcacaatcaagcctccattgtgttccctcctccaggggcttctgaggagaatggcctgcctcacacgtcagccagaacccagctgccccagtcaatgaagattatgcatgagatcatgtacaaactggaagtgctctatgtcctctgcgtgctgctgatggggcgtcagcgaaaccaggttcacagaatgattgcagagttcaagctgatccctggacttaataatttgtttgacaaactgatttggaggaagcattcagcatctgcccttgtcctccatggtcacaaccagaactgtgactgtagcccggacatcaccttgaagatacagtttttgaggcttcttcagagcttcagtgaccaccacgagaacaagtacttgttactcaacaaccaggagctgaatgaactcagtgccatctctctcaaggccaacatccctgaggtggaagctgtcctcaacaccgacaggagtttggtgtgtgatgggaagaggggcttattaactcgtctgctgcaggtcatgaagaaggagccagcagagtcgtctttcaggttttggcaagctcgggctgtggagagtttcctccgagggaccacctcctatgcagaccagatgttcctgctgaagcgaggcctcttggagcacatcctttactgcattgtggacagcgagtgtaagtcaagggatgtgctccagagttactttgacctcctgggggagctgatgaagttcaacgttgatgcattcaagagattcaataaatatatcaacaccgatgcaaagttccaggtattcctgaagcagatcaacagctccctggtggactccaacatgctggtgcgctgtgtcactctgtccctggaccgatttgaaaaccaggtggatatgaaagttgccgaggtactgtctgaatgccgcctgctcgcctacatatcccaggtgcccacgcagatgtccttcctcttccgcctcatcaacatcatccacgtgcagacgctgacccaggagaacgtcagctgcctcaacaccagcctggtgatcctgatgctggcccgacggaaagagcggctgcccctgtacctgcggctgctgcagcggatggagcacagcaagaagtaccccggcttcctgctcaacaacttccacaacctgctgcgcttctggcagcagcactacctgcacaaggacaaggacagcacctgcctagagaacagctcctgcatcagcttctcatactggaaggagacagtgtccatcctgttgaacccggaccggcagtcaccctctgctctcgttagctacattgaggagccctacatggacatagacagggacttcactgaggagtgaccttgggccaggcctcgggaggctgctgggccagtgtgggtgagcgtgggtacgatgccacacgccctgccctgttcccgttcctccctgctgctctctgcctgccccaggtctttgggtacaggcttggtgggagggaagtcctagaagcccttggtccccctgggtctgagggccctaggtcatggagagcctcagtccccataatgaggacagggtaccatgcccacctttccttcagaaccctggggcccagggccacccagaggtaagaggacatttagcattagctctgtgtgagctcctgccggtttcttggctgtcagtcagtcccagagtggggaggaagatatgggtgacccccaccccccatctgtgagccaagcctcccttgtccctggcctttggacccaggcaaaggcttctgagccctgggcaggggtggtgggtaccagagaatgctgccttcccccaagcctgcccctctgcctcattttcctgtagctcctctggttctgtttgctcattggctgctgtgttcatccaagggggttctcccagaagtgaggggcctttccctccatcccttggggcacggggcagctgtgcctgccctgcctctgcctgaggcagccgctcctgcctgagcctggacatggggcccttccttgtgttgccaatttattaacagcaaataaaccaattaaatggagactattaaataactttattttaaaaatgacaaaaaaaaaaaaaaaaaaaaaaaaaaaaatttgtgggcggccggggccgaaaaaatttttaagaaccttccgctcgtggggggggcgggggcccccaagaggtgttaaggtttgcacactggcgcccaaagcagggctccagaggaaaaatcgtggcccaagagacacagagtgccgggtttctccccccaataaaaaaaagggcgcggggggaccaccggaggtgtttcgtgaacaaaattcccgaagggggctccgggaggccacatacgggctctactcaaagggagtccacagagaactcaaaataaatgagccgacgggg

SEQ ID NO: 359065 - DNA, 3130 bp, Homo sapiens
actgggggcgctgcggcgacccctccgccgccccgtagaaatctccgcggccccgaggccgcttgcttcctgtttgtccgacgaggagacatggcggcggcgccggtagcggctgggtctggagccggccgagggagacggtcggcagccacagtggcggcttggggcggatggggcggccggccgcggcctggtaacattctgctgcagctgcggcagggccagctgaccggccggggcctggtccgggcggtgcagttcactgagacttttttgacggagagggacaaacaatccaagtggagtggaattcctcagctgctcctcaagctgcacaccaccagccacctccacagtgactttgttgagtgtcaaaacatcctcaaggaaatttctcctcttctctccatggaggctatggcatttgttactgaagagaggaaacttacccaagaaaccacttatccaaatacttatatttttgacttgtttggaggtgttgatcttcttgtagaaattcttatgaggcctacgatctctatccggggacagaaactgaaaataagtgatgaaatgtccaaggactgcttgagtatcctgtataatacctgtgtctgtacagagggagttacaaagcgtttggcagaaaagaatgactttgtgatcttcctgtttacattgatgacaagtaagaagacattcttacaaacagcaaccctcattgaagatattttgggtgttaaaaaggaaatgatccgactagatgaagtccccaatctgagttccttagtatccaatttcgatcagcagcagctcgctaatttctgccggattctggctgtcaccatttcagagatggatacagggaatgatgacaagcacacgcttcttgccaaaaatgctcaacagaagaagagcttgagtttggggccttctgcagctgaaatcaatcaagcggcccttctcagcattcctggctttgttgagcggctttgcaaactggcgactcgaaaggtgtcagagtcaacgggcacagccagcttccttcaggagttggaagagtggtacacatggctagacaatgctttggtgctagatgccctgatgcgagtggccaatgaggagtcagagcacaatcaagcctccattgtgttccctcctccaggggcttctgaggagaatggcctgcctcacacgtcagccagaacccagctgccccagtcaatgaagattatgcatgagatcatgtacaaactggaagtgctctatgtcctctgcgtgctgctgatggggcgtcagcgaaaccaggttcacagaatgattgcagagttcaagctgatccctggacttaataatttgtttgacaaactgatttggaggaagcattcagcatctgcccttgtcctccatggtcacaaccagaactgtgactgtagcccggacatcaccttgaagatacagtttttgaggcttcttcagagcttcagtgaccaccacgagaacaagtacttgttactcaacaaccaggagctgaatgaactcagtgccatctctctcaaggccaacatccctgaggtggaagctgtcctcaacaccgacaggagtttggtgtgtgatgggaagaggggcttattaactcgtctgctgcaggtcatgaagaaggagccagcagagtcgtctttcaggttttggcaagctcgggctgtggagagtttcctccgagggaccacctcctatgcagaccagatgttcctgctgaagcgaggcctcttggagcacatcctttactgcattgtggacagcgagtgtaagtcaagggatgtgctccagagttactttgacctcctgggggagctgatgaagttcaacgttgatgcattcaagagattcaataaatatatcaacaccgatgcaaagttccaggtattcctgaagcagatcaacagctccctggtggactccaacatgctggtgcgctgtgtcactctgtccctggaccgatttgaaaaccaggtggatatgaaagttgccgaggtactgtctgaatgccgcctgctcgcctacatatcccaggtgcccacgcagatgtccttcctcttccgcctcatcaacatcatccacgtgcagacgctgacccaggagaacgtcagctgcctcaacaccagcctggtgatcctgatgctggcccgacggaaagagcggctgcccctgtacctgcggctgctgcagcggatggagcacagcaagaagtaccccggcttcctgctcaacaacttccacaacctgctgcgcttctggcagcagcactacctgcacaaggacaaggacagcacctgcctagagaacagctcctgcatcagcttctcatactggaaggagacagtgtccatcctgttgaacccggaccggcagtcaccctctgctctcgttagctacattgaggagccctacatggacatagacagggacttcactgaggagtgaccttgggccaggcctcgggaggctgctgggccagtgtgggtgagcgtgggtacgatgccacacgccctgccctgttcccgttcctccctgctgctctctgcctgccccaggtctttgggtacaggcttggtgggagggaagtcctagaagcccttggtccccctgggtctgagggccctaggtcatggagagcctcagtccccataatgaggacagggtaccatgcccacctttccttcagaaccctggggcccagggccacccagaggtaagaggacatttagcattagctctgtgtgagctcctgccggtttcttggctgtcagtcagtcccagagtggggaggaagatatgggtgacccccaccccccatctgtgagccaagcctcccttgtccctggcctttggacccaggcaaaggcttctgagccctgggcaggggtggtgggtaccagagaatgctgccttcccccagcctttccctccatcccttggggcacggggcagctgtgcctgccctgcctctgcctgaggcagccgctcctgcctgagcctggacatggggcccttccttgtgttgccaatttattaacagcaaataaaccaattaaatggagactattaaataactttattttaaaaatga

SEQ ID NO: 359066 - DNA, 2761 bp, Homo sapiens
actgggggcgctgcggcgacccctccgccgccccgtagaaatctccgcggccccgaggccgcttgcttcctgtttgtccgacgaggagacatggcggcggcgccggtagcggctgggtctggagccggccgagggagacggtcggcagccacagtggcggcttggggcggatggggcggccggccgcggcctggtaacattctgctgcagctgcggcagggccagctgaccggccggggcctggtccgggcggtgcagttcactgagacttttttgacggagagggacaaacaatccaagtggagtggaattcctcagctgctcctcaagctgcacaccaccagccacctccacagtgactttgttgagtgtcaaaacatcctcaaggaaatttctcctcttctctccatggaggctatggcatttgttactgaagagaggaaacttacccaagaaaccacttatccaaatacttatatttttgacttgtttggaggtgttgatcttcttgtagaaattcttatgaggcctacgatctctatccggggacagaaactgaaaataagtgatgaaatgtccaaggactgcttgagtatcctgtataatacctgtgtctgtacagagggagttacaaagcgtttggcagaaaagaatgactttgtgatcttcctgtttacattgatgacaagtaagaagacattcttacaaacagcaaccctcattgaagatattttgggtgttaaaaaggaaatgatccgactagatgaagtccccaatctgagttccttagtatccaatttcgatcagcagcagctcgctaatttctgccggattctggctgtcaccatttcagagatggatacagggaatgatgacaagcacacgcttcttgccaaaaatgctcaacagaagaagagcttgagtttggggccttctgcagctgaaatcaatcaagcggcccttctcagcattcctggctttgttgagcggctttgcaaactggcgactcgaaaggtgtcagagtcaacgggcacagccagcttccttcaggagttggaagagtggtacacatggctagacaatgctttggtgctagatgccctgatgcgagtggccaatgaggagtcagagcacaatcaagcctccattgtgttccctcctccaggggcttctgaggagaatggcctgcctcacacgtcagccagaacccagctgccccagtcaatgaagattatgcatgagatcatgtacaaactggaagtgctctatgtcctctgcgtgctgctgatggggcgtcagcgaaaccaggttcacagaatgattgcagagttcaagctgatccctggacttaataatttgtttgacaaactgatttggaggaagcattcagcatctgcccttgtcctccatggtcacaaccagaactgtgactgtagcccggacatcaccttgaagatacagtttttgaggcttcttcagagcttcagtgaccaccacgagaacaagtacttgttactcaacaaccaggagctgaatgaactcagtgccatctctctcaaggccaacatccctgaggtggaagctgtcctcaacaccgacaggagtttggtgtgtgatgggaagaggggcttattaactcgtctgctgcaggtcatgaagaaggagccagcagagtcgtctttcaggttttggcaagctcgggctgtggagagtttcctccgagggaccacctcctatgcagaccagatgttcctgctgaagcgaggcctcttggagcacatcctttactgcattgtggacagcgagtgtaagtcaagggatgtgctccagagttactttgacctcctgggggagctgatgaagttcaacgttgatgcattcaagagattcaataaatatatcaacaccgatgcaaagttccaggtattcctgaagcagatcaacagctccctggtggactccaacatgctggtgcgctgtgtcactctgtccctggaccgatttgaaaaccaggtggatatgaaagttgccgaggtactgtctgaatgccgcctgctcgcctacatatcccaggtgcccacgcagatgtccttcctcttccgcctcatcaacatcatccacgtgcagacgctgacccaggagaacgtcagctgcctcaacaccagcctggtgatcctgatgctggcccgacggaaagagcggctgcccctgtacctgcggctgctgcagcggatggagcacagcaagaagtaccccggcttcctgctcaacaacttccacaacctgctgcgcttctggcagcagcactacctgcacaaggacaaggacagcacctgcctagagaacagctcctgcatcagcttctcatactggaaggagacagtgtccatcctgttgaacccggaccggcagtcaccctctgctctcgttagctacattgaggagccctacatggacatagacagggacttcactgaggagtgaccttgggccaggcctcgggaggctgctgggccagtgtggctcctctggttctgtttgctcattggctgctgtgttcatccaagggggttctcccagaagtgaggggcctttccctccatcccttggggcacggggcagctgtgcctgccctgcctctgcctgaggcagccgctcctgcctgagcctggacatggggcccttccttgtgttgccaatttattaacagcaaataaaccaattaaatggagactattaaataactttattttaaaaatga

SEQ ID NO: 359067 - DNA, 2456 bp, Homo sapiens
actgggggcgctgcggcgacccctccgccgccccgtagaaatctccgcggccccgaggccgcttgcttcctgtttgtccgacgaggagacatggcggcggcgccggtagcggctgggtctggagccggccgagggagacggtcggcagccacagtggcggcttggggcggatggggcggccggccgcggcctggtaacattctgctgcagctgcggcagggccagctgaccggccggggcctggtccgggcggtgcagttcactgagacttttttgacggagagggacaaacaatccaagtggagtggaattcctcagctgctcctcaagctgcacaccaccagccacctccacagtgactttgttgagtgtcaaaacatcctcaaggaaatttctcctcttctctccatggaggctatggcatttgttactgaagagaggaaacttacccaagaaaccacttatccaaatacttatatttttgacttgtttggaggtgttgatcttcttgtagaaattcttatgaggcctacgatctctatccggggacagaaactgaaaataagtgatgaaatgtccaaggactgcttgagtatcctgtataatacctgtgtctgtacagagggagttacaaagcgtttggcagaaaagaatgactttgtgatcttcctgtttacattgatgacaagtaagaagacattcttacaaacagcaaccctcattgaagatattttgggtgttaaaaaggaaatgatccgactagatgaagtccccaatctgagttccttagtatccaatttcgatcagcagcagctcgctaatttctgccggattctggctgtcaccatttcagagatggatacagggaatgatgacaagcacacgcttcttgccaaaaatgctcaacagaagaagagcttgagtttggggccttctgcagctgaaatcaatcaagcggcccttctcagcattcctggctttgttgagcggctttgcaaactggcgactcgaaaggtgtcagagtcaacgggcacagccagcttccttcaggagttggaagagtggtacacatggctagacaatgctttggtgctagatgccctgatgcgagtggccaatgaggagtcagagcacaatcaagcctccattgtgttccctcctccaggggcttctgaggagaatggcctgcctcacacgtcagccagaacccagctgccccagtcaatgaagattatgcatgagatcatgtacaaactggaagtgctctatgtcctctgcgtgctgctgatggggcgtcagcgaaaccaggttcacagaatgattgcagagttcaagctgatccctggacttaataatttgtttgacaaactgatttggaggaagcattcagcatctgcccttgtcctccatggtcacaaccagaactgtgactgtagcccggacatcaccttgaagatacagtttttgaggcttcttcagagcttcagtgaccaccacgagaacaagtacttgttactcaacaaccaggagctgaatgaactcagtgccatctctctcaaggccaacatccctgaggtggaagctgtcctcaacaccgacaggagtttggtgtgtgatgggaagaggggcttattaactcgtctgctgcaggtcatgaagaaggagccagcagagtcgtctttcaggttttggcaagctcgggctgtggagagtttcctccgagggaccacctcctatgcagaccagatgttcctgctgaagcgaggcctcttggagcacatcctttactgcattgtggacagcgagtgtaagtcaagggatgtgctccagagttactttgacctcctgggggagctgatgaagttcaacgttgatgcattcaagagattcaataaatatatcaacaccgatgcaaagttccaggtattcctgaagcagatcaacagctccctggtggactccaacatgctggtgcgctgtgtcactctgtccctggaccgatttgaaaaccaggtggatatgaaagttgccgaggtactgtctgaatgccgcctgctcgcctacatatcccaggtgcccacgcagatgtccttcctcttccgcctcatcaacatcatccacgtgcagacgctgacccaggagaacgtcagctgcctcaacaccagcctggtgatcctgatgctggcccgacggaaagagcggctgcccctgtacctgcggctgctgcagcggatggagcacagcaagaagtaccccggcttcctgctcaacaacttccacaacctgctgcgcttctggcagcagcactacctgcacaaggacaaggacagcacctgcctagagaacgccgctcctgcctgagcctggacatggggcccttccttgtgttgccaatttattaacagcaaataaaccaattaaatggagactattaaataactttattttaaaaatga

SEQ ID NO: 359068 - DNA, 2093 bp, Homo sapiens
actgggggcgctgcggcgacccctccgccgccccgtagaaatctccgcggccccgaggccgcttgcttcctgtttgtccgacgaggagacatggcggcggcgccggtagcggctgggtctggagccggccgagggagacggtcggcagccacagtggcggcttggggcggatggggcggccggccgcggcctggtaacattctgctgcagctgcggcagggccagctgaccggccggggcctggtccgggcggtgcagttcactgagacttttttgacggagagggacaaacaatccaagtggagtggaattcctcagctgctcctcaagctgcacaccaccagccacctccacagtgactttgttgagtgtcaaaacatcctcaaggaaatttctcctcttctctccatggaggctatggcatttgttactgaagagaggaaacttacccaagaaaccacttatccaaatacttatatttttgacttgtttggaggtgttgatcttcttgtagaaattcttatgaggcctacgatctctatccggggacagaaactgaaaataagtgatgaaatgtccaaggactgcttgagtatcctgtataatacctgtgtctgtacagagggagttacaaagcgtttggcagaaaagaatgactttgtgatcttcctgtttacattgatgacaagtaagaagacattcttacaaacagcaaccctcattgaagatattttgggtgttaaaaaggaaatgatccgactagatgaagtccccaatctgagttccttagtatccaatttcgatcagcagcagctcgctaatttctgccggattctggctgtcaccatttcagagatggatacagggaatgatgacaagcacacgcttcttgccaaaaatgctcaacagaagaagagcttgagtttggggccttctgcagctgaaatcaatcaagcggcccttctcagcattcctggctttgttgagcggctttgcaaactggcgactcgaaaggtgtcagagtcaacgggcacagccagcttccttcaggagttggaagagtggtacacatggctagacaatgctttggtgctagatgccctgatgcgagtggccaatgaggagtcagagcacaatcaagcctccattgtgttccctcctccaggggcttctgaggagaatggcctgcctcacacgtcagccagaacccagctgccccagtcaatgaagattatgcatgagatcatgtacaaactggaagtgctctatgtcctctgcgtgctgctgatggggcgtcagcgaaaccaggttcacagaatgattgcagagttcaagctgatccctggacttaataatttgtttgacaaactgatttggaggaagcattcagcatctgcccttgtcctccatggtcacaaccagaactgtgactgtagcccggacatcaccttgaagatacagtttttgaggcttcttcagagcttcagtgaccaccacgagaacaagtacttgttactcaacaaccaggagctgaatgaactcagtgccatctctctcaaggccaacatccctgaggtggaagctgtcctcaacaccgacaggagtttggtgtgtgatgggaagaggggcttattaactcgtctgctgcaggtcatgaagaaggagccagcagagtcgtctttcaggttttggcaagctcgggctgtggagagtttcctccgagggaccacctcctatgcagaccagatgttcctgctgaagcgaggcctcttggagcacatcctttactgcattgtggacagcgagtgtaagtcaagggatgtgctccagagttactttgacctcctgggggagctgatgaagttcaacgttgatgcattcaagagattcaataaatatatcaacaccgatgcaaagttccaggtattcctgaagcagatcaacagctccctggtggactccaacatgctggtgcgctgtgtcactccgtactggcccgcgggccagtacggatgtggagaagatggaaactgcaggagatgcagctgaaggaggccaagcacatcgctgaggattcagaccgcaaatatgaa

SEQ ID NO: 359069 - DNA, 253 bp, Homo sapiens
ttaaatggagactattaaataactttattttaaaaatgactgctgtggacctggcttttgtccctaggactgtgtttttcctcctgaaccccaaagaaaagaatgagaaggaaactggctgtggtgtttattcagggcccagggaaggctgaaggcagcagggggcgatgcagagatggcaggatcggggcaggtggcctcagccagatgtgcaacagcagacattcctctttagagcccagggggtcaggcc

SEQ ID NO: 359070 - DNA, 449 bp, Homo sapiens
cccaggactcttgcatcccaaaggactcttgaatcatatgcaggactctctgaatcccaaactcatgcttctgtgataggaactaccggacattatgccttgtaggattattgtgagcattaatgagcaaagttagaaagtgggtttgtgtgtgctgggcataggggatacacggatgttttcttcagaccctggccctccttactgacagtactgatacttgtcctgaatatcattatcgtgtgtactgagcacgaggttttgctagatttttcaagcacatttgtcttaatactttttccttcctatcccattcaggttcacagaatgattgcagagttcaagctgatccctggacttaataatttgtttgacaaactgatttggaggaagcattcagcatctgcccttgtcctccatggtcacaaccagaactgtgactgtagccc

SEQ ID NO: 359071 - DNA, 443 bp, Homo sapiens
agcataataagaaaacagctgctgtatcaaaccaaaagcaatatgcaaatgggcttgtaggttctgatgggcactatgaaaacctttggtagacaggggctggaagaagtatattaaaggaaaaataatcatcttggaggggattataacagttcttatgctgaaaaaaatgtggtaactgttgtactatcttttcattgagaaaaataaccagtcattaccctttcactttcagtaagtgatgaaatgtccaaggactgcttgagtatcctgtataatacctgtgtctgtgtaagtacccctgccactggggctctgtttatctcccctaccaggtctgcaatgtttaagatgggaatattcgagtagaatggcagacataagagctgctttcagacagtgggggaatcgggcttattttatgtgtgcctgaaaatcaggac

SEQ ID NO: 359072 - DNA, 502 bp, Homo sapiens
gcctactactactactactactactaaattagcggccgctcgacccttctgcagctgaaatcaatcaagcggcccttctcagcattcctggctttgttgagcggctttgcaaactggcgactcgaaaggtgtcagagtcaacgggcacagccagcttccttcaggagttggaagagtggtacacatggctagacaatgctttggtgctagatgccctgatgcgagtggccaatgaggagtcagagcacaatcaagcctccattgtgttccctcctccaggggcttctgaggagaatggcctgcctcacacgtcagccagaacccagctgccccagtcaatgaagattatgcatgagatcatgtacaaactggaagtgctctatgtcctctgcgccgctcctgcctgagcctggacatggggcccttccttgtgttgccaatttattaacagcaaataaaccaattaaatggagactattaaataactttattttaaaaatga

SEQ ID NO: 359073 - DNA, 780 bp, Homo sapiens
gatacatctaagatgagtcttgaagtcagtggacaggtagagttccatcagggccgggcgtgagctgtcaggaggcttcatgcccacatgggcctttgtcacttcagtgccttgtccaaactccctgtcgtggatacccgctgtgccctctgggtccctcggtcagcatcaaccactacttccctaggccagcccatcgtctgtgagcccagtggcctgtctgcatgtgttcgtccgcttcccacacacattcctggcccctcaattgcacgtcctcccattcttgtgaaagggcaaggcctagagtatgtttcacgggggctcgcaggagccagcccttcgatcccagatgttaccctttctgtgacacagccccttccagacagacccagatagaagacttctccactgagctggctctctgtgaggatgggggcactgctgtgtccccaggcccaggatgaagcctgatgcttggtagatgttcagtaaatgttgagtacatgaaaaggcaacaaacatctcccaaccccttggagaactgaacatgggccggaagagggcagccttagccacctgagccagtatttgggtcgcaggttttggcaagctcgggctgtggagagtttcctccgagggaccacctcctatgcagaccagatgttcctgctgaagcgaggcctcttggaggtatgatctggagcagccagtgtcttgggttccgtctccccccagcccacgcgttgctgtgtcctgtcctgagccccaaacagttcatca

SEQ ID NO: 359074 - DNA, 3202 bp, Homo sapiens
actgggggcgctgcggcgacccctccgccgccccgtagaaatctccgcggccccgaggccgcttgcttcctgtttgtccgacgaggagacatggcggcggcgccggtagcggctgggtctggagccggccgagggagacggtcggcagccacagtggcggcttggggcggatggggcggccggccgcggcctggtaacattctgctgcagctgcggcagggccagctgaccggccggggcctggtccgggcggtgcagttcactgagacttttttgacggagagggacaaacaatccaagtggagtggaattcctcagctgctcctcaagctgcacaccaccagccacctccacagtgactttgttgagtgtcaaaacatcctcaaggaaatttctcctcttctctccatggaggctatggcatttgttactgaagagaggaaacttacccaagaaaccacttatccaaatacttatatttttgacttgtttggaggtgttgatcttcttgtagaaattcttatgaggcctacgatctctatccggggacagaaactgaaaataagtgatgaaatgtccaaggactgcttgagtatcctgtataatacctgtgtctgtacagagggagttacaaagcgtttggcagaaaagaatgactttgtgatcttcctgtttacattgatgacaagtaagaagacattcttacaaacagcaaccctcattgaagatattttgggtgttaaaaaggaaatgatccgactagatgaagtccccaatctgagttccttagtatccaatttcgatcagcagcagctcgctaatttctgccggattctggctgtcaccatttcagagatggatacagggaatgatgacaagcacacgcttcttgccaaaaatgctcaacagaagaagagcttgagtttggggccttctgcagctgaaatcaatcaagcggcccttctcagcattcctggctttgttgagcggctttgcaaactggcgactcgaaaggtgtcagagtcaacgggcacagccagcttccttcaggagttggaagagtggtacacatggctagacaatgctttggtgctagatgccctgatgcgagtggccaatgaggagtcagagcacaatcaaggggcttctgaggagaatggcctgcctcacacgtcagccagaacccagctgccccagtcaatgaagattatgcatgagatcatgtacaaactggaagtgctctatgtcctctgcgtgctgctgatggggcgtcagcgaaaccaggttcacagaatgattgcagagttcaagctgatccctggacttaataatttgtttgacaaactgatttggaggaagcattcagcatctgcccttgtcctccatggtcacaaccagaactgtgactgtagcccggacatcaccttgaagatacagtttttgaggcttcttcagagcttcagtgaccaccacgagaacaagtacttgttactcaacaaccaggagctgaatgaactcagtgccatctctctcaaggccaacatccctgaggtggaagctgtcctcaacaccgacaggagtttggtgtgtgatgggaagaggggcttattaactcgtctgctgcaggtcatgaagaaggagccagcagagtcgtctttcaggttttggcaagctcgggctgtggagagtttcctccgagggaccacctcctatgcagaccagatgttcctgctgaagcgaggcctcttggagcacatcctttactgcattgtggacagcgagtgtaagtcaagggatgtgctccagagttactttgacctcctgggggagctgatgaagttcaacgttgatgcattcaagagattcaataaatatatcaacaccgatgcaaagttccaggtattcctgaagcagatcaacagctccctggtggactccaacatgctggtgcgctgtgtcactctgtccctggaccgatttgaaaaccaggtggatatgaaagttgccgaggtactgtctgaatgccgcctgctcgcctacatatcccaggtgcccacgcagatgtccttcctcttccgcctcatcaacatcatccacgtgcagacgctgacccaggagaacgtcagctgcctcaacaccagcctggtgatcctgatgctggcccgacggaaagagcggctgcccctgtacctgcggctgctgcagcggatggagcacagcaagaagtaccccggcttcctgctcaacaacttccacaacctgctgcgcttctggcagcagcactacctgcacaaggacaaggacagcacctgcctagagaacagctcctgcatcagcttctcatactggaaggagacagtgtccatcctgttgaacccggaccggcagtcaccctctgctctcgttagctacattgaggagccctacatggacatagacagggacttcactgaggagtgaccttgggccaggcctcgggaggctgctgggccagtgtgggtgagcgtgggtacgatgccacacgccctgccctgttcccgttcctccctgctgctctctgcctgccccaggtctttgggtacaggcttggtgggagggaagtcctagaagcccttggtccccctgggtctgagggccctaggtcatggagagcctcagtccccataatgaggacagggtaccatgcccacctttccttcagaaccctggggcccagggccacccagaggtaagaggacatttagcattagctctgtgtgagctcctgccggtttcttggctgtcagtcagtcccagagtggggaggaagatatgggtgacccccaccccccatctgtgagccaagcctcccttgtccctggcctttggacccaggcaaaggcttctgagccctgggcaggggtggtgggtaccagagaatgctgccttcccccaagcctgcccctctgcctcattttcctgtagctcctctggttctgtttgctcattggctgctgtgttcatccaagggggttctcccagaagtgaggggcctttccctccatcccttggggcacggggcagctgtgcctgccctgcctctgcctgaggcagccgctcctgcctgagcctggacatggggcccttccttgtgttgccaatttattaacagcaaataaaccaattaaatggagactattaaataactttattttaaaaatga

SEQ ID NO: 359075 - DNA, 2412 bp, Homo sapiens
  misc_feature (29)..(29): n is a, c, g, or t
ccggctaggtacgaggctcgggtggtgcnaccatttcagagatggatacagggaatgatgacaagcacacgcttcttgccaaaaatgctcaacagaagaagagcttgagtttggggccttctgcagctgaaatcaatcaagcggcccttctcagcattcctggctttgttgagcggctttgcaaactggcgactcgaaaggtgtcagagtcaacgggcacagccagcttccttcaggagttggaagagtggtacacatggctagacaatgctttggtgctagatgccctgatgcgagtggccaatgaggagtcagagcacaatcaagcctccattgtgttccctcctccaggggcttctgaggagaatggcctgcctcacacgtcagccagaacccagctgccccagtcaatgaagattatgcatgagatcatgtacaaactggaagtgctctatgtcctctgcgtgctgctgatggggcgtcagcgaaaccaggttcacagaatgattgcagagttcaagctgatccctggacttaataatttgtttgacaaactgatttggaggaagcattcagcatctgcccttgtcctccatggtcacaaccagaactgtgactgtagcccggacatcaccttgaagatacagtttttgaggcttcttcagagcttcagtgaccaccacgagaacaagtacttgttactcaacaaccaggagctgaatgaactcagtgccatctctctcaaggccaacatccctgaggtggaagctgtcctcaacaccgacaggagtttggtgtgtgatgggaagaggggcttattaactcgtctgctgcaggtcatgaagaaggagccagcagagtcgtctttcaggttttggcaagctcgggctgtggagagtttcctccgagggaccacctcctatgcagaccagatgttcctgctgaagcgaggcctcttggagcacatcctttactgcattgtggacagcgagtgtaagtcaagggatgtgctccagagttactttgacctcctgggggagctgatgaagttcaacgttgatgcattcaagagattcaataaatatatcaacaccgatgcaaagttccaggtattcctgaagcagatcaacagctccctggtggactccaacatgctggtgcgctgtgtcactctgtccctggaccgatttgaaaaccaggtggatatgaaagttgccgaggtactgtctgaatgccgcctgctcgcctacatatcccaggtgcccacgcagatgtccttcctcttccgcctcatcaacatcatccacgtgcagacgctgacccaggagaacgtcagctgcctcaacaccagcctggtgatcctgatgctggcccgacggaaagagcggctgcccctgtacctgcggctgctgcagcggatggagcacagcaagaagtaccccggcttcctgctcaacaacttccacaacctgctgcgcttctggcagcagcactacctgcacaaggacaaggacagcacctgcctagagaacagctcctgcatcagcttctcatactggaaggagacagtgtccatcctgttgaacccggaccggcagtcaccctctgctctcgttagctacattgaggagccctacatggacatagacagggacttcactgaggagtgaccttgggccaggcctcgggaggctgctgggccagtgtgggtgagcgtgggtacgatgccacacgccctgccctgttcccgttcctccctgctgctctctgcctgccccaggtctttgggtacaggcttggtgggagggaagtcctagaagcccttggtccccctgggtctgagggccctaggtcatggagagcctcagtccccataatgaggacagggtaccatgcccacctttccttcagaaccctggggcccagggccacccagaggtaagaggacatttagcattagctctgtgtgagctcctgccggtttcttggctgtcagtcagtcccagagtggggaggaagatatgggtgacccccaccccccatctgtgagccaagcctcccttgtccctggcctttggacccaggcaaaggcttctgagccctgggcaggggtggtgggtaccagagaatgctgccttcccccaagcctgcccctctgcctcattttcctgtagctcctctggttctgtttgctcattggctgctgtgttcatccaagggggttctcccagaagtgaggggcctttccctccatcccttggggcacggggcagctgtgcctgccctgcctctgcctgaggcagccgctcctgcctgagcctggacatggggcccttccttgtgttgccaatttattaacagcaaataaaccaattaaatggagactattaaataactttattttaaaaatga

SEQ ID NO: 359076 - DNA, 5191 bp, Homo sapiens
  misc_feature (2067)..(2067): n is a, c, g, or t
actgggggcgctgcggcgacccctccgccgccccgtagaaatctccgcggccccgaggccgcttgcttcctgtttgtccgacgaggagacatggcggcggcgccggtagcggctgggtctggagccggccgagggagacggtcggcagccacagtggcggcttggggcggatggggcggccggccgcggcctggtaacattctgctgcagctgcggcagggccagctgaccggccggggcctggtccgggcggtgcagttcactgagacttttttgacggagagggacaaacaatccaagtggagtggaattcctcagctgctcctcaagctgcacaccaccagccacctccacagtgactttgttgagtgtcaaaacatcctcaaggaaatttctcctcttctctccatggaggctatggcatttgttactgaagagaggaaacttacccaagaaaccacttatccaaatacttatatttttgacttgtttggaggtgttgatcttcttgtagaaattcttatgaggcctacgatctctatccggggacagaaactgaaaataagtgatgaaatgtccaaggactgcttgagtatcctgtataatacctgtgtctgtacagagggagttacaaagcgtttggcagaaaagaatgactttgtgatcttcctgtttacattgatgacaagtaagaagacattcttacaaacagcaaccctcattgaagatattttgggtgttaaaaaggaaatgatccgactagatgaagtccccaatctgagttccttagtatccaatttcgatcagcagcagctcgctaatttctgccggattctggctgtcaccatttcagagatggatacagggaatgatgacaagcacacgcttcttgccaaaaatgctcaacagaagaagagcttgagtttggggccttctgcagctgaaatcaatcaagcggcccttctcagcattcctggctttgttgagcggctttgcaaactggcgactcgaaaggtgtcagagtcaacgggcacagccagcttccttcaggagttggaagagtggtacacatggctagacaatgctttggtgctagatgccctgatgcgagtggccaatgaggagtcagagcacaatcaagcctccattgtgttccctcctccaggggcttctgaggagaatggcctgcctcacacgtcagccagaacccagctgccccagtcaatgaagattatgcatgagatcatgtacaaactggaagtgctctatgtcctctgcgtgctgctgatggggcgtcagcgaaaccaggttcacagaatgattgcagagttcaagctgatccctggacttaataatttgtttgacaaactgatttggaggaagcattcagcatctgcccttgtcctccatggtcacaaccagaactgtgactgtagcccggacatcaccttgaagatacagtttttgaggcttcttcagagcttcagtgaccaccacgagaacaagtacttgttactcaacaaccaggagctgaatgaactcagtgccatctctctcaaggccaacatccctgaggtggaagctgtcctcaacaccgacaggagtttggtgtgtgatgggaagaggggcttattaactcgtctgctgcaggtcatgaagaaggagccagcagagtcgtctttcaggttttggcaagctcgggctgtggagagtttcctccgagggaccacctcctatgcagaccagatgttcctgctgaagcgaggcctcttggagcacatcctttactgcattgtggacagcgagtgtaagtcaagggatgtgctccagagttactttgacctcctgggggagctgatgaagttcaacgttgatgcattcaagagattcaataaatatatcaacaccgatgcaaagttccaggtattcctgaagcagatcaacagctccctggtggactccaacatgctggtgcgctgtgtcactctgtccctggaccgatttgaaaaccaggtggatatgaaaggtacatgaaaggcaggctgtcaaggcaagtcatgcagggtnagaatgctggcatcagacaccctgtctccagcagggagacaagaatgactgagggagctgcaccagatgcccacgtggccggcctcaaggtggcggcttccagggcaattggctttgctgccttgttcaacactttaataaggtgaaaatccattgttgctagcaagatgcaaagaaaaccagaaaaagaccttcctcttctgggctggtattgcctggcacgatgagttggccccctcgtcctcagtgtgctgtgcgtggcatcgcaggtgccctgtggtgcagcaggcatctgaaccctcctggacttgctaacgcacttccatgtgtatgcgcacgcgtttcctttttttcctaggagagggcttgtggcatccagcagattctcctgagggtttgtgacccccccacacccccaaaaagtcaggcacttgttccttgtcacggtcactgtcattgatagcaagaagtatcccggttgttggtaatttagccgtttgcttcctttttctgccccagagggtctgtttcaggggaacagccacacagattttggtaccttcggttattgccctgcctcccagttgtgcgggaagcagttgctccgacactagtggacggagcagaacctgtgccttgtggtctcagcactgggccggactcacctgagagctggtgtggaaaaccagttgcgctaggacctctgcagaaggagtggaacttttgcgttgtttttcttaatgcagcgtcatggatccatcttcctgtggagggaactcttctgtgtgtgatatggagggcacgggtctggagccagtctggggagggctgagggagagctgccctgagcttggttctggaggatgaggtggggtgctcctgggcactctgagaacatggctttgcctggtagcaggacagctggaggtccttctttctgccacagtcagctttcgttgaagctgttttgatgatgagctcccagcttcagagtcaggacccaagcggggctccacgaaaggcctgggcgacccagccactgggcctaagcctgacctgctgcacccctgcctccctccacagttgccgaggtactgtctgaatgccgcctgctcgcctacatatcccaggtgcccacgcagatgtccttcctcttccgcctcatcaacatcatccacgtgcagacgctgacccaggtgagaggccccggcagacacacagcagggaaggtcgattggaaaccacttcctttgtcctggtgcccagcaggtttctgtcccccactccagaagtgcgtctctggagacccagctcttctgaggactgtgctcaggaggaatcagtgtcccattgtacagacagggcctaaggaaggagggctcgcaagtgccctcaggtcacaggctgacttgcaggccagtgctctccccgcctcccccatgtccacgtccctcacaccttctgccctgctgggctttggaatcggacctgaggctgcccaactccctcactgaatagtcatgcagccttcccttctctgagcctcctgcccctcttttctagagtgagggtgatcttagcacctctcagaggtggtctttggttccgttctgaggtgaagcaccaggtgggagtgcatggtgagtggggcagaactctttccccaccgaggcgcgcaggctagtgctgaatggcacttctgaagcgggataaccgccccaacacacgcacccagccctgcctgggacggaccttccggaaggagtgatgcttgagcccaggtctggacagggacaggtgttgttgcctcaggtggggtgggaggtgggcgtggggaagaggaaggtgctcagtcaggaaactggggctgctgggggcccccttcccccagtcctatctcacctctgtgcagggagagctctgtgggtggcccgaggcctggggccactctcctccctgcctgatggctacccaggttcaccaggggccactggggctcccaccagcccctgaccctgtgggcctgtggccttgcaggagaacgtcagctgcctcaacaccagcctggtgatcctgatgctggcccgacggaaagagcggctgcccctgtacctgcggctgctgcagcggatggagcacagcaagaagtaccccggcttcctgctcaacaacttccacaacctgctgcgcttctggcagcagcactacctgcacaaggacaaggacagcacctgcctagagaacagctcctgcatcagcttctcatactggaaggagacagtgtccatcctgttgaacccggaccggcagtcaccctctgctctcgttagctacattgaggagccctacatggacatagacagggacttcactgaggagtgaccttgggccaggcctcgggaggctgctgggccagtgtgggtgagcgtgggtacgatgccacacgccctgccctgttcccgttcctccctgctgctctctgcctgccccaggtctttgggtacaggcttggtgggagggaagtcctagaagcccttggtccccctgggtctgagggccctaggtcatggagagcctcagtccccataatgaggacagggtaccatgcccacctttccttcagaaccctggggcccagggccacccagaggtaagaggacatttagcattagctctgtgtgagctcctgccggtttcttggctgtcagtcagtcccagagtggggaggaagatatgggtgacccccaccccccatctgtgagccaagcctcccttgtccctggcctttggacccaggcaaaggcttctgagccctgggcaggggtggtgggtaccagagaatgctgccttcccccaagcctgcccctctgcctcattttcctgtagctcctctggttctgtttgctcattggctgctgtgttcatccaagggggttctcccagaagtgaggggcctttccctccatcccttggggcacggggcagctgtgcctgccctgcctctgcctgaggcagccgctcctgcctgagcctggacatggggcccttccttgtgttgccaatttattaacagcaaataaaccaattaaatggagactattaaataactttattttaaaaatga

SEQ ID NO: 359077 - DNA, 3857 bp, Homo sapiens
  misc_feature (2321)..(2321): n is a, c, g, or t
  misc_feature (2366)..(2366): n is a, c, g, or t
actgggggcgctgcggcgacccctccgccgccccgtagaaatctccgcggccccgaggccgcttgcttcctgtttgtccgacgaggagacatggcggcggcgccggtagcggctgggtctggagccggccgagggagacggtcggcagccacagtggcggcttggggcggatggggcggccggccgcggcctggtaacattctgctgcagctgcggcagggccagctgaccggccggggcctggtccgggcggtgcagttcactgagacttttttgacggagagggacaaacaatccaagtggagtggaattcctcagctgctcctcaagctgcacaccaccagccacctccacagtgactttgttgagtgtcaaaacatcctcaaggaaatttctcctcttctctccatggaggctatggcatttgttactgaagagaggaaacttacccaagaaaccacttatccaaatacttatatttttgacttgtttggaggtgttgatcttcttgtagaaattcttatgaggcctacgatctctatccggggacagaaactgaaaataagtgatgaaatgtccaaggactgcttgagtatcctgtataatacctgtgtctgtacagagggagttacaaagcgtttggcagaaaagaatgactttgtgatcttcctgtttacattgatgacaagtaagaagacattcttacaaacagcaaccctcattgaagatattttgggtgttaaaaaggaaatgatccgactagatgaagtccccaatctgagttccttagtatccaatttcgatcagcagcagctcgctaatttctgccggattctggctgtcaccatttcagagatggatacagggaatgatgacaagcacacgcttcttgccaaaaatgctcaacagaagaagagcttgagtttggggccttctgcagctgaaatcaatcaagcggcccttctcagcattcctggctttgttgagcggctttgcaaactggcgactcgaaaggtgtcagagtcaacgggcacagccagcttccttcaggagttggaagagtggtacacatggctagacaatgctttggtgctagatgccctgatgcgagtggccaatgaggagtcagagcacaatcaagcctccattgtgttccctcctccaggggcttctgaggagaatggcctgcctcacacgtcagccagaacccagctgccccagtcaatgaagattatgcatgagatcatgtacaaactggaagtgctctatgtcctctgcgtgctgctgatggggcgtcagcgaaaccaggttcacagaatgattgcagagttcaagctgatccctggacttaataatttgtttgacaaactgatttggaggaagcattcagcatctgcccttgtcctccatggtcacaaccagaactgtgactgtagcccggacatcaccttgaagatacagtttttgaggcttcttcagagcttcagtgaccaccacgagaacaagtacttgttactcaacaaccaggagctgaatgaactcagtgccatctctctcaaggccaacatccctgaggtggaagctgtcctcaacaccgacaggagtttggtgtgtgatgggaagaggggcttattaactcgtctgctgcaggtcatgaagaaggagccagcagagtcgtctttcaggttttggcaagctcgggctgtggagagtttcctccgagggaccacctcctatgcagaccagatgttcctgctgaagcgaggcctcttggagcacatcctttactgcattgtggacagcgagtgtaagtcaagggatgtgctccagagttactttgacctcctgggggagctgatgaagttcaacgttgatgcattcaagagattcaataaatatatcaacaccgatgcaaaggtaaagttaacccagggctctgtggagtgtgctgggttgtccagaagttcacctggagtcctggtctgccaggctttaggcacaggttttacgttagagacgacgggggagtctgggcagtctttggcaaacattcattggaacctgctctgtctggctttgtgctagaccctgggaatgcagggatgaaaaccggggctgcttgtgggtagggagtgagggtgggaatgggtggcttgtgcgcctgccgtgacgcagcatggtgggtgccacggtgggagccgctgtagggagggactgggcctggtgtgttaggctcaccgagtgtgtgtgacagaaacccagctcaggctagctgaagtaaaattaaaagtaaaaattaaaggaatccagcacccttgagngtaaaaccactggagagagtgtcggatctgtgctgaattccgggnagtgcctcttagtacctgggtggtgaggggaggtccctcagcttatctgagcctctgtcttcctatctgaagcagtggggctggtagaggtcgctgatgccccttgtagtgactgtccccccgggccatggccatacctggccagcagcccactgcctgctgtgagcttggtttctgtatagttccaggtattcctgaagcagatcaacagctccctggtggactccaacatgctggtgcgctgtgtcactctgtccctggaccgatttgaaaaccaggtggatatgaaagttgccgaggtactgtctgaatgccgcctgctcgcctacatatcccaggtgcccacgcagatgtccttcctcttccgcctcatcaacatcatccacgtgcagacgctgacccaggagaacgtcagctgcctcaacaccagcctggtgatcctgatgctggcccgacggaaagagcggctgcccctgtacctgcggctgctgcagcggatggagcacagcaagaagtaccccggcttcctgctcaacaacttccacaacctgctgcgcttctggcagcagcactacctgcacaaggacaaggacagcacctgcctagagaacagctcctgcatcagcttctcatactggaaggagacagtgtccatcctgttgaacccggaccggcagtcaccctctgctctcgttagctacattgaggagccctacatggacatagacagggacttcactgaggagtgaccttgggccaggcctcgggaggctgctgggccagtgtgggtgagcgtgggtacgatgccacacgccctgccctgttcccgttcctccctgctgctctctgcctgccccaggtctttgggtacaggcttggtgggagggaagtcctagaagcccttggtccccctgggtctgagggccctaggtcatggagagcctcagtccccataatgaggacagggtaccatgcccacctttccttcagaaccctggggcccagggccacccagaggtaagaggacatttagcattagctctgtgtgagctcctgccggtttcttggctgtcagtcagtcccagagtggggaggaagatatgggtgacccccaccccccatctgtgagccaagcctcccttgtccctggcctttggacccaggcaaaggcttctgagccctgggcaggggtggtgggtaccagagaatgctgccttcccccaagcctgcccctctgcctcattttcctgtagctcctctggttctgtttgctcattggctgctgtgttcatccaagggggttctcccagaagtgaggggcctttccctccatcccttggggcacggggcagctgtgcctgccctgcctctgcctgaggcagccgctcctgcctgagcctggacatggggcccttccttgtgttgccaatttattaacagcaaataaaccaattaaatggagactattaaataactttattttaaaaatga

SEQ ID NO: 359078 - DNA, 3582 bp, Homo sapiens
actgggggcgctgcggcgacccctccgccgccccgtagaaatctccgcggccccgaggccgcttgcttcctgtttgtccgacgaggagacatggcggcggcgccggtagcggctgggtctggagccggccgagggagacggtcggcagccacagtggcggcttggggcggatggggcggccggccgcggcctggtaacattctgctgcagctgcggcagggccagctgaccggccggggcctggtccgggcggtgcagttcactgagacttttttgacggagagggacaaacaatccaagtggagtggaattcctcagctgctcctcaagctgcacaccaccagccacctccacagtgactttgttgagtgtcaaaacatcctcaaggaaatttctcctcttctctccatggaggctatggcatttgttactgaagagaggaaacttacccaagaaaccacttatccaaatacttatatttttgacttgtttggaggtgttgatcttcttgtagaaattcttatgaggcctacgatctctatccggggacagaaactgaaaataagtgatgaaatgtccaaggactgcttgagtatcctgtataatacctgtgtctgtacagagggagttacaaagcgtttggcagaaaagaatgactttgtgatcttcctgtttacattgatgacaagtaagaagacattcttacaaacagcaaccctcattgaagatattttgggtgttaaaaaggaaatgatccgactagatgaagtccccaatctgagttccttagtatccaatttcgatcagcagcagctcgctaatttctgccggattctggctgtcaccatttcagagatggatacagggaatgatgacaagcacacgcttcttgccaaaaatgctcaacagaagaagagcttgagtttggggccttctgcagctgaaatcaatcaagcggcccttctcagcattcctggctttgttgagcggctttgcaaactggcgactcgaaaggtgtcagagtcaacgggcacagccagcttccttcaggagttggaagagtggtacacatggctagacaatgctttggtgctagatgccctgatgcgagtggccaatgaggagtcagagcacaatcaagcctccattgtgttccctcctccaggggcttctgaggagaatggcctgcctcacacgtcagccagaacccagctgccccagtcaatgaagattatgcatgagatcatgtacaaactggaagtgctctatgtcctctgcgtgctgctgatggggcgtcagcgaaaccaggttcacagaatgattgcagagttcaagctgatccctggacttaataatttgtttgacaaactgatttggaggaagcattcagcatctgcccttgtcctccatggtcacaaccagaactgtgactgtagcccggacatcaccttgaagatacagtttttgaggcttcttcagagcttcagtgaccaccacgagaacaagtacttgttactcaacaaccaggagctgaatgaactcagtgccatctctctcaaggccaacatccctgaggtggaagctgtcctcaacaccgacaggagtttggtgtgtgatgggaagaggggcttattaactcgtctgctgcaggtcatgaagaaggagccagcagagtcgtctttcaggttttggcaagctcgggctgtggagagtttcctccgagggaccacctcctatgcagaccagatgttcctgctgaagcgaggcctcttggagcacatcctttactgcattgtggacagcgagtgtaagtcaagggatgtgctccagagttactttgacctcctgggggagctgatgaagttcaacgttgatgcattcaagagattcaataaatatatcaacaccgatgcaaagttccaggtattcctgaagcagatcaacagctccctggtggactccaacatgctggtgcgctgtgtcactctgtccctggaccgatttgaaaaccaggtggatatgaaagttgccgaggtactgtctgaatgccgcctgctcgcctacatatcccaggtgcccacgcagatgtccttcctcttccgcctcatcaacatcatccacgtgcagacgctgacccaggagaacgtcagctgcctcaacaccagcctggtgatcctgatgctggcccgacggaaagagcggctgcccctgtacctgcggctgctgcagcggatggagcacagcaagaagtaccccggcttcctgctcaacaacttccacaacctgctgcgcttctggcagcagcactacctgcacaaggacaaggacagcacctgcctagagaacagctcctgcatcagcttctcatactggaaggagacagtgtccatcctgttgaacccggaccggcagtcaccctctgctctcgttagctacattgaggagccctacatggacatagacagggacttcactgaggagtgaccttgggccaggcctcgggaggctgctgggccagtgtgggtgagcgtgggtacgatgccacacgccctgccctgttcccgttcctccctgctgctctctgcctgccccaggtctttgggtacaggcttggtgggagggaagtcctagaagcccttggtccccctgggtctgagggccctaggtcatggagagcctcagtccccataatgaggacagggtaccatgcccacctttccttcagaaccctggggcccagggccacccagaggtaagaggacatttagcattagctctgtgtgagctcctgccggtttcttggctgtcagtcagtcccagagtggggaggaagatatgggtgacccccaccccccatctgtgagccaagcctcccttgtccctggcctttggacccaggcaaaggcttctgagccctgggcaggggtggtgggtaccagagaatgctgccttcccccaagcctgcccctctgcctcattttcctgtagctcctctggttctgtttgctcattggctgctgtgttcatccaagggggttctcccagaagtgaggggcctttccctccatcccttggggcacggggcagctgtgcctgccctgcctctgcctgaggcagccgctcctgcctgagcctggacatggggcccttccttgtgttgccaatttattaacagcaaataaaccaattaaatggagactattaaataactttattttaaaaatgaaaaaaaaaaaaaaaaaaaacaaagaacaaacaaaaaaaaaaaaaaaaaaaaaaaaaaaaatttgtgggcggccggggccgaaaaaatttttaagaaccttccgctcgtggggggggcgggggcccccaagaggtgttaaggtttgcacactggcgcccaaagcagggctccagaggaaaaatcgtggcccaagagacacagagtgccgggtttctccccccaataaaaaaaagggcgcggggggaccaccggaggtgtttcgtgaacaaaattcccgaagggggctccgggaggccacatacgggctctactcaaagggagtccacagagaactcaaaataaatgagccgacgggg

SEQ ID NO: 359079 - DNA, 3559 bp, Homo sapiens
actgggggcgctgcggcgacccctccgccgccccgtagaaatctccgcggccccgaggccgcttgcttcctgtttgtccgacgaggagacatggcggcggcgccggtagcggctgggtctggagccggccgagggagacggtcggcagccacagtggcggcttggggcggatggggcggccggccgcggcctggtaacattctgctgcagctgcggcagggccagctgaccggccggggcctggtccgggcggtgcagttcactgagacttttttgacggagagggacaaacaatccaagtggagtggaattcctcagctgctcctcaagctgcacaccaccagccacctccacagtgactttgttgagtgtcaaaacatcctcaaggaaatttctcctcttctctccatggaggctatggcatttgttactgaagagaggaaacttacccaagaaaccacttatccaaatacttatatttttgacttgtttggaggtgttgatcttcttgtagaaattcttatgaggcctacgatctctatccggggacagaaactgaaaataagtgatgaaatgtccaaggactgcttgagtatcctgtataatacctgtgtctgtacagagggagttacaaagcgtttggcagaaaagaatgactttgtgatcttcctgtttacattgatgacaagtaagaagacattcttacaaacagcaaccctcattgaagatattttgggtgttaaaaaggaaatgatccgactagatgaagtccccaatctgagttccttagtatccaatttcgatcagcagcagctcgctaatttctgccggattctggctgtcaccatttcagagatggatacagggaatgatgacaagcacacgcttcttgccaaaaatgctcaacagaagaagagcttgagtttggggccttctgcagctgaaatcaatcaagcggcccttctcagcattcctggctttgttgagcggctttgcaaactggcgactcgaaaggtgtcagagtcaacgggcacagccagcttccttcaggagttggaagagtggtacacatggctagacaatgctttggtgctagatgccctgatgcgagtggccaatgaggagtcagagcacaatcaagcctccattgtgttccctcctccaggggcttctgaggagaatggcctgcctcacacgtcagccagaacccagctgccccagtcaatgaagattatgcatgagatcatgtacaaactggaagtgctctatgtcctctgcgtgctgctgatggggcgtcagcgaaaccaggttcacagaatgattgcagagttcaagctgatccctggacttaataatttgtttgacaaactgatttggaggaagcattcagcatctgcccttgtcctccatggtcacaaccagaactgtgactgtagcccggacatcaccttgaagatacagtttttgaggcttcttcagagcttcagtgaccaccacgagaacaagtacttgttactcaacaaccaggagctgaatgaactcagtgccatctctctcaaggccaacatccctgaggtggaagctgtcctcaacaccgacaggagtttggtgtgtgatgggaagaggggcttattaactcgtctgctgcaggtcatgaagaaggagccagcagagtcgtctttcaggttttggcaagctcgggctgtggagagtttcctccgagggaccacctcctatgcagaccagatgttcctgctgaagcgaggcctcttggagcacatcctttactgcattgtggacagcgagtgtaagtcaagggatgtgctccagagttactttgacctcctgggggagctgatgaagttcaacgttgatgcattcaagagattcaataaatatatcaacaccgatgcaaagttccaggtattcctgaagcagatcaacagctccctggtggactccaacatgctggtgcgctgtgtcactctgtccctggaccgatttgaaaaccaggtggatatgaaagttgccgaggtactgtctgaatgccgcctgctcgcctacatatcccaggtgcccacgcagatgtccttcctcttccgcctcatcaacatcatccacgtgcagacgctgacccaggagaacgtcagctgcctcaacaccagcctggtgatcctgatgctggcccgacggaaagagcggctgcccctgtacctgcggctgctgcagcggatggagcacagcaagaagtaccccggcttcctgctcaacaacttccacaacctgctgcgcttctggcagcagcactacctgcacaaggacaaggacagcacctgcctagagaacagctcctgcatcagcttctcatactggaaggagacagtgtccatcctgttgaacccggaccggcagtcaccctctgctctcgttagctacattgaggagccctacatggacatagacagggacttcactgaggagtgaccttgggccaggcctcgggaggctgctgggccagtgtgggtgagcgtgggtacgatgccacacgccctgccctgttcccgttcctccctgctgctctctgcctgccccaggtctttgggtacaggcttggtgggagggaagtcctagaagcccttggtccccctgggtctgagggccctaggtcatggagagcctcagtccccataatgaggacagggtaccatgcccacctttccttcagaaccctggggcccagggccacccagaggtaagaggacatttagcattagctctgtgtgagctcctgccggtttcttggctgtcagtcagtcccagagtggggaggaagatatgggtgacccccaccccccatctgtgagccaagcctcccttgtccctggcctttggacccaggcaaaggcttctgagccctgggcaggggtggtgggtaccagagaatgctgccttcccccaagcctgcccctctgcctcattttcctgtagctcctctggttctgtttgctcattggctgctgtgttcatccaagggggttctcccagaagtgaggggcctttccctccatcccttggggcacggggcagctgtgcctgccctgcctctgcctgaggcagccgctcctgcctgagcctggacatggggcccttccttgtgttgccaatttattaacagcaaataaaccaattaaatggagactattaaataactttattttaaaaatgactgctgtggacctggcttttgtccctaggactgtgtttttcctcctgaacttggggcccagggcgtcccgggtccgtgcccgcagcttgttggcctgggtttccgccatgtctgcccgctcctccgcatcatccagctcgtgctgggccttgcgatacttggccaggttggtgttggcctgctgctcctgggggcacacacagggccttggttccgcttgggtgactgagatgcttattctggtccctgccccagtccaagaagggagctagctcctcctggttctcaactttgttcctattgccactgtccatcctcaccaataccacagcg

SEQ ID NO: 359080 - DNA, 2853 bp, Homo sapiens
actgggggcgctgcggcgacccctccgccgccccgtagaaatctccgcggccccgaggccgcttgcttcctgtttgtccgacgaggagacatggcggcggcgccggtagcggctgggtctggagccggccgagggagacggtcggcagccacagtggcggcttggggcggatggggcggccggccgcggcctggtaacattctgctgcagctgcggcagggccagctgaccggccggggcctggtccgggcggtgcagttcactgagacttttttgacggagagggacaaacaatccaagtggagtggaattcctcagctgctcctcaagctgcacaccaccagccacctccacagtgactttgttgagtgtcaaaacatcctcaaggaaatttctcctcttctctccatggaggctatggcatttgttactgaagagaggaaacttacccaagaaaccacttatccaaatacttatatttttgacttgtttggaggtgttgatcttcttgtagaaattcttatgaggcctacgatctctatccggggacagaaactgaaaataagtgatgaaatgtccaaggactgcttgagtatcctgtataatacctgtgtctgtacagagggagttacaaagcgtttggcagaaaagaatgactttgtgatcttcctgtttacattgatgacaagtaagaagacattcttacaaacagcaaccctcattgaagatattttgggtgttaaaaaggaaatgatccgactagatgaagtccccaatctgagttccttagtatccaatttcgatcagcagcagctcgctaatttctgccggattctggctgtcaccatttcagagatggatacagggaatgatgacaagcacacgcttcttgccaaaaatgctcaacagaagaagagcttgagtttggggccttctgcagctgaaatcaatcaagcggcccttctcagcattcctggctttgttgagcggctttgcaaactggcgactcgaaaggtgtcagagtcaacgggcacagccagcttccttcaggagttggaagagtggtacacatggctagacaatgctttggtgctagatgccctgatgcgagtggccaatgaggagtcagagcacaatcaagcctccattgtgttccctcctccaggggcttctgaggagaatggcctgcctcacacgtcagccagaacccagctgccccagtcaatgaagattatgcatgagatcatgtacaaactggaagtgctctatgtcctctgcgtgctgctgatggggcgtcagcgaaaccaggttcacagaatgattgcagagttcaagctgatccctggacttaataatttgtttgacaaactgatttggaggaagcattcagcatctgcccttgtcctccatggtcacaaccagaactgtgactgtagcccggacatcaccttgaagatacagtttttgaggcttcttcagagcttcagtgaccaccacgagaacaagtacttgttactcaacaaccaggagctgaatgaactcagtgccatctctctcaaggccaacatccctgaggtggaagctgtcctcaacaccgacaggagtttggtgtgtgatgggaagaggggcttattaactcgtctgctgcaggtcatgaagaaggagccagcagagtcgtctttcaggttttggcaagctcgggctgtggagagtttcctccgagggaccacctcctatgcagaccagatgttcctgctgaagcgaggcctcttggagcacatcctttactgcattgtggacagcgagtgtaagtcaagggatgtgctccagagttactttgacctcctgggggagctgatgaagttcaacgttgatgcattcaagagattcaataaatatatcaacaccgatgcaaagttccaggtattcctgaagcagatcaacagctccctggtggactccaacatgctggtgcgctgtgtcactctgtccctggaccgatttgaaaaccaggtggatatgaaagttgccgaggtactgtctgaatgccgcctgctcgcctacatatcccaggtgcccacgcagatgtccttcctcttccgcctcatcaacatcatccacgtgcagacgctgacccaggagaacgtcagctgcctcaacaccagcctggtgatcctgatgctggcccgacggaaagagcggctgcccctgtacctgcggctgctgcagcggatggagcacagcaagaagtaccccggcttcctgctcaacaacttccacaacctgctgcgcttctggcagcagcactacctgcacaaggacaaggacagcacctgcctagagaacagctcctgcatcagcttctcatactggaaggagacagtgtccatcctgttgaacccggaccggcagtcaccctctgctctcgttagctacattgaggagccctacatggacatagacagggacttcactgaggagtgaccttgggccaggcctcgggaggctgctgggccagtgtgggtgagcgtgggtacgatgccacacgccctgccctgttcccgttcctccctgctgctctctgcagcctgcccctctgcctcattttcctgtagctcctctggttctgtttgctcattggctgctgtgttcatccaagggggttctcccagaagtgaggggcctttccctccatcccttggggcacggggcagctgtgcctgccctgcctctgcctgaggcagccgctcctgcctgagcctggacatggggcccttccttgtgttgccaatttattaacagcaaataaaccaattaaatggagactattaaataactttattttaaaaatga

SEQ ID NO: 359081 - DNA, 2420 bp, Homo sapiens
actgggggcgctgcggcgacccctccgccgccccgtagaaatctccgcggccccgaggccgcttgcttcctgtttgtccgacgaggagacatggcggcggcgccggtagcggctgggtctggagccggccgagggagacggtcggcagccacagtggcggcttggggcggatggggcggccggccgcggcctggtaacattctgctgcagctgcggcagggccagctgaccggccggggcctggtccgggcggtgcagttcactgagacttttttgacggagagggacaaacaatccaagtggagtggaattcctcagctgctcctcaagctgcacaccaccagccacctccacagtgactttgttgagtgtcaaaacatcctcaaggaaatttctcctcttctctccatggaggctatggcatttgttactgaagagaggaaacttacccaagaaaccacttatccaaatacttatatttttgacttgtttggaggtgttgatcttcttgtagaaattcttatgaggcctacgatctctatccggggacagaaactgaaaataagtgatgaaatgtccaaggactgcttgagtatcctgtataatacctgtgtctgtacagagggagttacaaagcgtttggcagaaaagaatgactttgtgatcttcctgtttacattgatgacaagtaagaagacattcttacaaacagcaaccctcattgaagatattttgggtgttaaaaaggaaatgatccgactagatgaagtccccaatctgagttccttagtatccaatttcgatcagcagcagctcgctaatttctgccggattctggctgtcaccatttcagagatggatacagggaatgatgacaagcacacgcttcttgccaaaaatgctcaacagaagaagagcttgagtttggggccttctgcagctgaaatcaatcaagcggcccttctcagcattcctggctttgttgagcggctttgcaaactggcgactcgaaaggtgtcagagtcaacgggcacagccagcttccttcaggagttggaagagtggtacacatggctagacaatgctttggtgctagatgccctgatgcgagtggccaatgaggagtcagagcacaatcaagcctccattgtgttccctcctccaggggcttctgaggagaatggcctgcctcacacgtcagccagaacccagctgccccagtcaatgaagattatgcatgagatcatgtacaaactggaagtgctctatgtcctctgcgtgctgctgatggggcgtcagcgaaaccaggttcacagaatgattgcagagttcaagctgatccctggacttaataatttgtttgacaaactgatttggaggaagcattcagcatctgcccttgtcctccatggtcacaaccagaactgtgactgtagcccggacatcaccttgaagatacagtttttgaggcttcttcagagcttcagtgaccaccacgagaacaagtacttgttactcaacaaccaggagctgaatgaactcagtgccatctctctcaaggccaacatccctgaggtggaagctgtcctcaacaccgacaggagtttggtgtgtgatgggaagaggggcttattaactcgtctgctgcaggtcatgaagaaggagccagcagagtcgtctttcaggttttggcaagctcgggctgtggagagtttcctccgagggaccacctcctatgcagaccagatgttcctgctgaagcgaggcctcttggagcacatcctttactgcattgtggacagcgagtgtaagtcaagggatgtgctccagagttactttgacctcctgggggagctgatgaagttcaacgttgatgcattcaagagattcaataaatatatcaacaccgatgcaaagttccaggtattcctgaagcagatcaacagctccctggtggactccaacatgctggtgcgctgtgtcactctgtccctggaccgatttgaaaaccaggtggatatgaaagttgccgaggtactgtctgaatgccgcctgctcgcctacatatcccaggtgcccacgcagatgtccttcctcttccgcctcatcaacatcatccacgtgcagacgctgacccaggagaacgtcagctgcctcaacaccagcctggtgatcctgatgctggcccgacggaaagagcggctgcccctgtacctgcggctgctgcagcggatggagcacagcaagaagtaccccggcttcctgctcaacaacttccacaacctgctgcgcttctggcagcagcactacgccgctcctgcctgagcctggacatggggcccttccttgtgttgccaatttattaacagcaaataaaccaattaaatggagactattaaataactttattttaaaaatga

SEQ ID NO: 359082 - DNA, 1763 bp, Homo sapiens
actgggggcgctgcggcgacccctccgccgccccgtagaaatctccgcggccccgaggccgcttgcttcctgtttgtccgacgaggagacatggcggcggcgccggtagcggctgggtctggagccggccgagggagacggtcggcagccacagtggcggcttggggcggatggggcggccggccgcggcctggtaacattctgctgcagctgcggcagggccagctgaccggccggggcctggtccgggcggtgcagttcactgagacttttttgacggagagggacaaacaatccaagtggagtggaattcctcagctgctcctcaagctgcacaccaccagccacctccacagtgactttgttgagtgtcaaaacatcctcaaggaaatttctcctcttctctccatggaggctatggcatttgttactgaagagaggaaacttacccaagaaaccacttatccaaatacttatatttttgacttgtttggaggtgttgatcttcttgtagaaattcttatgaggcctacgatctctatccggggacagaaactgaaaataagtgatgaaatgtccaaggactgcttgagtatcctgtataatacctgtgtctgtacagagggagttacaaagcgtttggcagaaaagaatgactttgtgatcttcctgtttacattgatgacaagtaagaagacattcttacaaacagcaaccctcattgaagatattttgggtgttaaaaaggaaatgatccgactagatgaagtccccaatctgagttccttagtatccaatttcgatcagcagcagctcgctaatttctgccggattctggctgtcaccatttcagagatggatacagggaatgatgacaagcacacgcttcttgccaaaaatgctcaacagaagaagagcttgagtttggggccttctgcagctgaaatcaatcaagcggcccttctcagcattcctggctttgttgagcggctttgcaaactggcgactcgaaaggtgtcagagtcaacgggcacagccagcttccttcaggagttggaagagtggtacacatggctagacaatgctttggtgctagatgccctgatgcgagtggccaatgaggagtcagagcacaatcaagcctccattgtgttccctcctccaggggcttctgaggagaatggcctgcctcacacgtcagccagaacccagctgccccagtcaatgaagattatgcatgagatcatgtacaaactggaagtgctctatgtcctctgcgtgctgctgatggggcgtcagcgaaaccaggttcacagaatgattgcagagttcaagctgatccctggacttaataatttgtttgacaaactgatttggaggaagcattcagcatctgcccttgtcctccatggtcacaaccagaactgtgactgtagcccggtaagcaggagacccccggggacagatggggcctcactggcttggagtagttgtttcaagacctgctgctgaccctttgaccttttttctttgggaggccgagcgggcagatcacttgaggtcaagagttacagaccagcctggccaacatggtgaaaccctgtctcactagtgtgagagacacttgcgtctctcactaaaaatacaaaaattggccaggtatggtgttgggtgcctgtaatcccaactcttcgggaggctgaggcaccagaattgcttgaacccaggaggcagaggttgcagtgagctgagatcacgccact

SEQ ID NO: 359083 - DNA, 621 bp, Homo sapiens
cgcagacatcaaagtaccttacagaaggaccagttcccatccgcagacgtgaggacctgggcgatggccaaaggcttagtccaacacccaccggggccgcagagtccgagctggccttccccagcttcctcctgcaatgcttcctgggggccctgtggctggctctgagtggcaccctattctccacacctggccccctcagagccagctcccattcactgcaggacccagtacacacagagaaaattccagaagagccgccagccccgccccagctcccagtataaccagagactctttgggggagacatggagaagtttatccagcaacaatttgcaaatacaacgtaaggcactgcctaaaacctcatcaaaaatatcagacacctacgagtggatctaacaaacggtgtgctaagcctctgtgccgacaacgatgatgtgttcttcagagaaaataaaagcactcagcctggtgcggtggctcatgcctgtaatcccaccattggggagcttgaggcaggagtatcacttgagcccaggaagctgaggctacagtgagccgagatcacgccagtgcacttcagcctgggtgacagagtgagaccttgtctcaaaaaa

SEQ ID NO: 359084 - DNA, 3886 bp, Homo sapiens
cgtgggagcagtggggttcgacggcgcggccgcgaggccgccatggccgctcacgggaagctgcggcgggagcgggggctgcaggctgagtatgagacgcaagtcaaagagatgcgctggcagctgagcgagcagctgcgctgcctggagctgcagggcgagctgcggcgggagttgctgcaggagctggcagagttcatgcggcgccgcgctgaggtggagctggaatactcccggggcctggaaaagctggccgagcgcttctccagccgtggaggccgcctggggagcagccgggagcaccaaagcttccggaaggagccgtccctcctgtcgcccttgcactgctgggcggtgctgctgcagcacacgcggcagcagagccgggagagcgcggccctgagtgaggtgctggccgggcccctggcccagcgcctgagtcacattgcagaggacgtggggcgcctggtcaagaagagcagggatctggagcagcagctgcaggatgagctcctggaggtggtctcagagctccagacggccaagaagacgtaccaggcatatcacatggagagcgtgaatgccgaggccaagctccgggaggccgagcggcaggaggagaagcgggcaggccggagtgtccccaccaccaccgctggtgccactgaggcagggcccctccgcaagagctccctcaagaagggagggaggctggtggagaagcggcaggccaagttcatggagcacaaactcaagtgcacaaaggcgcgcaacgagtacctgcttagcctggctagtgtcaacgctgctgtcagtaactactacctgcatgacgtcttggacctcatggactgctgtgacacagggttccacctggccctggggcaggtgctccggagctacacggccgctgagagccgcacccaagcctcccaagtgcagggcctgggcagcctggaagaagctgtggaggccctggatcctccaggggacaaagccaaggttctcgaggtgcatgctaccgtcttctgtcccccgctgcgctttgactaccacccccatgatggggatgaggtggctgagatctgcgttgaaatggagctgcgggacgagattctgcccagagcccagaacatccagagccgcctggaccgacagaccattgagacagaggaggtgaacaagactctgaaggcgacactgcaggccctgctggaggtggtggcctcggatgacggggatgtgcttgattccttccagaccagcccctccaccgagtccctcaagtccaccagctcagacccaggcagccggcaggcgggccggaggcgcggccagcagcaggagaccgaaaccttctacctcacgaagctccaggagtatctgagtggacggagcatcctcgccaagctgcaggccaagcacgagaagctgcaggaggcccttcagcgaggtgacaaggaggagcaggaggtgtcttggacccagtacacacagagaaaattccagaagagccgccagccccgccccagctcccagtataaccagagactctttgggggagacatggagaagtttatccagagctcaggccagcctgtgcccctggtggtggagagctgcattcgcttcatcaacctcaatggcctgcagcatgaaggcatcttccgggtatcgggtgcccagctccgggtctcagagatccgtgatgccttcgagagaggggaggacccactggtggagggctgcactgcccacgacctggactcggtggccggggtgctgaagctctacttccggagcctggagcccccactcttccccccagacctgttcggcgagctgctggcttcttcggagctggaggccacagcggagagggtggagcacgtgagccgcctgctgtggcggctgcccgcgccggtgctggtggttctgcgctacctcttcaccttcctcaaccacctggcccagtacagcgatgagaacatgatggacccctacaacctggccgtgtgcttcgggcccacgctgctaccggtgcccgctgggcaggacccggtggcgctgcagggccgggtgaaccagctggtgcagacgctcatagtgcagcccgatcgggtcttcccgcccctgacctcgctgcctggccccgtctacgagaagtgcatggcaccgccttccgccagctgcctgggggacgcccagctggagagcctgggggcggacaatgagccggagctggaagccgagatgcccgcacaggaggatgacctggagggggtcgtggaggctgtggcctgctttgcctacacgggccgcacagcccaggagctgagcttccggcggggggacgtactgcggctgcacgagagggcctcgagcgactggtggcggggggagcacaacggcatgcggggcctcatcccccacaagtatatcacgctgcccgccgggacggagaagcaggtggtgggcgcagggctgcagactgcaggggagtctgggagcagtcccgagggcctcctggcatcggagctggtccaccggccagagccatgcacctcacctgaggccatgggaccctctggacacagacgacgctgcttggtcccagcctccccagagcaacacgtggaggtggataaggctgtggcacagaacatggactctgtgtttaaggagctcttgggaaagacctctgtccgccagggccttgggccagcatctaccacctctcccagtcctgggccccgaagcccaaaggccccgcccagcagccgcctgggcaggaacaaaggcttctcccggggccctggggccccagcctcaccctcagcttcccacccccagggcctagacacgacccccaagccacactgaggtgccgctgctggagatgcgtgcccccggcggctacccgctggaccggccactctccccagcccccttgcttctctccagccctgtccagcaagtgcagggtgcctgcacttcaccctgtgcagagaggtgggatggggccgtgcacacagggatgcccgctccacatcctgcctgcccctcagccctggcccaggccccttttggaggcagctgaggaaggatgctggggaaagccctcttctgcagctttgtggaaggctgatcagtggctgctgggtggcgggtacccttgctcagatgcctggcagggctgggtggcgattcataaagacctcgtgttgattccaaaaaaaaaaaaaaaaaaaaaaaaaaaaaaaaaaaaaaaaaaaaaaaaaaaaaaaaaaaaaaaaaaaaaaaaaaaaaaaaaaaaaaaaaaaaaaaaagaggggaggcagaaaaaaaactcagagggggggaaccacaaaaaagagcacaagaaacgacaacaggagaccaaaaagaagagaaaacaaagacggacggagagcaaaacaaacagacacacggaaaaacacgaaaggacacacacgagagaaaacccacaagggggagacaaaaaagaacaaacaccgaacaaaaaaagccccgagcatcaaacaaaagagcacaaagggcaaacaccgaaacataccgacgacgaagagcgtccggcaggggacaatgaaaatatacccgggggcaaactataaacgagacgacagaaagcacgggagacagacgcgcggaacagcgaggcacgaccaaagcgcagaacagaagagagaagagcggaccaagcacagaccagacaacggcgagccaggacaaacagagacagagcaaggacaacaagaacgagggagcaagggagacgaagaagagcgaaagagcaagccgaataagcaaaaaccaaaccaaagaaaagagaagagacaaaggaaagaagctaaaggacagtcaa

SEQ ID NO: 359085 - DNA, 3374 bp, Homo sapiens
cgtgggagcagtggggttcgacggcgcggccgcgaggccgccatggccgctcacgggaagctgcggcgggagcgggggctgcaggctgagtatgagacgcaagtcaaagagatgcgctggcagctgagcgagcagctgcgctgcctggagctgcagggcgagctgcggcgggagttgctgcaggagctggcagagttcatgcggcgccgcgctgaggtggagctggaatactcccggggcctggaaaagctggccgagcgcttctccagccgtggaggccgcctggggagcagccgggagcaccaaagcttccggaaggagccgtccctcctgtcgcccttgcactgctgggcggtgctgctgcagcacacgcggcagcagagccgggagagcgcggccctgagtgaggtgctggccgggcccctggcccagcgcctgagtcacattgcagaggacgtggggcgcctggtcaagaagagcagggatctggagcagcagctgcaggatgagctcctggaggtggtctcagagctccagacggccaagaagacgtaccaggcatatcacatggagagcgtgaatgccgaggccaagctccgggaggccgagcggcaggaggagaagcgggcaggccggagtgtccccaccaccaccgctggtgccactgaggcagggcccctccgcaagagctccctcaagaagggagggaggctggtggagaagcggcaggccaagttcatggagcacaaactcaagtgcacaaaggcgcgcaacgagtacctgcttagcctggctagtgtcaacgctgctgtcagtaactactacctgcatgacgtcttggacctcatggactgctgtgacacagggttccacctggccctggggcaggtgctccggagctacacggccgctgagagccgcacccaagcctcccaagtgcagggcctgggcagcctggaagaagctgtggaggccctggatcctccaggggacaaagccaaggttctcgaggtgcatgctaccgtcttctgtcccccgctgcgctttgactaccacccccatgatggggatgaggtggctgagatctgcgttgaaatggagctgcgggacgagattctgcccagagcccagaacatccagagccgcctggaccgacagaccattgagacagaggaggtgaacaagactctgaaggcgacactgcaggccctgctggaggtggtggcctcggatgacggggatgtgcttgattccttccagaccagcccctccaccgagtccctcaagtccaccagctcagacccaggcagccggcaggcgggccggaggcgcggccagcagcaggagaccgaaaccttctacctcacgaagctccaggagtatctgagtggacggagcatcctcgccaagctgcaggccaagcacgagaagctgcaggaggcccttcagcgaggtgacaaggaggagcaggaggtgtcttggacccagtacacacagagaaaattccagaagagccgccagccccgccccagctcccagtataaccagagactctttgggggagacatggagaagtttatccagagctcaggccagcctgtgcccctggtggtggagagctgcattcgcttcatcaacctcaatggggaggacccactggtggagggctgcactgcccacgacctggactcggtggccggggtgctgaagctctacttccggagcctggagcccccactcttccccccagacctgttcggcgagctgctggcttcttcggagctggaggccacagcggagagggtggagcacgtgagccgcctgctgtggcggctgcccgcgccggtgctggtggttctgcgctacctcttcaccttcctcaaccacctggcccagtacagcgatgagaacatgatggacccctacaacctggccgtgtgcttcgggcccacgctgctaccggtgcccgctgggcaggacccggtggcgctgcagggccgggtgaaccagctggtgcagacgctcatagtgcagcccgatcgggtcttcccgcccctgacctcgctgcctggccccgtctacgagaagtgcatggcaccgccttccgccagctgcctgggggacgcccagctggagagcctgggggcggacaatgagccggagctggaagccgagatgcccgcacaggaggatgacctggagggggtcgtggaggctgtggcctgctttgcctacacgggccgcacagcccaggagctgagcttccggcggggggacgtactgcggctgcacgagagggcctcgagcgactggtggcggggggagcacaacggcatgcggggcctcatcccccacaagtatatcacgctgcccgccgggacggagaagcaggtggtgggcgcagggctgcagactgcaggggagtctgggagcagtcccgagggcctcctggcatcggagctggtccaccggccagagccatgcacctcacctgaggccatgggaccctctggacacagacgacgctgcttggtcccagcctccccagagcaacacgtggaggtggataaggctgtggcacagaacatggactctgtgtttaaggagctcttgggaaagacctctgtccgccagggccttgggccagcatctaccacctctcccagtcctgggccccgaagcccaaaggccccgcccagcagccgcctgggcaggaacaaaggcttctcccggggccctggggccccagcctcaccctcagcttcccacccccagggcctagacacgacccccaagccacactgaggtgccgctgctggagatgcgtgcccccggcggctacccgctggaccggccactctccccagcccccttgcttctctccagccctgtccagcaagtgcagggtgcctgcacttcaccctgtgcagagaggtgggatggggccgtgcacacagggatgcccgctccacatcctgcctgcccctcagccctggcccaggccccttttggaggcagctgaggaaggatgctggggaaagccctcttctgcagctttgtggaaggctgatcagtggctgctgggtggcgggtacccttgctcagatgcctggcagggctgggtggcgattcataaagacctcgtgttgattccccgatgggagccagctctctgtctcgggtgggcaggtgggtgctggaggtgagaacagcttccccaggggtcctgcagctttgaagacttggctgcctgcgccatggattccagagctgtgcacgtgactgtgggtgtgtgtggggagtctgtgtatgtctctgtgctgcctccacacccaccgttacccggatccaaggagaccccttgccatgtggaa

SEQ ID NO: 359086 - DNA, 3391 bp, Homo sapiens
cgtgggagcagtggggttcgacggcgcggccgcgaggccgccatggccgctcacgggaagctgcggcgggagcgggggctgcaggctgagtatgagacgcaagtcaaagagatgcgctggcagctgagcgagcagctgcgctgcctggagctgcagggcgagctgcggcgggagttgctgcaggagctggcagagttcatgcggcgccgcgctgaggtggagctggaatactcccggggcctggaaaagctggccgagcgcttctccagccgtggaggccgcctggggagcagccgggagcaccaaagcttccggaaggagccgtccctcctgtcgcccttgcactgctgggcggtgctgctgcagcacacgcggcagcagagccgggagagcgcggccctgagtgaggtgctggccgggcccctggcccagcgcctgagtcacattgcagaggacgtggggcgcctggtcaagaagagcagggatctggagcagcagctgcaggatgagctcctggaggtggtctcagagctccagacggccaagaagacgtaccaggcatatcacatggagagcgtgaatgccgaggccaagctccgggaggccgagcggcaggaggagaagcgggcaggccggagtgtccccaccaccaccgctggtgccactgaggcagggcccctccgcaagagctccctcaagaagggagggaggctggtggagaagcggcaggccaagttcatggagcacaaactcaagtgcacaaaggcgcgcaacgagtacctgcttagcctggctagtgtcaacgctgctgtcagtaactactacctgcatgacgtcttggacctcatggactgctgtgacacagggttccacctggccctggggcaggtgctccggagctacacggccgctgagagccgcacccaagcctcccaagtgcagggcctgggcagcctggaagaagctgtggaggccctggatcctccaggggacaaagccaaggttctcgaggtgcatgctaccgtcttctgtcccccgctgcgctttgactaccacccccatgatggggatgaggtggctgagatctgcgttgaaatggagctgcgggacgagattctgcccagagcccagaacatccagagccgcctggaccgacagaccattgagacagaggaggtgaacaagactctgaaggcgacactgcaggccctgctggaggtggtggcctcggatgacggggatgtgcttgattccttccagaccagcccctccaccgagtccctcaagtccaccagctcagacccaggcagccggcaggcgggccggaggcgcggccagcagcaggagaccgaaaccttctacctcacgaagctccaggagtatctgagtggacggagcatcctcgccaagctgcaggccaagcacgagaagctgcaggaggcccttcagcgaggtgacaaggaggagcaggaggtgtcttggacccagtacacacagagaaaattccagaagagccgccagccccgccccagctcccagtataaccagagactctttgggggagacatggagaagtttatccaggcctgcagcatgaaggcatcttccgggtatcgggtgcccagctccgggtctcagagatccgtgatgccttcgagagaggggaggacccactggtggagggctgcactgcccacgacctggactcggtggccggggtgctgaagctctacttccggagcctggagcccccactcttccccccagacctgttcggcgagctgctggcttcttcggagctggaggccacagcggagagggtggagcacgtgagccgcctgctgtggcggctgcccgcgccggtgctggtggttctgcgctacctcttcaccttcctcaaccacctggcccagtacagcgatgagaacatgatggacccctacaacctggccgtgtgcttcgggcccacgctgctaccggtgcccgctgggcaggacccggtggcgctgcagggccgggtgaaccagctggtgcagacgctcatagtgcagcccgatcgggtcttcccgcccctgacctcgctgcctggccccgtctacgagaagtgcatggcaccgccttccgccagctgcctgggggacgcccagctggagagcctgggggcggacaatgagccggagctggaagccgagatgcccgcacaggaggatgacctggagggggtcgtggaggctgtggcctgctttgcctacacgggccgcacagcccaggagctgagcttccggcggggggacgtactgcggctgcacgagagggcctcgagcgactggtggcggggggagcacaacggcatgcggggcctcatcccccacaagtatatcacgctgcccgccgggacggagaagcaggtggtgggcgcagggctgcagactgcaggggagtctgggagcagtcccgagggcctcctggcatcggagctggtccaccggccagagccatgcacctcacctgaggccatgggaccctctggacacagacgacgctgcttggtcccagcctccccagagcaacacgtggaggtggataaggctgtggcacagaacatggactctgtgtttaaggagctcttgggaaagacctctgtccgccagggccttgggccagcatctaccacctctcccagtcctgggccccgaagcccaaaggccccgcccagcagccgcctgggcaggaacaaaggcttctcccggggccctggggccccagcctcaccctcagcttcccacccccagggcctagacacgacccccaagccacactgaggtgccgctgctggagatgcgtgcccccggcggctacccgctggaccggccactctccccagcccccttgcttctctccagccctgtccagcaagtgcagggtgcctgcacttcaccctgtgcagagaggtgggatggggccgtgcacacagggatgcccgctccacatcctgcctgcccctcagccctggcccaggccccttttggaggcagctgaggaaggatgctggggaaagccctcttctgcagctttgtggaaggctgatcagtggctgctgggtggcgggtacccttgctcagatgcctggcagggctgggtggcgattcataaagacctcgtgttgattccccgatgggagccagctctctgtctcgggtgggcaggtgggtgctggaggtgagaacagcttccccaggggtcctgcagctttgaagacttggctgcctgcgccatggattccagagctgtgcacgtgactgtgggtgtgtgtggggagtctgtgtatgtctctgtgctgcctccacacccaccgttacccggatccaaggagaccccttgccatgtggaa

SEQ ID NO: 359087 - DNA, 1120 bp, Homo sapiens
gaaggtctgggctgggccagagaacagagcctctctgaccactcctggctggcgcggaggctgctggccctggaccccgtgcagggaaggagcactcgaaacaggccggtccttcccaccgcaggacggagaagcaggtggtgggcgcagggctgcagactgcaggggagtctgggagcagtcccgagggcctcctggcatcggagctggtccaccggccagagccatgcacctcacctgaggccatgggaccctctggacacagacgacgctgcttggtcccagcctccccagagcaacacgtggaggtggataaggctgtggcacagaacatggactctgtgtttaaggagctcttgggaaagacctctgtccgccagggccttgggccagcatctaccacctctcccagtcctgggccccgaagcccaaaggccccgcccagcagccgcctgggcaggaacaaaggcttctcccggggccctggggccccagcctcaccctcagcttcccacccccagggcctagacacgacccccaagccacactgaggtgccgctgctggagatgcgtgcccccggcggctacccgctggaccggccactctccccagcccccttgcttctctccagccctgtccagcaagtgcagggtgcctgcacttcaccctgtgcagagaggtgggatggggccgtgcacacagggatgcccgctccacatcctgcctgcccctcagccctggcccaggccccttttggaggcagctgaggaaggatgctggggaaagccctcttctgcagctttgtggaaggctgatcagtggctgctgggtggcgggtacccttgctcagatgcctggcagggctgggtggcgattcataaagacctcgtgttgattccccgatgggagccagctctctgtctcgggtgggcaggtgggtgctggaggtgagaacagcttccccaggggtcctgcagctttgaagacttggctgcctgcgccatggattccagagctgtgcacgtgactgtgggtgtgtgtggggagtctgtgtatgtctctgtgctgcctccacacccaccgttacccggatccaaggagaccccttgccatgtggaa

SEQ ID NO: 359088 - DNA, 1878 bp, Homo sapiens
cgtgggagcagtggggttcgacggcgcggccgcgaggccgccatggccgctcacgggaagctgcggcgggagcgggggctgcaggctgagtatgagacgcaagtcaaagagatgcgctggcagctgagcgagcagctgcgctgcctggagctgcagggcgagctgcggcgggagttgctgcaggagctggcagagttcatgcggcgccgcgctgaggtggagctggaatactcccggggcctggaaaagctggccgagcgcttctccagccgtggaggccgcctggggagcagccgggagcaccaaagcttccggaaggagccgtccctcctgtcgcccttgcactgctgggcggtgctgctgcagcacacgcggcagcagagccgggagagcgcggccctgagtgaggtgctggccgggcccctggcccagcgcctgagtcacattgcagaggacgtggggcgcctggtcaagaagagcagggatctggagcagcagctgcaggatgagctcctggaggtggtctcagagctccagacggccaagaagacgtaccaggcatatcacatggagagcgtgaatgccgaggccaagctccgggaggccgagcggcaggaggagaagcgggcaggccggagtgtccccaccaccaccgctggtgccactgaggcagggcccctccgcaagagctccctcaagaagggagggaggctggtggagaagcggcaggccaagttcatggagcacaaactcaagtgcacaaaggcgcgcaacgagtacctgcttagcctggctagtgtcaacgctgctgtcagtaactactacctgcatgacgtcttggacctcatggactgctgtgacacagggttccacctggccctggggcaggtgctccggagctacacggccgctgagagccgcacccaagcctcccaagtgcagggcctgggcagcctggaagaagctgtggaggccctggatcctccaggggacaaagccaaggttctcgaggtgcatgctaccgtcttctgtcccccgctgcgctttgactaccacccccatgatggggatgaggtggctgagatctgcgttgaaatggagctgcgggacgagattctgcccagagcccagaacatccagagccgcctggaccgacagaccattgagacagaggaggtgaacaagactctgaaggcgacactgcaggccctgctggaggtggtggcctcggatgacggggatgtgcttgattccttccagaccagcccctccaccgagtccctcaagtccaccagctcagacccaggcagccggcaggcgggccggaggcgcggccagcagcaggagaccgaaaccttctacctcacgaagctccaggagtatctgagtggacggagcatcctcgccaagctgcaggccaagcacgagaagctgcaggaggcccttcagcgaggtgacaaggaggagcaggaggtgtcttggacccagtacacacagagaaaattccagaagagccgccagccccgccccagctcccagtataaccagagactctttgggggagacatggagaagtttatccagcaacaatttgcaaatacaacgtaaggcactgcctaaaacctcatcaaaaatatcagacacctacgagtggatctaacaaacggtgtgctaagcctctgtgccgacaacgatgatgtgttcttcagagaaaataaaagcactcagcctggtgcggtggctcatgcctgtaatcccaccattggggagcttgaggcaggagtatcacttgagcccaggaagctgaggctacagtgagccgagatcacgccagtgcacttcagcctgggtgacagagtgagaccttgtctcaaaaaa

SEQ ID NO: 359089 - DNA, 273 bp, Homo sapiens
agtcctccctgagggctggggccctgcgacggtccgccatctcttctcttcctggggcccagctcagctgcccaatcccctgggcctcacttccccagttttcgcactggattgtggaataacttcagagaattagaggccggcttggctggcctggggggtggggcaccctattctccacacctggccccctcagagccagctcccattcactgcaggacccagtacacacagagaaaattccagaagagccgccagccccgccccagctcc

SEQ ID NO: 359090 - DNA, 362 bp, Homo sapiens
cccagcttgagttttgaaatgttacttgattcaagattggtgtacagaattcaattgcatttgtatattccagcaacaatttgcaaatacaacgtaaggcactgcctaaaacctcatcaaaaatatcagacacctacgagtggatctaacaaacggtgtgctaagcctctgtgccgacaacgatgatgtgttcttcagagaaaataaaagcactcagcctggtgcggtggctcatgcctgtaatcccaccattggggagcttgaggcaggagtatcacttgagcccaggaagctgaggctacagtgagccgagatcacgccagtgcacttcagcctgggtgacagagtgagaccttgtctca

SEQ ID NO: 359091 - DNA, 878 bp, Homo sapiens
tcagcacgtctctgtgtcagagggtccatggcctcaggtgaggtgcatggctctggccggtggagggtggataaggctgtggcacagaacatggactctgtgtttaaggagctcttgggaaagacctctgtccgccagggccttgggccagcatctaccacctctcccagtcctgggccccgaagcccaaaggccccgcccagcagccgcctgggcaggaacaaaggcttctcccggggccctggggccccagcctcaccctcagcttcccacccccagggcctagacacgacccccaagccacactgaggtgccgctgctggagatgcgtgcccccggcggctacccgctggaccggccactctccccagcccccttgcttctctccagccctgtccagcaagtgcagggtgcctgcacttcaccctgtgcagagaggtgggatggggccgtgcacacagggatgcccgctccacatcctgcctgcccctcagccctggcccaggccccttttggaggcagctgaggaaggatgctggggaaagccctcttctgcagctttgtggaaggctgatcagtggctgctgggtggcgggtacccttgctcagatgcctggcagggctgggtggcgattcataaagacctcgtgttgattccccgatgggagccagctctctgtctcgggtgggcaggtgggtgctggaggtgagaacagcttccccaggggtcctgcagctttgaagacttggctgcctgcgccatggattccagagctgtgcacgtgactgtgggtgtgtgtggggagtctgtgtatgtctctgtgctgcctccacacccaccgttacccggatccaaggagaccccttgccatgtggaa

SEQ ID NO: 359092 - DNA, 3452 bp, Homo sapiens
cgtgggagcagtggggttcgacggcgcggccgcgaggccgccatggccgctcacgggaagctgcggcgggagcgggggctgcaggctgagtatgagacgcaagtcaaagagatgcgctggcagctgagcgagcagctgcgctgcctggagctgcagggcgagctgcggcgggagttgctgcaggagctggcagagttcatgcggcgccgcgctgaggtggagctggaatactcccggggcctggaaaagctggccgagcgcttctccagccgtggaggccgcctggggagcagccgggagcaccaaagcttccggaaggagccgtccctcctgtcgcccttgcactgctgggcggtgctgctgcagcacacgcggcagcagagccgggagagcgcggccctgagtgaggtgctggccgggcccctggcccagcgcctgagtcacattgcagaggacgtggggcgcctggtcaagaagagcagggatctggagcagcagctgcaggatgagctcctggaggtggtctcagagctccagacggccaagaagacgtaccaggcatatcacatggagagcgtgaatgccgaggccaagctccgggaggccgagcggcaggaggagaagcgggcaggccggagtgtccccaccaccaccgctggtgccactgaggcagggcccctccgcaagagctccctcaagaagggagggaggctggtggagaagcggcaggccaagttcatggagcacaaactcaagtgcacaaaggcgcgcaacgagtacctgcttagcctggctagtgtcaacgctgctgtcagtaactactacctgcatgacgtcttggacctcatggactgctgtgacacagggttccacctggccctggggcaggtgctccggagctacacggccgctgagagccgcacccaagcctcccaagtgcagggcctgggcagcctggaagaagctgtggaggccctggatcctccaggggacaaagccaaggttctcgaggtgcatgctaccgtcttctgtcccccgctgcgctttgactaccacccccatgatggggatgaggtggctgagatctgcgttgaaatggagctgcgggacgagattctgcccagagcccagaacatccagagccgcctggaccgacagaccattgagacagaggaggtgaacaagactctgaaggcgacactgcaggccctgctggaggtggtggcctcggatgacggggatgtgcttgattccttccagaccagcccctccaccgagtccctcaagtccaccagctcagacccaggcagccggcaggcgggccggaggcgcggccagcagcaggagaccgaaaccttctacctcacgaagctccaggagtatctgagtggacggagcatcctcgccaagctgcaggccaagcacgagaagctgcaggaggcccttcagcgaggtgacaaggaggagcaggaggtgtcttggacccagtacacacagagaaaattccagaagagccgccagccccgccccagctcccagtataaccagagactctttgggggagacatggagaagtttatccagagctcaggccagcctgtgcccctggtggtggagagctgcattcgcttcatcaacctcaatggcctgcagcatgaaggcatcttccgggtatcgggtgcccagctccgggtctcagagatccgtgatgccttcgagagaggggaggacccactggtggagggctgcactgcccacgacctggactcggtggccggggtgctgaagctctacttccggagcctggagcccccactcttccccccagacctgttcggcgagctgctggcttcttcggagctggaggccacagcggagagggtggagcacgtgagccgcctgctgtggcggctgcccgcgccggtgctggtggttctgcgctacctcttcaccttcctcaaccacctggcccagtacagcgatgagaacatgatggacccctacaacctggccgtgtgcttcgggcccacgctgctaccggtgcccgctgggcaggacccggtggcgctgcagggccgggtgaaccagctggtgcagacgctcatagtgcagcccgatcgggtcttcccgcccctgacctcgctgcctggccccgtctacgagaagtgcatggcaccgccttccgccagctgcctgggggacgcccagctggagagcctgggggcggacaatgagccggagctggaagccgagatgcccgcacaggaggatgacctggagggggtcgtggaggctgtggcctgctttgcctacacgggccgcacagcccaggagctgagcttccggcggggggacgtactgcggctgcacgagagggcctcgagcgactggtggcggggggagcacaacggcatgcggggcctcatcccccacaagtatatcacgctgcccgccgggacggagaagcaggtggtgggcgcagggctgcagactgcaggggagtctgggagcagtcccgagggcctcctggcatcggagctggtccaccggccagagccatgcacctcacctgaggccatgggaccctctggacacagacgacgctgcttggtcccagcctccccagagcaacacgtggaggtggataaggctgtggcacagaacatggactctgtgtttaaggagctcttgggaaagacctctgtccgccagggccttgggccagcatctaccacctctcccagtcctgggccccgaagcccaaaggccccgcccagcagccgcctgggcaggaacaaaggcttctcccggggccctggggccccagcctcaccctcagcttcccacccccagggcctagacacgacccccaagccacactgaggtgccgctgctggagatgcgtgcccccggcggctacccgctggaccggccactctccccagcccccttgcttctctccagccctgtccagcaagtgcagggtgcctgcacttcaccctgtgcagagaggtgggatggggccgtgcacacagggatgcccgctccacatcctgcctgcccctcagccctggcccaggccccttttggaggcagctgaggaaggatgctggggaaagccctcttctgcagctttgtggaaggctgatcagtggctgctgggtggcgggtacccttgctcagatgcctggcagggctgggtggcgattcataaagacctcgtgttgattccccgatgggagccagctctctgtctcgggtgggcaggtgggtgctggaggtgagaacagcttccccaggggtcctgcagctttgaagacttggctgcctgcgccatggattccagagctgtgcacgtgactgtgggtgtgtgtggggagtctgtgtatgtctctgtgctgcctccacacccaccgttacccggatccaaggagaccccttgccatgtggaa

SEQ ID NO: 359093 - DNA, 3460 bp, Homo sapiens
tttgcaagggaggctgccacctcccggagcctgggtaccggcgggaaaggaagtcgcaggggaaaccattcagaggctttccaggaacgagggagagacaggaagccaaactgaaagagatgcgctggcagctgagcgagcagctgcgctgcctggagctgcagggcgagctgcggcgggagttgctgcaggagctggcagagttcatgcggcgccgcgctgaggtggagctggaatactcccggggcctggaaaagctggccgagcgcttctccagccgtggaggccgcctggggagcagccgggagcaccaaagcttccggaaggagccgtccctcctgtcgcccttgcactgctgggcggtgctgctgcagcacacgcggcagcagagccgggagagcgcggccctgagtgaggtgctggccgggcccctggcccagcgcctgagtcacattgcagaggacgtggggcgcctggtcaagaagagcagggatctggagcagcagctgcaggatgagctcctggaggtggtctcagagctccagacggccaagaagacgtaccaggcatatcacatggagagcgtgaatgccgaggccaagctccgggaggccgagcggcaggaggagaagcgggcaggccggagtgtccccaccaccaccgctggtgccactgaggcagggcccctccgcaagagctccctcaagaagggagggaggctggtggagaagcggcaggccaagttcatggagcacaaactcaagtgcacaaaggcgcgcaacgagtacctgcttagcctggctagtgtcaacgctgctgtcagtaactactacctgcatgacgtcttggacctcatggactgctgtgacacagggttccacctggccctggggcaggtgctccggagctacacggccgctgagagccgcacccaagcctcccaagtgcagggcctgggcagcctggaagaagctgtggaggccctggatcctccaggggacaaagccaaggttctcgaggtgcatgctaccgtcttctgtcccccgctgcgctttgactaccacccccatgatggggatgaggtggctgagatctgcgttgaaatggagctgcgggacgagattctgcccagagcccagaacatccagagccgcctggaccgacagaccattgagacagaggaggtgaacaagactctgaaggcgacactgcaggccctgctggaggtggtggcctcggatgacggggatgtgcttgattccttccagaccagcccctccaccgagtccctcaagtccaccagctcagacccaggcagccggcaggcgggccggaggcgcggccagcagcaggagaccgaaaccttctacctcacgaagctccaggagtatctgagtggacggagcatcctcgccaagctgcaggccaagcacgagaagctgcaggaggcccttcagcgaggtgacaaggaggagcaggaggtgtcttggacccagtacacacagagaaaattccagaagagccgccagccccgccccagctcccagtataaccagagactctttgggggagacatggagaagtttatccagagctcaggccagcctgtgcccctggtggtggagagctgcattcgcttcatcaacctcaatggcctgcagcatgaaggcatcttccgggtatcgggtgcccagctccgggtctcagagatccgtgatgccttcgagagaggggaggacccactggtggagggctgcactgcccacgacctggactcggtggccggggtgctgaagctctacttccggagcctggagcccccactcttccccccagacctgttcggcgagctgctggcttcttcggagctggaggccacagcggagagggtggagcacgtgagccgcctgctgtggcggctgcccgcgccggtgctggtggttctgcgctacctcttcaccttcctcaaccacctggcccagtacagcgatgagaacatgatggacccctacaacctggccgtgtgcttcgggcccacgctgctaccggtgcccgctgggcaggacccggtggcgctgcagggccgggtgaaccagctggtgcagacgctcatagtgcagcccgatcgggtcttcccgcccctgacctcgctgcctggccccgtctacgagaagtgcatggcaccgccttccgccagctgcctgggggacgcccagctggagagcctgggggcggacaatgagccggagctggaagccgagatgcccgcacaggaggatgacctggagggggtcgtggaggctgtggcctgctttgcctacacgggccgcacagcccaggagctgagcttccggcggggggacgtactgcggctgcacgagagggcctcgagcgactggtggcggggggagcacaacggcatgcggggcctcatcccccacaagtatatcacgctgcccgccgggacggagaagcaggtggtgggcgcagggctgcagactgcaggggagtctgggagcagtcccgagggcctcctggcatcggagctggtccaccggccagagccatgcacctcacctgaggccatgggaccctctggacacagacgacgctgcttggtcccagcctccccagagcaacacgtggaggtggataaggctgtggcacagaacatggactctgtgtttaaggagctcttgggaaagacctctgtccgccagggccttgggccagcatctaccacctctcccagtcctgggccccgaagcccaaaggccccgcccagcagccgcctgggcaggaacaaaggcttctcccggggccctggggccccagcctcaccctcagcttcccacccccagggcctagacacgacccccaagccacactgaggtgccgctgctggagatgcgtgcccccggcggctacccgctggaccggccactctccccagcccccttgcttctctccagccctgtccagcaagtgcagggtgcctgcacttcaccctgtgcagagaggtgggatggggccgtgcacacagggatgcccgctccacatcctgcctgcccctcagccctggcccaggccccttttggaggcagctgaggaaggatgctggggaaagccctcttctgcagctttgtggaaggctgatcagtggctgctgggtggcgggtacccttgctcagatgcctggcagggctgggtggcgattcataaagacctcgtgttgattccccgatgggagccagctctctgtctcgggtgggcaggtgggtgctggaggtgagaacagcttccccaggggtcctgcagctttgaagacttggctgcctgcgccatggattccagagctgtgcacgtgactgtgggtgtgtgtggggagtctgtgtatgtctctgtgctgcctccacacccaccgttacccggatccaaggagaccccttgccatgtggaa

SEQ ID NO: 359094 - DNA, 3537 bp, Homo sapiens
cgtgggagcagtggggttcgacggcgcggccgcgaggccgccatggccgctcacgggaagctgcggcgggagcgggggctgcaggctgagtatgagacgcaagtcaaagagatgcgctggcagctgagcgagcagctgcgctgcctggagctgcagggcgagctgcggcgggagttgctgcaggagctggcagagttcatgcggcgccgcgctgaggtggagctggaatactcccggggcctggaaaagctggccgagcgcttctccagccgtggaggccgcctggggagcagccgggagcaccaaagcttccggaaggagccgtccctcctgtcgcccttgcactgctgggcggtgctgctgcagcacacgcggcagcagagccgggagagcgcggccctgagtgaggtgctggccgggcccctggcccagcgcctgagtcacattgcagaggacgtggggcgcctggtcaagaagagcagggatctggagcagcagctgcaggatgagctcctggaggtggtctcagagctccagacggccaagaagacgtaccaggcatatcacatggagagcgtgaatgccgaggccaagctccgggaggccgagcggcaggaggagaagcgggcaggccggagtgtccccaccaccaccgctggtgccactgaggcagggcccctccgcaagagctccctcaagaagggagggaggctggtggagaagcggcaggccaagttcatggagcacaaactcaagtgcacaaaggcgcgcaacgagtacctgcttagcctggctagtgtcaacgctgctgtcagtaactactacctgcatgacgtcttggacctcatggactgctgtgacacagggttccacctggccctggggcaggtgctccggagctacacggccgctgagagccgcacccaagcctcccaagtgcagggcctgggcagcctggaagaagctgtggaggccctggatcctccaggggacaaagccaaggttctcgaggtgcatgctaccgtcttctgtcccccgctgcgctttgactaccacccccatgatggggatgaggtggctgagatctgcgttgaaatggagctgcgggacgagattctgcccagagcccagaacatccagagccgcctggaccgacagaccattgagacagaggaggtgaacaagactctgaaggcgacactgcaggccctgctggaggtggtggcctcggatgacggggatgtgcttgattccttccagaccagcccctccaccgagtccctcaagtccaccagctcagacccaggcagccggcaggcgggccggaggcgcggccagcagcaggagaccgaaaccttctacctcacgaagctccaggagtatctgagtggacggagcatcctcgccaagctgcaggccaagcacgagaagctgcaggaggcccttcagcgaggtgacaaggaggagcaggaggtgtcttggacccagtacacacagagaaaattccagaagagccgccagccccgccccagctcccagtataaccagagactctttgggggagacatggagaagtttatccagagctcaggccagcctgtgcccctggtggtggagagctgcattcgcttcatcaacctcaatggcctgcagcatgaaggcatcttccgggtatcgggtgcccagctccgggtctcagagatccgtgatgccttcgagagaggggaggacccactggtggagggctgcactgcccacgacctggactcggtggccggggtgctgaagctctacttccggagcctggagcccccactcttccccccagacctgttcggcgagctgctggcttcttcggagctggaggccacagcggagagggtggagcacgtgagccgcctgctgtggcggctgcccgcgccggtgctggtggttctgcgctacctcttcaccttcctcaaccacctggcccagtacagcgatgagaacatgatggacccctacaacctggccgtgtgcttcgggcccacgctgctaccggtgcccgctgggcaggacccggtggcgctgcagggccgggtgaaccagctggtgcagacgctcatagtgcagcccgatcgggtcttcccgcccctgacctcgctgcctggccccgtctacgagaagtgcatggcaccgccttccgccagctgcctggggtacacccttggtgctgccgaggggactggggggtccactggagaagagcccccctcatctgcctcgctctgccctgaacctcagggacgcccagctggagagcctgggggcggacaatgagccggagctggaagccgagatgcccgcacaggaggatgacctggagggggtcgtggaggctgtggcctgctttgcctacacgggccgcacagcccaggagctgagcttccggcggggggacgtactgcggctgcacgagagggcctcgagcgactggtggcggggggagcacaacggcatgcggggcctcatcccccacaagtatatcacgctgcccgccgggacggagaagcaggtggtgggcgcagggctgcagactgcaggggagtctgggagcagtcccgagggcctcctggcatcggagctggtccaccggccagagccatgcacctcacctgaggccatgggaccctctggacacagacgacgctgcttggtcccagcctccccagagcaacacgtggaggtggataaggctgtggcacagaacatggactctgtgtttaaggagctcttgggaaagacctctgtccgccagggccttgggccagcatctaccacctctcccagtcctgggccccgaagcccaaaggccccgcccagcagccgcctgggcaggaacaaaggcttctcccggggccctggggccccagcctcaccctcagcttcccacccccagggcctagacacgacccccaagccacactgaggtgccgctgctggagatgcgtgcccccggcggctacccgctggaccggccactctccccagcccccttgcttctctccagccctgtccagcaagtgcagggtgcctgcacttcaccctgtgcagagaggtgggatggggccgtgcacacagggatgcccgctccacatcctgcctgcccctcagccctggcccaggccccttttggaggcagctgaggaaggatgctggggaaagccctcttctgcagctttgtggaaggctgatcagtggctgctgggtggcgggtacccttgctcagatgcctggcagggctgggtggcgattcataaagacctcgtgttgattccccgatgggagccagctctctgtctcgggtgggcaggtgggtgctggaggtgagaacagcttccccaggggtcctgcagctttgaagacttggctgcctgcgccatggattccagagctgtgcacgtgactgtgggtgtgtgtggggagtctgtgtatgtctctgtgctgcctccacacccaccgttacccggatccaaggagaccccttgccatgtggaa

SEQ ID NO: 359095 - DNA, 755 bp, Homo sapiens
ggggactcggggtgcgggctctctgcttgtgatgtgcgtgtccccccagctgggccccgaagcccaaaggccccgcccagcagccgcctgggcaggaacaaaggcttctcccggggccctggggccccagcctcaccctcagcttcccacccccagggcctagacacgacccccaagccacactgaggtgccgctgctggagatgcgtgcccccggcggctacccgctggaccggccactctccccagcccccttgcttctctccagccctgtccagcaagtgcagggtgcctgcacttcaccctgtgcagagaggtgggatggggccgtgcacacagggatgcccgctccacatcctgcctgcccctcagccctggcccaggccccttttggaggcagctgaggaaggatgctggggaaagccctcttctgcagctttgtggaaggctgatcagtggctgctgggtggcgggtacccttgctcagatgcctggcagggctgggtggcgattcataaagacctcgtgttgattccccgatgggagccagctctctgtctcgggtgggcaggtgggtgctggaggtgagaacagcttccccaggggtcctgcagctttgaagacttggctgcctgcgccatggattccagagctgtgcacgtgactgtgggtgtgtgtggggagtctgtgtatgtctctgtgctgcctccacacccaccgttacccggatccaaggagaccccttgccatgtggaa

SEQ ID NO: 359096 - DNA, 644 bp, Homo sapiens
cgtgggagcagtggggttcgacggcgcggccgcgaggccgccatggccgctcacgggaagctgcggcgggagcgggggctgcaggctgagtatgagacgcaagtcaaaggtgagagggcgccgggcgctcccggcccgtttcctgcggagaacccaaggtcgtgagggagctccaagcgtccccgccgcctgagtcacattgcagaggacgtggggcgcctggtcaagaagctggaccgacagaccattgagacagaggaggtgaacaagactctgaaggcgacactgcaggccctgctggaggtggtggcctcggatgacggggatgtgcttgattccttccagaccagcccctccaccgagtccctcaagtccacgcctggcagggctgggtggcgattcataaagacctcgtgttgattccccgatgggagccagctctctgtctcgggtgggcaggtgggtgctggaggtgagaacagcttccccaggggtcctgcagctttgaagacttggctgcctgcgccatggattccagagctgtgcacgtgactgtgggtgtgtgtggggagtctgtgtatgtctctgtgctgcctccacacccaccgttacccggatccaaggagaccccttgccatgtggaa

SEQ ID NO: 359097 - DNA, 456 bp, Homo sapiens
tatttgtcttttcactgtgtgggtatttatactgattatacaatagcaattgtgggtaaaattgatggggacatagtacgaatcaaggcagtgaaattagacaatatagtagtcattagtcattatttatttgttgctatgcacatgagggaaaaaatggcaatttcactttagaataccttgatgaagcagtgaaaatgatttaagtttattgaattttgatcttgattacacatcttagtctgtgtgaaacaatgtgaagtatgcataaaacacttctgctgcatactaaagtgtactgattatctcaagaaaaagcatttgtcctattatttgagttgaaaactaacatttgcttttcttcataaaaattcacttacttgaaagaatgactgagaaacaaaccataactatttggcagatattttctcaaaactgaaagaaattccttttgct

SEQ ID NO: 359098 - DNA, 242 bp, Homo sapiens
agagtaagcctgggcctccaatcccagctatccctttccctttctttactggacctgggaccccagagtctgcctcaccccactcccctgtacctcctgccctcccggacaccctaggagtactcaacactcacccagtccttgtacctctttggactccggggataccagaatgtttcaggacacccctccctctggggtccactcttggcctagacattttgtgtccttggaggaagagc

SEQ ID NO: 359099 - DNA, 513 bp, Homo sapiens
atggtcatttgttacagtagcaacagagaacttacaaagcccccaatccagaaagtgtaggcttcctcactttcaacactgaccagtccacaggaaattcatacagaccaatattggcacccggagtctcctgaaaaatagccgatggccctccctgatcatcctatagtgaaatctcctttttaaaaactacactcatccacacagtgtctaaatctgaaatataaatgaacacctaaggatgagtcaacacttggaaaaagcttttgacatcaaagagatcccaacaaacacaaagagagaaggaattggatggaaaaagagacaatgccagtgaaaaatgactttaaaaacataattgagggtagctgtagtggcttacgcctgttatcccaactaatcagcaaggtgagatgggaggatggcctgaggctgagagtttgaagctacagtgagttatgatcatgtcactggactccaacctggacaaccgagtaaggctcatctctaaaa

SEQ ID NO: 359100 - DNA, 380 bp, Homo sapiens
ttttatagtatcttaaatatgaagtacttttcattagacaggggaacttgagagaatgttgtgtaatataatgttgtttgcctaccacaaacccatcctctaacccccatcctcttcttccttgctagaaaagtcctatttgttccatctcctttaggtagccaggtccttaagaggcaactgcatgcctctcaggtcctaagatgatcgtgtaaacatcattccccttatgtgattattttaggcataaatatgttgtcatgccataggcagtgactcatgtggccaatgttctttaaggggtagtcttctgaatgatttatgtgtagaatattcttactctttaaatggcagaactgccgggcgcggtggctcccgcc

SEQ ID NO: 359101 - DNA, 373 bp, Homo sapiens
acaaactcacaaaaaaactcttggtctgggacattataggcatgcagggggtaggaaagagacctcaatgagacctaacatgaagcaacagtaaagaatacatatgagtctgaatcttaagaatactggaacaaagtgagaggagggagttaggttaggcaattagacagggagggactcagcagaagagcaacagtaatagaaacgcctgcagaacagcagcaacaccacctctgcagctagcgggaagatcaacagtcataggaacacccgtgggacagcacccacactgcctctgcagctaaagggaagaaatgtagttaagaacttccccttatgccaggaggtctgctcagaagggactgtcccagct

SEQ ID NO: 359102 - DNA, 384 bp, Homo sapiens
cacctctcctcttggctctgcaagtctttgcatggaacagctgatttaacgtgggcccagggcagcaggggaccctaaagcaagcctcctgggtggggggaggcagtggcatgtcactgggactcccctgtcctgttggccttctgtggtggatttgggggccagtggcccgctgagggcaggacacaccctggcaagggagcgggcgtgggcgggagggcatgttgctgcagtctggggcatgtgagcttggcctccagagatgagctcatcctccctgggccttgctgagcgtctgaggcttcttcaccgaggctcacctgagtgacttcagcgccgggggtttaccaaggaaaaacgttcccctccagtttgaaaaaaaaa

SEQ ID NO: 359103 - DNA, 808 bp, Homo sapiens
caagcggacctaaggagtcgcagttgtgaacaggtttggtgccgcgggctggggtaggcggcggttgggtccgtggctctggggcactgggaagatcgcgagtcgtgcgcatgggaaggtcctcccccggtcctccgggtcatctttgctcccgaggagcggcatatttcgcatctgcctgaggtgtgcccgggggtcgttgggagagtgacgggatgaatccctgcagagagcccggactgggagggaaggtgtcggggagacgtcgtttcctggcgacgtggtcccggcaggcgacttagacctgagccgaatctgttgaccccaaattgtgcttttcccaccaagaagaaaagggagagaaacagtacaagttcggcagtaaaatatagtagagaagcaatatagcctctgaaatcacacagctattcagtttcaaagcgttcctagtgcccagctctcctaactcccggccagtgttccttgacatatggtgatatataaagactttctgtttccgctcgtgtgtgtgtctgtgagaagcctctgactcacttctgtgctccagtagcaccctctgcagccttgcaatgtagcccttattgcatggcacggaagatactagtttggatttcctctgccaatcagaccatagctatatccattttctggcacagtggctagcacatcatagacagacacaaacatttattaaacggaatgaatacaggaccttaactgaatgaaatggtaccctgccccgctttttctcaatcaagctgtcagattttatgcagcccgatattcc

SEQ ID NO: 359104 - DNA, 1303 bp, Homo sapiens
caagcggacctaaggagtcgcagttgtgaacaggtttggtgccgcgggctggggtaggcggcggttgggtccgtggctctggggcactgggaagatcgcgagtcgtgcgcatgggaaggtcctcccccggtcctccgggtcatctttgctcccgaggagcggcatatttcgcatctgcctgaggttagagttacttgttattggtaaatagccactatggagactaaggaccagaagaaacacagaaagaaaaacggtggacccaaagctgcaaagaaaaagaagtggcatctgcaggatctccagctaggagactaagaaaatgcccagaagagaaatgccaatgcttttgcagttcagtctgctgtgtggatgtctcgatcctttcacaggactctggatttgaagacacaaaagcatcatattccagtggttgatggaactccactagagccgccaccaataccggtagtggtgacggggcctccaaagttggaaagagcactttgatataatgcctcattcggaacttcacctggcagaagttcaccgagatcagaggccctgtgacgatcgtgtcaggtaaaaagcgcagactcaccattattgaatgtgggtgtgacattaacatgatgattgatctggctaaagtagcagatctggtactgatgcttatagatgccagctttgggtttgaaatggaaatgtttgagtttctaaacatctgtcaagcacatggctttcctaaaattctgggagttctcacccacctcgactccttcaagcataacaagcaactgaagaagacaaagaagcgattaaaacacaggttctggacagaagtttaccaggttgccaaactgttctacctttctggaatggtgcatggagaatatcaaaaccaagaaatccacaatctgggccattttattacagttatgaagtttaggcctctcatggcaaacttttcacccttatatcctggcagacaggatggaagatttgacaaacccggaggatatccaaacaaacatcaaatgtgaccggcaggtgtcactttatggttatttaagaggagcacacttcaaagataaaagccaaattcacatgccaggacaaggtggggctcacccatgagctggtccagagtctcatctccacctactccaccattgatgccaagatggcttcaagtcgagtgacgctgctttccaattccaaaccacttgggtcagaggctatagataatcaagggtaagtctgctttttttctatttttaataaaaagatatattacagaaga

SEQ ID NO: 359105 - DNA, 559 bp, Homo sapiens
ggaatgaatgtcactttcagcctagagacacagttgtgtgcctgccccttttcctctgctggatggtgaacggtgcttccttatttctgcattttctagttcctaagtgatgtgcttagtggacaagagtgtgatgagtcattgacacatgaaaggaggtataggaactttggcattcgtttctgctgtatgattgagtttatttttctaggatggaagatttgacaaacccggaggatatccaaacaaacatcaaatgtgaccggcaggtgtcactttatggttatttaagaggagcacacttcaaagataaaagccaaattcacatgccaggtattctcttgttgtagaacatactagaattgcacataggattcttgggatggcttcatttctcaggaaaaatgaaaaatgaccaaacaagggaagatggccttgctggaggttttaaaagtaagccagctatgtgtaggcctgcaaaggtgttaccgaatccctcttctctgacctcttgtagctagagggccactgttccagtgtggcacaatgcccttcttta

SEQ ID NO: 359106 - DNA, 460 bp, Homo sapiens
tttctctgtctgggtgatgcctgtgtagtcatttgatttagtctggagtgggacttttctgtcgagggccagatagtgaatattttcagctttgtggatcatatcttctgcagctacttagctctgcagttgtagtgcacaggcggccatagacaatatgtaaaggaattaatgtggctatgttccaataaaactttagttacaaacacaggtgatgggctggatttggcccgtgggccagttgccaacccctagtgtaggtggtctgttttggtagtttcttcgagaaataatgtgttgtgcttgtaggtactgatgcttatagatgccagctttgggtttgaaatggaaatgtttgagtttctaaacatctgtcaagcacatggctttcctaaaattctgggagttctcacccacctcgactccttcaagcataacaagcaactgaagaagacaaaga

SEQ ID NO: 359107 - DNA, 1153 bp, Homo sapiens
caagcggacctaaggagtcgcagttgtgaacaggttagagttacttgttattggtaaatagccactatggagactaaggaccagaagaaacacagaaagaaaaacggtggacccaaagctgcaaagaaaaagaagtggcatctgcaggatctccagctaggagactaagaaaatgcccagaagagaaatgccaatgcttttgcagttcagtctgctgtgtggatgtctcgatcctttcacaggactctggatttgaagacacaaaagcatcatattccagtggttgatggaactccactagagccgccaccaataccggtagtggtgacggggcctccaaagttggaaagagcactttgatataatgcctcattcggaacttcacctggcagaagttcaccgagatcagaggccctgtgacgatcgtgtcaggtaaaaagcgcagactcaccattattgaatgtgggtgtgacattaacatgatgattgatctggctaaagtagcagatctggtactgatgcttatagatgccagctttgggtttgaaatggaaatgtttgagtttctaaacatctgtcaagcacatggctttcctaaaattctgggagttctcacccacctcgactccttcaagcataacaagcaactgaagaagacaaagaagcgattaaaacacaggttctggacagaagtttaccaggttgccaaactgttctacctttctggaatggtgcatggagaatatcaaaaccaagaaatccacaatctgggccattttattacagttatgaagtttaggcctctcatggcaaacttttcacccttatatcctggcagacaggatggaagatttgacaaacccggaggatatccaaacaaacatcaaatgtgaccggcaggtgtcactttatggttatttaagaggagcacacttcaaagataaaagccaaattcacatgccaggacaaggtggggctcacccatgagctggtccagagtctcatctccacctactccaccattgatgccaagatggcttcaagtcgagtgacgctgctttccaattccaaaccacttgggtcagaggctatagataatcaagggtaagtctgctttttttctatttttaataaaaagatatattacagaaga

SEQ ID NO: 359108 - DNA, 1197 bp, Homo sapiens
tccgcgcgcacagcaggaccgtcattgacgccatgagcgcgctgctgcggctgctgcgcacgggtgccccagccgctgcgtgcctgcggttggggaccagtgcagggaccgggtcgcgccgtgctatggccctgtaccacactgaggagcgcggccagccctgctcgcagaattaccgcctcttctttaagaatgtaactggtcactacatttccccctttcatgatattcctctgaaggtgaactctaaagaggaaaatggcattcctatgaagaaagcacgaaatgatgaatatgagaatctgtttaatatgattgtagaaatacctcggtggacaaatgctaaaatggagattgccaccaaggagccaatgaatcccattaaacaatatgtaaaggatggaaagctacgctatgtggcgaatatcttcccttacaagggttatatatggaattatggtaccctccctcagacttgggaagatccccatgaaaaagataagagcacgaactgctttggagataatgatcctattgatgtttgcgaaataggctcaaagattctttcttgtggagaagttattcatgtgaagatccttggaattttggctcttattgatgaaggtgaaacagattggaaattaattgctatcaatgcgaatgatcctgaagcctcaaagtttcatgatattgatgatgttaagaagttcaaaccgggttacctggaagctactcttaattggtttagattatataaggtaccagatggaaaaccagaaaaccagtttgcttttaatggagaattcaaaaacaaggcttttgctcttgaagttattaaatccactcatcaatgttggaaagcattgcttatgaagaagtgtaatggaggagctataaattgcacaaacgtgcagatatctgatagccctttccgttgcactcaagaggaagcaagatcattagttgaatcggtatcatcttcaccaaataaagaaagtaatgaagaagagcaagtgtggcacttccttggcaagtgattgaaacatctgaaattctgctgtcaagattcccatctctaaggactccaagtgctagagacaagggggtctatgagcatttactgacttcctgttaaaacttcattttttcaaactttttgagctatgcaatatataaataaacagtaagaattttaaa

SEQ ID NO: 359109 - DNA, 1241 bp, Homo sapiens
tccgcgcgcacagcaggaccgtcattgacgccatgagcgcgctgctgcggctgctgcgcacgggtgccccagccgctgcgtgcctgcggttggggaccagtgcagggaccgggtcgcgccgtgctatggccctgtaccacactgaggagcgcggccagccctgctcgcagaattaccgcctcttctttaagaatgtaactggtcactacatttccccctttcatgatattcctctgaaggtgaactctaaagaggacactgaggctcaaggcatttttatagacttgtctaagatctggaaaatggcattcctatgaagaaagcacgaaatgatgaatatgagaatctgtttaatatgattgtagaaatacctcggtggacaaatgctaaaatggagattgccaccaaggagccaatgaatcccattaaacaatatgtaaaggatggaaagctacgctatgtggcgaatatcttcccttacaagggttatatatggaattatggtaccctccctcagacttgggaagatccccatgaaaaagataagagcacgaactgctttggagataatgatcctattgatgtttgcgaaataggctcaaagattctttcttgtggagaagttattcatgtgaagatccttggaattttggctcttattgatgaaggtgaaacagattggaaattaattgctatcaatgcgaatgatcctgaagcctcaaagtttcatgatattgatgatgttaagaagttcaaaccgggttacctggaagctactcttaattggtttagattatataaggtaccagatggaaaaccagaaaaccagtttgcttttaatggagaattcaaaaacaaggcttttgctcttgaagttattaaatccactcatcaatgttggaaagcattgcttatgaagaagtgtaatggaggagctataaattgcacaaacgtgcagatatctgatagccctttccgttgcactcaagaggaagcaagatcattagttgaatcggtatcatcttcaccaaataaagaaagtaatgaagaagagcaagtgtggcacttccttggcaagtgattgaaacatctgaaattctgctgtcaagattcccatctctaaggactccaagtgctagagacaagggggtctatgagcatttactgacttcctgttaaaacttcattttttcaaactttttgagctatgcaatatataaataaacagtaagaattttaaa

SEQ ID NO: 359110 - DNA, 745 bp, Homo sapiens
aactctgctatcgtagtactagagcagcataggccaaacacaagcaaatgtgactgttcagtaaaactttacagggggcagactggattttacccatagttcctagtttgccaacccctgatatagattatccctattatattctacttcatagatgaagaaattgaggcttagcaagcttaagtaacctgcccaaagtcacacagctgacaaataaggaagccagaatttataccaagctttgcctgactctggagctcatgctcttaacaattaactgtcatcacaagattagttttgtgttagtgtaacaatgtgactgatattaaatacgtctttttttatttgtttgtttggagctaggcttttgctcttgaagttattaaatccactcatcaatgttggaaagcattgcttatgaagaagtgtaatggaggagctataaattgcacaaacgtgcagatatctgatagccctttccgttgcactcaagaggaagcaagatcattagttgaatcggtatcatcttcaccaaataaagaaagtaatgaagaagagcaagtgtggcacttccttggcaagtgattgaaacatctgaaattctgctgtcaagattcccatctctaaggactccaagtgctagagacaagggggtctatgagcatttactgacttcctgttaaaacttcattttttcaaactttttgagctatgcaatatataaataaacagtaagaattttaaa

SEQ ID NO: 359111 - DNA, 1479 bp, Homo sapiens
tccgcgcgcacagcaggaccgtcattgacgccatgagcgcgctgctgcggctgctgcgcacgggtgccccagccgctgcgtgcctgcggttggggaccagtgcagggaccgggtcgcgccgtgctatggccctgtaccacactgaggagcgcggccagccctgctcgcagaattaccgcctcttctttaagaatgtaactggtcactacatttccccctttcatgatattcctctgaaggtgaactctaaagaggaaaatggcattcctatgaagaaagcacgaaatgatgaatatgagaatctgtttaatatgattgtagaaatacctcggtggacaaatgctaaaatggagattgccaccaaggagccaatgaatcccattaaacaatatgtaaaggatggaaagctacgctatgtggcgaatatcttcccttacaagggttatatatggaattatggtaccctccctcagacttgggaagatccccatgaaaaagataagagcacgaactgctttggagataatgatcctattgatgtttgcgaaataggctcaaagattctttcttgtggagaagttattcatgtgaagatccttggaattttggctcttattgatgaaggtgaaacagattggaaattaattgctatcaatgcgaatgatcctgaagcctcaaagtttcatggtctcagaaatattccagtatatacaataaatcgcatagtcatcctgccttcacttgacaggagccaaacttccagcctgtcctacctgcctgcacatcaggattcctgtgtgcccctggatgcagccctacatgttgttttgtatttttggtccctcttgggtctacaaagttacttatcttgtttttgagtctttttgatgttaatctgcttataaggtatctattttaggtaggttagcctgagggagtacattgtaacacgaatttagtgcccctcctgtcaaaaggtctctgttttttccgaagcagaatgctttggaaacttgaggagtctttttatttgctgataatttggttaatatgcttgaactcagtgaaaacctcatttcagaaataaatatttataagtacttcactcaagtaattctatttatatattccctctccattccaaatgtttaaaagaggggttaatttaacttcaacacagtggaaaaaaataaatttataagaactaaattgtaataatattagagataaaagtaaacgtgtctgttgttaaataagaaattaattacaaattcatttagggtctttactataagtgaaaaactatatgtgtatagcaaaaagttattaataagtatgcatgtgtatgtgtatatatgtatacctagatactttttatatatgttatttttagtctttgtgtttgtttataactatgcctacctacattgatttttcaggagcattatacaaattaaaataactgtcaatattaatgaa

SEQ ID NO: 359112 - DNA, 354 bp, Homo sapiens
atggcttctaagatataagagatcagatataccaatgaccctaactggggcgggttagcacaaacgtgcagatatctgatagccctttccgttgcactcaagaggaagcaagatcattagttgaatcggtatcatcttcaccaaataaagaaagtaatgaagaagagcaagtgtggcacttccttggcaagtgattgaaacatctgaaattctgctgtcaagattcccatctctaaggactccaagtgctagagacaagggggtctatgagcatttactgacttcctgttaaaacttcattttttcaaactttttgagctatgcaatatataaataaacagtaagaattttaaa

SEQ ID NO: 359113 - DNA, 460 bp, Homo sapiens
  misc_feature (453)..(453): n is a, c, g, or t
  misc_feature (455)..(459): n is a, c, g, or t
ctggcttaatttcttttaaagcatctttgatcattaagttgaaatatgaatgtttagtctgaaaatagcagatttttaaaagtactatttggacatagaattaattatttcttatcccatctccttttcttccttctgtgatttgcttagattgccaccaaggagccaatgaatcccattaaacaatatgtaaaggatggaaagctacgctatgtggcgaatatcttcccttacaagggttatatatggaattatggtaccctccctcaggtaacatttttgttacaatggtaaaatgttcctgtcttctgaaaaaattgccttataaatcctgtgaactactgaatttaaattggttctgaggacatgtcatttggagaggtttgtaaatttggaatttattaacgtggatggagttttagtatatcaataaattttgttttaaaccataanannnnna

SEQ ID NO: 359114 - DNA, 614 bp, Homo sapiens
gggaaagcaaactgtattccttatatggtaagctaacaaattgtttctttgcgatactatcccatttggggcattttttgtgtagtcaaattttacaatacaagctttatctaaacctttcatattatagcacttctatgttgtctgctagagactaaaatgacccagaaagatacaagaaataaagtaggaaggctctagaatttttaatgtagctttatataaggcttgggccaaatgagagaacttgggacgaaagtttgaagggaaatagctttaaatagagaaatgcaactttagatagcttatgactgtttgtatctgcctaaatacttcctaaaagtcgaaattaaatttgattaatcactcccttctccctcctcttatcccttccctaataccctctttccccattttaaatgcagagcaagtgtggcacttccttggcaagtgattgaaacatctgaaattctgctgtcaagattcccatctctaaggactccaagtgctagagacaagggggtctatgagcatttactgacttcctgttaaaacttcattttttcaaactttttgagctatgcaatatataaataaacagtaagaattttaaa

SEQ ID NO: 359115 - DNA, 781 bp, Homo sapiens
gggaaagcaaactgtattccttatatggtaagctaacaaattgtttctttgcgatactatcccatttggggcattttttgtgtagtcaaattttacaatacaagctttatctaaacctttcatattatagcacttctatgttgtctgctagagactaaaatgacccagaaagatacaagaaataaagtaggaaggctctagaatttttaatgtagctttatataaggcttgggccaaatgagagaacttgggacgaaagtttgaagggaaatagctttaaatagagaaatgcaactttagatagcttatgactgtttgtatctgcctaaatacttcctaaaagtcgaaattaaatttgattaatcactcccttctccctcctcttatcccttccctaataccctctttccccattttaaatgcagagcaagtgtggcacttccttggcaagtgattgaaacatctgaaattctgctgtcaagattcccatctctaaggactccaagtgctagagacaagggggtctatgagcatttactgacttcctgttaaaacttcattttttcaaactttttgagctatgcaatatataaataaacagtaagaattttaaattactctcctttggacatttattgatataaaaagaagattttggccaggcacggtggctcatgcctgtaatttcagcactttgggaggccgaggtgggcagatcacaaggtcaggagttcaagaccagcctggccagtatgttgaaaccccatctctattaaaaata

SEQ ID NO: 359116 - DNA, 1364 bp, Homo sapiens
tccgcgcgcacagcaggaccgtcattgacgccatgagcgcgctgctgcggctgctgcgcacgggtgccccagccgctgcgtgcctgcggttggggaccagtgcagggaccgggtcgcgccgtgctatggccctgtaccacactgaggagcgcggccagccctgctcgcagaattaccgcctcttctttaagaatgtaactggtcactacatttccccctttcatgatattcctctgaaggtgaactctaaagaggaaaatggcattcctatgaagaaagcacgaaatgatgaatatgagaatctgtttaatatgattgtagaaatacctcggtggacaaatgctaaaatggagattgccaccaaggagccaatgaatcccattaaacaatatgtaaaggatggaaagctacgctatgtggcgaatatcttcccttacaagggttatatatggaattatggtaccctccctcagacttgggaagatccccatgaaaaagataagagcacgaactgctttggagataatgatcctattgatgtttgcgaaataggctcaaagattctttcttgtggagaagttattcatgtgaagatccttggaattttggctcttattgatgaaggtgaaacagattggaaattaattgctatcaatgcgaatgatcctgaagcctcaaagtttcatgatattgatgatgttaagaagttcaaaccgggttacctggaagctactcttaattggtttagattatataaggtaccagatggaaaaccagaaaaccagtttgcttttaatggagaattcaaaaacaaggcttttgctcttgaagttattaaatccactcatcaatgttggaaagcattgcttatgaagaagtgtaatggaggagctataaattgcacaaacgtgcagatatctgatagccctttccgttgcactcaagaggaagcaagatcattagttgaatcggtatcatcttcaccaaataaagaaagtaatgaagaagagcaagtgtggcacttccttggcaagtgattgaaacatctgaaattctgctgtcaagattcccatctctaaggactccaagtgctagagacaagggggtctatgagcatttactgacttcctgttaaaacttcattttttcaaactttttgagctatgcaatatataaataaacagtaagaattttaaattactctcctttggacatttattgatataaaaagaagattttggccaggcacggtggctcatgcctgtaatttcagcactttgggaggccgaggtgggcagatcacaaggtcaggagttcaagaccagcctggccagtatgttgaaaccccatctctattaaaaata

SEQ ID NO: 359117 - DNA, 1627 bp, Homo sapiens
tccgcgcgcacagcaggaccgtcattgacgccatgagcgcgctgctgcggctgctgcgcacgggtgccccagccgctgcgtgcctgcggttggggaccagtgcagggaccgggtcgcgccgtgctatggccctgtaccacactgaggagcgcggccagccctgctcgcagaattaccgcctcttctttaagaatgtaactggtcactacatttccccctttcatgatattcctctgaaggtgaactctaaagaggaaaatggcattcctatgaagaaagcacgaaatgatgaatatgagaatctgtttaatatgattgtagaaatacctcggtggacaaatgctaaaatggagattgccaccaaggagccaatgaatcccattaaacaatatgtaaaggatggaaagctacgctatgtggcgaatatcttcccttacaagggttatatatggaattatggtaccctccctcagacttgggaagatccccatgaaaaagataagagcacgaactgctttggagataatgatcctattgatgtttgcgaaataggctcaaagattctttcttgtggagaagttattcatgtgaagatccttggaattttggctcttattgatgaaggtgaaacagattggaaattaattgctatcaatgcgaatgatcctgaagcctcaaagtttcatgatattgatgatgttaagaagttcaaaccgggttacctggaagctactcttaattggtttagattatataaggtaccagatggaaaaccagaaaaccagtttgcttttaatggagaattcaaaaacaaggcttttgctcttgaagttattaaatccactcatcaatgttggaaagcattgcttatgaagaagtgtaatggaggagctataaattgcacaaacgtgcagatatctgatagccctttccgttgcactcaagaggaagcaagatcattagttgaatcggtatcatcttcaccaaataaagaaagtaatgaagaagacagggtctcactcctgccacccagactgtagtgcagtggtgatcatggctcactgcagcctcggcttcctgaactcaggtgatcttctccctcagcctcacaagtagctggaactacagatactgcaacatggaagtggagtcaatacatactaatatagtggccaggcacacaggagccgtcacttgtagcatgtgagcacataaacaatttcaagtttatggtataactgaggccatgtggttacagacactctgactgctcctaattaatggctaaactgtacaattcagataatgaaatcatctcaagttattcacattagcaaatacaacttcttatcgcatgactgccaaacaggcattttgatgcccattttataaatgtaaaagtgcacgctgaactctcttcctttcaaccaaagattgggctttcctatcagtggccgcaaagaggggagaggccctgggcttcacttactctgcattcaaggcacaccggcgattggtgagcgtgccgtatttcctcagcgtctcggtaagctccgagtagagtttgtcagccagagacagcgggattccttcccacaccaggatgagaatcacaatcactgcagcc

SEQ ID NO: 359118 - DNA, 1566 bp, Homo sapiens
tccgcgcgcacagcaggaccgtcattgacgccatgagcgcgctgctgcggctgctgcgcacgggtgccccagccgctgcgtgcctgcggttggggaccagtgcagggaccgggtcgcgccgtgctatggccctgtaccacactgaggagcgcggccagccctgctcgcagaattaccgcctcttctttaagaatgtaactggtcactacatttccccctttcatgatattcctctgaaggtgaactctaaagaggaaaatggcattcctatgaagaaagcacgaaatgatgaatatgagaatctgtttaatatgattgtagaaatacctcggtggacaaatgctaaaatggagattgccaccaaggagccaatgaatcccattaaacaatatgtaaaggatggaaagctacgctatgtggcgaatatcttcccttacaagggttatatatggaattatggtaccctccctcagacttgggaagatccccatgaaaaagataagagcacgaactgctttggagataatgatcctattgatgtttgcgaaataggctcaaagattctttcttgtggagaagttattcatgtgaagatccttggaattttggctcttattgatgaaggtgaaacagattggaaattaattgctatcaatgcgaatgatcctgaagcctcaaagtttcatgatattgatgatgttaagaagttcaaaccgggttacctggaagctactcttaattggtttagattatataaggtaccagatggaaaaccagaaaaccagtttgcttttaatggagaattcaaaaacaaggcttttgctcttgaagttattaaatccactcatcaatgttggaaagcattgcttatgaagaagtgtaatggaggagctataaattgcacaaacgtgcagatatctgatagccctttccgttgcactcaagaggaagcaagatcattagttgaatcggtatcatcttcaccaaataaagaaagtaatgaagaagacagggtctcactcctgccacccagactgtagtgcagtggtgatcatggctcactgcagcctcggcttcctgaactcaggtgatcttctccctcagcctcacaagtagctggaactacagcaatgaatgaaggttcctgttgctccacattctcaccagcacttggtttcatcagtgttctgacttcagccattctaacaggtttgaactgcatggactgcttatatgtgaattttcttccacttctgccacccctggaacagcaagaccaacccatccttttcctcctcttcttcagcatactcaaggtgaagacaacaaaggatgaagatctttatgatgatctacttccatttaataaatagtactatattgtacattccactgtaaatgagcaaacattacactggcagcagggaccagcatcctttatcaagaggcagttgtagctcaagagttgcatcttggtagcatcaatacagaatttaaggattacagaagatatctcaaaagttctctatacttggaagaaaaataaagaacgatttgcacttcaaa

SEQ ID NO: 359119 - DNA, 1087 bp, Homo sapiens
tccgcgcgcacagcaggaccgtcattgacgccatgagcgcgctgctgcggctgctgcgcacgggtgccccagccgctgcgtgcctgcggttggggaccagtgcagggaccgggtcgcgccgtgctatggccctgtaccacactgaggagcgcggccagccctgctcgcagaattaccgcctcttctttaaatctgtttaatatgattgtagaaatacctcggtggacaaatgctaaaatggagattgccaccaaggagccaatgaatcccattaaacaatatgtaaaggatggaaagctacgctatgtggcgaatatcttcccttacaagggttatatatggaattatggtaccctccctcagacttgggaagatccccatgaaaaagataagagcacgaactgctttggagataatgatcctattgatgtttgcgaaataggctcaaagattctttcttgtggagaagttattcatgtgaagatccttggaattttggctcttattgatgaaggtgaaacagattggaaattaattgctatcaatgcgaatgatcctgaagcctcaaagtttcatgatattgatgatgttaagaagttcaaaccgggttacctggaagctactcttaattggtttagattatataaggtaccagatggaaaaccagaaaaccagtttgcttttaatggagaattcaaaaacaaggcttttgctcttgaagttattaaatccactcatcaatgttggaaagcattgcttatgaagaagtgtaatggaggagctataaattgcacaaacgtgcagatatctgatagccctttccgttgcactcaagaggaagcaagatcattagttgaatcggtatcatcttcaccaaataaagaaagtaatgaagaagagcaagtgtggcacttccttggcaagtgattgaaacatctgaaattctgctgtcaagattcccatctctaaggactccaagtgctagagacaagggggtctatgagcatttactgacttcctgttaaaacttcattttttcaaactttttgagctatgcaatatataaataaacagtaagaattttaaa

SEQ ID NO: 359120 - DNA, 1110 bp, Homo sapiens
tccgcgcgcacagcaggaccgtcattgacgccatgagcgcgctgctgcggctgctgcgcacgggtgccccagccgctgcgtgcctgcggttggggaccagtgcagggaccgggtcgcgccgtgctatggccctgtaccacactgaggagcgcggccagccctgctcgcagaattaccgcctcttctttaagaatgtaactggtcactacatttccccctttcatgatattcctctgaaggtgaactctaaagaggaaaatggcattcctatgaagaaagcacgaaatgatgaatatgagaatctgtttaatatgattgtagaaatacctcggtggacaaatgctaaaatggagattgccaccaaggagccaatgaatcccattaaacaatatgtaaaggatggaaagctacgctatgtggcgaatatcttcccttacaagggttatatatggaattatggtaccctccctcagattctttcttgtggagaagttattcatgtgaagatccttggaattttggctcttattgatgaaggtgaaacagattggaaattaattgctatcaatgcgaatgatcctgaagcctcaaagtttcatgatattgatgatgttaagaagttcaaaccgggttacctggaagctactcttaattggtttagattatataaggtaccagatggaaaaccagaaaaccagtttgcttttaatggagaattcaaaaacaaggcttttgctcttgaagttattaaatccactcatcaatgttggaaagcattgcttatgaagaagtgtaatggaggagctataaattgcacaaacgtgcagatatctgatagccctttccgttgcactcaagaggaagcaagatcattagttgaatcggtatcatcttcaccaaataaagaaagtaatgaagaagagcaagtgtggcacttccttggcaagtgattgaaacatctgaaattctgctgtcaagattcccatctctaaggactccaagtgctagagacaagggggtctatgagcatttactgacttcctgttaaaacttcattttttcaaactttttgagctatgcaatatataaataaacagtaagaattttaaa

SEQ ID NO: 359121 - DNA, 1000 bp, Homo sapiens
tccgcgcgcacagcaggaccgtcattgacgccatgagcgcgctgctgcggctgctgcgcacgggtgccccagccgctgcgtgcctgcggttggggaccagtgcagggaccgggtcgcgccgtgctatggccctgtaccacactgaggagcgcggccagccctgctcgcagaattaccgcctcttctttaaatctgtttaatatgattgtagaaatacctcggtggacaaatgctaaaatggagattgccaccaaggagccaatgaatcccattaaacaatatgtaaaggatggaaagctacgctatgtggcgaatatcttcccttacaagggttatatatggaattatggtaccctccctcagattctttcttgtggagaagttattcatgtgaagatccttggaattttggctcttattgatgaaggtgaaacagattggaaattaattgctatcaatgcgaatgatcctgaagcctcaaagtttcatgatattgatgatgttaagaagttcaaaccgggttacctggaagctactcttaattggtttagattatataaggtaccagatggaaaaccagaaaaccagtttgcttttaatggagaattcaaaaacaaggcttttgctcttgaagttattaaatccactcatcaatgttggaaagcattgcttatgaagaagtgtaatggaggagctataaattgcacaaacgtgcagatatctgatagccctttccgttgcactcaagaggaagcaagatcattagttgaatcggtatcatcttcaccaaataaagaaagtaatgaagaagagcaagtgtggcacttccttggcaagtgattgaaacatctgaaattctgctgtcaagattcccatctctaaggactccaagtgctagagacaagggggtctatgagcatttactgacttcctgttaaaacttcattttttcaaactttttgagctatgcaatatataaataaacagtaagaattttaaa

SEQ ID NO: 359122 - DNA, 842 bp, Homo sapiens
tttttttaaaattcttactgtttatttatatattgcatagctcaaaaagtttgaaaaaatgaagttttaacaggaagtcagtaaatgctcatagacccccttgtctctagcacttggagtccttagagatgggaatcttgacagcagaatttcagatgtttcaatcacttgccaaggaagtgccacacttgctcttcttcattacattctttcttgtggagaagttattcatgtgaagatccttggaattttggctcttattgatgaaggtgaaacagattggaaattaattgctatcaatgcgaatgatcctgaagcctcaaagtttcatgatattgatgatgttaagaagttcaaaccgggttacctggaagctactcttaattggtttagattatataaggtaccagatggaaaaccagaaaaccagtttgcttttaatggagaattcaaaaacaaggcttttgctcttgaagttattaaatccactcatcaatgttggaaagcattgcttatgaagaagtgtaatggaggagctataaattgcacaaacgtgcagatatctgatagccctttccgttgcactcaagaggaagcaagatcattagttgaatcggtatcatcttcaccaaataaagaaagtaatgaagaagagcaagtgtggcacttccttggcaagtgattgaaacatctgaaattctgctgtcaagattcccatctctaaggactccaagtgctagagacaagggggtctatgagcatttactgacttcctgttaaaacttcattttttcaaactttttgagctatgcaatatataaataaacagtaagaattttaaa

SEQ ID NO: 359123 - DNA, 891 bp, Homo sapiens
tccgcgcgcacagcaggaccgtcattgacgccatgagcgcgctgctgcggctgctgcgcacgggtgccccagccgctgcgtgcctgcggttggggaccagtgcagggaccgggtcgcgccgtgctatggccctgtaccacactgaggagcgcggccagccctgctcgcagaattaccgcctcttctttaagaatgtaactggtcactacatttccccctttcatgatattcctctgaaggtgaactctaaagagattctttcttgtggagaagttattcatgtgaagatccttggaattttggctcttattgatgaaggtgaaacagattggaaattaattgctatcaatgcgaatgatcctgaagcctcaaagtttcatgatattgatgatgttaagaagttcaaaccgggttacctggaagctactcttaattggtttagattatataaggtaccagatggaaaaccagaaaaccagtttgcttttaatggagaattcaaaaacaaggcttttgctcttgaagttattaaatccactcatcaatgttggaaagcattgcttatgaagaagtgtaatggaggagctataaattgcacaaacgtgcagatatctgatagccctttccgttgcactcaagaggaagcaagatcattagttgaatcggtatcatcttcaccaaataaagaaagtaatgaagaagagcaagtgtggcacttccttggcaagtgattgaaacatctgaaattctgctgtcaagattcccatctctaaggactccaagtgctagagacaagggggtctatgagcatttactgacttcctgttaaaacttcattttttcaaactttttgagctatgcaatatataaataaacagtaagaattttaaa

SEQ ID NO: 359124 - DNA, 984 bp, Homo sapiens
gttccttctaccttttcccctcttgtccagttagtgatgtacttctcacttttataatgctttcttttactccctcttctatgacattaccattgcttctgtttatctctgttaaaacctcattgcattttaattgcagtttatctatttgtctctttccctgagttaaaaactgagtatcttgatgaaaagaactttgttgtatccatccatttattccccatacatagcacattgtctgaagatgctttgtaaatgtttgtagagtgcaggaatagtattatacatatgaaaacacaaaagtctgaaggtgatatacatatcaatgatgatgctgctctaggtatcacaatcaattgtgcttctggttagactgggccccatgtttcctggctccctcagtccaatgctctgccactaaagggaattaattttggttcttaacaaaacatctttttgtttttttctttacagatattgatgatgttaagaagttcaaaccgggttacctggaagctactcttaattggtttagattatataaggtaccagatggaaaaccagaaaaccagtttgcttttaatggagaattcaaaaacaaggcttttgctcttgaagttattaaatccactcatcaatgttggaaagcattgcttatgaagaagtgtaatggaggagctataaattgcacaaacgtgcagatatctgatagccctttccgttgcactcaagaggaagcaagatcattagttgaatcggtatcatcttcaccaaataaagaaagtaatgaagaagagcaagtgtggcacttccttggcaagtgattgaaacatctgaaattctgctgtcaagattcccatctctaaggactccaagtgctagagacaagggggtctatgagcatttactgacttcctgttaaaacttcattttttcaaactttttgagctatgcaatatataaataaacagtaagaattttaaa

SEQ ID NO: 359125 - DNA, 1414 bp, Homo sapiens
gttccttctaccttttcccctcttgtccagttagtgatgtacttctcacttttataatgctttcttttactccctcttctatgacattaccattgcttctgtttatctctgttaaaacctcattgcattttaattgcagtttatctatttgtctctttccctgagttaaaaactgagtatcttgatgaaaagaactttgttgtatccatccatttattccccatacatagcacattgtctgaagatgctttgtaaatgtttgtagagtgcaggaatagtattatacatatgaaaacacaaaagtctgaaggtgatatacatatcaatgatgatgctgctctaggtatcacaatcaattgtgcttctggttagactgggccccatgtttcctggctccctcagtccaatgctctgccactaaagggaattaattttggttcttaacaaaacatctttttgtttttttctttacagatattgatgatgttaagaagttcaaaccgggttacctggaagctactcttaattggtttagattatataaggtaccagatggaaaaccagaaaaccagtttgcttttaatggagaattcaaaaacaaggcttttgctcttgaagttattaaatccactcatcaatgttggaaagcattgcttatgaagaagtgtaatggaggagctataaattgcacaaacgtgcagatatctgatagccctttccgttgcactcaagaggaagcaagatcattagttgaatcggtatcatcttcaccaaataaagaaagtaatgaagaagacagggtctcactcctgccacccagactgtagtgcagtggtgatcatggctcactgcagcctcggcttcctgaactcaggtgatcttctccctcagcctcacaagtagctggaactacagatactgcaacatggaagtggagtcaatacatactaatatagtggccaggcacacaggagccgtcacttgtagcatgtgagcacataaacaatttcaagtttatggtataactgaggccatgtggttacagacactctgactgctcctaattaatggctaaactgtacaattcagataatgaaatcatctcaagttattcacattagcaaatacaacttcttatcgcatgactgccaaacaggcattttgatgcccattttataaatgtaaaagtgcacgctgaactctcttcctttcaaccaaagattgggctttcctatcagtggccgcaaagaggggagaggccctgggcttcacttactctgcattcaaggcacaccggcgattggtgagcgtgccgtatttcctcagcgtctcggtaagctccgagtagagtttgtcagccagagacagcgggattccttcccacaccaggatgagaatcacaatcactgcagcc

SEQ ID NO: 359126 - DNA, 1080 bp, Homo sapiens
tccgcgcgcacagcaggaccgtcattgacgccatgagcgcgctgctgcggctgctgcgcacgggtgccccagccgctgcgtgcctgcggttggggaccagtgcagggaccgggtcgcgccgtgctatggccctgtaccacactgaggagcgcggccagccctgctcgcagaattaccgcctcttctttaggccctcagcggtagccgcgcggtccaggccaccttacttcccgcgggagcgcgcaccgagtcacgagaactgccagcgaggaggcggcggatcaagaccccaaagcggagagcagaggcgcagggctgccggctggggggtagatagcgccctgtgccctgccagccgccctccccgaggggtaggcagagtgcaagcggccaccccgcggcggcctgcagccattagccggcccggccgccgttcccggttcacacaactcagtgaggaagggaaggcagagcccgcccacacgccggccttcctagaggcgtaagaaacctcctactgcgggagctccctgacgtcggagaggcaggcggaactttgcggatgcctaatccagcgcgtcttctttttttggagggactctgatgaaggttctttccccagaagcttgacttgagaatgtaactggtcactacatttccccctttcatgatattcctctgaaggtgaactctaaagaggaaaatggcattcctatgaagaaagcacgaaatgatgaatatgagaatctgtttaatatgattgtagaaatacctcggtggacaaatgctaaaatggagattgccaccaaggagccaatgaatcccattaaacaatatgtaaaggatggaaagctacgctatgtggcgaatatcttcccttacaagggttatatatggaattatggtaccctccctcagacttgggaagatccccatgaaaaagataagagcacgaactgctttggagataatgatcctattgatgtttgcgaaataggctcaaagatcatctctgttaatgcccatgttagaatggagcagtctgggtgcagtggctcatgcctgtaatcccagcacttt

SEQ ID NO: 359127 - DNA, 216 bp, Homo sapiens
tgtttttgctacatacatatggaaggtatttgacctgggaatcccaaagtttctcattagacttactttctgtttcagatactgcaacatggaagtggagtcaatacatactaatatagtggccaggcacacaggagccgtcacttgtagcatgtgagcacataaacaatttcaagtttatggtataactgaggccatgtggttacagacactctg

SEQ ID NO: 359128 - DNA, 593 bp, Homo sapiens
atccacgcgtccggacccacgcgtccggttggaggaagatatggggaggtaggaaaatgggacttttttcctccatttactttatattgatgatgttaagaagttcaaaccgggttacctggaagctactcttaattggtttagattatataaggtaccagatggaaaaccagaaaaccagtttgcttttaatggagaattcaaaaacaaggcttttgctcttgaagttattaaatccactcatcaatgttggaaagcattgcttatgaagaagtgtaatggaggagctataaattgcacaaacgtgcagatatctgatagccctttccgttgcactcaagaggaagcaagatcattagttgaatcggtatcatcttcaccaaataaagaaagtaatgaagaagagcaagtgtggcacttccttggcaagtgattgaaacatctgaaattctgctgtcaagattcccatctctaaggactccaagtgctagagacaagggggtctatgagcatttactgacttcctgttaaaacttcattttttcaaactttttgagctatgcaatatataaataaacagtaagaattttaaa

SEQ ID NO: 359129 - DNA, 1513 bp, Homo sapiens
  misc_feature (1340)..(1340): n is a, c, g, or t
tccgcgcgcacagcaggaccgtcattgacgccatgagcgcgctgctgcggctgctgcgcacgggtgccccagccgctgcgtgcctgcggttggggaccagtgcagggaccgggtcgcgccgtgctatggccctgtaccacactgaggagcgcggccagccctgctcgcagaattaccgcctcttctttaagaatgtaactggtcactacatttccccctttcatgatattcctctgaaggtgaactctaaagaggaaaatggcattcctatgaagaaagcacgaaatgatgaatatgagaatctgtttaatatgattgtagaaatacctcggtggacaaatgctaaaatggagattgccaccaaggagccaatgaatcccattaaacaatatgtaaaggatggaaagctacgctatgtggcgaatatcttcccttacaagggttatatatggaattatggtaccctccctcagacttgggaagatccccatgaaaaagataagagcacgaactgctttggagataatgatcctattgatgtttgcgaaataggctcaaagattctttcttgtggagaagttattcatgtgaagatccttggaattttggctcttattgatgaaggtgaaacagattggaaattaattgctatcaatgcgaatgatcctgaagcctcaaagtttcatgatattgatgatgttaagaagttcaaaccgggttacctggaagctactcttaattggtttagattatataaggtaccagatggaaaaccagaaaaccagtttgcttttaatggagaattcaaaaacaaggcttttgctcttgaagttattaaatccactcatcaatgttggaaagcattgcttatgaagaagtgtaatggaggagctataaattgcacaaacgtgcagatatctgatagccctttccgttgcactcaagaggaagcaagatcattagttgaatcggtatcatcttcaccaaataaagaaagtaatgaagaagagcaagtgtggcacttccttggcaagtgattgaaacatctgaaattctgctgtcaagattcccatctctaaggactccaagtgctagagacaagggggtctatgagcatttactgacttcctgttaaaacttcattttttcaaactttttgagctatgcaatatataaataaacagtaagaattttaaaaaaaaaaaaaaaaaaaaaaaaaaaaatcggttgggcggcgcctctgcgccctctacgaaaaagcatttctcataagacccatccgtgttggggcgcggcgcgggcgccccagggtagcggtaaccgtgcgacactgggcgccnacaacgggcgggtgtcccaagagggagaacccgggcgccaagtgggacatagggggcgtggcagttctcccacccaataaaaaacaaccgcccggcggggacgaccggagcgcgtccttggcaccaattccagagtggagtcccggagagccatacagggggtccaatccaac

SEQ ID NO: 359130 - DNA, 1642 bp, Homo sapiens
tccgcgcgcacagcaggaccgtcattgacgccatgagcgcgctgctgcggctgctgcgcacgggtgccccagccgctgcgtgcctgcggttggggaccagtgcagggaccgggtcgcgccgtgctatggccctgtaccacactgaggagcgcggccagccctgctcgcagaattaccgcctcttctttaggccctcagcggtagccgcgcggtccaggccaccttacttcccgcgggagcgcgcaccgagtcacgagaactgccagcgaggaggcggcggatcaagaccccaaagcggagagcagaggcgcagggctgccggctggggggtagatagcgccctgtgccctgccagccgccctccccgaggggtaggcagagtgcaagcggccaccccgcggcggcctgcagccattagccggcccggccgccgttcccggttcacacaactcagtgaggaagggaaggcagagcccgcccacacgccggccttcctagaggcgtaagaaacctcctactgcgggagctccctgacgtcggagaggcaggcggaactttgcggatgcctaatccagcgcgtcttctttttttggagggactctgatgaaggttctttccccagaagcttgacttgagaatgtaactggtcactacatttccccctttcatgatattcctctgaaggtgaactctaaagaggaaaatggcattcctatgaagaaagcacgaaatgatgaatatgagaatctgtttaatatgattgtagaaatacctcggtggacaaatgctaaaatggagattgccaccaaggagccaatgaatcccattaaacaatatgtaaaggatggaaagctacgctatgtggcgaatatcttcccttacaagggttatatatggaattatggtaccctccctcagacttgggaagatccccatgaaaaagataagagcacgaactgctttggagataatgatcctattgatgtttgcgaaataggctcaaagattctttcttgtggagaagttattcatgtgaagatccttggaattttggctcttattgatgaaggtgaaacagattggaaattaattgctatcaatgcgaatgatcctgaagcctcaaagtttcatgatattgatgatgttaagaagttcaaaccgggttacctggaagctactcttaattggtttagattatataaggtaccagatggaaaaccagaaaaccagtttgcttttaatggagaattcaaaaacaaggcttttgctcttgaagttattaaatccactcatcaatgttggaaagcattgcttatgaagaagtgtaatggaggagctataaattgcacaaacgtgcagatatctgatagccctttccgttgcactcaagaggaagcaagatcattagttgaatcggtatcatcttcaccaaataaagaaagtaatgaagaagagcaagtgtggcacttccttggcaagtgattgaaacatctgaaattctgctgtcaagattcccatctctaaggactccaagtgctagagacaagggggtctatgagcatttactgacttcctgttaaaacttcattttttcaaactttttgagctatgcaatatataaataaacagtaagaattttaaa

SEQ ID NO: 359131 - DNA, 1132 bp, Homo sapiens
tccgcgcgcacagcaggaccgtcattgacgccatgagcgcgctgctgcggctgctgcgcacgggtgccccagccgctgcgtgcctgcggttggggaccagtgcagggaccgggtcgcgccgtgctatggccctgtaccacactgaggagcgcggccagccctgctcgcagaattaccgcctcttctttagaaaatggcattcctatgaagaaagcacgaaatgatgaatatgagaatctgtttaatatgattgtagaaatacctcggtggacaaatgctaaaatggagattgccaccaaggagccaatgaatcccattaaacaatatgtaaaggatggaaagctacgctatgtggcgaatatcttcccttacaagggttatatatggaattatggtaccctccctcagacttgggaagatccccatgaaaaagataagagcacgaactgctttggagataatgatcctattgatgtttgcgaaataggctcaaagattctttcttgtggagaagttattcatgtgaagatccttggaattttggctcttattgatgaaggtgaaacagattggaaattaattgctatcaatgcgaatgatcctgaagcctcaaagtttcatgatattgatgatgttaagaagttcaaaccgggttacctggaagctactcttaattggtttagattatataaggtaccagatggaaaaccagaaaaccagtttgcttttaatggagaattcaaaaacaaggcttttgctcttgaagttattaaatccactcatcaatgttggaaagcattgcttatgaagaagtgtaatggaggagctataaattgcacaaacgtgcagatatctgatagccctttccgttgcactcaagaggaagcaagatcattagttgaatcggtatcatcttcaccaaataaagaaagtaatgaagaagagcaagtgtggcacttccttggcaagtgattgaaacatctgaaattctgctgtcaagattcccatctctaaggactccaagtgctagagacaagggggtctatgagcatttactgacttcctgttaaaacttcattttttcaaactttttgagctatgcaatatataaataaacagtaagaattttaaa

SEQ ID NO: 359132 - DNA, 1143 bp, Homo sapiens
tccgcgcgcacagcaggaccgtcattgacgccatgagcgcgctgctgcggctgctgcgcacgggtgccccagccgctgcgtgcctgcggttggggaccagtgcagggaccgggtcgcgccgtgctatggccctgtaccacactgaggagcgcggccagccctgctcgcagaattaccgcctcttctttaagaatgtaactggtcactacatttccccctttcatgatattcctctgaaggtgaactctaaagaggaaaatggcattcctatgaagaaagcacgaaatgatgaatatgagattgccaccaaggagccaatgaatcccattaaacaatatgtaaaggatggaaagctacgctatgtggcgaatatcttcccttacaagggttatatatggaattatggtaccctccctcagacttgggaagatccccatgaaaaagataagagcacgaactgctttggagataatgatcctattgatgtttgcgaaataggctcaaagattctttcttgtggagaagttattcatgtgaagatccttggaattttggctcttattgatgaaggtgaaacagattggaaattaattgctatcaatgcgaatgatcctgaagcctcaaagtttcatgatattgatgatgttaagaagttcaaaccgggttacctggaagctactcttaattggtttagattatataaggtaccagatggaaaaccagaaaaccagtttgcttttaatggagaattcaaaaacaaggcttttgctcttgaagttattaaatccactcatcaatgttggaaagcattgcttatgaagaagtgtaatggaggagctataaattgcacaaacgtgcagatatctgatagccctttccgttgcactcaagaggaagcaagatcattagttgaatcggtatcatcttcaccaaataaagaaagtaatgaagaagagcaagtgtggcacttccttggcaagtgattgaaacatctgaaattctgctgtcaagattcccatctctaaggactccaagtgctagagacaagggggtctatgagcatttactgacttcctgttaaaacttcattttttcaaactttttgagctatgcaatatataaataaacagtaagaattttaaa

SEQ ID NO: 359133 - DNA, 2612 bp, Homo sapiens
tccgcgcgcacagcaggaccgtcattgacgccatgagcgcgctgctgcggctgctgcgcacgggtgccccagccgctgcgtgcctgcggttggggaccagtgcagggaccgggtcgcgccgtgctatggccctgtaccacactgaggagcgcggccagccctgctcgcagaattaccgcctcttctttaggccctcagcggtagccgcgcggtccaggccaccttacttcccgcgggagcgcgcaccgagtcacgagaactgccagcgaggaggcggcggatcaagaccccaaagcggagagcagaggcgcagggctgccggctggggggtagatagcgccctgtgccctgccagccgccctccccgaggggtaggcagagtgcaagcggccaccccgcggcggcctgcagccattagccggcccggccgccgttcccggttcacacaactcagtgaggaagggaaggcagagcccgcccacacgccggccttcctagaggcgtaagaaacctcctactgcgggagctccctgacgtcggagaggcaggcggaactttgcggatgcctaatccagcgcgtcttctttttttggagggactctgatgaaggttctttccccagaagcttgacttggtacgcacaagtttacaccctgagtgtgatccaccatccaaagcctcgttggttccggagcagccccttttcctccccaagctgaacaagcccagaaggctaagcgacttcgggggggtccctgagttgccgagctcagagaaaggacccaggtcttcgtgactcattgttccgtgtaccccattgtttcactgtgtacgttaaccgtaacagaaaatagcgatgtcggtcgcttgccttcactccccactgactgcagagccttggagtggtagtatcaaagtgggccttgcattatcgctccccttttcggagcactggctctggaggctttcagttctaagcaggccctcgagttcttcacgtcttaactctgtgaccccggacgagtttaagttgctaagccttgttttttctcatccgtaaaatagggctgcaagtattacatgacattatatatgtaaactgattagtcacagggcctaaaatataaattactattgttaataccgataatcattatagatatttgtaatttatgagagatttgcagttatgctacatgagtttagggtcgaggattattttgtgggaaagaagagtttgcctaaagtcgtgtgattataatgcaactagtactagaatttctattttcttcaaaattggttgcagttttcaccctatgccacatattttcttctatctttggttaagactgatcaggtgaacaggaagtctcaaatttctgaatggattatgttctaaaaggttaccatgtgatgattaatgggaatagtcagaaaaaattatgaagtggcagttcgctttttaagcagattgaaaaaaggcctgtctactgcaagtattctagatttgcaataagtacggtaattaatagatacccaaataataaatatttatgaagtgtgctagacactgttaggcatagtacagagattcacaatattactataattatggaaaaagtaaatacactggttgagcaaaaacaggcttgagaagccaggagcgcacagagtagttgacccagtaccggatttggaatggggagtcctaggccataatcttggctctgccgttaactcgctgtgtgctgttgggtgggtggttacttcagttctttctcacagagccagtttcttcagctgtaaaatgaagcttttgaccttgaaacgatgatcctcaaggtccttctcagcactggtattccctgaaggcattggatgaataacggagattctaacagtctctgttaagacaggatgtcgaatgggggcatttttgggagtatgttggcctcttattgttggtttgtttctttagctgcaaatgtacttaggactcatgatttttctgtaactagagtgccacaaataaaatacgtttttcattcagttggataaacagggcaggaaagaagaaaacccgattttactaaggtaaatgggcaaaaactggaagaaaggggagtgtggttttggagagggtcccgatggtaagatcctgattggaaggtgtgttggttaaacaatttctgaactaaccgccagatggcatcactggccaggactgtttactacctgctagaaggggtagggcaaagtgaaacgaagccactctagggcgaatggggtaaggggaaagcaacgaataaattgccctttataaagatgatcacagattggatatttattactcagtgtgtctgtatgcagtactagggtggactaatgtctcacttcaaaaaaaatatgagtgtagtatacttggcctaaaattgttactcagtgttactaaagtgtaatcattttccacatctccaaatatattccaagtctctgaaatactagtgcattgggaggtagaacattttcgagcttcatgtctgtaaatggtttctctttactgtcattcagtaaaatcagaataaatgattgatgtaatacttaaaaaaaaa

SEQ ID NO: 359134 - DNA, 699 bp, Homo sapiens
tccgcgcgcacagcaggaccgtcattgacgccatgagcgcgctgctgcggctgctgcgcacgggtgccccagccgctgcgtgcctgcggttggggaccagtgcagggaccgggtcgcgccgtgctatggccctgtaccacactgaggagcgcggccagccctgctcgcagaattaccgcctcttctttaagaatgtaactggtcactacatttccccctttcatgatattcctctgaaggtgaactctaaagaggaaaatggcattcctatgaagaaagcacgaaatgatgaatatgagaatctgtttaatatgattgtagaaatacctcggtggacaaatgctaaaatggagattgccaccaaggagccaatgaatcccattaaacaatatgtaaaggatggaaagctacgctatgtggcgaatatcttcccttacaagggttatatatggaattatggtaccctccctcaggtatcatcttcaccaaataaagaaagtaatgaagaagagcaagtgtggcacttccttggcaagtgattgaaacatctgaaattctgctgtcaagattcccatctctaaggactccaagtgctagagacaagggggtctatgagcatttactgacttcctgttaaaacttcattttttcaaactttttgagctatgcaatatataaataaacagtaagaattttaaa

SEQ ID NO: 359135 - DNA, 747 bp, Homo sapiens
tgcggttggggaccagtgcagggaccgggtcgcgccgtgctatggccctgtaccacactgaggagcgcggccagccctgctcgcagaattaccgcctcttctttagtaagtagctcccggaggttcgccgagcggcgcaccggagaaacctgggtgggggatggaatgggggacacttgggacgccccgcgcggtctcccttctctctttttggggccctcagcggtagccgcgcggtccaggccaccttacttcccgcgggagcgcgcaccgagtcacgagaactgccagcgaggaggcggcggatcaagaccccaaagcggagagcagaggcgcagggctgccggctggggggtagatagcgccctgtgccctgccagccgccctccccgaggggtaggcagagtgcaagcggccaccccgcggcggcctgcagccattagccggcccggccgccgttcccggttcacacaactcagtgaggaagggaaggcagagcccgcccacacgccggccttcctagaggcgtaagaaacctcctactgcgggagctccctgacgtcggagaggcaggcggaactttgcggatgcctaatccagcgcgtcttctttttttggagggactctgatgaaggttctttccccagaagcttgacttggtacgcacaagtttacaccctgagtgtgatccaccatccaaagcctcgttggttccggagcagccccttttcctccccaagctgaaca

SEQ ID NO: 359136 - DNA, 946 bp, Homo sapiens
gtaaagaacacattaacagcatcccagaaattcctcttgttccctgccattactgccctcactcttactcaaggaatctactatactgacttaaaaaaatagctttattgttatgtagttgatacacaataagccacacaatttataatttgataaattttggcatgagtatgtacctgtgaaactagcatcacaagcaagataatgaacacatctgtaagcccccagagttttcctgtgtatccttataatccctctctcccagctggcttcttcatttagcattaactattttgtagtttatgttgttgtgtgcatcagtatttcatttctttttattgctgtgtagtattccattgtatggatataccacagtttatccattttcctgttgatggacatgtgagttatttctgttttttgagtattataaataaagttgctataaacatttgtgtatggataagtggtttcattcctcttgggtaagtggaatggaatggctgaatcatttttaactttttaaataactgccaaactgtattccaaggagattgttcccaccagctgtgtatgtgagttctaggtgctacatgtcttcctcaacactagatatagtcttcttaatttttgatattgtgatagatgtgtagtagtatttattgtggttttaatttgtatttacctaatatctaatgatgctaagcatcattttcatgtgtttatttgccatctgtatatattctgtggtgaggtgtttgttcaaatattttattgatttttttttaaattgggttgtttggtttcttaatttttaaagaaacattattattaaagttttcaaacatatgtgaaagtagaacgaatgagcgtaacaaacttttttttttttttttttttttttcttttttgagacgcaatcgtcttgccctgtcatcacccaggc

SEQ ID NO: 359137 - DNA, 3097 bp, Homo sapiens
acgtcagcggaatgcgacctcatctttgtcagtgcacaaaatggcgccctacagcctactggtgactcggctgcagaaagctctgggtgtgcggcagtaccatgtggcctcagtcctgtgccaacgggccaaggtggcgatgagccactttgagcccaacgagtacatccattatgacctgctagagaagaacattaacattgttcgcaaacgactgaaccggccgctgacactctcggagaagattgtgtatggacacctggatgaccccgccagccaggaaattgagcgaggcaagtcgtacctgcggctgcggccggaccgtgtggccatgcaggatgcgacggcccagatggccatgctccagttcatcagcagcgggctgtccaaggtggctgtgccatccaccatccactgtgaccatctgattgaagcccaggttgggggcgagaaagacctgcgccgggccaaggacatcaaccaggaagtttataatttcctggcaactgcaggtgccaaatatggcgtgggcttctggaagcctggatctggaatcattcaccagattattctggaaaactatgcgtaccctggtgttcttctgattggcactgactcccacacccccaatggtggcggccttgggggcatctgcattggagttgggggtgccgatgctgtggatgtcatggctgggatcccctgggagctgaagtgccccaaggtgattggcgtgaagctgacgggctctctctccggttggtcctcacccaaagatgtgatcctgaaggtggcaggcatcctcacggtgaaaggtggcacaggtgcaatcgtggaataccacgggcctggtgtagactccatctcctgcactggcatggcgacaatctgcaacatgggtgcagaaattggggccaccacttccgtgttcccttacaaccacaggatgaagaagtacctgagcaagaccggccgggaagacattgccaatctagctgatgaattcaaggatcacttggtgcctgaccctggctgccattatgaccaactaattgaaattaacctcagtgagctgaagccacacatcaatgggcccttcacccctgacctggctcaccctgtggcagaagtgggcaaggtggcagagaaggaaggatggcctctggacatccgagtgggtctaattggtagctgcaccaattcaagctatgaagatatggggcgctcagcagctgtggccaagcaggcactggcccatggcctcaagtgcaagtcccagttcaccatcactccaggttccgagcagatccgcgccaccattgagcgggacggctatgcacagatcttgagggatctgggtggcattgtcctggccaatgcttgtggcccctgcattggccagtgggacaggaaggacatcaagaagggggagaagaacacaatcgtcacctcctacaacaggaacttcacgggccgcaacgacgcaaaccccgagacccatgcctttgtcacgtccccagagattgtcacagccctggccattgcgggaaccctcaagttcaacccagagaccgactacctgacgggcacggatggcaagaagttcaggctggaggctccggatgcagatgagcttcccaaaggggagtttgacccagggcaggacacctaccagcacccacccaaggacagcagcgggcagcatgtggacgtgagccccaccagccagcgcctgcagctcctggagccttttgacaagtgggatggcaaggacctggaggacctgcagatcctcatcaaggtcaaagggaagtgtaccactgaccacatctcagctgctggcccctggctcaagttccgtgggcacttggataacatctccaacaacctgctcattggtgccatcaacattgaaaacggcaaggccaactccgtgcgcaatgccgtcactcaggagtttggccccgtccctgacactgcccgctactacaagaaacatggcatcaggtgggtggtgatcggagacgagaactacggcgagggctcgagccgggagcatgcagctctggagcctcgccaccttgggggccgggccatcatcaccaagagctttgccaggatccacgagaccaacctgaagaaacagggcctgctgcctctgaccttcgctgacccggctgactacaacaagattcaccctgtggacaagctgaccattcagggcctgaaggacttcacccctggcaagcccctgaagtgcatcatcaagcaccccaacgggacccaggagaccatcctcctgaaccacaccttcaacgagacgcagattgagtggttccgcgctggcagtgccctcaacagaatgaaggaactgcaacagtgagggcagtgcctccccgccccgccgctggcgtcaagttcagctccacgtgtgccatcagtggatccgatccgtccagccatggcttcctattccaagatggtgtgaccagacatgcttcctgctccccgcttagcccacggagtgactgtggttgtggtgggggggttcttaaaataactttttagcccccgtcttcctattttgagtttggttcagatcttaagcagctccatgcaactgtatttatttttgatgacaagactcccatctaaagtttttctcctgcctgatcatttcattggtggctgaaggattctagagaaccttttgttcttgcaaggaaaacaagaatccaaaaccagtgactgttctgtgagtgattggtgtctgtgccgtttgttgtcaagtccagggtccaggaagggtcttttcagtcaaggtcagtggaggcccaacagccacagccacagatggatccatcactgcagtgaaggaggagcagggcctagatggtggaggagcggggcaagctggtgggcactcctggccttgcctcactgtccagctcgagacactatctccttagcatcggcctcagctgctgttgtcttcacagccggccataccaccttcccgcaggctggtagggtccactgttccagccccagggctagttgctggtccaccaggagagaaggcccaggcctggctcac

SEQ ID NO: 359138 - DNA, 3314 bp, Homo sapiens
acgtcagcggaatgcgacctcatctttgtcagtgcacaaaatggcgccctacagcctactggtgactcggctgcagaaagctctgggtgtgcggcagtaccatgtggcctcagtcctgtgccaacgggccaaggtggcgatgagccactttgagcccaacgagtacatccattatgacctgctagagaagaacattaacattgttcgcaaacgactgaaccggccgctgacactctcggagaagattgtgtatggacacctggatgaccccgccagccaggaaattgagcgaggcaagtcgtacctgcggctgcggccggaccgtgtggccatgcaggatgcgacggcccagatggccatgctccagttcatcagcagcgggctgtccaaggtggctgtgccatccaccatccactgtgaccatctgattgaagcccaggttgggggcgagaaagacctgcgccgggccaaggacatcaaccaggaagtttataatttcctggcaactgcaggtgccaaatatggcgtgggcttctggaagcctggatctggaatcattcaccagattattctggaaaactatgcgtaccctggtgttcttctgattggcactgactcccacacccccaatggtggcggccttgggggcatctgcattggagttgggggtgccgatgctgtggatgtcatggctgggatcccctgggagctgaagtgccccaaggtgattggcgtgaagctgacgggctctctctccggttggtcctcacccaaagatgtgatcctgaaggtggcaggcatcctcacggtgaaaggtggcacaggtgcaatcgtggaataccacgggcctggtgtagactccatctcctgcactggcatggcgacaatctgcaacatgggtgcagaaattggggccaccacttccgtgttcccttacaaccacaggatgaagaagtacctgagcaagaccggccgggaagacattgccaatctagctgatgaattcaaggatcacttggtgcctgaccctggctgccattatgaccaactaattgaaattaacctcagtgagctgaagccacacatcaatgggcccttcacccctgacctggctcaccctgtggcagaagtgggcaaggtggcagagaaggaaggatggcctctggacatccgagtgggtctaattggtagctgcaccaattcaagctatgaagatatggggcgctcagcagctgtggccaagcaggcactggcccatggcctcaagtgcaagtcccagttcaccatcactccaggttccgagcagatccgcgccaccattgagcgggacggctatgtgagtgcccatatccccctgcccatctcccccaccccatgctgagtaatgcctccaggcggcacaagcccagaggcctgttgggccggggctggggcaggtcccagtggctgccctggggttccagtacagcacttcgtcctgcagccaccacatcaccccttcccatcagactctcacccacccttgacattctgtcttcctctctccctggcaggcacagatcttgagggatctgggtggcattgtcctggccaatgcttgtggcccctgcattggccagtgggacaggaaggacatcaagaagggggagaagaacacaatcgtcacctcctacaacaggaacttcacgggccgcaacgacgcaaaccccgagacccatgcctttgtcacgtccccagagattgtcacagccctggccattgcgggaaccctcaagttcaacccagagaccgactacctgacgggcacggatggcaagaagttcaggctggaggctccggatgcagatgagcttcccaaaggggagtttgacccagggcaggacacctaccagcacccacccaaggacagcagcgggcagcatgtggacgtgagccccaccagccagcgcctgcagctcctggagccttttgacaagtgggatggcaaggacctggaggacctgcagatcctcatcaaggtcaaagggaagtgtaccactgaccacatctcagctgctggcccctggctcaagttccgtgggcacttggataacatctccaacaacctgctcattggtgccatcaacattgaaaacggcaaggccaactccgtgcgcaatgccgtcactcaggagtttggccccgtccctgacactgcccgctactacaagaaacatggcatcaggtgggtggtgatcggagacgagaactacggcgagggctcgagccgggagcatgcagctctggagcctcgccaccttgggggccgggccatcatcaccaagagctttgccaggatccacgagaccaacctgaagaaacagggcctgctgcctctgaccttcgctgacccggctgactacaacaagattcaccctgtggacaagctgaccattcagggcctgaaggacttcacccctggcaagcccctgaagtgcatcatcaagcaccccaacgggacccaggagaccatcctcctgaaccacaccttcaacgagacgcagattgagtggttccgcgctggcagtgccctcaacagaatgaaggaactgcaacagtgagggcagtgcctccccgccccgccgctggcgtcaagttcagctccacgtgtgccatcagtggatccgatccgtccagccatggcttcctattccaagatggtgtgaccagacatgcttcctgctccccgcttagcccacggagtgactgtggttgtggtgggggggttcttaaaataactttttagcccccgtcttcctattttgagtttggttcagatcttaagcagctccatgcaactgtatttatttttgatgacaagactcccatctaaagtttttctcctgcctgatcatttcattggtggctgaaggattctagagaaccttttgttcttgcaaggaaaacaagaatccaaaaccagtgactgttctgtgagtgattggtgtctgtgccgtttgttgtcaagtccagggtccaggaagggtcttttcagtcaaggtcagtggaggcccaacagccacagccacagatggatccatcactgcagtgaaggaggagcagggcctagatggtggaggagcggggcaagctggtgggcactcctggccttgcctcactgtccagctcgagacactatctccttagcatcggcctcagctgctgttgtcttcacagccggccataccaccttcccgcaggctggtagggtccactgttccagccccagggctagttgctggtccaccaggagagaaggcccaggcctggctcac

SEQ ID NO: 359139 - DNA, 2816 bp, Homo sapiens
acgtcagcggaatgcgacctcatctttgtcagtgcacaaaatggcgccctacagcctactggtgactcggctgcagaaagctctgggtgtgcggcagtaccatgtggcctcagtcctgtgccaacgggccaaggtggcgatgagccactttgagcccaacgagtacatccattatgacctgctagagaagaacattaacattgttcgcaaacgactgaaccggccgctgacactctcggagaagattgtgtatggacacctggatgaccccgccagccaggaaattgagcgaggcaagtcgtacctgcggctgcggccggaccgtgtggccatgcaggatgcgacggcccagatggccatgctccagttcatcagcagcgggctgtccaaggtggctgtgccatccaccatccactgtgaccatctgattgaagcccaggttgggggcgagaaagacctgcgccgggccaaggacatcaaccaggaagtttataatttcctggcaactgcaggtgccaaatatggcgtgggcttctggaagcctggatctggaatcattcaccagattattctggaaaactatgcgtaccctggtgttcttctgattggcactgactcccacacccccaatggtggcggccttgggggcatctgcattggagttgggggtgccgatgctgtggatgtcatggctgggatcccctgggagctgaagtgccccaaggtgattggcgtgaagctgacgggctctctctccggttggtcctcacccaaagatgtgatcctgaaggtggcaggcatcctcacggtgaaaggtggcacaggtgcaatcgtggaataccacgggcctggtgtagactccatctcctgcactggcatggcgacaatctgcaacatgggtgcagaaattggggccaccacttccgtgttcccttacaaccacaggatgaagaagtacctgagcaagaccggccgggaagacattgccaatctagctgatgaattcaaggatcacttggtgcctgaccctggctgccattatgaccaactaattgaaattaacctcagtgagctgaagccacacatcaatgggcccttcacccctgacctggctcaccctgtggcagaagtgggcaaggtggcagagaaggaaggatggcctctggacatccgagtgggtctaattggtagctgcaccaattcaagctatgaagatatggggcgctcagcagctgtggccaagcaggcactggcccatggcctcaagtgcaagtcccagttcaccatcactccaggttccgagcagatccgcgccaccattgagcgggacggctatgcacagatcttgagggatctgggtggcattgtcctggccaatgcttgtggcccctgcattggccagtgggacaggaaggacatcaagaagggggagaagaacacaatcgtcacctcctacaacaggaacttcacgggccgcaacgacgcaaaccccgagacccatgcctttgtcacgtccccagagattgtcacagccctggccattgcgggaaccctcaagttcaacccagagaccgactacctgacgggcacggatggcaagaagttcaggctggaggctccggatgcagatgagcttcccaaaggggagtttgacccagggcaggacacctaccagcacccacccaaggacagcagcgggcagcatgtggacgtgagccccaccagccagcgcctgcagctcctggagccttttgacaagtgggatggcaaggacctggaggacctgcagatcctcatcaaggtcaaagggaagtgtaccactgaccacatctcagctgctggcccctggctcaagttccgtgggcacttggataacatctccaacaacctgctcattggtgccatcaacattgaaaacggcaaggccaactccgtgcgcaatgccgtcactcaggagtttggccccgtccctgacactgcccgctactacaagaaacatggcatcaggtgggtggtgatcggagacgagaactacggcgagggctcgagccgggagcatgcagctctggagcctcgccaccttgggggccgggccatcatcaccaagagctttgccaggatccacgagaccaacctgaagaaacagggcctgctgcctctgaccttcgctgacccggctgactacaacaagattcaccctgtggacaagctgaccattcagggcctgaaggacttcacccctggcaagcccctgaagtgcatcatcaagcaccccaacgggacccaggagaccatcctcctgaaccacaccttcaacgagacgcagattgagtggttccgcgctggcagtgccctcaacagaatgaaggaactgcaacagtgagggcagtgcctccccgccccgccgctggcgtcaagttcagctccacgtgtgccatcagtggatccgatccgtccagccatggcttcctattccaagatggtgtgaccagacatgcttcctgctccccgcttagcccacggagtgactgtggttgtggtgggggggttcttaaaataactttttagcccccgtcttcctattttgagtttggttcagatcttaagcagctccatgcaactgtatttatttttgatgacaagactcccatctaaagtttttctcctgcctgatcatttcattggtggctgaaggattctagagaaccttttgttcttggccgccttggccacgtcgaattttagatgagccagcttatgcatgcggcccgaattgagcttatttggccattccgcctataggggtgggattacat

SEQ ID NO: 359140 - DNA, 3084 bp, Homo sapiens
atatcgtcgacccacgccgtcgcgaaatggcgccgtacagcctactggtgactccggctgcagaaagctctgggtgtgcggcagtaccatgtggcctcagtcctgtgccaacgggccaaggtggcgatgagccactttgagcccaacgagtacatccattatgacctgctagagaagaacattaacattgttcgcaaacgactgaaccggccgctgacactctcggagaagattgtgtatggacacctggatgaccccgccagccaggaaattgagcgaggcaagtcgtacctgcggctgcggccggaccgtgtggccatgcaggatgcgacggcccagatggccatgctccagttcatcagcagcgggctgtccaaggtggctgtgccatccaccatccactgtgaccatctgattgaagcccaggttgggggcgagaaagacctgcgccgggccaaggacatcaaccaggaagtttataatttcctggcaactgcaggtgccaaatatggcgtgggcttctggaagcctggatctggaatcattcaccagattattctggaaaactatgcgtaccctggtgttcttctgattggcactgactcccacacccccaatggtggcggccttgggggcatctgcattggagttgggggtgccgatgctgtggatgtcatggctgggatcccctgggagctgaagtgccccaaggtgattggcgtgaagctgacgggctctctctccggttggtcctcacccaaagatgtgatcctgaaggtggcaggcatcctcacggtgaaaggtggcacaggtgcaatcgtggaataccacgggcctggtgtagactccatctcctgcactggcatggcgacaatctgcaacatgggtgcagaaattggggccaccacttccgtgttcccttacaaccacaggatgaagaagtacctgagcaagaccggccgggaagacattgccaatctagctgatgaattcaaggatcacttggtgcctgaccctggctgccattatgaccaactaattgaaattaacctcagtgagctgaagccacacatcaatgggcccttcacccctgacctggctcaccctgtggcagaagtgggcaaggtggcagagaaggaaggatggcctctggacatccgagtgggtctaattggtagctgcaccaattcaagctatgaagatatggggcgctcagcagctgtggccaagcaggcactggcccatggcctcaagtgcaagtcccagttcaccatcactccaggttccgagcagatccgcgccaccattgagcgggacggctatgcacagatcttgagggatctgggtggcattgtcctggccaatgcttgtggcccctgcattggccagtgggacaggaaggacatcaagaagggggagaagaacacaatcgtcacctcctacaacaggaacttcacgggccgcaacgacgcaaaccccgagacccatgcctttgtcacgtccccagagattgtcacagccctggccattgcgggaaccctcaagttcaacccagagaccgactacctgacgggcacggatggcaagaagttcaggctggaggctccggatgcagatgagcttcccaaaggggagtttgacccagggcaggacacctaccagcacccacccaaggacagcagcgggcagcatgtggacgtgagccccaccagccagcgcctgcagctcctggagccttttgacaagtgggatggcaaggacctggaggacctgcagatcctcatcaaggtcaaagggaagtgtaccactgaccacatctcagctgctggcccctggctcaagttccgtgggcacttggataacatctccaacaacctgctcattggtgccatcaacattgaaaacggcaaggccaactccgtgcgcaatgccgtcactcaggagtttggccccgtccctgacactgcccgctactacaagaaacatggcatcaggtgggtggtgatcggagacgagaactacggcgagggctcgagccgggagcatgcagctctggagcctcgccaccttgggggccgggccatcatcaccaagagctttgccaggatccacgagaccaacctgaagaaacagggcctgctgcctctgaccttcgctgacccggctgactacaacaagattcaccctgtggacaagctgaccattcagggcctgaaggacttcacccctggcaagcccctgaagtgcatcatcaagcaccccaacgggacccaggagaccatcctcctgaaccacaccttcaacgagacgcagattgagtggttccgcgctggcagtgccctcaacagaatgaaggaactgcaacagtgagggcagtgcctccccgccccgccgctggcgtcaagttcagctccacgtgtgccatcagtggatccgatccgtccagccatggcttcctattccaagatggtgtgaccagacatgcttcctgctccccgcttagcccacggagtgactgtggttgtggtgggggggttcttaaaataactttttagcccccgtcttcctattttgagtttggttcagatcttaagcagctccatgcaactgtatttatttttgatgacaagactcccatctaaagtttttctcctgcctgatcatttcattggtggctgaaggattctagagaaccttttgttcttgcaaggaaaacaagaatccaaaaccagtgactgttctgtgagtgattggtgtctgtgccgtttgttgtcaagtccagggtccaggaagggtcttttcagtcaaggtcagtggaggcccaacagccacagccacagatggatccatcactgcagtgaaggaggagcagggcctagatggtggaggagcggggcaagctggtgggcactcctggccttgcctcactgtccagctcgagacactatctccttagcatcggcctcagctgctgttgtcttcacagccggccataccaccttcccgcaggctggtagggtccactgttccagccccagggctagttgctggtccaccaggagagaaggcccaggcctggctcac

SEQ ID NO: 359141 - DNA, 2236 bp, Homo sapiens
atatcgtcatagctgactctagagtataccctgctgatccgcaagactgcttggcaccacttccgtgttcccttacaaccacaggatgaagaagtacctgagcaagaccggccgggaagacattgccaatctagctgatgaattcaaggatcacttggtgcctgaccctggctgccattatgaccaactaattgaaattaacctcagtgagctgaagccacacatcaatgggcccttcacccctgacctggctcaccctgtggcagaagtgggcaaggtggcagagaaggaaggatggcctctggacatccgagtgggtctaattggtagctgcaccaattcaagctatgaagatatggggcgctcagcagctgtggccaagcaggcactggcccatggcctcaagtgcaagtcccagttcaccatcactccaggttccgagcagatccgcgccaccattgagcgggacggctatgcacagatcttgagggatctgggtggcattgtcctggccaatgcttgtggcccctgcattggccagtgggacaggaaggacatcaagaagggggagaagaacacaatcgtcacctcctacaacaggaacttcacgggccgcaacgacgcaaaccccgagacccatgcctttgtcacgtccccagagattgtcacagccctggccattgcgggaaccctcaagttcaacccagagaccgactacctgacgggcacggatggcaagaagttcaggctggaggctccggatgcagatgagcttcccaaaggggagtttgacccagggcaggacacctaccagcacccacccaaggacagcagcgggcagcatgtggacgtgagccccaccagccagcgcctgcagctcctggagccttttgacaagtgggatggcaaggacctggaggacctgcagatcctcatcaaggtcaaagggaagtgtaccactgaccacatctcagctgctggcccctggctcaagttccgtgggcacttggataacatctccaacaacctgctcattggtgccatcaacattgaaaacggcaaggccaactccgtgcgcaatgccgtcactcaggagtttggccccgtccctgacactgcccgctactacaagaaacatggcatcaggtgggtggtgatcggagacgagaactacggcgagggctcgagccgggagcatgcagctctggagcctcgccaccttgggggccgggccatcatcaccaagagctttgccaggatccacgagaccaacctgaagaaacagggcctgctgcctctgaccttcgctgacccggctgactacaacaagattcaccctgtggacaagctgaccattcagggcctgaaggacttcacccctggcaagcccctgaagtgcatcatcaagcaccccaacgggacccaggagaccatcctcctgaaccacaccttcaacgagacgcagattgagtggttccgcgctggcagtgccctcaacagaatgaaggaactgcaacagtgagggcagtgcctccccgccccgccgctggcgtcaagttcagctccacgtgtgccatcagtggatccgatccgtccagccatggcttcctattccaagatggtgtgaccagacatgcttcctgctccccgcttagcccacggagtgactgtggttgtggtgggggggttcttaaaataactttttagcccccgtcttcctattttgagtttggttcagatcttaagcagctccatgcaactgtatttatttttgatgacaagactcccatctaaagtttttctcctgcctgatcatttcattggtggctgaaggattctagagaaccttttgttcttgcaaggaaaacaagaatccaaaaccagtgactgttctgtgagtgattggtgtctgtgccgtttgttgtcaagtccagggtccaggaagggtcttttcagtcaaggtcagtggaggcccaacagccacagccacagatggatccatcactgcagtgaaggaggagcagggcctagatggtggaggagcggggcaagctggtgggcactcctggccttgcctcactgtccagctcgagacactatctccttagcatcggcctcagctgctgttgtcttcacagccggccataccaccttcccgcaggctggtagggtccactgttccagccccagggctagttgctggtccaccaggagagaaggcccaggcctggctcac

SEQ ID NO: 359142 - DNA, 2058 bp, Homo sapiens
attcggcacaggattgaaattaacctcagtgagctgaagccacacatcaatgggcccttcacccctgacctggctcaccctgtggcagaagtgggcaaggtggcagagaaggaaggatggcctctggacatccgagtgggtctaattggtagctgcaccaattcaagctatgaagatatggggcgctcagcagctgtggccaagcaggcactggcccatggcctcaagtgcaagtcccagttcaccatcactccaggttccgagcagatccgcgccaccattgagcgggacggctatgcacagatcttgagggatctgggtggcattgtcctggccaatgcttgtggcccctgcattggccagtgggacaggaaggacatcaagaagggggagaagaacacaatcgtcacctcctacaacaggaacttcacgggccgcaacgacgcaaaccccgagacccatgcctttgtcacgtccccagagattgtcacagccctggccattgcgggaaccctcaagttcaacccagagaccgactacctgacgggcacggatggcaagaagttcaggctggaggctccggatgcagatgagcttcccaaaggggagtttgacccagggcaggacacctaccagcacccacccaaggacagcagcgggcagcatgtggacgtgagccccaccagccagcgcctgcagctcctggagccttttgacaagtgggatggcaaggacctggaggacctgcagatcctcatcaaggtcaaagggaagtgtaccactgaccacatctcagctgctggcccctggctcaagttccgtgggcacttggataacatctccaacaacctgctcattggtgccatcaacattgaaaacggcaaggccaactccgtgcgcaatgccgtcactcaggagtttggccccgtccctgacactgcccgctactacaagaaacatggcatcaggtgggtggtgatcggagacgagaactacggcgagggctcgagccgggagcatgcagctctggagcctcgccaccttgggggccgggccatcatcaccaagagctttgccaggatccacgagaccaacctgaagaaacagggcctgctgcctctgaccttcgctgacccggctgactacaacaagattcaccctgtggacaagctgaccattcagggcctgaaggacttcacccctggcaagcccctgaagtgcatcatcaagcaccccaacgggacccaggagaccatcctcctgaaccacaccttcaacgagacgcagattgagtggttccgcgctggcagtgccctcaacagaatgaaggaactgcaacagtgagggcagtgcctccccgccccgccgctggcgtcaagttcagctccacgtgtgccatcagtggatccgatccgtccagccatggcttcctattccaagatggtgtgaccagacatgcttcctgctccccgcttagcccacggagtgactgtggttgtggtgggggggttcttaaaataactttttagcccccgtcttcctattttgagtttggttcagatcttaagcagctccatgcaactgtatttatttttgatgacaagactcccatctaaagtttttctcctgcctgatcatttcattggtggctgaaggattctagagaaccttttgttcttgcaaggaaaacaagaatccaaaaccagtgactgttctgtgagtgattggtgtctgtgccgtttgttgtcaagtccagggtccaggaagggtcttttcagtcaaggtcagtggaggcccaacagccacagccacagatggatccatcactgcagtgaaggaggagcagggcctagatggtggaggagcggggcaagctggtgggcactcctggccttgcctcactgtccagctcgagacactatctccttagcatcggcctcagctgctgttgtcttcacagccggccataccaccttcccgcaggctggtagggtccactgttccagccccagggctagttgctggtccaccaggagagaaggcccaggcctggctcac

SEQ ID NO: 359143 - DNA, 2549 bp, Homo sapiens
tactcacctgtgggtcccagctactcaggaagttgaggcaggaggagttgcttgagccccaggagttagagactgcagtgagcaagcctcgactgtgcccttgcactccagcctgggcgacagagcaagaccccatctcaacaacaacaaaaagagactgtctagacagaaagtgcgatgttattcaggttttatagactttttaaaaagaactcttattgccctgattataaaacaatctttaaaacccagaaaatactagaaagtataaaagaagaaaattagcatctcctgtcagccccagcccatcaaggatggctgttcgtatgagccctctgacgtgcctacacgtgtacatgatattgctgtaaaaggggtcatagtcctaatgtgttcagcatcatggccaatggctacagcatctttcttcaaatgacgccacgtcatgagttagcctgtcctttattgttggatatttcggttgcttgcaactggtctctgttaaaaaagtctctggcccagcccagatggtgaactcttttggccaagtctggataatttgaagtcaggtggagacctctgctcactgtctcctcctgacccttaaccccaccacccacaatgcaccaggtctaattggtagctgcaccaattcaagctatgaagatatggggcgctcagcagctgtggccaagcaggcactggcccatggcctcaagtgcaagtcccagttcaccatcactccaggttccgagcagatccgcgccaccattgagcgggacggctatgcacagatcttgagggatctgggtggcattgtcctggccaatgcttgtggcccctgcattggccagtgggacaggaaggacatcaagaagggggagaagaacacaatcgtcacctcctacaacaggaacttcacgggccgcaacgacgcaaaccccgagacccatgcctttgtcacgtccccagagattgtcacagccctggccattgcgggaaccctcaagttcaacccagagaccgactacctgacgggcacggatggcaagaagttcaggctggaggctccggatgcagatgagcttcccaaaggggagtttgacccagggcaggacacctaccagcacccacccaaggacagcagcgggcagcatgtggacgtgagccccaccagccagcgcctgcagctcctggagccttttgacaagtgggatggcaaggacctggaggacctgcagatcctcatcaaggtcaaagggaagtgtaccactgaccacatctcagctgctggcccctggctcaagttccgtgggcacttggataacatctccaacaacctgctcattggtgccatcaacattgaaaacggcaaggccaactccgtgcgcaatgccgtcactcaggagtttggccccgtccctgacactgcccgctactacaagaaacatggcatcaggtgggtggtgatcggagacgagaactacggcgagggctcgagccgggagcatgcagctctggagcctcgccaccttgggggccgggccatcatcaccaagagctttgccaggatccacgagaccaacctgaagaaacagggcctgctgcctctgaccttcgctgacccggctgactacaacaagattcaccctgtggacaagctgaccattcagggcctgaaggacttcacccctggcaagcccctgaagtgcatcatcaagcaccccaacgggacccaggagaccatcctcctgaaccacaccttcaacgagacgcagattgagtggttccgcgctggcagtgccctcaacagaatgaaggaactgcaacagtgagggcagtgcctccccgccccgccgctggcgtcaagttcagctccacgtgtgccatcagtggatccgatccgtccagccatggcttcctattccaagatggtgtgaccagacatgcttcctgctccccgcttagcccacggagtgactgtggttgtggtgggggggttcttaaaataactttttagcccccgtcttcctattttgagtttggttcagatcttaagcagctccatgcaactgtatttatttttgatgacaagactcccatctaaagtttttctcctgcctgatcatttcattggtggctgaaggattctagagaaccttttgttcttgcaaggaaaacaagaatccaaaaccagtgactgttctgtgagtgattggtgtctgtgccgtttgttgtcaagtccagggtccaggaagggtcttttcagtcaaggtcagtggaggcccaacagccacagccacagatggatccatcactgcagtgaaggaggagcagggcctagatggtggaggagcggggcaagctggtgggcactcctggccttgcctcactgtccagctcgagacactatctccttagcatcggcctcagctgctgttgtcttcacagccggccataccaccttcccgcaggctggtagggtccactgttccagccccagggctagttgctggtccaccaggagagaaggcccaggcctggctcac

SEQ ID NO: 359144 - DNA, 3317 bp, Homo sapiens
tactcacctgtgggtcccagctactcaggaagttgaggcaggaggagttgcttgagccccaggagttagagactgcagtgagcaagcctcgactgtgcccttgcactccagcctgggcgacagagcaagaccccatctcaacaacaacaaaaagagactgtctagacagaaagtgcgatgttattcaggttttatagactttttaaaaagaactcttattgccctgattataaaacaatctttaaaacccagaaaatactagaaagtataaaagaagaaaattagcatctcctgtcagccccagcccatcaaggatggctgttcgtatgagccctctgacgtgcctacacgtgtacatgatattgctgtaaaaggggtcatagtcctaatgtgttcagcatcatggccaatggctacagcatctttcttcaaatgacgccacgtcatgagttagcctgtcctttattgttggatatttcggttgcttgcaactggtctctgttaaaaaagtctctggcccagcccagatggtgaactcttttggccaagtctggataatttgaagtcaggtggagacctctgctcactgtctcctcctgacccttaaccccaccacccacaatgcaccaggtctaattggtagctgcaccaattcaagctatgaagatatggggcgctcagcagctgtggccaagcaggcactggcccatggcctcaagtgcaagtcccagttcaccatcactccaggttccgagcagatccgcgccaccattgagcgggacggctatgtgagtgcccatatccccctgcccatctcccccaccccatgctgagtaatgcctccaggcggcacaagcccagaggcctgttgggccggggctggggcaggtcccagtggctgccctggggttccagtacagcacttcgtcctgcagccaccacatcaccccttcccatcagactctcacccacccttgacattctgtcttcctctctccctggcaggcacagatcttgagggatctgggtggcattgtcctggccaatgcttgtggcccctgcattggccagtgggacaggtaagaggcgtatcttttgacaagacagccccttgtgcacagggtacagagccccagaagttggagggggaattattggggtggagagaagagactccagccaaggtctctagctccagggactcttgcccattagaagcctctggcagacatgcctgggaagaggggctgggtgaggaagggccctgcagaggcactggggggcaacttggctgaagcctgggctggcaggaggaagccagcgcggcctcaccctgacggacacagcaggagccgtttgggaggaggcagtgccccaggtcaggaaactcaggccttgaccaaggccttgcctctggcttacgtgtggttgcaggctgggcccagtgatcctgaggttcccttctgctctgcgcgtggccccaggaggaggcaaccctggcagggcctcttcattttccctcggtaggagctaggctgggctgcgccacaggaacccagcttatctgtcctcgggacaggccaggtgacaaggccagatatccctaaccctgatccctctgacctggcaggaaggacatcaagaagggggagaagaacacaatcgtcacctcctacaacaggaacttcacgggccgcaacgacgcaaaccccgagacccatgcctttgtcacgtccccagagattgtcacagccctggccattgcgggaaccctcaagttcaacccagagaccgactacctgacgggcacggatggcaagaagttcaggctggaggctccggatgcagatgagcttcccaaaggggagtttgacccagggcaggacacctaccagcacccacccaaggacagcagcgggcagcatgtggacgtgagccccaccagccagcgcctgcagctcctggagccttttgacaagtgggatggcaaggacctggaggacctgcagatcctcatcaaggtcaaagggaagtgtaccactgaccacatctcagctgctggcccctggctcaagttccgtgggcacttggataacatctccaacaacctgctcattggtgccatcaacattgaaaacggcaaggccaactccgtgcgcaatgccgtcactcaggagtttggccccgtccctgacactgcccgctactacaagaaacatggcatcaggtgggtggtgatcggagacgagaactacggcgagggctcgagccgggagcatgcagctctggagcctcgccaccttgggggccgggccatcatcaccaagagctttgccaggatccacgagaccaacctgaagaaacagggcctgctgcctctgaccttcgctgacccggctgactacaacaagattcaccctgtggacaagctgaccattcagggcctgaaggacttcacccctggcaagcccctgaagtgcatcatcaagcaccccaacgggacccaggagaccatcctcctgaaccacaccttcaacgagacgcagattgagtggttccgcgctggcagtgccctcaacagaatgaaggaactgcaacagtgagggcagtgcctccccgccccgccgctggcgtcaagttcagctccacgtgtgccatcagtggatccgatccgtccagccatggcttcctattccaagatggtgtgaccagacatgcttcctgctccccgcttagcccacggagtgactgtggttgtggtgggggggttcttaaaataactttttagcccccgtcttcctattttgagtttggttcagatcttaagcagctccatgcaactgtatttatttttgatgacaagactcccatctaaagtttttctcctgcctgatcatttcattggtggctgaaggattctagagaaccttttgttcttgcaaggaaaacaagaatccaaaaccagtgactgttctgtgagtgattggtgtctgtgccgtttgttgtcaagtccagggtccaggaagggtcttttcagtcaaggtcagtggaggcccaacagccacagccacagatggatccatcactgcagtgaaggaggagcagggcctagatggtggaggagcggggcaagctggtgggcactcctggccttgcctcactgtccagctcgagacactatctccttagcatcggcctcagctgctgttgtcttcacagccggccataccaccttcccgcaggctggtagggtccactgttccagccccagggctagttgctggtccaccaggagagaaggcccaggcctggctcac

SEQ ID NO: 359145 - DNA, 2596 bp, Homo sapiens
acgtcagcggaatgcgacctcatctttgtcagtgcacaaaatggcgccctacagcctactggtgactcggctgcagaaagctctgggtgtgcggcagtaccatgtggcctcagtcctgtgccaacgggccaaggtggcgatgagccactttgagcccaacgagtacatccattatgacctgctagagaagaacattaacattgttcgcaaacgactgaaccggccgctgacactctcggagaagattgtgtatggacacctggatgaccccgccagccaggaaattgagcgaggcaagtcgtacctgcggctgcggccggaccgtgtggccatgcaggatgcgacggcccagatggccatgctccagttcatcagcagcgggctgtccaaggtggctgtgccatccaccatccactgtgaccatctgattgaagcccaggttgggggcgagaaagacctgcgccgggccaaggacatcaaccaggaagtttataatttcctggcaactgcaggtgccaaatatggcgtgggcttctggaagcctggatctggaatcattcaccagattattctggaaaactatgcgtaccctggtgttcttctgattggcactgactcccacacccccaatggtggcggccttgggggcatctgcattggagttgggggtgccgatgctgtggatgtcatggctgggatcccctgggagctgaagtgccccaaggtgattggcgtgaagctgacgggctctctctccggttggtcctcacccaaagatgtgatcctgaaggtggcaggcatcctcacggtgaaaggtggcacaggtgcaatcgtggaataccacgggcctggtgtagactccatctcctgcactggcatggcgacaatctgcaacatgggtgcagaaattggggccaccacttccgtgttcccttacaaccacaggatgaagaagtacctgagcaagaccggccgggaagacattgccaatctagctgatgaattcaaggatcacttggtgcctgaccctggctgccattatgaccaactaattgaaattaacctcagtgagctgaagccacacatcaatgggcccttcacccctgacctggctcaccctgtggcagaagtgggcaaggtggcagagaaggaaggatggcctctggacatccgagtgggtctaattggtagctgcaccaattcaagctatgaagatatggggcgctcagcagctgtggccaagcaggcactggcccatggcctcaagtgcaagtcccagttcaccatcactccaggttccgagcagatccgcgccaccattgagcgggacggctatgcacagatcttgagggatctgggtggcattgtcctggccaatgcttgtggcccctgcattggccagtgggacaggaaggacatcaagaagggggagaagaacacaatcgtcacctcctacaacaggaacttcacgggccgcaacgacgcaaaccccgagacccatgcctttgtcacgtccccagagattgtcacagccctggccattgcgggaaccctcaagttcaacccagagaccgactacctgacgggcacggatggcaagaagttcaggctggaggctccggatgcagatgagcttcccaaaggggagtttgacccagggcaggacacctaccagcacccacccaaggacagcagcgggcagcatgtggacgtgagccccaccagccagcgcctgcagctcctggagccttttgacaagtgggatggcaaggacctggaggacctgcagatcctcatcaaggtcaaagggaagtgtaccactgaccacatctcagctgctggcccctggctcaagttccgtgggcacttggataacatctccaacaacctgctcattggtgccatcaacattgaaaacggcaaggccaactccgtgcgcaatgccgtcactcaggagtttggccccgtccctgacactgcccgctactacaagaaacatggcatcaggtgggtggtgatcggagacgagaactacggcgagggctcgagccgggagcatgcagctctggagcctcgccaccttgggggccgggccatcatcaccaagagctttgccaggatccacgagaccaacctgaagaaacagggcctgctgcctctgaccttcgctgacccggctgactacaacaagattcaccctgtggacaagctgaccattcagggcctgaaggacttcacccctggcaaggttaggggcccgggtccccctgaggtggtggggtgaggggcagccaccttgtttcccctcctgcactggccccagggtagcttctcccaggaggcttcattccagctggaaaggcccccagttctccaggtggccccacagagaaagcaaagtggcttctcagagttgggggttggagtcaacccggggccctcacacctccccaacctccctttactcaccaggacctggcactcaggggacagcccacccactgcaggaccctctgggccccaggaatcccctgtaggtgccacctgggtctgacctgggccatcaggcacagactggcctaggatttggtttgcc

SEQ ID NO: 359146 - DNA, 2631 bp, Homo sapiens
acgtcagcggaatgcgacctcatctttgtcagtgcacaaaatggcgccctacagcctactggtgactcggctgcagaaagctctgggtgtgcggcagtaccatgtggcctcagtcctgtgccaacgggccaaggtggcgatgagccactttgagcccaacgagtacatccattatgacctgctagagaagaacattaacattgttcgcaaacgactgaaccggccgctgacactctcggagaagattgtgtatggacacctggatgaccccgccagccaggaaattgagcgaggcaagtcgtacctgcggctgcggccggaccgtgtggccatgcaggatgcgacggcccagatggccatgctccagttcatcagcagcgggctgtccaaggtggctgtgccatccaccatccactgtgaccatctgattgaagcccaggttgggggcgagaaagacctgcgccgggccaaggacatcaaccaggaagtttataatttcctggcaactgcaggtgccaaatatggcgtgggcttctggaagcctggatctggaatcattcaccagattattctggaaaactatgcgtaccctggtgttcttctgattggcactgactcccacacccccaatggtggcggccttgggggcatctgcattggagttgggggtgccgatgctgtggatgtcatggctgggatcccctgggagctgaagtgccccaaggtgattggcgtgaagctgacgggctctctctccggttggtcctcacccaaagatgtgatcctgaaggtggcaggcatcctcacggtgaaaggtggcacaggtgcaatcgtggaataccacgggcctggtgtagactccatctcctgcactggcatggcgacaatctgcaacatgggtgcagaaattggggccaccacttccgtgttcccttacaaccacaggatgaagaagtacctgagcaagaccggccgggaagacattgccaatctagctgatgaattcaaggatcacttggtgcctgaccctggctgccattatgaccaactaattgaaattaacctcagtgagctgaagccacacatcaatgggcccttcacccctgacctggctcaccctgtggcagaagtgggcaaggtggcagagaaggaaggatggcctctggacatccgagtgggtctaattggtagctgcaccaattcaagctatgaagatatggggcgctcagcagctgtggccaagcaggcactggcccatggcctcaagtgcaagtcccagttcaccatcactccaggttccgagcagatccgcgccaccattgagcgggacggctatgcacagatcttgagggatctgggtggcattgtcctggccaatgcttgtggcccctgcattggccagtgggacaggaaggacatcaagaagggggagaagaacacaatcgtcacctcctacaacaggaacttcacgggccgcaacgacgcaaaccccgagacccatgcctttgtcacgtccccagagattgtcacagccctggccattgcgggaaccctcaagttcaacccagagaccgactacctgacgggcacggatggcaagaagttcaggctggaggctccggatgcagatgagcttcccaaaggggagtttgacccagggcaggacacctaccagcacccacccaaggacagcagcgggcagcatgtggacgtgagccccaccagccagcgcctgcagctcctggagccttttgacaagtgggatggcaaggacctggaggacctgcagatcctcatcaaggtcaaagggaagtgtaccactgaccacatctcagctgctggcccctggctcaagttccgtgggcacttggataacatctccaacaacctgctcattggtgccatcaacattgaaaacggcaaggccaactccgtgcgcaatgccgtcactcaggagtttggccccgtccctgacactgcccgctactacaagccatggcttcctattccaagatggtgtgaccagacatgcttcctgctccccgcttagcccacggagtgactgtggttgtggtgggggggttcttaaaataactttttagcccccgtcttcctattttgagtttggttcagatcttaagcagctccatgcaactgtatttatttttgatgacaagactcccatctaaagtttttctcctgcctgatcatttcattggtggctgaaggattctagagaaccttttgttcttgcaaggaaaacaagaatccaaaaccagtgactgttctgtgagtgattggtgtctgtgccgtttgttgtcaagtccagggtccaggaagggtcttttcagtcaaggtcagtggaggcccaacagccacagccacagatggatccatcactgcagtgaaggaggagcagggcctagatggtggaggagcggggcaagctggtgggcactcctggccttgcctcactgtccagctcgagacactatctccttagcatcggcctcagctgctgttgtcttcacagccggccataccaccttcccgcaggctggtagggtccactgttccagccccagggctagttgctggtccaccaggagagaaggcccaggcctggctcac

SEQ ID NO: 359147 - DNA, 2224 bp, Homo sapiens
acgtcagcggaatgcgacctcatctttgtcagtgcacaaaatggcgccctacagcctactggtgactcggctgcagaaagctctgggtgtgcggcagtaccatgtggcctcagtcctgtgccaacgggccaaggtggcgatgagccactttgagcccaacgagtacatccattatgacctgctagagaagaacattaacattgttcgcaaacgactgaaccggccgctgacactctcggagaagattgtgtatggacacctggatgaccccgccagccaggaaattgagcgaggcaagtcgtacctgcggctgcggccggaccgtgtggccatgcaggatgcgacggcccagatggccatgctccagttcatcagcagcgggctgtccaaggtggctgtgccatccaccatccactgtgaccatctgattgaagcccaggttgggggcgagaaagacctgcgccgggccaaggacatcaaccaggaagtttataatttcctggcaactgcaggtgccaaatatggcgtgggcttctggaagcctggatctggaatcattcaccagattattctggaaaactatgcgtaccctggtgttcttctgattggcactgactcccacacccccaatggtggcggccttgggggcatctgcattggagttgggggtgccgatgctgtggatgtcatggctgggatcccctgggagctgaagtgccccaaggtgattggcgtgaagctgacgggctctctctccggttggtcctcacccaaagatgtgatcctgaaggtggcaggcatcctcacggtgaaaggtggcacaggtgcaatcgtggaataccacgggcctggtgtagactccatctcctgcactggcatggcgacaatctgcaacatgggtgcagaaattggggccaccacttccgtgttcccttacaaccacaggatgaagaagtacctgagcaagaccggccgggaagacattgccaatctagctgatgaattcaaggatcacttggtgcctgaccctggctgccattatgaccaactaattgaaattaacctcagtgagctgaagccacacatcaatgggcccttcacccctgacctggctcaccctgtggcagaagtgggcaaggtggcagagaaggaaggatggcctctggacatccgagtgggtctaattggtagctgcaccaattcaagctatgaagatatggggcgctcagcagctgtggccaagcaggcactggcccatggcctcaagtgcaagtcccagttcaccatcactccaggttccgagcagatccgcgccaccattgagcgggacggctatgcacagatcttgagggatctgggtggcattgtcctggccaatgcttgtggcccctgcattggccagtgggacaggaaggacatcaagaagggggagaagaacacaatcgtcacctcctacaacaggaacttcacgggccgcaacgacgcaaaccccgagacccatgcctttgtcacgtccccagagattgtcacagccctggccattgcgggaaccctcaagttcaacccagagaccgactacctgacgggcacggatggcaagaagttcaggctggaggctccggatgcagatgagcttcccaaaggggagtttgacccagggcaggacacctaccagcacccacccaaggacagcagcgggcagcatgtggacgtgagccccaccagccagcgcctgcagctcctggagccttttgacaagtgggatggcaaggacctggaggacctgcagatcctcatcaaggtcaaagggaagtgtaccactgaccacatctcagctgctggcccctggctcaagttccgtgggcacttggataacatctccaacaacctgctcattggtgccatcaacattgaaaacggcaaggccaactccgtgcgcaatgccgtcactcaggagtttggccccgtccctgacactgcccgctactacaagaaacatggcatcaggtgggtggtgatcggagacgagaactacggcgagggctcgagccgggagcatgcagctctggagcctcgccaccttgggggccgggccatcatcaccaagagctttgccaggatccacgagaccaactggagaaccgggctgtggctctgacttcgtgaccggtgatacacagattcacctgtggacagtggcatccaggccgaggatcacctggca

SEQ ID NO: 359148 - DNA, 2209 bp, Homo sapiens
acgtcagcggaatgcgacctcatctttgtcagtgcacaaaatggcgccctacagcctactggtgactcggctgcagaaagctctgggtgtgcggcagtaccatgtggcctcagtcctgtgccaacgggccaaggtggcgatgagccactttgagcccaacgagtacatccattatgacctgctagagaagaacattaacattgttcgcaaacgactgaaccggccgctgacactctcggagaagattgtgtatggacacctggatgaccccgccagccaggaaattgagcgaggcaagtcgtacctgcggctgcggccggaccgtgtggccatgcaggatgcgacggcccagatggccatgctccagttcatcagcagcgggctgtccaaggtggctgtgccatccaccatccactgtgaccatctgattgaagcccaggttgggggcgagaaagacctgcgccgggccaaggacatcaaccaggaagtttataatttcctggcaactgcaggtgccaaatatggcgtgggcttctggaagcctggatctggaatcattcaccagattattctggaaaactatgcgtaccctggtgttcttctgattggcactgactcccacacccccaatggtggcggccttgggggcatctgcattggagttgggggtgccgatgctgtggatgtcatggctgggatcccctgggagctgaagtgccccaaggtgattggcgtgaagctgacgggctctctctccggttggtcctcacccaaagatgtgatcctgaaggtggcaggcatcctcacggtgaaaggtggcacaggtgcaatcgtggaataccacgggcctggtgtagactccatctcctgcactggcatggcgacaatctgcaacatgggtgcagaaattggggccaccacttccgtgttcccttacaaccacaggatgaagaagtacctgagcaagaccggccgggaagacattgccaatctagctgatgaattcaaggatcacttggtgcctgaccctggctgccattatgaccaactaattgaaattaacctcagtgagctgaagccacacatcaatgggcccttcacccctgacctggctcaccctgtggcagaagtgggcaaggtggcagagaaggaaggatggcctctggacatccgagtgggtctaattggtagctgcaccaattcaagctatgaagatatggggcgctcagcagctgtggccaagcaggcactggcccatggcctcaagtgcaagtcccagttcaccatcactccaggttccgagcagatccgcgccaccattgagcgggacggctatgcacagatcttgagggatctgggtggcattgtcctggccaatgcttgtggcccctgcattggccagtgggacaggaaggacatcaagaagggggagaagaacacaatcgtcacctcctacaacaggaacttcacgggccgcaacgacgcaaaccccgagacccatgcctttgtcacgtccccagagattgtcacagccctggccattgcgggaaccctcaagttcaacccagagaccgactacctgacgggcacggatggcaagaagttcaggctggaggctccggatgcagatgagcttcccaaaggggagtttgacccagggcaggacacctaccagcacccacccaaggacagcagcgggcagcatgtggacgtgagccccaccagccagcgcctgcagctcctggagccttttgacaagtgggatggcaaggacctggaggacctgcagatcctcatcaaggtcaaagggaagtgtaccactgaccacatctcagctgctggcccctggctcaagttccgtgggcacttggataacatctccaacaacctgctcattggtgccatcaacattgaaaacggcaaggccaactccgtgcgcaatgccgtcactcaggagtttggccccgtccctgacactgcccgctactacaagaaacatggcatcaggtgggtggtgatcggagacgagaactacggcgagggctcgagccgggagcatgcagctctggagcctcgccaccttgggggccgggccatcatcaccaagagctttgccaggatccacgagaccacctaattggaagcgccaccctagcaatatcaaccatataaccttccctatccgcttatcaatggaatcctctagagt

SEQ ID NO: 359149 - DNA, 1690 bp, Homo sapiens
acgtcagcggaatgcgacctcatctttgtcagtgcacaaaatggcgccctacagcctactggtgactcggctgcagaaagctctgggtgtgcggcagtaccatgtggcctcagtcctgtgccaacgggccaaggtggcgatgagccactttgagcccaacgagtacatccattatgacctgctagagaagaacattaacattgttcgcaaacgactgaaccggccgctgacactctcggagaagattgtgtatggacacctggatgaccccgccagccaggaaattgagcgaggcaagtcgtacctgcggctgcggccggaccgtgtggccatgcaggatgcgacggcccagatggccatgctccagttcatcagcagcgggctgtccaaggtggctgtgccatccaccatccactgtgaccatctgattgaagcccaggttgggggcgagaaagacctgcgccgggccaaggacatcaaccaggaagtttataatttcctggcaactgcaggtgccaaatatggcgtgggcttctggaagcctggatctggaatcattcaccagattattctggaaaactatgcgtaccctggtgttcttctgattggcactgactcccacacccccaatggtggcggccttgggggcatctgcattggagttgggggtgccgatgctgtggatgtcatggctgggatcccctgggagctgaagtgccccaaggtgattggcgtgaagctgacgggctctctctccggttggtcctcacccaaagatgtgatcctgaaggtggcaggcatcctcacggtgaaaggtggcacaggtgcaatcgtggaataccacgggcctggtgtagactccatctcctgcactggcatggcgacaatctgcaacatgggtgcagaaattggggccaccacttccgtgttcccttacaaccacaggatgaagaagtacctgagcaagaccggccgggaagacattgccaatctagctgatgaattcaaggatcacttggtgcctgaccctggctgccattatgaccaactaattgaaattaacctcagtgagatggtgtgaccagacatgcttcctgctccccgcttagcccacggagtgactgtggttgtggtgggggggttcttaaaataactttttagcccccgtcttcctattttgagtttggttcagatcttaagcagctccatgcaactgtatttatttttgatgacaagactcccatctaaagtttttctcctgcctgatcatttcattggtggctgaaggattctagagaaccttttgttcttgcaaggaaaacaagaatccaaaaccagtgactgttctgtgagtgattggtgtctgtgccgtttgttgtcaagtccagggtccaggaagggtcttttcagtcaaggtcagtggaggcccaacagccacagccacagatggatccatcactgcagtgaaggaggagcagggcctagatggtggaggagcggggcaagctggtgggcactcctggccttgcctcactgtccagctcgagacactatctccttagcatcggcctcagctgctgttgtcttcacagccggccataccaccttcccgcaggctggtagggtccactgttccagccccagggctagttgctggtccaccaggagagaaggcccaggcctggctcac

SEQ ID NO: 359150 - DNA, 2152 bp, Homo sapiens
acgtcagcggaatgcgacctcatctttgtcagtgcacaaaatggcgccctacagcctactggtgactcggctgcagaaagctctgggtgtgcggcagtaccatgtggcctcagtcctgtgccaacgggccaaggtggcgatgagccactttgagcccaacgagtacatccattatgacctgctagagaagaacattaacattgttcgcaaacgactgaaccggccgctgacactctcggagaagattgtgtatggacacctggatgaccccgccagccaggaaattgagcgaggcaagtcgtacctgcggctgcggccggaccgtgtggccatgcaggatgcgacggcccagatggccatgctccagttcatcagcagcgggctgtccaaggtggctgtgccatccaccatccactgtgaccatctgattgaagcccaggttgggggcgagaaagacctgcgccgggccaaggacatcaaccaggaagtttataatttcctggcaactgcaggtgccaaatatggcgtgggcttctggaagcctggatctggaatcattcaccagattattctggaaaactatgcgtaccctggtgttcttctgattggcactgactcccacacccccaatggtggcggccttgggggcatctgcattggagttgggggtgccgatgctgtggatgtcatggctgggatcccctgggagctgaagtgccccaaggtgattggcgtgaagctgacgggctctctctccggttggtcctcacccaaagatgtgatcctgaaggtggcaggcatcctcacggtgaaaggtggcacaggtgcaatcgtggaataccacgggcctggtgtagactccatctcctgcactggcatggcgacaatctgcaacatgggtgcagaaattggggccaccacttccgtgttcccttacaaccacaggatgaagaagtacctgagcaagaccggccgggaagacattgccaatctagctgatgaattcaaggatcacttggtgcctgaccctggctgccattatgaccaactaattgaaattaacctcagtgagctgaagccacacatcaatgggcccttcacccctgacctggctcaccctgtggcagaagtgggcaaggtggcagagaaggaaggatggcctctggacatccgagtgggtctaattggtagctgcaccaattcaagctatgaagatatggggcgctcagcagctgtggccaagcaggcactggcccatggcctcaagtgcaagtcccagttcaccatcactccaggttccgagcagatccgcgccaccattgagcgggacggctatgcacagatcttgagggatctgggtggcattgtcctggccaatgcttgtggcccctgcattggccagtgggacaggtaagaggcgtatcttttgacaagacagccccttgtgcacagggtacagagccccagaagttggagggggaattattggggtggagagaagagactccagccaaggtctctagctccagggactcttgcccattagaagcctctggcagacatgcctgggaagaggggctgggtgaggaagggccctgcagaggcactggggggcaacttggctgaagcctgggctggcaggaggaagccagcgcggcctcaccctgacggacacagcaggagccgtttgggaggaggcagtgccccaggtcaggaaactcaggccttgaccaaggccttgcctctggcttacgtgtggttgcaggctgggcccagtgatcctgaggttcccttctgctctgcgcgtggccccaggaggaggcaaccctggcagggcctcttcattttccctcggtaggagctaggctgggctgcgccacaggaacccagcttatctgtcctcgggacaggccaggtgacaaggccagatatccctaaccctgatccctctgacctggcaggaaggacatcaagaagggggagaagaacacaatcgtcacctcctacaacaggaacttcacgggccgcaacgacgcaaaccccgagacccatgcctttgtcacgtccccagaggtgagactgcccagctgcgcacaagcctgggatggcctctgggggtcctggcgggtcagaggaggaggcagaaggagat

SEQ ID NO: 359151 - DNA, 1466 bp, Homo sapiens
acgtcagcggaatgcgacctcatctttgtcagtgcacaaaatggcgccctacagcctactggtgactcggctgcagaaagctctgggtgtgcggcagtaccatgtggcctcagtcctgtgccaacgggccaaggtggcgatgagccactttgagcccaacgagtacatccattatgacctgctagagaagaacattaacattgttcgcaaacgactgaaccggccgctgacactctcggagaagattgtgtatggacacctggatgaccccgccagccaggaaattgagcgaggcaagtcgtacctgcggctgcggccggaccgtgtggccatgcaggatgcgacggcccagatggccatgctccagttcatcagcagcgggctgtccaaggtggctgtgccatccaccatccactgtgaccatctgattgaagcccaggttgggggcgagaaagacctgcgccgggccaaggacatcaaccaggaagtttataatttcctggcaactgcaggtgccaaatatggcgtgggcttctggaagcctggatctggaatcattcaccagattattctggaaaactatgcgtaccctggtgttcttctgattggcactgactcccacacccccaatggtggcggccttgggggcatctgcattggagttgggggtgccgatgctgtggatgtcatggctgggatcccctgggagctgaagtgccccaaggtgattggcgtgaagctgacgggctctctctccggttggtcctcacccaaagatgtgatcctgaaggtggcaggcatcctcacggtgaaaggtggcacaggtgcaatcgtggaataccacgggcctggtgtagactccatctcctgcactggcatggcgacaatctgcaacatgggtgcagaaattggggccaccacttccgtgttcccttacaaccacaggatgaagaagtacctgagcaagaccggccgggaagacattgccaatctagctgatgaattcaaggatcacttggtgcctgaccctggctgccattatgaccaactaattgaaattaacctcagtgagctgaagccacacatcaatgggcccttcacccctgacctggctcaccctgtggcagaagtgggcaaggtggcagagaaggaaggatggcctctggacatccgagtggacgccctggcatgccagtcactggcatctgctgctgctgggtacagtgtggctgtgaagagcatggagcctggagccagatggcctgggcttgaatcctggctctgccacctaacagccactaacagctgagtgaccctgagcaaactacttcactgtctatgtgtgggttccccatctgtaaaacaggagtcatgatcgtactgacacctttgaaggtggtgttgggcctactgctgctatcaccaatgagaaaaataaataaaaaataaagttgtctggagaagtg

SEQ ID NO: 359152 - DNA, 1458 bp, Homo sapiens
acgtcagcggaatgcgacctcatctttgtcagtgcacaaaatggcgccctacagcctactggtgactcggctgcagaaagctctgggtgtgcggcagtaccatgtggcctcagtcctgtgccaacgggccaaggtggcgatgagccactttgagcccaacgagtacatccattatgacctgctagagaagaacattaacattgttcgcaaacgactgaaccggccgctgacactctcggagaagattgtgtatggacacctggatgaccccgccagccaggaaattgagcgaggcaagtcgtacctgcggctgcggccggaccgtgtggccatgcaggatgcgacggcccagatggccatgctccagttcatcagcagcgggctgtccaaggtggctgtgccatccaccatccactgtgaccatctgattgaagcccaggttgggggcgagaaagacctgcgccgggccaaggacatcaaccaggaagtttataatttcctggcaactgcaggtgccaaatatggcgtgggcttctggaagcctggatctggaatcattcaccagattattctggaaaactatgcgtaccctggtgttcttctgattggcactgactcccacacccccaatggtggcggccttgggggcatctgcattggagttgggggtgccgatgctgtggatgtcatggctgggatcccctgggagctgaagtgccccaaggtgattggcgtgaagctgacgggctctctctccggttggtcctcacccaaagatgtgatcctgaaggtggcaggcatcctcacggtgaaaggtggcacaggtgcaatcgtggaataccacgggcctggtgtagactccatctcctgcactggcatggcgacaatctgcaacatgggtgcagaaattggggccaccacttccgtgttcccttacaaccacaggatgaagaagtacctgagcaagaccggccgggaagacattgccaatctagctgatgaattcaaggatcacttggtgcctgaccctggctgccattatgaccaactaattgaaattaacctcagtgagctgaagccacacatcaatgggcccttcacccctgacctggctcaccctgtggcagaagtgggcaaggtggcagagaaggaaggatggcctctggacatccgagtgggtgagcaccttccaccccatctgtttagcaggtctcagggccagtggctctgcccagggctgtagacaatcacctatgcctactgtgtggcactttctaaggtgggcagtttctgaaatgggtttattattgaaaaattactttttcggccagaagtggtggctcatgcttgaaatcccagcatttcaggaggccaatgcaggtggattacttgagtctaggggttcaagaccagcctgggcaacatggaaaaaccccgtctcttaaaagaaaatgcaaa

SEQ ID NO: 359153 - DNA, 625 bp, Homo sapiens
atatcgtcgacccacgccgtcgcgaaatggcgccgtacagcctactggtgactccggctgcagaaagctctgggtgtgcggcagtaccatgtggcctcagtcctgtgccaacgggccaaggtggcgatgagccactttgagcccaacgagtacatccattatgacctgctagagaagaacattaacattgttcgcaaacgccctgacctggctcaccctgtggcagaagtgggcaaggtggcagagaaggaaggatggcctctggacatccgagtggacgccctggcatgccagtcactggcatctgctgctgctgggtacagtgtggctgtgaagagcatggagcctggagccagatggcctgggcttgaatcctggctctgccacctaacagccactaacagctgagtgaccctgagcaaactacttcactgtctatgtgtgggttccccatctgtaaaacaggagtcatgatcgtactgacacctttgaaggtggtgttgggcctactgctgctatcaccaatgagaaaaataaataaaaaataaagttgtctggagaagtgacaatatgtgaaaagagatttctataccgtctggccgaaaataagggcaatataatgtgt

SEQ ID NO: 359154 - DNA, 250 bp, Homo sapiens
tcgtggaataccacgggcctggtgtagactccatctcctgcactggtgaggaaggcggccaggcgacgtggcccctaccctgtgctgggcctgatgggtctccagttgggagtagaagcggtgaatggccttcacttgagaatctgtctgttccatttggggacttgggatagacagaggtagaaggaaaattggagacagcattagagattgtctagtccacatcctcattaaacagatgaagagattg

SEQ ID NO: 359155 - DNA, 743 bp, Homo sapiens
ttcccgtggccagagtgagccttgcccttggcggtattcagccctggccgtgactggcacatggccaggctctcttgacttggttgtttatctgcgtgttctacaaatatgtcttgctaaatgggtgaaggaatggctccttccatgtttttagtgtcctgcgcactgagcaggtttgcatcataccagcatttctgcgccagggcccccactccctccaggatagctgtgaggagagagaacagcactgccggcccggccctgcagggatgggagaggccgcactgcccttggcttcctgagtcctctgcaggcccaaggccccgtggtcccaaagatcgtcctgcagctctggcctctgaggaacacaggggtctgggaagaacatggaaatttcctgggttcctttctcagttttggcctaggcttttggtaggtgcaggagacaggagtggcaattggtgctgaccaacaaactggccacctccatttcagattgtcacagccctggccattgcgggaaccctcaagttcaacccagagaccgactacctgacgggcacggatggcaagaagttcaggctggaggctccggatgcagatgagcttcccaaaggggtgagcgcccacgccccctgcttgctggttgctgtgtggccacgtcacttccttctcaacctcacagcacctcctgtgcaggcagggagggcgctgctagtgagaaggaagcagctctgttccct

SEQ ID NO: 359156 - DNA, 860 bp, Homo sapiens
gggccatcatcaccaagagctttgccaggatccacggtgagctggagtctgtacccaggccatcctcatcccatccctagtgatcaaggtcactctccctgcccgtggctgagttgggcctggttctaggctgtgtccactgcagcccacaggcccgtcagcctcttgccccttcttaggctcacacagtgcacatccgacgctcagcttcccggcttcccgcaggccctgcttccaggcttgtagatctgagccgctgagatctaggacatgtgccagggggttctttctgatcatgaatgtgcagcaggaaggcctcgcagacctcagcaccagcgcacacttgctaggggcacccctagtgaaagggagcagaccagggccccatagtcactgcccgggcattgtcccaggcagcaggattaggggcatctcccagagccccagatgggttcagaaaatgaagctctccaggctagtcaggcccccgatgaccgaatgccgcctgctttccagagaccaacctgaagaaacagggcctgctgcctctgaccttcgctgacccggctgactacaacaagattcaccctgtggacaagctgaccattcagggcctgaaggacttcacccctggcaaggttaggggcccgggtccccctgaggtggtggggtgaggggcagccaccttgtttcccctcctgcactggccccagggtagcttctcccaggaggcttcattccagctggaaaggcccccagttctccaggtggccccacagagaaagcaaagtggcttctcagagttgggggttggagtcaacccggggccctcacacctccccaacctccctttactcacc

SEQ ID NO: 359157 - DNA, 643 bp, Homo sapiens
aactgcagactcaagcaacagagcctgcctccaaaaaaaaaaaaaaaaaaaaaaaagaaagaaaagaaaaattactttttcttggcagaaaagaaaaatatgtttattgtagagaatattcacaatcaagaagaatttttaaaactcctaatctcaacccccagccaggagcaagctcttagagctcttggagaggtgtgctgtgtttctgtgtattgtgtgcatagattttcccgttttacattttatatcacccatgctgctttatgtgacttttcatgctttacacatgcagacgccctggcatgccagtcactggcatctgctgctgctgggtacagtgtggctgtgaagagcatggagcctggagccagatggcctgggcttgaatcctggctctgccacctaacagccactaacagctgagtgaccctgagcaaactacttcactgtctatgtgtgggttccccatctgtaaaacaggagtcatgatcgtactgacacctttgaaggtggtgttgggcctactgctgctatcaccaatgagaaaaataaataaaaaataaagttgtctggagaagtgacaatatgtgaaaagagatttctataccgtctggccgaaaataagggcaatataatgtgt

SEQ ID NO: 359158 - DNA, 2881 bp, Homo sapiens
acgtcagcggaatgcgacctcatctttgtcagtgcacaaaatggcgccctacagcctactggtgactcggctgcagaaagctctgggtgtgcggcagtaccatgtggcctcagtcctgtgccaacgggccaaggtggcgatgagccactttgagcccaacgagtacatccattatgacctgctagagaagaacattaacattgttcgcaaacgactgaaccggccgctgacactctcggagaagattgtgtatggacacctggatgaccccgccagccaggaaattgagcgaggcaagtcgtacctgcggctgcggccggaccgtgtggccatgcaggatgcgacggcccagatggccatgctccagttcatcagcagcgggctgtccaaggtggctgtgccatccaccatccactgtgaccatctgattgaagcccaggttgggggcgagaaagacctgcgccgggccaaggacatcaaccaggaagtttataatttcctggcaactgcaggtgccaaatatggcgtgggcttctggaagcctggatctggaatcattcaccagattattctggaaaactatgcgtaccctggtgttcttctgattggcactgactcccacacccccaatggtggcggccttgggggcatctgcattggagttgggggtgccgatgctgtggatgtcatggctgggatcccctgggagctgaagtgccccaaggtgattggcgtgaagctgacgggctctctctccggttggtcctcacccaaagatgtgatcctgaaggtggcaggcatcctcacggtgaaaggtggcacaggtgcaatcgtggaataccacgggcctggtgtagactccatctcctgcactggcatggcgacaatctgcaacatgggtgcagaaattggggccaccacttccgtgttcccttacaaccacaggatgaagaagtacctgagcaagaccggccgggaagacattgccaatctagctgatgaattcaaggatcacttggtgcctgaccctggctgccattatgaccaactaattgaaattaacctcagtgagctgaagccacacatcaatgggcccttcacccctgacctggctcaccctgtggcagaagtgggcaaggtggcagagaaggaaggatggcctctggacatccgagtgggtctaattggtagctgcaccaattcaagctatgaagatatggggcgctcagcagctgtggccaagcaggcactggcccatggcctcaagtgcaagtcccagttcaccatcactccaggttccgagcagatccgcgccaccattgagcgggacggctatgcacagatcttgagggatctgggtggcattgtcctggccaatgcttgtggcccctgcattggccagtgggacaggaaggacatcaagaagggggagaagaacacaatcgtcacctcctacaacaggaacttcacgggccgcaacgacgcaaaccccgagacccatgcctttgtcacgtccccagagattgtcacagccctggccattgcgggaaccctcaagttcaacccagagaccgactacctgacgggcacggatggcaagaagttcaggctggaggctccggatgcagatgagcttcccaaaggggagtttgacccagggcaggacacctaccagcacccacccaaggacagcagcgggcagcatgtggacgtgagccccaccagccagcgcctgcagctcctggagccttttgacaagtgggatggcaaggacctggaggacctgcagatcctcatcaaggtcaaagggaagtgtaccactgaccacatctcagctgctggcccctggctcaagttccgtgggcacttggataacatctccaacaacctgctcattggtgccatcaacattgaaaacggcaaggccaactccgtgcgcaatgccgtcactcaggagtttggccccgtccctgacactgcccgctactacaagaaacatggcatcaggtgggtggtgatcggagacgagaactacggcgagggctcgagccgggagcatgcagctctggagcctcgccaccttgggggccgggccatcatcaccaagagctttgccaggatccacgagaccaacctgaagaaacagggcctgctgcctctgaccttcgctgacccggctgactacaacaagattcaccctgtggacaagctgaccattcagggcctgaaggacttcacccctggcaagcccctgaagtgcatcatcaagcaccccaacgggacccaggagaccatcctcctgaaccacaccttcaacgagacgcagattgagtggttccgcgctggcagtgccctcaacagaatgaaggaactgcaacagtgagggcagtgcctccccgccccgccgctggcgtcaagttcagctccacgtgtgccatcagtggatccgatccgtccagccatggcttcctattccaagatggtgtgaccagacatgcttcctgctccccgcttagcccacggagtgactgtggttgtggtgggggggttcttaaaataactttttagcccccgtcttcctattttgagtttggttcagatcttaagcagctccatgcaactgtatttatttttgatgacaagactcccatctaaagtttttctcctgcctgatcatttcattggtggctgaaggattctagagaaccttttgttcttgcaaggaaaacaagaatccaaaaccagtgacaaaagcaaacagccaccaaccagccaaacacagaagaacaacagcgacaaaaagaaaagaagagaaccgggcgggcagggagaggggaggaaacgggggagacaggagcgcaggaatagtggcacgaaggag

SEQ ID NO: 359159 - DNA, 2033 bp, Homo sapiens
acgtcagcggaatgcgacctcatctttgtcagtgcacaaaatggcgccctacagcctactggtgactcggctgcagaaagctctgggtgtgcggcagtaccatgtggcctcagtcctgtgccaacgggccaaggtggcgatgagccactttgagcccaacgagtacatccattatgacctgctagagaagaacattaacattgttcgcaaacgactgaaccggccgctgacactctcggagaagattgtgtatggacacctggatgaccccgccagccaggaaattgagcgaggcaagtcgtacctgcggctgcggccggaccgtgtggccatgcaggatgcgacggcccagatggccatgctccagttcatcagcagcgggctgtccaaggtggctgtgccatccaccatccactgtgaccatctgattgaagcccaggttgggggcgagaaagacctgcgccgggccaaggacatcaaccaggaagtttataatttcctggcaactgcaggtgccaaatatggcgtgggcttctggaagcctggatctggaatcattcaccagattattctggaaaactatgcgtaccctggtgttcttctgattggcactgactcccacacccccaatggtggcggccttgggggcatgccccaccagccagcgcctgcagctcctggagccttttgacaagtgggatggcaaggacctggaggacctgcagatcctcatcaaggtcaaagggaagtgtaccactgaccacatctcagctgctggcccctggctcaagttccgtgggcacttggataacatctccaacaacctgctcattggtgccatcaacattgaaaacggcaaggccaactccgtgcgcaatgccgtcactcaggagtttggccccgtccctgacactgcccgctactacaagaaacatggcatcaggtgggtggtgatcggagacgagaactacggcgagggctcgagccgggagcatgcagctctggagcctcgccaccttgggggccgggccatcatcaccaagagctttgccaggatccacgagaccaacctgaagaaacagggcctgctgcctctgaccttcgctgacccggctgactacaacaagattcaccctgtggacaagctgaccattcagggcctgaaggacttcacccctggcaagcccctgaagtgcatcatcaagcaccccaacgggacccaggagaccatcctcctgaaccacaccttcaacgagacgcagattgagtggttccgcgctggcagtgccctcaacagaatgaaggaactgcaacagtgagggcagtgcctccccgccccgccgctggcgtcaagttcagctccacgtgtgccatcagtggatccgatccgtccagccatggcttcctattccaagatggtgtgaccagacatgcttcctgctccccgcttagcccacggagtgactgtggttgtggtgggggggttcttaaaataactttttagcccccgtcttcctattttgagtttggttcagatcttaagcagctccatgcaactgtatttatttttgatgacaagactcccatctaaagtttttctcctgcctgatcatttcattggtggctgaaggattctagagaaccttttgttcttgcaaggaaaacaagaatccaaaaccagtgactgttctgtgagtgattggtgtctgtgccgtttgttgtcaagtccagggtccaggaagggtcttttcagtcaaggtcagtggaggcccaacagccacagccacagatggatccatcactgcagtgaaggaggagcagggcctagatggtggaggagcggggcaagctggtgggcactcctggccttgcctcactgtccagctcgagacactatctccttagcatcggcctcagctgctgttgtcttcacagccggccataccaccttcccgcaggctggtagggtccactgttccagccccagggctagttgctggtccaccaggagagaaggcccaggcctggctcac

SEQ ID NO: 359160 - DNA, 1477 bp, Homo sapiens
acggatagcggatctgctcggaacctggagtgatggtgaactgggacttgcacttgaggccatgggccagtgcctgcttggccacagctgctgaggccccaccagccagcgcctgcagctcctggagccttttgacaagtgggatggcaaggacctggaggacctgcagatcctcatcaaggtcaaagggaagtgtaccactgaccacatctcagctgctggcccctggctcaagttccgtgggcacttggataacatctccaacaacctgctcattggtgccatcaacattgaaaacggcaaggccaactccgtgcgcaatgccgtcactcaggagtttggccccgtccctgacactgcccgctactacaagaaacatggcatcaggtgggtggtgatcggagacgagaactacggcgagggctcgagccgggagcatgcagctctggagcctcgccaccttgggggccgggccatcatcaccaagagctttgccaggatccacgagaccaacctgaagaaacagggcctgctgcctctgaccttcgctgacccggctgactacaacaagattcaccctgtggacaagctgaccattcagggcctgaaggacttcacccctggcaagcccctgaagtgcatcatcaagcaccccaacgggacccaggagaccatcctcctgaaccacaccttcaacgagacgcagattgagtggttccgcgctggcagtgccctcaacagaatgaaggaactgcaacagtgagggcagtgcctccccgccccgccgctggcgtcaagttcagctccacgtgtgccatcagtggatccgatccgtccagccatggcttcctattccaagatggtgtgaccagacatgcttcctgctccccgcttagcccacggagtgactgtggttgtggtgggggggttcttaaaataactttttagcccccgtcttcctattttgagtttggttcagatcttaagcagctccatgcaactgtatttatttttgatgacaagactcccatctaaagtttttctcctgcctgatcatttcattggtggctgaaggattctagagaaccttttgttcttgcaaggaaaacaagaatccaaaaccagtgactgttctgtgagtgattggtgtctgtgccgtttgttgtcaagtccagggtccaggaagggtcttttcagtcaaggtcagtggaggcccaacagccacagccacagatggatccatcactgcagtgaaggaggagcagggcctagatggtggaggagcggggcaagctggtgggcactcctggccttgcctcactgtccagctcgagacactatctccttagcatcggcctcagctgctgttgtcttcacagccggccataccaccttcccgcaggctggtagggtccactgttccagccccagggctagttgctggtccaccaggagagaaggcccaggcctggctcac

SEQ ID NO: 359161 - DNA, 2206 bp, Homo sapiens
acgtcagcggaatgcgacctcatctttgtcagtgcacaaaatggcgccctacagcctactggtgactcggctgcagaaagctctgggtgtgcggcagtaccatgtggcctcagtcctgtgccaacgggccaaggtggcgatgagccactttgagcccaacgagtacatccattatgacctgctagagaagaacattaacattgttcgcaaacgactgaaccggccgctgacactctcggagaagattgtgtatggacacctggatgaccccgccagccaggaaattgagcgaggcaagtcgtacctgcggctgcggccggaccgtgtggccatgcaggatgcgacggcccagatggccatgctccagttcatcagcagcgggctgtccaaggtggctgtgccatccaccatccactgtgaccatctgattgaagcccaggttgggggcgagaaagacctgcgccgggccaaggacatcaaccaggaagtttataatttcctggcaactgcaggtgccaaatatggcgtgggcttctggaagcctggatctggaatcattcaccagattattctggaaaactatgcgtaccctggtgttcttctgattggcactgactcccacacccccaatggtggcggccttgggggcatctgcattggagttgggggtgccgatgctgtggatgtcatggctgggatcccctgggagctgaagtgccccaaggtgattggcgtgaagctgacgggctctctctccggttggtcctcacccaaagatgtgatcctgaaggtggcaggcatcctcacggtgaaaggtggcacaggtgcaatcgtggaataccacgggcctggtgtagactccatctcctgcactggcatggcgacaatctgcaacatgggtgcagaaattggggccaccacttccgtgttcccttacaaccacaggatgaagaagtacctgagcaagaccggccgggaagacattgccaatctagctgatgaattcaaggatcacttggtgcctgaccctggctgccattatgaccaactaattgaaattaacctcagtgagctgaagccacacatcaatgggcccttcacccctgacctggctcaccctgtggcagaagtgggcaaggtggcagagaaggaaggatggcctctggacatccgagtgggtctaattggtagctgcaccaattcaagctatgaagatatggggcgctcagcagctgtggccaagcaggcactggcccatggcctcaagtgcaagtcccagttcaccatcactccaggttccgagcagatccgcgccaccattgagcgggacggctatgcacagatcttgagggatctgggtggcattgtcctggccaatgcttgtggcccctgcattggccagtgggacaggaaggacatcaagaagggggagaagaacacaatcgtcacctcctacaacaggaacttcacgggccgcaacgacgcaaaccccgagacccatgcctttgtcacgtccccagagattgtcacagccctggccattgcgggaaccctcaagttcaacccagagaccgactacctgacgggcacggatggcaagaagttcaggctggaggctccggatgcagatgagcttcccaaaggggagtttgacccagggcaggacacctaccagcacccacccaaggacagcagcgggcagcatgtggacgtgagccccaccagccagcgcctgcagctcctggagccttttgacaagtgggatggcaaggacctggaggacctgcagatcctcatcaaggtcaaagggaagtgtaccactgaccacatctcagctgctggcccctggctcaagttccgtgggcacttggataacatctccaacaacctgctcattggtgccatcaacattgaaaacggcaaggccaactccgtgcgcaatgccgtcactcaggagtttggccccgtccctgacactgcccgctactacaagaaacatggcatcaggtgggtggtgatcggagacgagaactacggcgagggctcgagccgggagcatgcagctctggagcctcgccaccttgggggccagctggagctccagctggcacccaaggctgtttgatgctgggatcctcttgtgggggggcgtctgtcaatgtcaccattttggaagtgcgcagagctcagaacggcgcttccatgc

SEQ ID NO: 359162 - DNA, 2296 bp, Homo sapiens
acgtcagcggaatgcgacctcatctttgtcagtgcacaaaatggcgccctacagcctactggtgactcggctgcagaaagctctgggtgtgcggcagtaccatgtggcctcagtcctgtgccaacgggccaaggtggcgatgagccactttgagcccaacgagtacatccattatgacctgctagagaagaacattaacattgttcgcaaacgactgaaccggccgctgacactctcggagaagattgtgtatggacacctggatgaccccgccagccaggaaattgagcgaggcaagtcgtacctgcggctgcggccggaccgtgtggccatgcaggatgcgacggcccagatggccatgctccagttcatcagcagcgggctgtccaaggtggctgtgccatccaccatccactgtgaccatctgattgaagcccaggttgggggcgagaaagacctgcgccgggccaaggacatcaaccaggaagtttataatttcctggcaactgcaggtgccaaatatggcgtgggcttctggaagcctggatctggaatcattcaccagattattctggaaaactatgcgtaccctggtgttcttctgattggcactgactcccacacccccaatggtggcggccttgggggcatctgcattggagttgggggtgccgatgctgtggatgtcatggctgggatcccctgggagctgaagtgccccaaggtgattggcgtgaagctgacgggctctctctccggttggtcctcacccaaagatgtgatcctgaaggtggcaggcatcctcacggtgaaaggtggcacaggtgcaatcgtggaataccacgggcctggtgtagactccatctcctgcactggcatggcgacaatctgcaacatgggtgcagaaattggggccaccacttccgtgttcccttacaaccacaggatgaagaagtacctgagcaagaccggccgggaagacattgccaatctagctgatgaattcaaggatcacttggtgcctgaccctggctgccattatgaccaactaattgaaattaacctcagtgagctgaagccacacatcaatgggcccttcacccctgacctggctcaccctgtggcagaagtgggcaaggtggcagagaaggaaggatggcctctggacatccgagtgggtctaattggtagctgcaccaattcaagctatgaagatatggggcgctcagcagctgtggccaagcaggcactggcccatggcctcaagtgcaagtcccagttcaccatcactccaggttccgagcagatccgcgccaccattgagcgggacggctatgcacagatcttgagggatctgggtggcattgtcctggccaatgcttgtggcccctgcattggccagtgggacaggaaggacatcaagaagggggagaagaacacaatcgtcacctcctacaacaggaacttcacgggccgcaacgacgcaaaccccgagacccatgcctttgtcacgtccccagagattgtcacagccctggccattgcgggaaccctcaagttcaacccagagaccgactacctgacgggcacggatggcaagaagttcaggctggaggctccggatgcagatgagcttcccaaaggggagtttgacccagggcaggacacctaccagcacccacccaaggacagcagcgggcagcatgtggacgtgacccacggagtgactgtggttgtggtgggggggttcttaaaataactttttagcccccgtcttcctattttgagtttggttcagatcttaagcagctccatgcaactgtatttatttttgatgacaagactcccatctaaagtttttctcctgcctgatcatttcattggtggctgaaggattctagagaaccttttgttcttgcaaggaaaacaagaatccaaaaccagtgactgttctgtgagtgattggtgtctgtgccgtttgttgtcaagtccagggtccaggaagggtcttttcagtcaaggtcagtggaggcccaacagccacagccacagatggatccatcactgcagtgaaggaggagcagggcctagatggtggaggagcggggcaagctggtgggcactcctggccttgcctcactgtccagctcgagacactatctccttagcatcggcctcagctgctgttgtcttcacagccggccataccaccttcccgcaggctggtagggtccactgttccagccccagggctagttgctggtccaccaggagagaaggcccaggcctggctcac

SEQ ID NO: 359163 - DNA, 1028 bp, Homo sapiens
cgatcaccacccacctgatgccatgtttcttgtagtagcgggcagtgtcagtgcacgagaccaacctgaagaaacagggcctgctgcctctgaccttcgctgacccggctgactacaacaagattcaccctgtggacaagctgaccattcagggcctgaaggacttcacccctggcaagcccctgaagtgcatcatcaagcaccccaacgggacccaggagaccatcctcctgaaccacaccttcaacgagacgcagattgagtggttccgcgctggcagtgccctcaacagaatgaaggaactgcaacagtgagggcagtgcctccccgccccgccgctggcgtcaagttcagctccacgtgtgccatcagtggatccgatccgtccagccatggcttcctattccaagatggtgtgaccagacatgcttcctgctccccgcttagcccacggagtgactgtggttgtggtgggggggttcttaaaataactttttagcccccgtcttcctattttgagtttggttcagatcttaagcagctccatgcaactgtatttatttttgatgacaagactcccatctaaagtttttctcctgcctgatcatttcattggtggctgaaggattctagagaaccttttgttcttgcaaggaaaacaagaatccaaaaccagtgactgttctgtgagtgattggtgtctgtgccgtttgttgtcaagtccagggtccaggaagggtcttttcagtcaaggtcagtggaggcccaacagccacagccacagatggatccatcactgcagtgaaggaggagcagggcctagatggtggaggagcggggcaagctggtgggcactcctggccttgcctcactgtccagctcgagacactatctccttagcatcggcctcagctgctgttgtcttcacagccggccataccaccttcccgcaggctggtagggtccactgttccagccccagggctagttgctggtccaccaggagagaaggcccaggcctggctcac

SEQ ID NO: 359164 - DNA, 1526 bp, Homo sapiens
acgtcagcggaatgcgacctcatctttgtcagtgcacaaaatggcgccctacagcctactggtgactcggctgcagaaagctctgggtgtgcggcagtaccatgtggcctcagtcctgtgccaacgggccaaggtggcgatgagccactttgagcccaacgagtacatccattatgacctgctagagaagaacattaacattgttcgcaaacgactgaaccggccgctgacactctcggagaagattgtgtatggacacctggatgaccccgccagccaggaaattgagcgaggcaagtcgtacctgcggctgcggccggaccgtgtggccatgcaggatgcgacggcccagatggccatgctccagttcatcagcagcgggctgtccaaggtggctgtgccatccaccatccactgtgaccatctgattgaagcccaggttgggggcgagaaagacctgcgccgggccaaggacatcaaccaggaagtttataatttcctggcaactgcaggtgccaaatatggcgtgggcttctggaagcctggatctggaatcattcaccagattattctggaaaactatgcgtaccctggtgttcttctgattggcactgactcccacacccccaatggtggcggccttgggggcatctgcattggagttgggggtgccgatgctgtggatgtcatggctgggatcccctgggagctgaagtgccccaaggtgattggcgtgaagctgacgggctctctctccggttggtcctcacccaaagatgtgatcctgaaggtggcaggcatcctcacggtgaaaggtggcacaggtgcaatcgtggaataccacgggcctggtgtagactccatctcctgcactggcatggcgacaatctgcaacatgggtgcagaaattggggccaccacttccgtgttcccttacaaccacaggatgaagaagtacctgagcaagaccggccgggaagacattgccaatctagctgatgaattcaaggatcacttggtgcctgaccctggctgccattatgaccaactaattgaaattaacctcagtgagctgaagccacacatcaatgggcccttcacccctgacctggctcaccctgtggcagaagtgggcaaggtggcagagaaggaaggatggcctctggacatccgagtggacgccctggcatgccagtcactggcatctgctgctgctgggtacagtgtggctgtgaagagcatggagcctggagccagatggcctgggcttgaatcctggctctgccacctaacagccactaacagctgagtgaccctgagcaaactacttcactgtctatgtgtgggttccccatctgtaaaacaggagtcatgatcgtactgacacctttgaaggtggtgttgggcctactgctgctatcaccaatgagaaaaataaataaaaaataaagttgtctggagaagtgacaatatgtgaaaagagatttctataccgtctggccgaaaataagggcaatataatgtgt

SEQ ID NO: 359165 - DNA, 673 bp, Homo sapiens
acgtcagcggaatgcgacctcatctttgtcagtgcacaaaatggcgccctacagcctactggtgactcggctgcagaaagctctgggtgtgcggcagtaccatgtggcctcagtcctgtgccaacgggccaaggtggcgatgagccactttgagcccaacgagtacatccattatgacctgctagagaagaacattaacattgttcgcaaacgactgaaccggccgctgacactctcggagaagattgtgtatggacacctggatgaccccgccagccaggaaattgagcgaggcaagtcgtacctgcggctgcggccggaccgtgtggccatgcaggatgcgacggcccagatggccatgctccagttcatcagcagcgggctgtccaaggtggctgtgccatccaccatccactgtgaccatctgattgaagcccaggttgggggcgagaaagacctgcgccgggccaaggtgagcagaaggtggctttgggggtgggcaagtgggcaagactgggcgagaggcctcaccctcacactggagcaaaccagggcattgcctccaaattctcacacctctttggattggtctgcttttaaaacttgattttacttgtttctctttctaaaaatagcacttgctcattatgttaaaaaatacagaggaagccta

SEQ ID NO: 359166 - DNA, 957 bp, Homo sapiens
  misc_feature (818)..(818): n is a, c, g, or t
  misc_feature (835)..(835): n is a, c, g, or t
  misc_feature (839)..(839): n is a, c, g, or t
  misc_feature (844)..(844): n is a, c, g, or t
  misc_feature (847)..(847): n is a, c, g, or t
  misc_feature (862)..(862): n is a, c, g, or t
  misc_feature (864)..(864): n is a, c, g, or t
  misc_feature (866)..(866): n is a, c, g, or t
  misc_feature (869)..(869): n is a, c, g, or t
  misc_feature (875)..(875): n is a, c, g, or t
  misc_feature (878)..(878): n is a, c, g, or t
aatataggctaggtagaggctgggtgttgaattcgccgaggcaggcctctgcctcggccgcaggcccttcagtcaccgtcgcctcgtctccctgactgtccgcaggcctgggcagcatggccgtattccggtcgggtctcctggtgctgacgacgccgctggcctccctagcccctcgcctggcctccatcctgacctcggcggcccggctggtgaatcacacactctatgttcacctgcagccgggcatgagcctggagggcccggctcagccccagtccagccccgtgcaggccacgtttgaggttcttgatttcatcacgcacctctatgctggcgccgacgtccacaggcacttggacgtcagaatcctactgaccaatatccgaaccaagagcacctttctccctcccctgcccacctcagtccagaatctcgcccacccgccagaagtcgtgttgacagatttccagaccctggatggaagccagtacaacccggtcaaacagcagctagtgcgttacgccaccagctgttacagctgttgtccgcgactggcctcggtgctgctatactccgattatgggataggagaagtgcccgtggagcccctggatgtccccttaccctccacgatcaggccagcttcccccgtggccgggtctccaaagcagccggtgcgtggctactaccgtggcgctgtcggtggcacgtttgaccgcctgcacaacgcccacaaggtgttgctcagtgtcgcgtgcatcctggcccaggagcagcttgtggtgggagtagcagacaaagatctgttgaagagnaagttgtcctgactgtncaancttancgnacgttggacatctgngnantcngggggncanaagcctccttgtttgattgtccccttgggccccctgggccctgcttcacccccggtctcggggcgggaacaatcgggga

SEQ ID NO: 359167 - DNA, 2507 bp, Homo sapiens
tatccgtgttcggagttgcggtttctccgttagtgcttccgggttgcagccagggaagcctccgcggtggtgcaagtggaacccaagccttgaggtttcagtgagtagggggccgacgtgagctttagcgtccccctttagcctccctcttcgattccttgaagaccctggtgcagcttagcaagagggcccaggatttttggatccccagccctgtgacaagggttcctgtccagtttccccctcccaggatttcgactcagttcagcgaagtcaccgccccgtctgagaaatgaggacaccaaggcttagagcacagccccgaggcgccgtctaccaggccccgtcccctcccccggctcctgtcggtcagcactgaaaccccgtccctgctccaggcctccttctctggggtccaaggtcccatacaggcctctgcctcggccgcaggcccttcagtcaccgtcgcctcgtctccctgactgtccgcaggcctgggcagcatggccgtattccggtcgggtctcctggtgctgacgacgccgctggcctccctagcccctcgcctggcctccatcctgacctcggcggcccggctggtgaatcacacactctatgttcacctgcagccgggcatgagcctggagggcccggctcagccccagtccagccccgtgcaggccacgtttgaggttcttgatttcatcacgcacctctatgctggcgccgacgtccacaggcacttggacgtcagaatcctactgaccaatatccgaaccaagagcacctttctccctcccctgcccacctcagtccagaatctcgcccacccgccagaagtcgtgttgacagatttccagaccctggatggaagccagtacaacccggtcaaacagcagctagtgcgttacgccaccagctgttacagctgttgtccgcgactggcctcggtgctgctatactccgattatgggataggagaagtgcccgtggagcccctggatgtccccttaccctccacgatcaggccagcttcccccgtggccgggtctccaaagcagccggtgcgtggctactaccgtggcgctgtcggtggcacgtttgaccgcctgcacaacgcccacaaggtgttgctcagtgtcgcgtgcatcctggcccaggagcagcttgtggtgggagtagcagacaaagatctgttgaagagcaagttgctccctgagctgctccaaccttatacagaacgtgtggaacatctgagtgaattcctggtggacatcaagccctccttgacttttgatgtcatccccctgctggacccctatgggcccgctggctctgacccctccctggagttcctggtggtcagcgaggagacctatcgtggggggatggccatcaaccgcttccgccttgagaatgacctggaggaacttgctttgtaccagatccagctgctgaaggacctcagacatacggagaatgaagaggacaaagtcagctcctccagcttccgccagcgaatgttggggaacctgcttcggcctccatatgaaaggccagagctccccacatgtctctatgtaattgggctgactggcatcagtggctctgggaagagctcaatagctcagcgactgaagggcctgggggcgtttgtcattgacagtgaccacctgggtcatcgggcctatgccccaggtggccctgcctaccagcctgtggtggaggcctttggaacagatattctccataaagatggcatcatcaacaggaaggtcctaggcagccgggtgtttgggaataagaagcagctgaagatactcacggacattatgtggccaattatcgcaaagctggcccgagaggagatggatcgggctgtggctgagggaaagcgtgtgtgtgtgattgatgccgctgtgttgcttgaagccggctggcagaacctggtccatgaggtgtggactgctgtcatcccagagactgaggctgtaagacgcattgtggagagggatggcctcagtgaagccgcggctcaaagccggctgcagagccagatgagcgggcagcagcttgtggaacagagccacgtggtgctcagcaccttgtgggagccgcatatcacccaacgccaggtggagaaagcctgggccctcttgcagaagcgcattcccaagactcatcaggccctcgactgaaaagttctcagtggggccagactggctcctggagctgacaagcgaccccgtggtgaggagaaatgggggccttgatgctcaccctggttcaggcccagaggtccaagctatactgtgcaggacatggccaggcctggtggacacaggaagcctacccaacacgctggtatttggccaacactgaggatgtggttcatgggggagcagtcccctccccactcttgcccatgggtgactcttacccacagctgactagggccagcgcaaatactggaacctgtaacagaattaaaggtgaatgttctgaga

SEQ ID NO: 359168 - DNA, 2472 bp, Homo sapiens
cggctaggtcgaggccggtggttaaatcggccgagtgcaagtggaacccaagccttgaggtttcagtgagtagggggccgacgtgagctttagcgtccccctttagcctccctcttcgattccttgaagaccctggtgcagcttagcaagagggcccaggatttttggatccccagccctgtgacaagggttcctgtccagtttccccctcccaggatttcgactcagttcagcgaagtcaccgccccgtctgagaaatgaggacaccaaggcttagagcacagccccgaggcgccgtctaccaggccccgtcccctcccccggctcctgtcggtcagcactgaaaccccgtccctgctccaggcctccttctctggggtccaaggtcccatacaggcctctgcctcggccgcaggcccttcagtcaccgtcgcctcgtctccctgactgtccgcaggcctgggcagcatggccgtattccggtcgggtctcctggtgctgacgacgccgctggcctccctagcccctcgcctggcctccatcctgacctcggcggcccggctggtgaatcacacactctatgttcacctgcagccgggcatgagcctggagggcccggctcagccccagtccagccccgtgcaggccacgtttgaggttcttgatttcatcacgcacctctatgctggcgccgacgtccacaggcacttggacgtcagaatcctactgaccaatatccgaaccaagagcacctttctccctcccctgcccacctcagtccagaatctcgcccacccgccagaagtcgtgttgacagatttccagaccctggatggaagccagtacaacccggtcaaacagcagctagtgcgttacgccaccagctgttacagctgttgtccgcgactggcctcggtgctgctatactccgattatgggataggagaagtgcccgtggagcccctggatgtccccttaccctccacgatcaggccagcttcccccgtggccgggtctccaaagcagccggtgcgtggctactaccgtggcgctgtcggtggcacgtttgaccgcctgcacaacgcccacaaggtgttgctcagtgtcgcgtgcatcctggcccaggagcagcttgtggtgggagtagcagacaaagatctgttgaagagcaagttgctccctgagctgctccaaccttatacagaacgtgtggaacatctgagtgaattcctggtggacatcaagccctccttgacttttgatgtcatccccctgctggacccctatgggcccgctggctctgacccctccctggagttcctggtggtcagcgaggagacctatcgtggggggatggccatcaaccgcttccgccttgagaatgacctggaggaacttgctttgtaccagatccagctgctgaaggacctcagacatacggagaatgaagaggacaaagtcagctcctccagcttccgccagcgaatgttggggaacctgcttcggcctccatatgaaaggccagagctccccacatgtctctatgtaattgggctgactggcatcagtggctctgggaagagctcaatagctcagcgactgaagggcctgggggcgtttgtcattgacagtgaccacctgggtcatcgggcctatgccccaggtggccctgcctaccagcctgtggtggaggcctttggaacagatattctccataaagatggcatcatcaacaggaaggtcctaggcagccgggtgtttgggaataagaagcagctgaagatactcacggacattatgtggccaattatcgcaaagctggcccgagaggagatggatcgggctgtggctgagggaaagcgtgtgtgtgtgattgatgccgctgtgttgcttgaagccggctggcagaacctggtccatgaggtgtggactgctgtcatcccagagactgaggctgtaagacgcattgtggagagggatggcctcagtgaagccgcggctcaaagccggctgcagagccagatgagcgggcagcagcttgtggaacagagccacgtggtgctcagcaccttgtgggagccgcatatcacccaacgccaggtggagaaagcctgggccctcttgcagaagcgcattcccaagactcatcaggccctcgactgaaaagttctcagtggggccagactggctcctggagctgacaagcgaccccgtggtgaggagaaatgggggccttgatgctcaccctggttcaggcccagaggtccaagctatactgtgcaggacatggccaggcctggtggacacaggaagcctacccaacacgctggtatttggccaacactgaggatgtggttcatgggggagcagtcccctccccactcttgcccatgggtgactcttacccacagctgactagggccagcgcaaatactggaacctgtaacagaattaaaggtgaatgttctgaga

SEQ ID NO: 359169 - DNA, 2378 bp, Homo sapiens
tatccgtgttcggagttgcggtttctccgttagtgcttccgggttgcagccagggaagcctccgcggtggttggatccccagccctgtgacaagggttcctgtccagtttccccctcccaggatttcgactcagttcagcgaagtcaccgccccgtctgagaaatgaggacaccaaggcttagagcacagccccgaggcgccgtctaccaggccccgtcccctcccccggctcctgtcggtcagcactgaaaccccgtccctgctccaggcctccttctctggggtccaaggtcccatacaggcctctgcctcggccgcaggcccttcagtcaccgtcgcctcgtctccctgactgtccgcaggcctgggcagcatggccgtattccggtcgggtctcctggtgctgacgacgccgctggcctccctagcccctcgcctggcctccatcctgacctcggcggcccggctggtgaatcacacactctatgttcacctgcagccgggcatgagcctggagggcccggctcagccccagtccagccccgtgcaggccacgtttgaggttcttgatttcatcacgcacctctatgctggcgccgacgtccacaggcacttggacgtcagaatcctactgaccaatatccgaaccaagagcacctttctccctcccctgcccacctcagtccagaatctcgcccacccgccagaagtcgtgttgacagatttccagaccctggatggaagccagtacaacccggtcaaacagcagctagtgcgttacgccaccagctgttacagctgttgtccgcgactggcctcggtgctgctatactccgattatgggataggagaagtgcccgtggagcccctggatgtccccttaccctccacgatcaggccagcttcccccgtggccgggtctccaaagcagccggtgcgtggctactaccgtggcgctgtcggtggcacgtttgaccgcctgcacaacgcccacaaggtgttgctcagtgtcgcgtgcatcctggcccaggagcagcttgtggtgggagtagcagacaaagatctgttgaagagcaagttgctccctgagctgctccaaccttatacagaacgtgtggaacatctgagtgaattcctggtggacatcaagccctccttgacttttgatgtcatccccctgctggacccctatgggcccgctggctctgacccctccctggagttcctggtggtcagcgaggagacctatcgtggggggatggccatcaaccgcttccgccttgagaatgacctggaggaacttgctttgtaccagatccagctgctgaaggacctcagacatacggagaatgaagaggacaaagtcagctcctccagcttccgccagcgaatgttggggaacctgcttcggcctccatatgaaaggccagagctccccacatgtctctatgtaattgggctgactggcatcagtggctctgggaagagctcaatagctcagcgactgaagggcctgggggcgtttgtcattgacagtgaccacctgggtcatcgggcctatgccccaggtggccctgcctaccagcctgtggtggaggcctttggaacagatattctccataaagatggcatcatcaacaggaaggtcctaggcagccgggtgtttgggaataagaagcagctgaagatactcacggacattatgtggccaattatcgcaaagctggcccgagaggagatggatcgggctgtggctgagggaaagcgtgtgtgtgtgattgatgccgctgtgttgcttgaagccggctggcagaacctggtccatgaggtgtggactgctgtcatcccagagactgaggctgtaagacgcattgtggagagggatggcctcagtgaagccgcggctcaaagccggctgcagagccagatgagcgggcagcagcttgtggaacagagccacgtggtgctcagcaccttgtgggagccgcatatcacccaacgccaggtggagaaagcctgggccctcttgcagaagcgcattcccaagactcatcaggccctcgactgaaaagttctcagtggggccagactggctcctggagctgacaagcgaccccgtggtgaggagaaatgggggccttgatgctcaccctggttcaggcccagaggtccaagctatactgtgcaggacatggccaggcctggtggacacaggaagcctacccaacacgctggtatttggccaacactgaggatgtggttcatgggggagcagtcccctccccactcttgcccatgggtgactcttacccacagctgactagggccagcgcaaatactggaacctgtaacagaattaaaggtgaatgttctgaga

SEQ ID NO: 359170 - DNA, 2310 bp, Homo sapiens
tgctagtagaggccgggtggtttggcgacgagtagggggccgacgtgagctttagcgtccccctttagcctccctcttcgattccttgaagaccctggtgcagcttagcaagagggcccaggatttttggatccccagccctgtgacaagggttcctgtccagtttccccctcccaggatttcgactcagttcagcgaagtcaccgccccgtctgagaaatgaggacaccaaggcttagagcacagccccgaggcgccgtctaccaggccccgtcccctcccccggctcctgtcggcctgggcagcatggccgtattccggtcgggtctcctggtgctgacgacgccgctggcctccctagcccctcgcctggcctccatcctgacctcggcggcccggctggtgaatcacacactctatgttcacctgcagccgggcatgagcctggagggcccggctcagccccagtccagccccgtgcaggccacgtttgaggttcttgatttcatcacgcacctctatgctggcgccgacgtccacaggcacttggacgtcagaatcctactgaccaatatccgaaccaagagcacctttctccctcccctgcccacctcagtccagaatctcgcccacccgccagaagtcgtgttgacagatttccagaccctggatggaagccagtacaacccggtcaaacagcagctagtgcgttacgccaccagctgttacagctgttgtccgcgactggcctcggtgctgctatactccgattatgggataggagaagtgcccgtggagcccctggatgtccccttaccctccacgatcaggccagcttcccccgtggccgggtctccaaagcagccggtgcgtggctactaccgtggcgctgtcggtggcacgtttgaccgcctgcacaacgcccacaaggtgttgctcagtgtcgcgtgcatcctggcccaggagcagcttgtggtgggagtagcagacaaagatctgttgaagagcaagttgctccctgagctgctccaaccttatacagaacgtgtggaacatctgagtgaattcctggtggacatcaagccctccttgacttttgatgtcatccccctgctggacccctatgggcccgctggctctgacccctccctggagttcctggtggtcagcgaggagacctatcgtggggggatggccatcaaccgcttccgccttgagaatgacctggaggaacttgctttgtaccagatccagctgctgaaggacctcagacatacggagaatgaagaggacaaagtcagctcctccagcttccgccagcgaatgttggggaacctgcttcggcctccatatgaaaggccagagctccccacatgtctctatgtaattgggctgactggcatcagtggctctgggaagagctcaatagctcagcgactgaagggcctgggggcgtttgtcattgacagtgaccacctgggtcatcgggcctatgccccaggtggccctgcctaccagcctgtggtggaggcctttggaacagatattctccataaagatggcatcatcaacaggaaggtcctaggcagccgggtgtttgggaataagaagcagctgaagatactcacggacattatgtggccaattatcgcaaagctggcccgagaggagatggatcgggctgtggctgagggaaagcgtgtgtgtgtgattgatgccgctgtgttgcttgaagccggctggcagaacctggtccatgaggtgtggactgctgtcatcccagagactgaggctgtaagacgcattgtggagagggatggcctcagtgaagccgcggctcaaagccggctgcagagccagatgagcgggcagcagcttgtggaacagagccacgtggtgctcagcaccttgtgggagccgcatatcacccaacgccaggtggagaaagcctgggccctcttgcagaagcgcattcccaagactcatcaggccctcgactgaaaagttctcagtggggccagactggctcctggagctgacaagcgaccccgtggtgaggagaaatgggggccttgatgctcaccctggttcaggcccagaggtccaagctatactgtgcaggacatggccaggcctggtggacacaggaagcctacccaacacgctggtatttggccaacactgaggatgtggttcatgggggagcagtcccctccccactcttgcccatgggtgactcttacccacagctgactagggccagcgcaaatactggaacctgtaacagaattaaaggtgaatgttctgaga

SEQ ID NO: 359171 - DNA, 1797 bp, Homo sapiens
tatccgtgttcggagttgcggtttctccgttagtgcttccgggttgcagccagggaagcctccgcggtggtgcaagtggaacccaagccttgaggtttcagtgtccagaatctcgcccacccgccagaagtcgtgttgacagatttccagaccctggatggaagccagtacaacccggtcaaacagcagctagtgcgttacgccaccagctgttacagctgttgtccgcgactggcctcggtgctgctatactccgattatgggataggagaagtgcccgtggagcccctggatgtccccttaccctccacgatcaggccagcttcccccgtggccgggtctccaaagcagccggtgcgtggctactaccgtggcgctgtcggtggcacgtttgaccgcctgcacaacgcccacaaggtgttgctcagtgtcgcgtgcatcctggcccaggagcagcttgtggtgggagtagcagacaaagatctgttgaagagcaagttgctccctgagctgctccaaccttatacagaacgtgtggaacatctgagtgaattcctggtggacatcaagccctccttgacttttgatgtcatccccctgctggacccctatgggcccgctggctctgacccctccctggagttcctggtggtcagcgaggagacctatcgtggggggatggccatcaaccgcttccgccttgagaatgacctggaggaacttgctttgtaccagatccagctgctgaaggacctcagacatacggagaatgaagaggacaaagtcagctcctccagcttccgccagcgaatgttggggaacctgcttcggcctccatatgaaaggccagagctccccacatgtctctatgtaattgggctgactggcatcagtggctctgggaagagctcaatagctcagcgactgaagggcctgggggcgtttgtcattgacagtgaccacctgggtcatcgggcctatgccccaggtggccctgcctaccagcctgtggtggaggcctttggaacagatattctccataaagatggcatcatcaacaggaaggtcctaggcagccgggtgtttgggaataagaagcagctgaagatactcacggacattatgtggccaattatcgcaaagctggcccgagaggagatggatcgggctgtggctgagggaaagcgtgtgtgtgtgattgatgccgctgtgttgcttgaagccggctggcagaacctggtccatgaggtgtggactgctgtcatcccagagactgaggctgtaagacgcattgtggagagggatggcctcagtgaagccgcggctcaaagccggctgcagagccagatgagcgggcagcagcttgtggaacagagccacgtggtgctcagcaccttgtgggagccgcatatcacccaacgccaggtggagaaagcctgggccctcttgcagaagcgcattcccaagactcatcaggccctcgactgaaaagttctcagtggggccagactggctcctggagctgacaagcgaccccgtggtgaggagaaatgggggccttgatgctcaccctggttcaggcccagaggtccaagctatactgtgcaggacatggccaggcctggtggacacaggaagcctacccaacacgctggtatttggccaacactgaggatgtggttcatgggggagcagtcccctccccactcttgcccatgggtgactcttacccacagctgactagggccagcgcaaatactggaacctgtaacagaattaaaggtgaatgttctgaga

SEQ ID NO: 359172 - DNA, 2638 bp, Homo sapiens
tatccgtgttcggagttgcggtttctccgttagtgcttccgggttgcagccagggaagcctccgcggtggtgcaagtggaacccaagccttgaggtttcagtgagtagggggccgacgtgagctttagcgtccccctttagcctccctcttcgattccttgaagaccctggtgcagcttagcaagagggcccaggatttttggatccccagccctgtgacaagggttcctgtccagtttccccctcccaggatttcgactcagttcagcgaagtcaccgccccgtctgagaaatgaggacaccaaggcttagagcacagccccgaggcgccgtctaccaggccccgtcccctcccccggctcctgtcggtcagcactgaaaccccgtccctgctccaggcctccttctctggggtccaaggtcccatacaggcctctgcctcggccgcaggcccttcagtcaccgtcgcctcgtctccctgactgtccgcaggcctgggcagcatggccgtattccggtcgggtctcctggtgctgacgacgccgctggcctccctagcccctcgcctggcctccatcctgacctcggcggcccggctggtgaatcacacactctatgttcacctgcagccgggcatgagcctggagggcccggctcagccccagtccagccccgtgcaggccacgtttgaggttcttgatttcatcacgcacctctatgctggcgccgacgtccacaggcacttggacgtcagaatcctactgaccaatatccgaaccaagagcacctttctccctcccctgcccacctcagtccagaatctcgcccacccgccagaagtcgtgttgacagatttccagaccctggatggaagccagtacaacccggtcaaacagcagctagtgcgttacgccaccagctgttacagctgttgtccgcgactggcctcggtgctgctatactccgattatgggataggagaagtgcccgtggagcccctggatgtccccttaccctccacgatcaggccagcttcccccgtggccgggtctccaaagcagccggtgcgtggctactaccgtggcgctgtcggtggcacgtttgaccgcctgcacaacgcccacaaggtgttgctcagtgtcgcgtgcatcctggcccaggagcagcttgtggtgggagtagcagacaaagatctgttgaagagcaagttgctccctgagctgctccaaccttatacagaacgtgtggaacatctgagtgaattcctggtggacatcaagccctccttgacttttgatgtcatccccctgctggacccctatgggcccgctggctctgacccctccctggagttcctggtggtcagcgaggagacctatcgtggggggatggccatcaaccgcttccgccttgagaatgacctggaggaacttgctttgtaccagatccagctgctgaaggacctcagacatacggagaatgaagaggacaaagtcagctcctccagcttccgccagcgaatgttggggaacctgcttcggcctccatatgtaagctcctctccctccttccctcctgcttggtgtcctggcaatgctggagagtagaagctgaggggctcagccccaggcatgaggctgagggccccagtaactgtgggttccctttcacctatccccaggaaaggccagagctccccacatgtctctatgtaattgggctgactggcatcagtggctctgggaagagctcaatagctcagcgactgaagggcctgggggcgtttgtcattgacagtgaccacctgggtcatcgggcctatgccccaggtggccctgcctaccagcctgtggtggaggcctttggaacagatattctccataaagatggcatcatcaacaggaaggtcctaggcagccgggtgtttgggaataagaagcagctgaagatactcacggacattatgtggccaattatcgcaaagctggcccgagaggagatggatcgggctgtggctgagggaaagcgtgtgtgtgtgattgatgccgctgtgttgcttgaagccggctggcagaacctggtccatgaggtgtggactgctgtcatcccagagactgaggctgtaagacgcattgtggagagggatggcctcagtgaagccgcggctcaaagccggctgcagagccagatgagcgggcagcagcttgtggaacagagccacgtggtgctcagcaccttgtgggagccgcatatcacccaacgccaggtggagaaagcctgggccctcttgcagaagcgcattcccaagactcatcaggccctcgactgaaaagttctcagtggggccagactggctcctggagctgacaagcgaccccgtggtgaggagaaatgggggccttgatgctcaccctggttcaggcccagaggtccaagctatactgtgcaggacatggccaggcctggtggacacaggaagcctacccaacacgctggtatttggccaacactgaggatgtggttcatgggggagcagtcccctccccactcttgcccatgggtgactcttacccacagctgactagggccagcgcaaatactggaacctgtaacagaattaaaggtgaatgttctgaga

SEQ ID NO: 359173 - DNA, 2531 bp, Homo sapiens
tatccgtgttcggagttgcggtttctccgttagtgcttccgggttgcagccagggaagcctccgcggtggtgcaagtggaacccaagccttgaggtttcagtgagtagggggccgacgtgagctttagcgtccccctttagcctccctcttcgattccttgaagaccctggtgcagcttagcaagagggcccaggatttttggatccccagccctgtgacaagggttcctgtccagtttccccctcccaggatttcgactcagttcagcgaagtcaccgccccgtctgagaaatgaggacaccaaggcttagagcacagccccgaggcgccgtctaccaggccccgtcccctcccccggctcctgtcggtcagcactgaaaccccgtccctgctccaggcctccttctctggggtccaaggtcccatacaggcctctgcctcggccgcaggcccttcagtcaccgtcgcctcgtctccctgactgtccgcaggcctgggcagcatggccgtattccggtcgggtctcctggtgctgacgacgccgctggcctccctagcccctcgcctggcctccatcctgacctcggcggcccggctggtgaatcacacactctatgttcacctgcagccgggcatgagcctggagggcccggctcagccccagtccagccccgtgcaggccacgtttgaggttcttgatttcatcacgcacctctatgctggcgccgacgtccacaggcacttggacgtcagaatcctactgaccaatatccgaaccaagagcacctttctccctcccctgcccacctcagtccagaatctcgcccacccgccagaagtcgtgttgacagatttccagaccctggatggaagccagtacaacccggtcaaacagcagctagtgcgttacgccaccagctgttacagctgttgtccgcgactggcctcggtgctgctatactccgattatgggataggagaagtgcccgtggagcccctggatgtccccttaccctccacgatcaggccagcttcccccgtggccgggtctccaaagcagccggtgcgtggctactaccgtggcgctgtcggtggcacgtttgaccgcctgcacaacgcccacaaggtgttgctcagtgtcgcgtgcatcctggcccaggagcagcttgtggtgggagtagcagacaaagatctgttgaagagcaagttgctccctgagctgctccaaccttatacagaacgtgtggaacatctgagtgaattcctggtggacatcaagccctccttgacttttgatgtcatccccctgctggacccctatgggcccgctggctctgacccctccctggagttcctggtggtcagcgaggagacctatcgtggggggatggccatcaaccgcttccgccttgagaatgacctggaggaacttgctttgtaccagatccagctgctgaaggacctcagacatacggagaatgaagaggacaaagtcagctcctccagcttccgccagcgaatgttggggaacctgcttcggcctccatatgaaaggccagagctccccacatgtctctatgtaattgggctgactggcatcagtggctctgggaagagctcaatagctcagcgactgaagggcctgggggcgtttgtcattgacagtgaccacctgggtcatcgggcctatgccccaggtggccctgcctaccagcctgtggtggaggcctttggaacagatattctccataaagatggcatcatcaacaggaaggtcctaggcagccgggtgtttgggaataagaagcagctgaagatactcacggacattatgtggccaattatcgcaaagctggcccgagaggagatggatcgggctgtggctgagggaaagcgtgtgtgtgtgattgatgccgctgtgttgcttgaagccggctggcagaacctggtccatgaggtgtggactgctgtcatcccagagactgaggctgtaagacgcattgtggagagggatggcctcagtgaagccgcggctcaaagccggctgcagagccagatgagcgggcagcagcttgtggaacagagccacgtggtgctcagcaccttgtgggagccgcatatcacccaacgccaggtggagaaagcctgggccctcttgcagaagcgcattcccaagactcatcaggccctcgactgaaaagttctcagtggggccagactggctcctggagctgacaagcgaccccgtggtgaggagaaatgggggccttgatgctcaccctggttcaggcccagaggtccaagctatactgtgcaggacatggccaggcctggtggacacaggaagcctacccaacacgctggtatttggccaacactgaggatgtggttcatgggggagcagtcccctccccactcttgcccatgggtgactcttacccacagctgactagggccagcgcaaatactggaacctgtaacagaattaaaggtgaatgttctgagaagatgttgcttgtatggtgtctgc

SEQ ID NO: 359174 - DNA, 1347 bp, Homo sapiens
acagaacgtgtggaacatctgagtgaattcctggtggagcagcgcaagttgctccctgagctgctccaaccttatacagaacgtgtggaacatctgagtgaattcctggtggacatcaagccctccttgacttttgatgtcatccccctgctggacccctatgggcccgctggctctgacccctccctggagttcctggtggtcagcgaggagacctatcgtggggggatggccatcaaccgcttccgccttgagaatgacctggaggaacttgctttgtaccagatccagctgctgaaggacctcagacatacggagaatgaagaggacaaagtcagctcctccagcttccgccagcgaatgttggggaacctgcttcggcctccatatgaaaggccagagctccccacatgtctctatgtaattgggctgactggcatcagtggctctgggaagagctcaatagctcagcgactgaagggcctgggggcgtttgtcattgacagtgaccacctgggtcatcgggcctatgccccaggtggccctgcctaccagcctgtggtggaggcctttggaacagatattctccataaagatggcatcatcaacaggaaggtcctaggcagccgggtgtttgggaataagaagcagctgaagatactcacggacattatgtggccaattatcgcaaagctggcccgagaggagatggatcgggctgtggctgagggaaagcgtgtgtgtgtgattgatgccgctgtgttgcttgaagccggctggcagaacctggtccatgaggtgtggactgctgtcatcccagagactgaggctgtaagacgcattgtggagagggatggcctcagtgaagccgcggctcaaagccggctgcagagccagatgagcgggcagcagcttgtggaacagagccacgtggtgctcagcaccttgtgggagccgcatatcacccaacgccaggtggagaaagcctgggccctcttgcagaagcgcattcccaagactcatcaggccctcgactgaaaagttctcagtggggccagactggctcctggagctgacaagcgaccccgtggtgaggagaaatgggggccttgatgctcaccctggttcaggcccagaggtccaagctatactgtgcaggacatggccaggcctggtggacacaggaagcctacccaacacgctggtatttggccaacactgaggatgtggttcatgggggagcagtcccctccccactcttgcccatgggtgactcttacccacagctgactagggccagcgcaaatactggaacctgtaacagaattaaaggtgaatgttctgaga

SEQ ID NO: 359175 - DNA, 2326 bp, Homo sapiens
tatccgtgttcggagttgcggtttctccgttagtgcttccgggttgcagccagggaagcctccgcggtggtgcaagtggaacccaagccttgaggtttcagtgagtagggggccgacgtgagctttagcgtccccctttagcctccctcttcgattccttgaagaccctggtgcagcttagcaagagggcccaggatttttggatccccagccctgtgacaagggttcctgtccagtttccccctcccaggatttcgactcagttcagcgaagtcaccgccccgtctgagaaatgaggacaccaaggcttagagcacagccccgaggcgccgtctaccaggccccgtcccctcccccggctcctgtcggtcagcactgaaaccccgtccctgctccaggcctccttctctggggtccaaggtcccatacaggcctctgcctcggccgcaggcccttcagtcaccgtcgcctcgtctccctgactgtccgcaggcctgggcagcatggccgtattccggtcgggtctcctggtgctgacgacgccgctggcctccctagcccctcgcctggcctccatcctgacctcggcggcccggctggtgaatcacacactctatgttcacctgcagccgggcatgagcctggagggcccggctcagccccagtccagccccgtgcaggccacgtttgaggttcttgatttcatcacgcacctctatgctggcgccgacgtccacaggcacttggacgtcagaatcctactgaccaatatccgaaccaagagcacctttctccctcccctgcccacctcagtccagaatctcgcccacccgccagaagtcgtgttgacagatttccagaccctggatggaagccagtacaacccggtcaaacagcagctagtgcgttacgccaccagctgttacagctgttgtccgcgactggcctcggtgctgctatactccgattatgggataggagaagtgcccgtggagcccctggatgtccccttaccctccacgatcaggccagcttcccccgtggccgggtctccaaagcagccggtgcgtggctactaccgtggcgctgtcggtggcacgtttgaccgcctgcacaacgcccacaaggtgttgctcagtgtcgcgtgcatcctggcccaggagcagcttgtggtgggagtagcagacaaagatctgttgaagagcaagttgctccctgagctgctccaaccttatacagaacgtgtggaacatctgagtgaattcctggtggacatcaagccctccttgacttttgatgtcatccccctgctggacccctatgggcccgctggctctgacccctccctggagttcctggtggtcagcgaggagacctatcgtggggggatggccatcaaccgcttccgccttgagaatgacctggaggaacttgctttgtaccagatccagctgctgaaggacctcagacatacggagaatgaagaggacaaagtcagctcctccagcttccgccagcgaatgttggggaacctgcttcggcctccatatgaaaggccagagctccccacatgtctctatgtaattgggctgactggcatcagtggctctgggaagagctcaatagctcagcgactgaagggcctgggggcgtttgtcattgacagtgaccacctgggtcatcgggcctatgccccaggtggccctgcctaccagcctgtggtggaggcctttggaacagatattctccataaagatggcatcatcaacaggaaggtcctaggcagccgggtgtttgggaataagaagcagctgaagatactcacggacattatgtggccaattatcgcaaagctggcccgagaggagatggatcgggctgtggctgagggaaagcgtgtgtgtgtgattgatgccgctgtgttgcttgaagccggctggcagaacctggtccatgaggtgtggactgctgtcatcccagagactgagttcccaagactcatcaggccctcgactgaaaagttctcagtggggccagactggctcctggagctgacaagcgaccccgtggtgaggagaaatgggggccttgatgctcaccctggttcaggcccagaggtccaagctatactgtgcaggacatggccaggcctggtggacacaggaagcctacccaacacgctggtatttggccaacactgaggatgtggttcatgggggagcagtcccctccccactcttgcccatgggtgactcttacccacagctgactagggccagcgcaaatactggaacctgtaacagaattaaaggtgaatgttctgaga

SEQ ID NO: 359176 - DNA, 2061 bp, Homo sapiens
tatccgtgttcggagttgcggtttctccgttagtgcttccgggttgcagccagggaagcctccgcggtggtgcaagtggaacccaagccttgaggtttcagtgagtagggggccgacgtgagctttagcgtccccctttagcctccctcttcgattccttgaagaccctggtgcagcttagcaagagggcccaggatttttggatccccagccctgtgacaagggttcctgtccagtttccccctcccaggatttcgactcagttcagcgaagtcaccgccccgtctgagaaatgaggacaccaaggcttagagcacagccccgaggcgccgtctaccaggccccgtcccctcccccggctcctgtcggtcagcactgaaaccccgtccctgctccaggcctccttctctggggtccaaggtcccatacaggcctctgcctcggccgcaggcccttcagtcaccgtcgcctcgtctccctgactgtccgcaggcctgggcagcatggccgtattccggtcgggtctcctggtgctgacgacgccgctggcctccctagcccctcgcctggcctccatcctgacctcggcggcccggctggtgaatcacacactctatgttcacctgcagccgggcatgagcctggagggcccggctcagccccagtccagccccgtgcaggccacgtttgaggttcttgatttcatcacgcacctctatgctggcgccgacgtccacaggcacttggacgtcagaatcctactgaccaatatccgaaccaagagcacctttctccctcccctgcccacctcagtccagaatctcgcccacccgccagaagtcgtgttgacagatttccagaccctggatggaagccagtacaacccggtcaaacagcagctagtgcgttacgccaccagctgttacagctgttgtccgcgactggcctcggtgctgctatactccgattatgggataggagaagtgcccgtggagcccctggatgtccccttaccctccacgatcaggccagcttcccccgtggccgggtctccaaagcagccggtgcgtggctactaccgtggcgctgtcggtggcacgtttgaccgcctgcacaacgcccacaaggtgttgctcagtgtcgcgtgcatcctggcccaggagcagcttgtggtgggagtagcagacaaagatctgttgaagagcaagttgctccctgagctgctccaaccttatacagaacgtgtggaacatctgagtgaattcctggtggacatcaagccctccttgacttttgatgtcatccccctgctggacccctatgggcccgctggctctgacccctccctggagttcctggtggtcagcgaggagacctatcgtggggggatggccatcaaccgcttccgccttgagaatgacctggaggaacttgctttgtaccagatccagctgctgaaggacctcagacatacggagaatgaagaggacaaagtcagctcctccagcttccgccagcgaatgttggggaacctgcttcggcctccatatgaaaggccagagctccccacatgtctctatgtaattgggctgactggcatcagtggctctgggaagagctcaatagctcagcgactgaagggcctgggggcgtttgtcattgacagtgaccacctgggtcatcgggcctatgccccaggtggccctgcctaccagcctgtggtggaggcctttggaacagatattctccataaagatggcatcatcaacaggaaggtcctaggcagccgggtgtttgggaataagaagcagctgaagatactcacggacattatgtggccaattatcgcaaagctggcccgagaggagatggatcgggctgtggctgagggaaagcgtgtgtgtgtgattgatgccgctgtgttgcttgaagccggctggcagaacctggtccatgaggtgtggactgctgtcatcccagagactgagtcttacccacagctgactagggccagcgcaaatactggaacctgtaacagaattaaaggtgaatgttctgaga

SEQ ID NO: 359177 - DNA, 955 bp, Homo sapiens
  misc_feature (41)..(41): n is a, c, g, or t
gctgcggtcactctaaggatcccgggttatcgatgccaccnaggcccacagtggctctgggaagagctcaatagctcagcgactgaagggcctgggggcgtttgtcattgacagtgaccacctgggtcatcgggcctatgccccaggtggccctgcctaccagcctgtggtggaggcctttggaacagatattctccataaagatggcatcatcaacaggaaggtcctaggcagccgggtgtttgggaataagaagcagctgaagatactcacggacattatgtggccaattatcgcaaagctggcccgagaggagatggatcgggctgtggctgagggaaagcgtgtgtgtgtgattgatgccgctgtgttgcttgaagccggctggcagaacctggtccatgaggtgtggactgctgtcatcccagagactgaggctgtaagacgcattgtggagagggatggcctcagtgaagccgcggctcaaagccggctgcagagccagatgagcgggcagcagcttgtggaacagagccacgtggtgctcagcaccttgtgggagccgcatatcacccaacgccaggtggagaaagcctgggccctcttgcagaagcgcattcccaagactcatcaggccctcgactgaaaagttctcagtggggccagactggctcctggagctgacaagcgaccccgtggtgaggagaaatgggggccttgatgctcaccctggttcaggcccagaggtccaagctatactgtgcaggacatggccaggcctggtggacacaggaagcctacccaacacgctggtatttggccaacactgaggatgtggttcatgggggagcagtcccctccccactcttgcccatgggtgactcttacccacagctgactagggccagcgcaaatactggaacctgtaacagaattaaaggtgaatgttctgaga

SEQ ID NO: 359178 - DNA, 1704 bp, Homo sapiens
tatccgtgttcggagttgcggtttctccgttagtgcttccgggttgcagccagggaagcctccgcggtggtgcaagtggaacccaagccttgaggtttcagtgagtagggggccgacgtgagctttagcgtccccctttagcctccctcttcgattccttgaagaccctggtgcagcttagcaagagggcccaggatttttggatccccagccctgtgacaagggttcctgtccagtttccccctcccaggatttcgactcagttcagcgaagtcaccgccccgtctgagaaatgaggacaccaaggcttagagcacagccccgaggcgccgtctaccaggccccgtcccctcccccggctcctgtcggtcagcactgaaaccccgtccctgctccaggcctccttctctggggtccaaggtcccatacaggcctctgcctcggccgcaggcccttcagtcaccgtcgcctcgtctccctgactgtccgcaggcctgggcagcatggccgtattccggtcgggtctcctggtgctgacgacgccgctggcctccctagcccctcgcctggcctccatcctgacctcggcggcccggctggtgaatcacacactctatgttcacctgcagccgggcatgagcctggagggcccggctcagccccagtccagccccgtgcaggccacgtttgaggttcttgatttcatcacgcacctctatgctggcgccgacgtccacaggcacttggacgtcagaatcctactgaccaatatccgaaccaagagcacctttctccctcccctgcccacctcagtccagaatctcgcccacccgccagaagtcgtgttgacagatttccagaccctggatggaagccagtacaacccggtcaaacagcagctagtgcgttacgccaccagctgttacagctgttgtccgcgactggcctcggtgctgctatactccgattatgggataggagaagtgcccgtggagcccctggatgtccccttaccctccacgatcaggccagcttcccccgtggccgggtctccaaagcagccggtgcgtggctactaccgtggcgctgtcggtggcacgtttgaccgcctgcacaacgcccacaaggtgttgctcagtgtcgcgtgcatcctggcccaggagcagcttgtggtgggagtagcagacaaagatctgttgaagagcaagttgctccctgagctgctccaaccttatacagaacgtgtggaacatctgagtgaattcctggtggacatcaagccctccttgacttttgatgtcatccccctgctggacccctatgggcccgctggctctgacccctccctggagttcctggtggtcagcgaggagacctatcgtggggggatggccatcaaccgcttccgccttgagaatgacctggaggaacttgctttgtaccagatccagctgctgaaggacctcagacatacggagaatgaagaggcccagaggtccaagctatactgtgcaggacatggccaggcctggtggacacaggaagcctacccaacacgctggtatttggccaacactgaggatgtggttcatgggggagcagtcccctccccactcttgcccatgggtgactcttacccacagctgactagggccagcgcaaatactggaacctgtaacagaattaaaggtgaatgttctgaga

SEQ ID NO: 359179 - DNA, 1281 bp, Homo sapiens
tatccgtgttcggagttgcggtttctccgttagtgcttccgggttgcagccagggaagcctccgcggtggtgcaagtggaacccaagccttgaggtttcagtgagtagggggccgacgtgagctttagcgtccccctttagcctccctcttcgattccttgaagaccctggtgcagcttagcaagagggcccaggatttttggatccccagccctgtgacaagggttcctgtccagtttccccctcccaggatttcgactcagttcagcgaagtcaccgccccgtctgagaaatgaggacaccaaggcttagagcacagccccgaggcgccgtctaccaggccccgtcccctcccccggctcctgtcggtcagcactgaaaccccgtccctgctccaggcctccttctctggggtccaaggtcccatacaggcctctgcctcggccgcaggcccttcagtcaccgtcgcctcgtctccctgactgtccgcaggcctgggcagcatggccgtattccggtcgggtctcctggtgctgacgacgccgctggcctccctagcccctcgcctggcctccatcctgacctcggcggcccggctggtgaatcacacactctatgttcacctgcagccgggcatgagcctggagggcccggctcagccccagtccagccccgtgcaggccacgtttgaggttcttgatttcatcacgcacctctatgctggcgccgacgtccacaggcacttggacgtcagaatcctactgaccaatatccgaaccaagagcacctttctccctcccctgcccacctcagtccagaatctcgcccacccgccagaagtcgtgttgacagatttccagaccctggatggaagccagtacaacccggtcaaacagcagctagtgcgttacgccaccagctgttacagctgttgtccgcgactggcctcggtgctgctatactccgattatgggataggagaagtgcccgtggagcccctggatgtccccttactcacaaacggcagaaaacccggggcagggcacaacaaccggcgtgtcaacacgggggagccacggaggcagcatgacggccgcacaagccccaagggctgccagcgccgtgatcagcaccagacaaagcgacgcaaccccacaggccgacacaccacacaccacaaaaaaggacacagacggacaaaccaaacaaaacaaagaaaaacagacaccaacccaacatcggacaaacaacagacgcagccaacaccgcccccgctccccg

SEQ ID NO: 359180 - DNA, 1126 bp, Homo sapiens
tatccgtgttcggagttgcggtttctccgttagtgcttccgggttgcagccagggaagcctccgcggtggtgcaagtggaacccaagccttgaggtttcagtgagtagggggccgacgtgagctttagcgtccccctttagcctccctcttcgattccttgaagaccctggtgcagcttagcaagagggcccaggatttttggatccccagccctgtgacaagggttcctgtccagtttccccctcccaggatttcgactcagttcagcgaagtcaccgccccgtctgagaaatgaggacaccaaggcttagagcacagccccgaggcgccgtctaccaggccccgtcccctcccccggctcctgtcggtcagcactgaaaccccgtccctgctccaggcctccttctctggggtccaaggtcccatacaggcctctgcctcggccgcaggcccttcagtcaccgtcgcctcgtctccctgactgtccgcaggcctgggcagcatggccgtattccggtcgggtctcctggtgctgacgacgccgctggcctccctagcccctcgcctggcctccatcctgacctcggcggcccggctggtgaatcacacactctatgttcacctgcagccgggcatgagcctggagggcccggctcagccccagtccagccccgtgcaggccacgtttgaggttcttgatttcatcacgcacctctatgctggcgccgacgtccacaggcacttggacgtcagaatcctactgaccaatatccgaaccaagagcaccttcccaagactcatcaggccctcgactgaaaagttctcagtggggccagactggctcctggagctgacaagcgaccccgtggtgaggagaaatgggggccttgatgctcaccctggttcaggcccagaggtccaagctatactgtgcaggacatggccaggcctggtggacacaggaagcctacccaacacgctggtatttggccaacactgaggatgtggttcatgggggagcagtcccctccccactcttgcccatgggtgactcttacccacagctgactagggccagcgcaaatactggaacctgtaacagaattaaaggtgaatgttctgaga

SEQ ID NO: 359181 - DNA, 888 bp, Homo sapiens
tatccgtgttcggagttgcggtttctccgttagtgcttccgggttgcagccagggaagcctccgcggtggtgcaagtggaacccaagccttgaggtttcagtgagtagggggccgacgtgagctttagcgtccccctttagcctccctcttcgattccttgaagaccctggtgcagcttagcaagagggcccaggatttttggatccccagccctgtgacaagggttcctgtccagtttccccctcccaggatttcgactcagttcagcgaagtcaccgccccgtctgagaaatgaggacaccaaggcttagagcacagccccgaggcgccgtctaccaggccccgtcccctcccccggctcctgtcggtcagcactgaaaccccgtccctgctccaggcctccttctctggggtccaaggtcccatacaggcctctgcctcggccgcaggcccttcagtcaccgtcgcctcgtctccctgactgtccgcaggcctgggcagcatggccgtattccggtcgggtctcctggtgctgacgacgccgctggcctccctagcccctcgcctggcctccatcctgacctcggcggcccggctggtgaatcacacactctatgttcacctgcagccgggcatgagcctggagggcccggctcagccccagtccagccccgtgcaggccacgtttgaggttcttgatttcatcacgcacctctatgctggcgccgacgtccacaggcacttggacgtcagaatcctactgaccaatatccgaaccaagagcaccccctccccactcttgcccatgggtgactcttacccacagctgactagggccagcgcaaatactggaacctgtaacagaattaaaggtgaatgttctgaga

SEQ ID NO: 359182 - DNA, 484 bp, Homo sapiens
atggaagccagtacaacccggtcaaacagcagctagtgcgttacgccaccagctgttacagctgttgtccgcgactggcctcggtgctgctatactccgattatgggataggagaagtgcccgtggagcccctggatgtccccttaccctccacgatcaggccagcttcccccgtggccgggtctccaaagcagccggtgcgtggctactaccgtggcgctgtcggtggcacgtttgaccgcctgcacaacgcccacaaggtgttgctcagtgtcgcgtgcatcctggcccaggagcagcttgtggtgggagtagcagacaaagatctgttgaagagtgagtaagagggaccctggactagggtggaggatccccaaatctccccacccccgacccttatgccgagatcaaggaagggtagggccattcattacttcccacccttcccaaatgtcacagtggttgacactcaattggtgctaag

SEQ ID NO: 359183 - DNA, 997 bp, Homo sapiens
tatccgtgttcggagttgcggtttctccgttagtgcttccgggttgcagccagggaagcctccgcggtggttggatccccagccctgtgacaagggttcctgtccagtttccccctcccaggatttcgactcagttcagcgaagtcaccgccccgtctgagaaatgaggacaccaaggcttagagcacagccccgaggcgccgtctaccaggccccgtcccctcccccggctcctgtcggtcagcactgaaaccccgtccctgctccaggcctccttctctggggtccaaggtcccatacaggcctctgcctcggccgcaggcccttcagtcaccgtcgcctcgtctccctgactgtccgcaggcctgggcagcatggccgtattccggtcgggtctcctggtgctgacgacgccgctggcctccctagcccctcgcctggcctccatcctgacctcggcggcccggctggtgaatcacacactctatgttcacctgcagccgggcatgagcctggagggcccggctcagccccagtccagccccgtgcaggccacgtttgaggttcttgatttcatcacgcacctctatgctggcgccgacgtccacaggcacttggacgtcagaatcctactgaccaatatccgaaccaagagcaccttcccaagactcatcaggccctcgactgaaaagttctcagtggggccagactggctcctggagctgacaagcgaccccgtggtgaggagaaatgggggccttgatgctcaccctggttcaggcccagaggtccaagctatactgtgcaggacatggccaggcctggtggacacaggaagcctacccaacacgctggtatttggccaacactgaggatgtggttcatgggggagcagtcccctccccactcttgcccatgggtgactcttacccacagctgactagggccagcgcaaatactggaacctgtaacagaattaaaggtgaatgttctgaga

SEQ ID NO: 359184 - DNA, 377 bp, Homo sapiens
cggcacgaggggactgctgtcatcccagagactgaggctgtaagacgcattgtggagagggatggcctcagtgaagccgcggctcaaagccggctgcagagccagatgagcgggcagcagcttgtggaacagagccacgtggtgctcagcaccttgtgggagccgcatatcacccaacgccaggtggagaaagcctgggccctcttgcagaagcgcattcccaagactcatcaggccctcgactgaaaagttctcagtggggccagactggctcctgccctccccactcttgcccatgggtgactcttacccacagctgactagggccagcgcaaatactggaacctgtaacagaattaaaggtgaatgttctgaga

SEQ ID NO: 359185 - DNA, 2118 bp, Homo sapiens
tatccgtgttcggagttgcggtttctccgttagtgcttccgggttgcagccagggaagcctccgcggtggtgcaagtggaacccaagccttgaggtttcagtggcctgggcagcatggccgtattccggtcgggtctcctggtgctgacgacgccgctggcctccctagcccctcgcctggcctccatcctgacctcggcggcccggctggtgaatcacacactctatgttcacctgcagccgggcatgagcctggagggcccggctcagccccagtccagccccgtgcaggccacgtttgaggttcttgatttcatcacgcacctctatgctggcgccgacgtccacaggcacttggacgtcagaatcctactgaccaatatccgaaccaagagcacctttctccctcccctgcccacctcagtccagaatctcgcccacccgccagaagtcgtgttgacagatttccagaccctggatggaagccagtacaacccggtcaaacagcagctagtgcgttacgccaccagctgttacagctgttgtccgcgactggcctcggtgctgctatactccgattatgggataggagaagtgcccgtggagcccctggatgtccccttaccctccacgatcaggccagcttcccccgtggccgggtctccaaagcagccggtgcgtggctactaccgtggcgctgtcggtggcacgtttgaccgcctgcacaacgcccacaaggtgttgctcagtgtcgcgtgcatcctggcccaggagcagcttgtggtgggagtagcagacaaagatctgttgaagagcaagttgctccctgagctgctccaaccttatacagaacgtgtggaacatctgagtgaattcctggtggacatcaagccctccttgacttttgatgtcatccccctgctggacccctatgggcccgctggctctgacccctccctggagttcctggtggtcagcgaggagacctatcgtggggggatggccatcaaccgcttccgccttgagaatgacctggaggaacttgctttgtaccagatccagctgctgaaggacctcagacatacggagaatgaagaggacaaagtcagctcctccagcttccgccagcgaatgttggggaacctgcttcggcctccatatgaaaggccagagctccccacatgtctctatgtaattgggctgactggcatcagtggctctgggaagagctcaatagctcagcgactgaagggcctgggggcgtttgtcattgacagtgaccacctgggtcatcgggcctatgccccaggtggccctgcctaccagcctgtggtggaggcctttggaacagatattctccataaagatggcatcatcaacaggaaggtcctaggcagccgggtgtttgggaataagaagcagctgaagatactcacggacattatgtggccaattatcgcaaagctggcccgagaggagatggatcgggctgtggctgagggaaagcgtgtgtgtgtgattgatgccgctgtgttgcttgaagccggctggcagaacctggtccatgaggtgtggactgctgtcatcccagagactgaggctgtaagacgcattgtggagagggatggcctcagtgaagccgcggctcaaagccggctgcagagccagatgagcgggcagcagcttgtggaacagagccacgtggtgctcagcaccttgtgggagccgcatatcacccaacgccaggtggagaaagcctgggccctcttgcagaagcgcattcccaagactcatcaggccctcgactgaaaagttctcagtggggccagactggctcctggagctgacaagcgaccccgtggtgaggagaaatgggggccttgatgctcaccctggttcaggcccagaggtccaagctatactgtgcaggacatggccaggcctggtggacacaggaagcctacccaacacgctggtatttggccaacactgaggatgtggttcatgggggagcagtcccctccccactcttgcccatgggtgactcttacccacagctgactagggccagcgcaaatactggaacctgtaacagaattaaaggtgaatgttctgaga

SEQ ID NO: 359186 - DNA, 2383 bp, Homo sapiens
tatccgtgttcggagttgcggtttctccgttagtgcttccgggttgcagccagggaagcctccgcggtggtgcaagtggaacccaagccttgaggtttcagtgagtagggggccgacgtgagctttagcgtccccctttagcctccctcttcgattccttgaagaccctggtgcagcttagcaagagggcccaggatttttggatccccagccctgtgacaagggttcctgtccagtttccccctcccaggatttcgactcagttcagcgaagtcaccgccccgtctgagaaatgaggacaccaaggcttagagcacagccccgaggcgccgtctaccaggccccgtcccctcccccggctcctgtcggcctgggcagcatggccgtattccggtcgggtctcctggtgctgacgacgccgctggcctccctagcccctcgcctggcctccatcctgacctcggcggcccggctggtgaatcacacactctatgttcacctgcagccgggcatgagcctggagggcccggctcagccccagtccagccccgtgcaggccacgtttgaggttcttgatttcatcacgcacctctatgctggcgccgacgtccacaggcacttggacgtcagaatcctactgaccaatatccgaaccaagagcacctttctccctcccctgcccacctcagtccagaatctcgcccacccgccagaagtcgtgttgacagatttccagaccctggatggaagccagtacaacccggtcaaacagcagctagtgcgttacgccaccagctgttacagctgttgtccgcgactggcctcggtgctgctatactccgattatgggataggagaagtgcccgtggagcccctggatgtccccttaccctccacgatcaggccagcttcccccgtggccgggtctccaaagcagccggtgcgtggctactaccgtggcgctgtcggtggcacgtttgaccgcctgcacaacgcccacaaggtgttgctcagtgtcgcgtgcatcctggcccaggagcagcttgtggtgggagtagcagacaaagatctgttgaagagcaagttgctccctgagctgctccaaccttatacagaacgtgtggaacatctgagtgaattcctggtggacatcaagccctccttgacttttgatgtcatccccctgctggacccctatgggcccgctggctctgacccctccctggagttcctggtggtcagcgaggagacctatcgtggggggatggccatcaaccgcttccgccttgagaatgacctggaggaacttgctttgtaccagatccagctgctgaaggacctcagacatacggagaatgaagaggacaaagtcagctcctccagcttccgccagcgaatgttggggaacctgcttcggcctccatatgaaaggccagagctccccacatgtctctatgtaattgggctgactggcatcagtggctctgggaagagctcaatagctcagcgactgaagggcctgggggcgtttgtcattgacagtgaccacctgggtcatcgggcctatgccccaggtggccctgcctaccagcctgtggtggaggcctttggaacagatattctccataaagatggcatcatcaacaggaaggtcctaggcagccgggtgtttgggaataagaagcagctgaagatactcacggacattatgtggccaattatcgcaaagctggcccgagaggagatggatcgggctgtggctgagggaaagcgtgtgtgtgtgattgatgccgctgtgttgcttgaagccggctggcagaacctggtccatgaggtgtggactgctgtcatcccagagactgaggctgtaagacgcattgtggagagggatggcctcagtgaagccgcggctcaaagccggctgcagagccagatgagcgggcagcagcttgtggaacagagccacgtggtgctcagcaccttgtgggagccgcatatcacccaacgccaggtggagaaagcctgggccctcttgcagaagcgcattcccaagactcatcaggccctcgactgaaaagttctcagtggggccagactggctcctggagctgacaagcgaccccgtggtgaggagaaatgggggccttgatgctcaccctggttcaggcccagaggtccaagctatactgtgcaggacatggccaggcctggtggacacaggaagcctacccaacacgctggtatttggccaacactgaggatgtggttcatgggggagcagtcccctccccactcttgcccatgggtgactcttacccacagctgactagggccagcgcaaatactggaacctgtaacagaattaaaggtgaatgttctgaga

SEQ ID NO: 359187 - DNA, 2215 bp, Homo sapiens
cggctaggtcgaggccggtggttaaatcggccgagtgcaagtggaacccaagccttgaggtttcagtgtttccccctcccaggatttcgactcagttcagcgaagtcaccgccccgtctgagaaatgaggacaccaaggcttagagcacagccccgaggcgccgtctaccaggccccgtcccctcccccggctcctgtcggcctgggcagcatggccgtattccggtcgggtctcctggtgctgacgacgccgctggcctccctagcccctcgcctggcctccatcctgacctcggcggcccggctggtgaatcacacactctatgttcacctgcagccgggcatgagcctggagggcccggctcagccccagtccagccccgtgcaggccacgtttgaggttcttgatttcatcacgcacctctatgctggcgccgacgtccacaggcacttggacgtcagaatcctactgaccaatatccgaaccaagagcacctttctccctcccctgcccacctcagtccagaatctcgcccacccgccagaagtcgtgttgacagatttccagaccctggatggaagccagtacaacccggtcaaacagcagctagtgcgttacgccaccagctgttacagctgttgtccgcgactggcctcggtgctgctatactccgattatgggataggagaagtgcccgtggagcccctggatgtccccttaccctccacgatcaggccagcttcccccgtggccgggtctccaaagcagccggtgcgtggctactaccgtggcgctgtcggtggcacgtttgaccgcctgcacaacgcccacaaggtgttgctcagtgtcgcgtgcatcctggcccaggagcagcttgtggtgggagtagcagacaaagatctgttgaagagcaagttgctccctgagctgctccaaccttatacagaacgtgtggaacatctgagtgaattcctggtggacatcaagccctccttgacttttgatgtcatccccctgctggacccctatgggcccgctggctctgacccctccctggagttcctggtggtcagcgaggagacctatcgtggggggatggccatcaaccgcttccgccttgagaatgacctggaggaacttgctttgtaccagatccagctgctgaaggacctcagacatacggagaatgaagaggacaaagtcagctcctccagcttccgccagcgaatgttggggaacctgcttcggcctccatatgaaaggccagagctccccacatgtctctatgtaattgggctgactggcatcagtggctctgggaagagctcaatagctcagcgactgaagggcctgggggcgtttgtcattgacagtgaccacctgggtcatcgggcctatgccccaggtggccctgcctaccagcctgtggtggaggcctttggaacagatattctccataaagatggcatcatcaacaggaaggtcctaggcagccgggtgtttgggaataagaagcagctgaagatactcacggacattatgtggccaattatcgcaaagctggcccgagaggagatggatcgggctgtggctgagggaaagcgtgtgtgtgtgattgatgccgctgtgttgcttgaagccggctggcagaacctggtccatgaggtgtggactgctgtcatcccagagactgaggctgtaagacgcattgtggagagggatggcctcagtgaagccgcggctcaaagccggctgcagagccagatgagcgggcagcagcttgtggaacagagccacgtggtgctcagcaccttgtgggagccgcatatcacccaacgccaggtggagaaagcctgggccctcttgcagaagcgcattcccaagactcatcaggccctcgactgaaaagttctcagtggggccagactggctcctggagctgacaagcgaccccgtggtgaggagaaatgggggccttgatgctcaccctggttcaggcccagaggtccaagctatactgtgcaggacatggccaggcctggtggacacaggaagcctacccaacacgctggtatttggccaacactgaggatgtggttcatgggggagcagtcccctccccactcttgcccatgggtgactcttacccacagctgactagggccagcgcaaatactggaacctgtaacagaattaaaggtgaatgttctgaga

SEQ ID NO: 359188 - DNA, 3318 bp, Homo sapiens
  misc_feature (2915)..(2915): n is a, c, g, or t
tatccgtgttcggagttgcggtttctccgttagtgcttccgggttgcagccagggaagcctccgcggtggtgcaagtggaacccaagccttgaggtttcagtgagtagggggccgacgtgagctttagcgtccccctttagcctccctcttcgattccttgaagaccctggtgcagcttagcaagagggcccaggatttttggatccccagccctgtgacaagggttcctgtccagtttccccctcccaggatttcgactcagttcagcgaagtcaccgccccgtctgagaaatgaggacaccaaggcttagagcacagccccgaggcgccgtctaccaggccccgtcccctcccccggctcctgtcggtcagcactgaaaccccgtccctgctccaggcctccttctctggggtccaaggtcccatacaggcctctgcctcggccgcaggcccttcagtcaccgtcgcctcgtctccctgactgtccgcaggcctgggcagcatggccgtattccggtcgggtctcctggtgctgacgacgccgctggcctccctagcccctcgcctggcctccatcctgacctcggcggcccggctggtgaatcacacactctatgttcacctgcagccgggcatgagcctggagggcccggctcagccccagtccagccccgtgcaggccacgtttgaggttcttgatttcatcacgcacctctatgctggcgccgacgtccacaggcacttggacgtcagaatcctactgaccaatatccgaaccaagagcacctttctccctcccctgcccacctcagtccagaatctcgcccacccgccagaagtcgtgttgacagatttccagaccctggatggaagccagtacaacccggtcaaacagcagctagtgcgttacgccaccagctgttacagctgttgtccgcgactggcctcggtgctgctatactccgattatgggataggagaagtgcccgtggagcccctggatgtccccttaccctccacgatcaggccagcttcccccgtggccgggtctccaaagcagccggtgcgtggctactaccgtggcgctgtcggtggcacgtttgaccgcctgcacaacgcccacaaggtgttgctcagtgtcgcgtgcatcctggcccaggagcagcttgtggtgggagtagcagacaaagatctgttgaagagcaagttgctccctgagctgctccaaccttatacagaacgtgtggaacatctgagtgaattcctggtggacatcaagccctccttgacttttgatgtcatccccctgctggacccctatgggcccgctggctctgacccctccctggagttcctggtggtcagcgaggagacctatcgtggggggatggccatcaaccgcttccgccttgagaatgacctggaggaacttgctttgtaccagatccagctgctgaaggacctcagacatacggagaatgaagaggacaaagtcagctcctccagcttccgccagcgaatgttggggaacctgcttcggcctccatatgaaaggccagagctccccacatgtctctatgtaattgggctgactggcatcagtggctctgggaagagctcaatagctcagcgactgaagggcctgggggcgtttgtcattgacagtgaccacctgggtcatcgggcctatgccccaggtggccctgcctaccagcctgtggtggaggcctttggaacagatattctccataaagatggcatcatcaacaggaaggtcctaggcagccgggtgtttgggaataagaagcagctgaagatactcacggacattatgtggccaattatcgcaaagctggcccgagaggagatggatcgggctgtggctgagggaaagcgtgtgtgtgtgattgatgccgctgtgttgcttgaagccggctggcagaacctggtccatgaggtgtggactgctgtcatcccagagactgaggctgtaagacgcattgtggagagggatggcctcagtgaagccgcggctcaaagccggctgcagagccagatgagcgggcagcagcttgtggaacagagccacgtggtgctcagcaccttgtgggagccgcatatcacccaacgccaggtggagaaagcctgggccctcttgcagaagcgcattcccaagactcatcaggccctcgactgaaaagttctcagtggggccagactggctcctggagctgacaagcgaccccgtggtgaggagaaatgggggccttgatgctcaccctggttcaggcccagaggtccaagctatactgtgcaggacatggccaggcctggtggacacaggaagcctacccaacacgctggtatttggccaacactgaggatgtggttcatgggggagcagtcccctccccactcttgcccatgggtgactcttacccacagctgactagggccagcgcaaatactggaacctgtaacagaattaaaggtgaatgttctgagacaaaaaaaaaaaaaaaaaagaaaaaaaaacaagcatgtgtgctggcgcgcggccctggtgcgctgtggaaaaaagttttttatagaaccatgctcggttggggcgcgcgcgggggcccccaaagtatggtggaaagggtgaccagggccgccaatagcgcgtgtgttccctctagggagaaccccgtgggcctagcgactatcggtgctgtggggttttctcaccccaattataaaaaacaagcgccggggggggcgacacaccgggcgcgtgttctggaacaaaccctaaaggggagcttccgggaggcctcaatacggggtggtccttatccaacacgggggagcgccgcaaagggaggagcgcccgagatttttaaatattaccggcccgcgtcggcgggggggnccaagtcactagcggtaactgaccaacatacaggaagcctacagcacgaacacaacagtactatacaataacacccacaacacactagcgcagcagtcacaacacccacatacacggcgacacaccacaaataccctacgaccagactagacgaatcgcaggacatagcaggcgaacaccaacggataacaaagctggcacgcaacggactcgagccgtcaaccacatcgaagcccctgcccacacaatcaacccgtctgaagccacgggagaagcgaaacagtggcgagaaggagtcactaagcccgtggaacccacatcccccgtaacgagtcaatccagagcagacgaaaagacacaggcaacaacaaccaagcgacaccacacaaaaaaaacaccatgc

SEQ ID NO: 359189 - DNA, 1587 bp, Homo sapiens
cacaggagttagtgcgttacagccgaccagctgtgacatgcgtgattgtccgatcaatgtgcctggttttacacagattgtgatcggactttctcctccacgatcaggccagcttcccccgtggccgggtctccaaagcagccggtgcgtggctactaccgtggcgctgtcggtggcacgtttgaccgcctgcacaacgcccacaaggtgttgctcagtgtcgcgtgcatcctggcccaggagcagcttgtggtgggagtagcagacaaagatctgttgaagagcaagttgctccctgagctgctccaaccttatacagaacgtgtggaacatctgagtgaattcctggtggacatcaagccctccttgacttttgatgtcatccccctgctggacccctatgggcccgctggctctgacccctccctggagttcctggtggtcagcgaggagacctatcgtggggggatggccatcaaccgcttccgccttgagaatgacctggaggaacttgctttgtaccagatccagctgctgaaggacctcagacatacggagaatgaagaggacaaagtcagctcctccagcttccgccagcgaatgttggggaacctgcttcggcctccatatgaaaggccagagctccccacatgtctctatgtaattgggctgactggcatcagtggctctgggaagagctcaatagctcagcgactgaagggcctgggggcgtttgtcattgacagtgaccacctgggtcatcgggcctatgccccaggtggccctgcctaccagcctgtggtggaggcctttggaacagatattctccataaagatggcatcatcaacaggaaggtcctaggcagccgggtgtttgggaataagaagcagctgaagatactcacggacattatgtggccaattatcgcaaagctggcccgagaggagatggatcgggctgtggctgagggaaagcgtgtgtgtgtgattgatgccgctgtgttgcttgaagccggctggcagaacctggtccatgaggtgtggactgctgtcatcccagagactgaggctgtaagacgcattgtggagagggatggcctcagtgaagccgcggctcaaagccggctgcagagccagatgagcgggcagcagcttgtggaacagagccacgtggtgctcagcaccttgtgggagccgcatatcacccaacgccaggtggagaaagcctgggccctcttgcagaagcgcattcccaagactcatcaggccctcgactgaaaagttctcagtggggccagactggctcctggagctgacaagcgaccccgtggtgaggagaaatgggggccttgatgctcaccctggttcaggcccagaggtccaagctatactgtgcaggacatggccaggcctggtggacacaggaagcctacccaacacgctggtatttggccaacactgaggatgtggttcatgggggagcagtcccctccccactcttgcccatgggtgactcttacccacagctgactagggccagcgcaaatactggaacctgtaacagaattaaaggtgaatgttctgaga

SEQ ID NO: 359190 - DNA, 2722 bp, Homo sapiens
tatccgtgttcggagttgcggtttctccgttagtgcttccgggttgcagccagggaagcctccgcggtggtgcaagtggaacccaagccttgaggtttcagtgagtagggggccgacgtgagctttagcgtccccctttagcctccctcttcgattccttgaagaccctggtgcagcttagcaagagggcccaggatttttggatccccagccctgtgacaagggttcctgtccagtttccccctcccaggatttcgactcagttcagcgaagtcaccgccccgtctgagaaatgaggacaccaaggcttagagcacagccccgaggcgccgtctaccaggccccgtcccctcccccggctcctgtcggtcagcactgaaaccccgtccctgctccaggcctccttctctggggtccaaggtcccatacaggcctctgcctcggccgcaggcccttcagtcaccgtcgcctcgtctccctgactgtccgcaggcctgggcagcatggccgtattccggtcgggtctcctggtgctgacgacgccgctggcctccctagcccctcgcctggcctccatcctgacctcggcggcccggctggtgaatcacacactctatgttcacctgcagccgggcatgagcctggagggcccggctcagccccagtccagccccgtgcaggccacgtttgaggttcttgatttcatcacgcacctctatgctggcgccgacgtccacaggcacttggacgtcagaatcctactgaccaatatccgaaccaagagcacctttctccctcccctgcccacctcagtccagaatctcgcccacccgccagaagtcgtgttgacagatttccagaccctggatggaagccagtacaacccggtcaaacagcagctagtgcgttacgccaccagctgttacagctgttgtccgcgactggcctcggtgctgctatactccgattatgggataggagaagtgcccgtggagcccctggatgtccccttaccctccacgatcaggccagcttcccccgtggccgggtctccaaagcagccggtgcgtggctactaccgtggcgctgtcggtggcacgtttgaccgcctgcacaacgcccacaaggtgttgctcagtgtcgcgtgcatcctggcccaggagcagcttgtggtgggagtagcagacaaagatctgttgaagagcaagttgctccctgagctgctccaaccttatacagaacgtgtggaacatctgagtgaattcctggtggacatcaagccctccttgacttttgatgtcatccccctgctggacccctatgggcccgctggctctgacccctccctggagttcctggtggtcagcgaggagacctatcgtggggggatggccatcaaccgcttccgccttgagaatgacctggaggaacttgctttgtaccagatccagctgctgaaggacctcagacatacggagaatgaagaggacaaagtcagctcctccagcttccgccagcgaatgttggggaacctgcttcggcctccatatgtaagctcctctccctccttccctcctgcttggtgtcctggcaatgctggagagtagaagctgaggggctcagccccaggcatgaggctgagggccccagtaactgtgggttccctttcacctatccccaggaaaggccagagctccccacatgtctctatgtaattgggctgactggcatcagtggctctgggaagagctcaatagctcagcgactgaagggcctgggggcgtttgtcattgacagtgaccacctgggtcatcgggcctatgccccaggtggccctgcctaccagcctgtggtggaggcctttggaacaggtaataactggggaaggctgaaagtggcctggagtgaggagctagccaggcctctgtgctcagttgtctgtctgtgttgtccagatattctccataaagatggcatcatcaacaggaaggtcctaggcagccgggtgtttgggaataagaagcagctgaagatactcacggacattatgtggccaattatcgcaaagctggcccgagaggagatggatcgggctgtggctgagggaaagcgtgtgtgtgtgattgatgccgctgtgttgcttgaagccggctggcagaacctggtccatgaggtgtggactgctgtcatcccagagactgaggctgtaagacgcattgtggagagggatggcctcagtgaagccgcggctcaaagccggctgcagagccagatgagcgggcagcagcttgtggaacagagccacgtggtgctcagcaccttgtgggagccgcatatcacccaacgccaggtggagaaagcctgggccctcttgcagaagcgcattcccaagactcatcaggccctcgactgaaaagttctcagtggggccagactggctcctggagctgacaagcgaccccgtggtgaggagaaatgggggccttgatgctcaccctggttcaggcccagaggtccaagctatactgtgcaggacatggccaggcctggtggacacaggaagcctacccaacacgctggtatttggccaacactgaggatgtggttcatgggggagcagtcccctccccactcttgcccatgggtgactcttacccacagctgactagggccagcgcaaatactggaacctgtaacagaattaaaggtgaatgttctgaga

SEQ ID NO: 359191 - DNA, 2448 bp, Homo sapiens
tatccgtgttcggagttgcggtttctccgttagtgcttccgggttgcagccagggaagcctccgcggtggtgcaagtggaacccaagccttgaggtttcagtgagtagggggccgacgtgagctttagcgtccccctttagcctccctcttcgattccttgaagaccctggtgcagcttagcaagagggcccaggatttttggatccccagccctgtgacaagggttcctgtccagtttccccctcccaggatttcgactcagttcagcgaagtcaccgccccgtctgagaaatgaggacaccaaggcttagagcacagccccgaggcgccgtctaccaggccccgtcccctcccccggctcctgtcggtcagcactgaaaccccgtccctgctccaggcctccttctctggggtccaaggtcccatacaggcctctgcctcggccgcaggcccttcagtcaccgtcgcctcgtctccctgactgtccgcaggcctgggcagcatggccgtattccggtcgggtctcctggtgctgacgacgccgctggcctccctagcccctcgcctggcctccatcctgacctcggcggcccggctggtgaatcacacactctatgttcacctgcagccgggcatgagcctggagggcccggctcagccccagtccagccccgtgcaggccacgtttgaggttcttgatttcatcacgcacctctatgctggcgccgacgtccacaggcacttggacgtcagaatcctactgaccaatatccgaaccaagagcacctttctccctcccctgcccacctcagtccagaatctcgcccacccgccagaagtcgtgttgacagatttccagaccctggatggaagccagtacaacccggtcaaacagcagctagtgcgttacgccaccagctgttacagctgttgtccgcgactggcctcggtgctgctatactccgattatgggataggagaagtgcccgtggagcccctggatgtccccttaccctccacgatcaggccagcttcccccgtggccgggtctccaaagcagccggtgcgtggctactaccgtggcgctgtcggtggcacgtttgaccgcctgcacaacgcccacaaggtgttgctcagtgtcgcgtgcatcctggcccaggagcagcttgtggtgggagtagcagacaaagatctgttgaagagcaagttgctccctgagctgctccaaccttatacagaacgtgtggaacatctgagtgaattcctggtggacatcaagccctccttgacttttgatgtcatccccctgctggacccctatgggcccgctggctctgacccctccctggagttcctggtggtcagcgaggagacctatcgtggggggatggccatcaaccgcttccgccttgagaatgacctggaggaacttgctttgtaccagatccagctgctgaaggacctcagacatacggagaatgaagaggacaaagtcagctcctccagcttccgccagcgaatgttggggaacctgcttcggcctccatatgaaaggccagagctccccacatgtctctatgtaattgggctgactggcatcagtggctctgggaagagctcaatagctcagcgactgaagggcctgggggcgtttgtcattgacagtgaccacctgggtcatcgggcctatgccccaggtggccctgcctaccagcctgtggtggaggcctttggaacagatattctccataaagatggcatcatcaacaggaaggtcctaggcagccgggtgtttgggaataagaagcagctgaagatactcacggacattatgtggccaattatcgcaaagctggcccgagaggagatggatcgggctgtggctgagggaaagcgtgtgtgtgtgattgatgccgctgtgttgcttgaagccggctggcagaacctggtccatgaggtgtggactgctgtcatcccagagactgaggctgtaagacgcattgtggagagggatggcctcagtgaagccgcggctcaaagccggctgcagagccagatgagcgggcagcagcttgtggaacagagccacgtggtgctcagcaccttgtgggagccgcatatcacccaacgccaggtggagaaagcctgggccctcttgcagaagcgcattcccaagactcatcaggccctcgactgaaaagttctcagtggggccagactggctcctgaggcccagaggtccaagctatactgtgcaggacatggccaggcctggtggacacaggaagcctacccaacacgctggtatttggccaacactgaggatgtggttcatgggggagcagtcccctccccactcttgcccatgggtgactcttacccacagctgactagggccagcgcaaatactggaacctgtaacagaattaaaggtgaatgttctgaga

SEQ ID NO: 359192 - DNA, 2090 bp, Homo sapiens
tatccgtgttcggagttgcggtttctccgttagtgcttccgggttgcagccagggaagcctccgcggtggtgcaagtggaacccaagccttgaggtttcagtgagtagggggccgacgtgagctttagcgtccccctttagcctccctcttcgattccttgaagaccctggtgcagcttagcaagagggcccaggatttttggatccccagccctgtgacaagggttcctgtccagtttccccctcccaggatttcgactcagttcagcgaagtcaccgccccgtctgagaaatgaggacaccaaggcttagagcacagccccgaggcgccgtctaccaggccccgtcccctcccccggctcctgtcggtcagcactgaaaccccgtccctgctccaggcctccttctctggggtccaaggtcccatacaggcctctgcctcggccgcaggcccttcagtcaccgtcgcctcgtctccctgactgtccgcaggcctgggcagcatggccgtattccggtcgggtctcctggtgctgacgacgccgctggcctccctagcccctcgcctggcctccatcctgacctcggcggcccggctggtgaatcacacactctatgttcacctgcagccgggcatgagcctggagggcccggctcagccccagtccagccccgtgcaggccacgtttgaggttcttgatttcatcacgcacctctatgctggcgccgacgtccacaggcacttggacgtcagaatcctactgaccaatatccgaaccaagagcacctttctccctcccctgcccacctcagtccagaatctcgcccacccgccagaagtcgtgttgacagatttccagaccctggatggaagccagtacaacccggtcaaacagcagctagtgcgttacgccaccagctgttacagctgttgtccgcgactggcctcggtgctgctatactccgattatgggataggagaagtgcccgtggagcccctggatgtccccttaccctccacgatcaggccagcttcccccgtggccgggtctccaaagcagccggtgcgtggctactaccgtggcgctgtcggtggcacgtttgaccgcctgcacaacgcccacaaggtgttgctcagtgtcgcgtgcatcctggcccaggagcagcttgtggtgggagtagcagacaaagatctgttgaagagcaagttgctccctgagctgctccaaccttatacagaacgtgtggaacatctgagtgaattcctggtggacatcaagccctccttgacttttgatgtcatccccctgctggacccctatgggcccgctggctctgacccctccctggagttcctggtggtcagcgaggagacctatcgtggggggatggccatcaaccgcttccgccttgagaatgacctggaggaacttgctttgtaccagatccagctgctgaaggacctcagacatacggagaatgaagaggacaaagtcagctcctccagcttccgccagcgaatgttggggaacctgcttcggcctccatatgaaaggccagagctccccacatgtctctatgtaattgggctgactggcatcagtggctctgggaagagctcaatagctcagcgactgaagggcctgggggcgtttgtcattgacagtgaccacctgggtcatcgggcctatgccccaggtggccctgcctaccagcctgtggtggaggcctttggaacagatattctccataaagatggcatcatcaacaggaaggtcctaggcagccgggtgtttgggaataagaagcagctgaagatactcacggacattatgtggccaattatcgcaaagctggcccgagaggagatggatcgggctgtggctgagggaaagcgtgtgtgtgtgattgatgccgctgtgttgcttgaacctacccaacacgctggtatttggccaacactgaggatgtggttcatgggggagcagtcccctccccactcttgcccatgggtgactcttacccacagctgactagggccagcgcaaatactggaacctgtaacagaattaaaggtgaatgttctgaga

SEQ ID NO: 359193 - DNA, 2055 bp, Homo sapiens
tatccgtgttcggagttgcggtttctccgttagtgcttccgggttgcagccagggaagcctccgcggtggtgcaagtggaacccaagccttgaggtttcagtgagtagggggccgacgtgagctttagcgtccccctttagcctccctcttcgattccttgaagaccctggtgcagcttagcaagagggcccaggatttttggatccccagccctgtgacaagggttcctgtccagtttccccctcccaggatttcgactcagttcagcgaagtcaccgccccgtctgagaaatgaggacaccaaggcttagagcacagccccgaggcgccgtctaccaggccccgtcccctcccccggctcctgtcggtcagcactgaaaccccgtccctgctccaggcctccttctctggggtccaaggtcccatacaggcctctgcctcggccgcaggcccttcagtcaccgtcgcctcgtctccctgactgtccgcaggcctgggcagcatggccgtattccggtcgggtctcctggtgctgacgacgccgctggcctccctagcccctcgcctggcctccatcctgacctcggcggcccggctggtgaatcacacactctatgttcacctgcagccgggcatgagcctggagggcccggctcagccccagtccagccccgtgcaggccacgtttgaggttcttgatttcatcacgcacctctatgctggcgccgacgtccacaggcacttggacgtcagaatcctactgaccaatatccgaaccaagagcacctttctccctcccctgcccacctcagtccagaatctcgcccacccgccagaagtcgtgttgacagatttccagaccctggatggaagccagtacaacccggtcaaacagcagctagtgcgttacgccaccagctgttacagctgttgtccgcgactggcctcggtgctgctatactccgattatgggataggagaagtgcccgtggagcccctggatgtccccttaccctccacgatcaggccagcttcccccgtggccgggtctccaaagcagccggtgcgtggctactaccgtggcgctgtcggtggcacgtttgaccgcctgcacaacgcccacaaggtgttgctcagtgtcgcgtgcatcctggcccaggagcagcttgtggtgggagtagcagacaaagatctgttgaagagcaagttgctccctgagctgctccaaccttatacagaacgtgtggaacatctgagtgaattcctggtggacatcaagccctccttgacttttgatgtcatccccctgctggacccctatgggcccgctggctctgacccctccctggagttcctggtggtcagcgaggagacctatcgtggggggatggccatcaaccgcttccgccttgagaatgacctggaggaacttgctttgtaccagatccagctgctgaaggacctcagacatacggagaatgaagaggacaaagtcagctcctccagcttccgccagcgaatgttggggaacctgcttcggcctccatatgtaagctcctctccctccttccctcctgcttggtgtcctggcaatgctggagagtagaagctgaggggctcagccccaggcatgaggctgagggccccagtaactgtgggttccctttcacctatccccaggaaaggccagagctccccacatgtctctatgtaattgggctgactggcatcagtggctctgggaagagctcaatagctcagcgactgaagggcctgggggcgtttgtcattgacagtgaccacctgggtcatcgggcctatgccccaggtggccctgcctaccagcctgtggtggaggcctttggaacaggtaataactggggaaggctgaaagtggcctggagtgaggagctagccaggcctctgtgctcagttgtctgtctgtgttgtccagccctccccactcttgcccatgggtgactcttacccacagctgactagggccagcgcaaatactggaacctgtaacagaattaaaggtgaatgttctgaga

SEQ ID NO: 359194 - DNA, 919 bp, Homo sapiens
ctcttcccagagccactgatgccagtcagcccaattacatagagacatgtggggcctgggggcgtttgtcattgacagtgaccacctgggtcatcgggcctatgccccaggtggccctgcctaccagcctgtggtggaggcctttggaacagatattctccataaagatggcatcatcaacaggaaggtcctaggcagccgggtgtttgggaataagaagcagctgaagatactcacggacattatgtggccaattatcgcaaagctggcccgagaggagatggatcgggctgtggctgagggaaagcgtgtgtgtgtgattgatgccgctgtgttgcttgaagccggctggcagaacctggtccatgaggtgtggactgctgtcatcccagagactgaggctgtaagacgcattgtggagagggatggcctcagtgaagccgcggctcaaagccggctgcagagccagatgagcgggcagcagcttgtggaacagagccacgtggtgctcagcaccttgtgggagccgcatatcacccaacgccaggtggagaaagcctgggccctcttgcagaagcgcattcccaagactcatcaggccctcgactgaaaagttctcagtggggccagactggctcctggagctgacaagcgaccccgtggtgaggagaaatgggggccttgatgctcaccctggttcaggcccagaggtccaagctatactgtgcaggacatggccaggcctggtggacacaggaagcctacccaacacgctggtatttggccaacactgaggatgtggttcatgggggagcagtcccctccccactcttgcccatgggtgactcttacccacagctgactagggccagcgcaaatactggaacctgtaacagaattaaaggtgaatgttctgaga

SEQ ID NO: 359195 - DNA, 638 bp, Homo sapiens
aatctgtaccggctggtgagggaaagcgtgtgtgtgtgattgatgccgctgtgttgcttgaagccggctggcagaacctggtccatgaggtgtggactgctgtcatcccagagactgaggctgtaagacgcattgtggagagggatggcctcagtgaagccgcggctcaaagccggctgcagagccagatgagcgggcagcagcttgtggaacagagccacgtggtgctcagcaccttgtgggagccgcatatcacccaacgccaggtggagaaagcctgggccctcttgcagaagcgcattcccaagactcatcaggccctcgactgaaaagttctcagtggggccagactggctcctggagctgacaagcgaccccgtggtgaggagaaatgggggccttgatgctcaccctggttcaggcccagaggtccaagctatactgtgcaggacatggccaggcctggtggacacaggaagcctacccaacacgctggtatttggccaacactgaggatgtggttcatgggggagcagtcccctccccactcttgcccatgggtgactcttacccacagctgactagggccagcgcaaatactggaacctgtaacagaattaaaggtgaatgttctgaga

SEQ ID NO: 359196 - DNA, 690 bp, Homo sapiens
accgcttccgccttgagaatgtaacccctgagggagactggcagagggagtggatgggggatggggaaggccattttgagggggctgttggaagtaccatggccccagaggagagaagtgggggctcagggtggtgggaagaagcaaggaggaactggttctcagtttgcccgctgagtcggaggaggaggagcctgggtaggaaggggaggatgggggggcaggttggatgtcagggtcttcctctcactccctccttccctctttttaccctttcctctttaccccaggacctggaggaacttgctttgtaccagatccagctgctgaaggacctcagacatacggagaatgaagaggacaaagtcagctcctccagcttccgccagcgaatgttggggaacctgcttcggcctccatatgtaagctcctctccctccttccctcctgcttggtgtcctggcaatgctggagagtagaagctgaggggctcagccccaggcatgaggctgagggccccagtaactgtgggttccctttcacctatccccaggaaaggccagagctccccacatgtctctatgtaattgggctgactggcatcagtggctctgggaagagctcaatagctcagcgactgaagggcctgggggcgtttgtcattgacagtgaccacctgggtcatcgggc

SEQ ID NO: 359197 - DNA, 811 bp, Homo sapiens
tagggaagtttaattacttctaatttccccagataaggagttttgcctctggatggcctgttggatggttaccaggtggtctttgctcccttctaaattcctcagataagggccaggcacagtggctcatgcctgtaatcccagcactctgggaggccaaggtgggtgaatcacttgaggtcaggagttcaagaccacctgggcaacatggcgaaagcccgtctctactaaaaaatacaaaaattagcccggagtggtggcacatgcctgtaatcccagctactcgggaggctgaggcatgagaatcgcttgaatccgggaggcggaggttgcattgggccgaaaccgcgactctgcactccagtctgggcgacagaatgagaccccgtctcaaaaaaaaaatcggcaatcggtgaggcggggattattaccctcaatgtagagatttaaaaaatgaggactgaaggtgactccttccaggtctgtcagtggccagcaaagagccaatatgctaaactctcccctcccggacaccggcttcagccagagctcgcacccgcctgcgccgctccacccacccacacttccggcttccgctccgcccaccccctagtacttccgttctccagcgctgggcaccgcggccggagctgtgggctggtaagtctgcgccgccagggctcgcatggccttcagaagcggtccctgggctgggcgatgacgggtcctggtggcagcaggcccttctttctcgcatcaccgggcattacgcggcagccatttccctcgctaaggccctaccttaggatga

SEQ ID NO: 359198 - DNA, 2831 bp, Homo sapiens
ggcatgtggtctgcagaagaggaggacgtggctgggtggcagggctggtctccaaggacgagtaagatcctgcagctgcaggcttcaggaagtctcctggggctatcagatggctccttcttgtagcagcagctgtggggtccactggccctgagccctcagaggggcggccgtgggggacctcctgtcttttgccttgcaagggcctcagttgtgctttttccctctaggcagccatgggtgccaggcagtgctgagagcagtggggcatggctgcagccctgcaggtcctgccccgcttggcccgagcccccttgcatccactcctctggcggggctcagtggcccgtctggccagcagcatggccttggcagagcaggccaggcagctgtttgagagtgctgtaggtgcagtgctgccgggccccatgctgcaccgggcactatccttggaccctggtggcagacagctgaaggtgcgggaccggaactttcagctgaggcaaaacctctacctggtgggctttggcaaggctgtgctgggtatggcagctgcagctgaggaactactgggccagcatcttgtgcagggcgtgatcagcgttcccaaggggatccgtgctgccatggagcgtgccggcaagcaggagatgctgctgaagccacatagccgtgtccaggtattcgagggtgcggaggacaacctcccggaccgcgatgcgctgcgggctgcactggccatccagcaactggctgagggactcacagctgatgacctgctgctcgtgctgatctcaggtgtggtaccacattggcccaagactgttggtggggggtgcaccacctgatctctcaggtcttcgagagatcaggtctgagcccccggggtcacagggtaaagttaggagcaagggaggtggtgaggagcctggatggtgactcctgggttgccttgggctagtcgtctggcctcccctgagctgtggagtcctccccctgagctgaccttttcggtgacagtgagagggtgcatggggagcacataatgcagggcctgacacatccgtagagtccttggaaaatgtcactgctattgctgctgtctgtactaatgtcacctggggctaggccctcagacctcatggagtcctctccttgatcttccattgtgtgccccctgccctgcctcctgttctagtctcttaaggagtagttagttcttccggtgcctactgggacctggggtaccccaaggcaggggcaacctcaggtggccaggatgtggtgactgtacacatattgcatatccacaggggggcaccctaaccccacctttccagccccctttttctaatgtgggcttgtcacccctgcttgcctggttccctgggttgggatagcccctctacctgataccctcattgtcttgagaggtgggggttcagctctgctgcctgcccccatcccacctgtcacactggaggagaagcagacactcactagactgctggcagcccgtggagccaccatccaggagttgaacaccattcggaaggccctgtcccagctcaagggtggggggctggctcaggccgcctaccctgcccaggtggtgagcctcatcctgtcagatgtggtgggggaccctgtggaggtgattgccagtggccccaccgtggccagttcccacaatgtgcaagattgcctgcatatcctcaatcgctacggcctccgtgcagccctgccacgttctgtgaagactgtgctgtctcgggccgactctgacccccatgggccacacacctgtggccatgtcctgaatgtgatcattggctctaatgtgctggcgctagctgaggcccagcggcaggccgaggcactgggctaccaggctgtggtgctgagtgcagccatgcaaggtgatgtaaaaagtatggcccagttctacgggctgctggcccatgtggctagaacccgcctcaccccatccatggctggggcttctgtggaggaagatgcacagctccatgagctggcagctgagcttcagatcccagacctgcagctggaggaggctctggagaccatggcatggggaaggggcccagtctgcctgctggctggtggcgagcccacagtacagctgcagggctcgggcaggggtggccggaaccaggaactggccctgcgtgttggagcagagttgagaaggtggccgctggggccgatagatgtgctgtttttgagcggtggcaccgatgggcaggatgggcccacagaggctgctggggcctgggtcacacctgagcttgccagccaggctgcagctgagggcctggacatagccaccttcctagcccacaatgactcacataccttcttctgctgcctccagggtggggcacacctgctgcacacagggatgacaggtaccaatgtcatggacacccacctcttgttcctgcggcctcggtgatggcataggtcacattttgggagttcagaggaggcctacaagggcaaggtcagatggcagagcaaggttggtcctcagggcctctctaagccttagggcccctcctctccttggccttggctgtttggttaactgtcaccttccactcagggcctctgctctatatctattcccttccagccagactggcagatgggggcttccccctacccctgaggatgaggacaagcccctcggccagttcagcgttcccgtgcttctcccttgggcagcctctctcttgagcccctcaccctgtttctttctgtgaagcgagaatgtctgaaaataaataggaccatgccatgggttatca

SEQ ID NO: 359199 - DNA, 3261 bp, Homo sapiens
tagggaagtttaattacttctaatttccccagataaggagttttgcctctggatggcctgttggatggttaccaggtggtctttgctcccttctaaattcctcagataagggccaggcacagtggctcatgcctgtaatcccagcactctgggaggccaaggtgggtgaatcacttgaggtcaggagttcaagaccacctgggcaacatggcgaaagcccgtctctactaaaaaatacaaaaattagcccggagtggtggcacatgcctgtaatcccagctactcgggaggctgaggcatgagaatcgcttgaatccgggaggcggaggttgcattgggccgaaaccgcgactctgcactccagtctgggcgacagaatgagaccccgtctcaaaaaaaaaatcggcaatcggtgaggcggggattattaccctcaatgtagagatttaaaaaatgaggactgaaggtgactccttccaggtctgtcagtggccagcaaagagccaatatgctaaactctcccctcccggacaccggcttcagccagagctcgcacccgcctgcgccgctccacccacccacacttccggcttccgctccgcccaccccctagtacttccgttctccagcgctgggcaccgcggccggagctgtgggctggcagccatgggtgccaggcagtgctgagagcagtggggcatggctgcagccctgcaggtcctgccccgcttggcccgagcccccttgcatccactcctctggcggggctcagtggcccgtctggccagcagcatggccttggcagagcaggccaggcagctgtttgagagtgctgtaggtgcagtgctgccgggccccatgctgcaccgggcactatccttggaccctggtggcagacagctgaaggtgcgggaccggaactttcagctgaggcaaaacctctacctggtgggctttggcaaggctgtgctgggtatggcagctgcagctgaggaactactgggccagcatcttgtgcagggcgtgatcagcgttcccaaggggatccgtgctgccatggagcgtgccggcaagcaggagatgctgctgaagccacatagccgtgtccaggtattcgagggtgcggaggacaacctcccggaccgcgatgcgctgcgggctgcactggccatccagcaactggctgagggactcacagctgatgacctgctgctcgtgctgatctcaggtgtggtaccacattggcccaagactgttggtggggggtgcaccacctgatctctcaggtcttcgagagatcaggtctgagcccccggggtcacagggtaaagttaggagcaagggaggtggtgaggagcctggatggtgactcctgggttgccttgggctagtcgtctggcctcccctgagctgtggagtcctccccctgagctgaccttttcggtgacagtgagagggtgcatggggagcacataatgcagggcctgacacatccgtagagtccttggaaaatgtcactgctattgctgctgtctgtactaatgtcacctggggctaggccctcagacctcatggagtcctctccttgatcttccattgtgtgccccctgccctgcctcctgttctagtctcttaaggagtagttagttcttccggtgcctactgggacctggggtaccccaaggcaggggcaacctcaggtggccaggatgtggtgactgtacacatattgcatatccacaggggggcaccctaaccccacctttccagccccctttttctaatgtgggcttgtcacccctgcttgcctggttccctgggttgggatagcccctctacctgataccctcattgtcttgagaggtgggggttcagctctgctgcctgcccccatcccacctgtcacactggaggagaagcagacactcactagactgctggcagcccgtggagccaccatccaggagttgaacaccattcggaaggccctgtcccagctcaagggtggggggctggctcaggccgcctaccctgcccaggtggtgagcctcatcctgtcagatgtggtgggggaccctgtggaggtgattgccagtggccccaccgtggccagttcccacaatgtgcaagattgcctgcatatcctcaatcgctacggcctccgtgcagccctgccacgttctgtgaagactgtgctgtctcgggccgactctgacccccatgggccacacacctgtggccatgtcctgaatgtgatcattggctctaatgtgctggcgctagctgaggcccagcggcaggccgaggcactgggctaccaggctgtggtgctgagtgcagccatgcaaggtgatgtaaaaagtatggcccagttctacgggctgctggcccatgtggctagaacccgcctcaccccatccatggctggggcttctgtggaggaagatgcacagctccatgagctggcagctgagcttcagatcccagacctgcagctggaggaggctctggagaccatggcatggggaaggggcccagtctgcctgctggctggtggcgagcccacagtacagctgcagggctcgggcaggggtggccggaaccaggaactggccctgcgtgttggagcagagttgagaaggtggccgctggggccgatagatgtgctgtttttgagcggtggcaccgatgggcaggatgggcccacagaggctgctggggcctgggtcacacctgagcttgccagccaggctgcagctgagggcctggacatagccaccttcctagcccacaatgactcacataccttcttctgctgcctccagggtggggcacacctgctgcacacagggatgacaggtaccaatgtcatggacacccacctcttgttcctgcggcctcggtgatggcataggtcacattttgggagttcagaggaggcctacaagggcaaggtcagatggcagagcaaggttggtcctcagggcctctctaagccttagggcccctcctctccttggccttggctgtttggttaactgtcaccttccactcagggcctctgctctatatctattcccttccagccagactggcagatgggggcttccccctacccctgaggatgaggacaagcccctcggccagttcagcgttcccgtgcttctcccttgggcagcctctctcttgagcccctcaccctgtttctttctgtgaagcgagaatgtctgaaaataaataggaccatgccatgggttatca

SEQ ID NO: 359200 - DNA, 2211 bp, Homo sapiens
tagggaagtttaattacttctaatttccccagataaggagttttgcctctggatggcctgttggatggttaccaggtggtctttgctcccttctaaattcctcagataagggccaggcacagtggctcatgcctgtaatcccagcactctgggaggccaaggtgggtgaatcacttgaggtcaggagttcaagaccacctgggcaacatggcgaaagcccgtctctactaaaaaatacaaaaattagcccggagtggtggcacatgcctgtaatcccagctactcgggaggctgaggcatgagaatcgcttgaatccgggaggcggaggttgcattgggccgaaaccgcgactctgcactccagtctgggcgacagaatgagaccccgtctcaaaaaaaaaatcggcaatcggtgaggcggggattattaccctcaatgtagagatttaaaaaatgaggactgaaggtgactccttccaggtctgtcagtggccagcaaagagccaatatgctaaactctcccctcccggacaccggcttcagccagagctcgcacccgcctgcgccgctccacccacccacacttccggcttccgctccgcccaccccctagtacttccgttctccagcgctgggcaccgcggccggagctgtgggctgggagatgctgctgaagccacatagccgtgtccaggtattcgagggtgcggaggacaacctcccggaccgcgatgcgctgcgggctgcactggccatccagcaactggctgagggactcacagctgatgacctgctgctcgtgctgatctcagggtgggggttcagctctgctgcctgcccccatcccacctgtcacactggaggagaagcagacactcactagactgctggcagcccgtggagccaccatccaggagttgaacaccattcggaaggccctgtcccagctcaagggtggggggctggctcaggccgcctaccctgcccaggtggtgagcctcatcctgtcagatgtggtgggggaccctgtggaggtgattgccagtggccccaccgtggccagttcccacaatgtgcaagattgcctgcatatcctcaatcgctacggcctccgtgcagccctgccacgttctgtgaagactgtgctgtctcgggccgactctgacccccatgggccacacacctgtggccatgtcctgaatgtgatcattggctctaatgtgctggcgctagctgaggcccagcggcaggccgaggcactgggctaccaggctgtggtgctgagtgcagccatgcaaggtgatgtaaaaagtatggcccagttctacgggctgctggcccatgtggctagaacccgcctcaccccatccatggctggggcttctgtggaggaagatgcacagctccatgagctggcagctgagcttcagatcccagacctgcagctggaggaggctctggagaccatggcatggggaaggggcccagtctgcctgctggctggtggcgagcccacagtacagctgcagggctcgggcaggggtggccggaaccaggaactggccctgcgtgttggagcagagttgagaaggtggccgctggggccgatagatgtgctgtttttgagcggtggcaccgatgggcaggatgggcccacagaggctgctggggcctgggtcacacctgagcttgccagccaggctgcagctgagggcctggacatagccaccttcctagcccacaatgactcacataccttcttctgctgcctccagggtggggcacacctgctgcacacagggatgacaggtaccaatgtcatggacacccacctcttgttcctgcggcctcggtgatggcataggtcacattttgggagttcagaggaggcctacaagggcaaggtcagatggcagagcaaggttggtcctcagggcctctctaagccttagggcccctcctctccttggccttggctgtttggttaactgtcaccttccactcagggcctctgctctatatctattcccttccagccagactggcagatgggggcttccccctacccctgaggatgaggacaagcccctcggccagttcagcgttcccgtgcttctcccttgggcagcctctctcttgagcccctcaccctgtttctttctgtgaagcgagaatgtctgaaaataaataggaccatgccatgggttatca

SEQ ID NO: 359201 - DNA, 2717 bp, Homo sapiens
ggcatgtggtctgcagaagaggaggacgtggctgggtggcagggctggtctccaaggacgagtaagatcctgcagctgcaggcttcaggaagtctcctggggctatcagatggctccttcttgtagcagcagctgtggggtccactggccctgagccctcagaggggcggccgtgggggacctcctgtcttttgccttgcaagggcctcagttgtgctttttccctctaggcagccatgggtgccaggcagtgctgagagcagtggggcatggctgcagccctgcaggtcctgccccgcttggcccgagcccccttgcatccactcctctggcggggctcagtggcccgtctggccagcagcatggccttggcagagcaggccaggcagctgtttgagagtgctgtaggtgcagtgctgccgggccccatgctgcaccgggcactatccttggaccctggtggcagacagctgaaggtgcgggaccggaactttcagctgaggcaaaacctctacctggtgggctttggcaaggctgtgctgggtatggcagctgcagctgaggaactactgggccagcatcttgtgcagggcgtgatcagcgttcccaaggggatccgtgctgccatggagcgtgccggcaagcaggagatgctgctgaagccacatagccgtgtccaggtattcgagggtgcggaggacaacctcccggaccgcgatgcgctgcgggctgcactggccatccagcaactggctgagggactcacagctgatgacctgctgctcgtgctgatctcaggtgtggtaccacattggcccaagactgttggtggggggtgcaccacctgatctctcaggtcttcgagagatcaggtctgagcccccggggtcacagggtaaagttaggagcaagggaggtggtgaggagcctggatggtgactcctgggttgccttgggctagtcgtctggcctcccctgagctgtggagtcctccccctgagctgaccttttcggtgacagtgagagggtgcatggggagcacataatgcagggcctgacacatccgtagagtccttggaaaatgtcactgctattgctgctgtctgtactaatgtcacctggggctaggccctcagacctcatggagtcctctccttgatcttccattgtgtgccccctgccctgcctcctgttctagtctcttaaggagtagttagttcttccggtgcctactgggacctggggtaccccaaggcaggggcaacctcaggtggccaggatgtggtgactgtacacatattgcatatccacaggggggcaccctaaccccacctttccagccccctttttctaatgtgggcttgtcacccctgcttgcctggttccctgggttgggatagcccctctacctgataccctcattgtcttgagaggtgggggttcagctctgctgcctgcccccatcccacctgtcacactggaggagaagcagacactcactagactgctggcagcccgtggagccaccatccaggagttgaacaccattcggaaggccctgtcccagctcaagggtggggggctggctcaggccgcctaccctgcccaggtggtgagcctcatcctgtcagatgtggtgggggaccctgtggaggtgattgccagtggccccaccgtggccagttcccacaatgtgcaagattgcctgcatatcctcaatcgctacggcctccgtgcagccctgccacgttctgtgaagactgtgctgtctcgggccgactctgacccccatgggccacacacctgtggccatgtcctgaatgtgatcattggctctaatgtgctggcgctagctgaggcccagcggcaggccgaggcactgggctaccaggctgtggtgctgagtgcagccatgcaaggtgatgtaaaaagtatggcccagttctacgggctgctggcccatgtggctagaacccgcctcaccccatccatggctggggcttctgtggaggaagatgcacagctccatgagctggcagctgagcttcagatcccagacctgcagctggaggaggctctggagaccatggcatggggaaggggcccagtctgcctgctggctggtggcgagcccacagtacagctgcagggctcgggcaggggtggccggaaccaggaactggccctgcgtgttggagcagagttgagaaggtggccgctggggccgatagatgtgctgtttttgagcggtggcaccgatgggcaggatgggcccacagaggctgctggggcctgggtcacacctgagcttgccagccaggctgcagctgagggcctggacatagccaccttcctagcccacaatgactcacataccttcttctgctgcctccagggtggggcacacctgctgcacacagggatgacaggtaccaatgtcatggacacccacctcttgttcctgcggcctcggtgatggcataggtcacattttgggagttcagaggaggcctacaagggcaaggtcagatggcagagcaagccagactggcagatgggggcttccccctacccctgaggatgaggacaagcccctcggccagttcagcgttcccgtgcttctcccttgggcagcctctctcttgagcccctcaccctgtttctttctgtgaagcgagaatgtctgaaaataaataggaccatgccatgggttatca

SEQ ID NO: 359202 - DNA, 1092 bp, Homo sapiens
cgcagaatggaactcttgctaagccagagctgtatttggtggcccatggtgggagagggaagaacaataataagttgtggaataaaagccatggagaggagcgggaattacttaatctggctccagaagggggagatgctgctgaagccacatagccgtgtccaggtattcgagggtgcggaggacaacctcccggaccgcgatgcgctgcgggctgcactggccatccagcaactggctgagggactcacagctgatgacctgctgctcgtgctgatctcagggtgggggttcagctctgctgcctgcccccatcccacctgtcacactggaggagaagcagacactcactagactgctggcagcccgtggagccaccatccaggagttgaacaccattcggaaggccctgtcccagctcaagggtggggggctggctcaggccgcctaccctgcccaggtggtgagcctcatcctgtcagatgtggtgggggaccctgtggaggtgattgccagtggccccaccgtggccagttcccacaatgtgcaagattgcctgcatatcctcaatcgctacggcctccgtgcagccctgccacgttctgtgaagactgtgctgtctcgggccgactctgacccccatgggccacacacctgtggccatgtcctgaatgtgatcattggctctaatgtgctggcgctagctgaggcccagcggcaggccgaggcactgggctaccaggctgtggtgctgagtgcagccatgcaagggtggggcacacctgctgcacacagggatgacaggtaccaatgtcatggacacccacctcttgttcctgcggcctcggtgatggcataggtcacattttgggagttcagaggaggcctacaagggcaaggtcagatggcagagcaagccagactggcagatgggggcttccccctacccctgaggatgaggacaagcccctcggccagttcagcgttcccgtgcttctcccttgggcagcctctctcttgagcccctcaccctgtttctttctgtgaagcgagaatgtctgaaaataaataggaccatgccatgggttatca

SEQ ID NO: 359203 - DNA, 1550 bp, Homo sapiens
tagggaagtttaattacttctaatttccccagataaggagttttgcctctggatggcctgttggatggttaccaggtggtctttgctcccttctaaattcctcagataagggccaggcacagtggctcatgcctgtaatcccagcactctgggaggccaaggtgggtgaatcacttgaggtcaggagttcaagaccacctgggcaacatggcgaaagcccgtctctactaaaaaatacaaaaattagcccggagtggtggcacatgcctgtaatcccagctactcgggaggctgaggcatgagaatcgcttgaatccgggaggcggaggttgcattgggccgaaaccgcgactctgcactccagtctgggcgacagaatgagaccccgtctcaaaaaaaaaatcggcaatcggtgaggcggggattattaccctcaatgtagagatttaaaaaatgaggactgaaggtgactccttccaggtctgtcagtggccagcaaagagccaatatgctaaactctcccctcccggacaccggcttcagccagagctcgcacccgcctgcgccgctccacccacccacacttccggcttccgctccgcccaccccctagtacttccgttctccagcgctgggcaccgcggccggagctgtgggctggcagccatgggtgccaggcagtgctgagagcagtggggcatggctgcagccctgcaggtcctgccccgcttggcccgagcccccttgcatccactcctctggcggggctcagtggcccgtctggccagcagcatggccttggcagagcaggccaggcagctgtttgagagtgctgtaggtgcagtgctgccgggccccatgctgcaccgggcactatccttggaccctggtggcagacagctgaaggtgcgggaccggaactttcagctgaggcaaaacctctacctggtgggctttggcaaggctgtgctgggtatggcagctgcagctgaggaactactgggccagcatcttgtgcagggcgtgatcagcgttcccaaggggatccgtgctgccatggagcgtgccggcaagcaggagatgctgctgaagccacatagccgtgtccaggtattcgagggtgcggaggacaacctcccggaccgcgatgcgctgcgggctgcactggccatccagcaactggctgagggactcacagctgatgacctgctgctcgtgctgatctcagggtggggcacacctgctgcacacagggatgacaggtaccaatgtcatggacacccacctcttgttcctgcggcctcggtgatggcataggtcacattttgggagttcagaggaggcctacaagggcaaggtcagatggcagagcaagccagactggcagatgggggcttccccctacccctgaggatgaggacaagcccctcggccagttcagcgttcccgtgcttctcccttgggcagcctctctcttgagcccctcaccctgtttctttctgtgaagcgagaatgtctgaaaataaataggaccatgccatgggttatca

SEQ ID NO: 359204 - DNA, 2627 bp, Homo sapiens
tagggaagtttaattacttctaatttccccagataaggagttttgcctctggatggcctgttggatggttaccaggtggtctttgctcccttctaaattcctcagataagggccaggcacagtggctcatgcctgtaatcccagcactctgggaggccaaggtgggtgaatcacttgaggtcaggagttcaagaccacctgggcaacatggcgaaagcccgtctctactaaaaaatacaaaaattagcccggagtggtggcacatgcctgtaatcccagctactcgggaggctgaggcatgagaatcgcttgaatccgggaggcggaggttgcattgggccgaaaccgcgactctgcactccagtctgggcgacagaatgagaccccgtctcaaaaaaaaaatcggcaatcggtgaggcggggattattaccctcaatgtagagatttaaaaaatgaggactgaaggtgactccttccaggtctgtcagtggccagcaaagagccaatatgctaaactctcccctcccggacaccggcttcagccagagctcgcacccgcctgcgccgctccacccacccacacttccggcttccgctccgcccaccccctagtacttccgttctccagcgctgggcaccgcggccggagctgtgggctggcagccatgggtgccaggcagtgctgagagcagtggggcatggctgcagccctgcaggtcctgccccgcttggcccgagcccccttgcatccactcctctggcggggctcagtggcccgtctggccagcagcatggccttggcagagcaggccaggcagctgtttgagagtgctgtaggtgcagtgctgccgggccccatgctgcaccgggcactatccttggaccctggtggcagacagctgaaggtgcgggaccggaactttcagctgaggcaaaacctctacctggtgggctttggcaaggctgtgctgggtatggcagctgcagctgaggaactactgggccagcatcttgtgcagggcgtgatcagcgttcccaaggggatccgtgctgccatggagcgtgccggcaagcaggagatgctgctgaagccacatagccgtgtccaggtattcgagggtgcggaggacaacctcccggaccgcgatgcgctgcgggctgcactggccatccagcaactggctgagggactcacagctgatgacctgctgctcgtgctgatctcagggtgggggttcagctctgctgcctgcccccatcccacctgtcacactggaggagaagcagacactcactagactgctggcagcccgtggagccaccatccaggagttgaacaccattcggaaggccctgtcccagctcaagggtggggggctggctcaggccgcctaccctgcccaggtggtgagcctcatcctgtcagatgtggtgggggaccctgtggaggtgattgccagtggccccaccgtggccagttcccacaatgtgcaagattgcctgcatatcctcaatcgctacggcctccgtgcagccctgccacgttctgtgaagactgtgctgtctcgggccgactctgacccccatgggccacacacctgtggccatgtcctgaatgtgatcattggctctaatgtgctggcgctagctgaggcccagcggcaggccgaggcactgggctaccaggctgtggtgctgagtgcagccatgcaaggtgatgtaaaaagtatggcccagttctacgggctgctggcccatgtggctagaacccgcctcaccccatccatggctggggcttctgtggaggaagatgcacagctccatgagctggcagctgagcttcagatcccagacctgcagctggaggaggctctggagaccatggcatggggaaggggcccagtctgcctgctggctggtggcgagcccacagtacagctgcagggctcgggcaggggtggccggaaccaggaactggccctgcgtgttggagcagagttgagaaggtggccgctggggccgatagatgtgctgtttttgagcggtggcaccgatgggcaggatgggcccacagaggctgctggggcctgggtcacacctgagcttgccagccaggctgcagctgagggcctggacatagccaccttcctagcccacaatgactcacataccttcttctgctgcctccagggtggggcacacctgctgcacacagggatgacaggtaccaatgtcatggacacccacctcttgttcctgcggcctcggtgatggcataggtcacattttgggagttcagaggaggcctacaagggcaaggtcagatggcagagcaaggttggtcctcagggcctctctaagccttagggcccctcctctccttggccttggctgtttggttaactgtcaccttccactcagggcctctgctctatatctattcccttccagccagactggcagatgggggcttccccctacccctgaggatgaggacaagcccctcggccagttcagcgttcccgtgcttctcccttgggcagcctctctcttgagcccctcaccctgtttctttctgtgaagcgagaatgtctgaaaataaataggaccatgccatgggttatca

SEQ ID NO: 359205 - DNA, 2241 bp, Homo sapiens
ggcatgtggtctgcagaagaggaggacgtggctgggtggcagggctggtctccaaggacgagtaagatcctgcagctgcaggcttcaggaagtctcctggggctatcagatggctccttcttgtagcagcagctgtggggtccactggccctgagccctcagaggggcggccgtgggggacctcctgtcttttgccttgcaagggcctcagttgtgctttttccctctaggcagccatgggtgccaggcagtgctgagagcagtggggcatggctgcagccctgcaggtcctgccccgcttggcccgagcccccttgcatccactcctctggcggggctcagtggcccgtctggccagcagcatggccttggcagagcaggccaggcagctgtttgagagtgctgtaggtgcagtgctgccgggccccatgctgcaccgggcactatccttggaccctggtggcagacagctgaaggtgcgggaccggaactttcagctgaggcaaaacctctacctggtgggctttggcaaggctgtgctgggtatggcagctgcagctgaggaactactgggccagcatcttgtgcagggcgtgatcagcgttcccaaggggatccgtgctgccatggagcgtgccggcaagcaggagatgctgctgaagccacatagccgtgtccaggtattcgagggtgcggaggacaacctcccggaccgcgatgcgctgcgggctgcactggccatccagcaactggctgagggactcacagctgatgacctgctgctcgtgctgatctcaggtgtggtaccacattggcccaagactgttggtggggggtgcaccacctgatctctcaggtcttcgagagatcaggtctgagcccccggggtcacagggtaaagttaggagcaagggaggtggtgaggagcctggatggtgactcctgggttgccttgggctagtcgtctggcctcccctgagctgtggagtcctccccctgagctgaccttttcggtgacagtgagagggtgcatggggagcacataatgcagggcctgacacatccgtagagtccttggaaaatgtcactgctattgctgctgtctgtactaatgtcacctggggctaggccctcagacctcatggagtcctctccttgatcttccattgtgtgccccctgccctgcctcctgttctagtctcttaaggagtagttagttcttccggtgcctactgggacctggggtaccccaaggcaggggcaacctcaggtggccaggatgtggtgactgtacacatattgcatatccacaggggggcaccctaaccccacctttccagccccctttttctaatgtgggcttgtcacccctgcttgcctggttccctgggttgggatagcccctctacctgataccctcattgtcttgagaggtgggggttcagctctgctgcctgcccccatcccacctgtcacactggaggagaagcagacactcactagactgctggcagcccgtggagccaccatccaggagttgaacaccattcggaaggccctgtcccagctcaagggtggggggctggctcaggccgcctaccctgcccaggtggtgagcctcatcctgtcagatgtggtgggggaccctgtggaggtgattgccagtggccccaccgtggccagttcccacaatgtgcaagattgcctgcatatcctcaatcgctacggcctccgtgcagccctgccacgttctgtgaagactgtgctgtctcgggccgactctgacccccatgggccacacacctgtggccatgtcctgaatgtgatcattggctctaatgtgctggcgctagctgaggcccagcggcaggccgaggcactgggctaccaggctgtggtgctgagtgcagccatgcaagggtggggcacacctgctgcacacagggatgacaggtaccaatgtcatggacacccacctcttgttcctgcggcctcggtgatggcataggtcacattttgggagttcagaggaggcctacaagggcaaggtcagatggcagagcaagccagactggcagatgggggcttccccctacccctgaggatgaggacaagcccctcggccagttcagcgttcccgtgcttctcccttgggcagcctctctcttgagcccctcaccctgtttctttctgtgaagcgagaatgtctgaaaataaataggaccatgccatgggttatca

SEQ ID NO: 359206 - DNA, 2428 bp, Homo sapiens
tagggaagtttaattacttctaatttccccagataaggagttttgcctctggatggcctgttggatggttaccaggtggtctttgctcccttctaaattcctcagataagggccaggcacagtggctcatgcctgtaatcccagcactctgggaggccaaggtgggtgaatcacttgaggtcaggagttcaagaccacctgggcaacatggcgaaagcccgtctctactaaaaaatacaaaaattagcccggagtggtggcacatgcctgtaatcccagctactcgggaggctgaggcatgagaatcgcttgaatccgggaggcggaggttgcattgggccgaaaccgcgactctgcactccagtctgggcgacagaatgagaccccgtctcaaaaaaaaaatcggcaatcggtgaggcggggattattaccctcaatgtagagatttaaaaaatgaggactgaaggtgactccttccaggtctgtcagtggccagcaaagagccaatatgctaaactctcccctcccggacaccggcttcagccagagctcgcacccgcctgcgccgctccacccacccacacttccggcttccgctccgcccaccccctagtacttccgttctccagcgctgggcaccgcggccggagctgtgggctggcagccatgggtgccaggcagtgctgagagcagtggggcatggctgcagccctgcaggtcctgccccgcttggcccgagcccccttgcatccactcctctggcggggctcagtggcccgtctggccagcagcatggccttggcagagcaggccaggcagctgtttgagagtgctgtaggtgcagtgctgccgggccccatgctgcaccgggcactatccttggaccctggtggcagacagctgaaggtgcgggaccggaactttcagctgaggcaaaacctctacctggtgggctttggcaaggctgtgctgggtatggcagctgcagctgaggaactactgggccagcatcttgtgcagggcgtgatcagcgttcccaaggggatccgtgctgcccccatcccacctgtcacactggaggagaagcagacactcactagactgctggcagcccgtggagccaccatccaggagttgaacaccattcggaaggccctgtcccagctcaagggtggggggctggctcaggccgcctaccctgcccaggtggtgagcctcatcctgtcagatgtggtgggggaccctgtggaggtgattgccagtggccccaccgtggccagttcccacaatgtgcaagattgcctgcatatcctcaatcgctacggcctccgtgcagccctgccacgttctgtgaagactgtgctgtctcgggccgactctgacccccatgggccacacacctgtggccatgtcctgaatgtgatcattggctctaatgtgctggcgctagctgaggcccagcggcaggccgaggcactgggctaccaggctgtggtgctgagtgcagccatgcaaggtgatgtaaaaagtatggcccagttctacgggctgctggcccatgtggctagaacccgcctcaccccatccatggctggggcttctgtggaggaagatgcacagctccatgagctggcagctgagcttcagatcccagacctgcagctggaggaggctctggagaccatggcatggggaaggggcccagtctgcctgctggctggtggcgagcccacagtacagctgcagggctcgggcaggggtggccggaaccaggaactggccctgcgtgttggagcagagttgagaaggtggccgctggggccgatagatgtgctgtttttgagcggtggcaccgatgggcaggatgggcccacagaggctgctggggcctgggtcacacctgagcttgccagccaggctgcagctgagggcctggacatagccaccttcctagcccacaatgactcacataccttcttctgctgcctccagggtggggcacacctgctgcacacagggatgacaggtaccaatgtcatggacacccacctcttgttcctgcggcctcggtgatggcataggtcacattttgggagttcagaggaggcctacaagggcaaggtcagatggcagagcaaggttggtcctcagggcctctctaagccttagggcccctcctctccttggccttggctgtttggttaactgtcaccttccactcagggcctctgctctatatctattcccttccagccagactggcagatgggggcttccccctacccctgaggatgaggacaagcccctcggccagttcagcgttcccgtgcttctcccttgggcagcctctctcttgagcccctcaccctgtttctttctgtgaagcgagaatgtctgaaaataaataggaccatgccatgggttatca

SEQ ID NO: 359207 - DNA, 460 bp, Homo sapiens
tgcggccgcgggcgactcctggtacccccgaggccccgcgaactcaccttcacaaagctgtcggcgtccgggaagcctggcagcaccatctctccgtcggatttggttgcgctggtcgccgacaggaccctgggctcccgggtaagctcctgaagaaagcgtctagctccaactgtgcttcctccctccagtaccctctgaactcctccaagcagacgttgtttcctgcagacatcgctggaaccattctggttaacacagagtgggaactcagtacacatttgtgaagtgaactcctggaagagctcttgtgagggaggcaccgaattatcaggcagctcaagagatagattcactctcctgaaattagagatgggatgcccttaatacaattcattccacccattaagtcttcaataaatgttcagcatatccagttaaaaaaaaaaagcttttcact

SEQ ID NO: 359208 - DNA, 730 bp, Homo sapiens
tgcggccgcgggcgactcctggtacccccgaggccccgcgaactcaccttcacaaagctgtcggcgtccgggaagcctggcagcaccatctctccgtcggatttggttgcgctggtcgccgacaggaccctgggctcccgggtactgggtggcgccattttttcagcctgcacggctcgtctcgcgagagcttgtcggccgaggagacgggacgcgtgcgcaccacgcatgcgccaggtcgaagcggcgggcggggcgtctgattatagtgtggggagcctgcgattggggtggggcgcctgcgattaggttgggaagcctgcgtttagggtggggcacctgcgattaggttgggaagcctgcgattaggttgggaagcctgcgattagggtggcactttcgagcgctctggtaagctcctgaagaaagcgtctagctccaactgtgcttcctccctccagtaccctctgaactcctccaagcagacgttgtttcctgcagacatcgctggaaccattctggttaacacagagtgggaactcagtacacatttgtgaagtgaactcctggaagagctcttgtgagggaggcaccgaattatcaggcagctcaagagatagattcactctcctgaaattagagatgggatgcccttaatacaattcattccacccattaagtcttcaataaatgttcagcatatccagttaaaaaaaaaaagcttttcact

SEQ ID NO: 359209 - DNA, 514 bp, Homo sapiens
tgcggccgcgggcgactcctggtacccccgaggccccgcgaactcaccttcacaaagctgtcggcgtccgggaagcctggcagcaccatctctccgtcggatttggttgcgctggtcgccgacaggaccctgggctcccgggtactgggtggcgccattttttcagcctgcacggctcgtctcgcgagagcttgtcggccgaggagacgggacgcgtgcgcaccacgcatgcgccaggtcgaagcggcgggcggggcgtctgattatagtgtggggagcctgcgattggggtggggcgcctgcgattaggttgggaagcctgcgtttagggtggggcacctgcgattaggttgggaagcctgcgattaggttgggaagcctgcgattagggtggcactttcgagcgctctggtgtgaatttcacgttcttttacctcatattgtatcatcccaacaaccctgtgatctagggtgcggcctggaggacctgactatcacatatatttttgacacg

SEQ ID NO: 359210 - DNA, 556 bp, Homo sapiens
tgcggccgcgggcgactcctggtacccccgaggccccgcgaactcaccttcacaaagctgtcggcgtccgggaagcctggcagcaccatctctccgtcggatttggttgcgctggtcgccgacaggaccctgggctcccgggtactgggtggcgccattttttcagcctgcacggctcgtctcgcgagagcttgtcggccgaggagacgggacgcgtgcgcaccacgcatgcgccaggtaagctcctgaagaaagcgtctagctccaactgtgcttcctccctccagtaccctctgaactcctccaagcagacgttgtttcctgcagacatcgctggaaccattctggttaacacagagtgggaactcagtacacatttgtgaagtgaactcctggaagagctcttgtgagggaggcaccgaattatcaggcagctcaagagatagattcactctcctgaaattagagatgggatgcccttaatacaattcattccacccattaagtcttcaataaatgttcagcatatccagttaaaaaaaaaaagcttttcact

SEQ ID NO: 359211 - DNA, 1465 bp, Homo sapiens
gctaaagatgtgtatggaatgttctgaatgaaacagacttagtaagacatgagtgttgaaaagttttctcagttaatttagcagcactcaggactgctttgtccatgcagatacggctgacttactggggacttttgtttctaacattagccaagcttactgtcaactctgaagagatgttggagttgtcctagaacacttaaacttggaagttaaattgtctttcaatgtgtttggcagagttataaaagtagacatgagccatattgatagcggcacggcatatgaagagcttcagaatacttatgacacttctttgacgttctgtgaaaggctatagataagtacctccaaacatcatgcctccagcctcactcttgcttaaggaaatactctgaaagtagattttctttcttttttgagacagtctctctgtctcccaggctggagtgcagtggcatgatcttggttcactgcagcctccacctcctgggttcaaccgattctccttcttcagcctcccgagtagctgggattacaggtgcccaccaccacgcctggctaatttttgttcttttagtagagacggggatttggttgcgccatgttggccaggctggtctcaaactcctgaccgcaagtgatccgcccacctcggcctcccaaagtgctgggattacgggcatgagttactgcgcccagccaaatatctgttcttttagctctttgatagttcctttgtagtgacaaattattttttaaaagcttataaattggtgtttctgtggaagatgttatttctcatcgaatgcgtattgatagtgttttaagtttagaccacaaagtatttgtcttccatgtgcctgatatttacatagtactctaagctgcactgttgagtactgtagcatctagcttatatggctatttaaatttatattaggctaaaaattcaccagtgcagccatatttcaagttttcagtggctgtgagtggccaatggctctgttgtattggacagtacagatataggacatatgcagaaattatcattggacaaccctgctgtagaatgtcaccagtgtttctggaatcactgttttcgtgcttgaagtattttgtgctccactttgaaatgctaggaaatcgtgtcttcccttcacattgtaaactcttggtgattattgtggtctttggaggtgaagcccttgggcagaattgggatgggagtggaaagtaaactgctttgctgtggactagaagtagaattgggatgaggtgttcccgttctcatgagtcccttccctgtctgcactgttccctttccttgtgaacctttatttcccaaaccccttcttcaccttttccacctccagcctgtgcagaggcagatagatactggggacctgttgtactttgttctgcatcttcactagtggaaataagagttctcttaggctcactg

SEQ ID NO: 359212 - DNA, 1135 bp, Homo sapiens
gctaaagatgtgtatggaatgttctgaatgaaacagacttagtaagacatgagtgttgaaaagttttctcagttaatttagcagcactcaggactgctttgtccatgcagatacggctgacttactggggacttttgtttctaacattagccaagcttactgtcaactctgaagagatgttggagttgtcctagaacacttaaacttggaagttaaattgtctttcaatgtgtttggcagagttataaaagtagacatgagccatattgatagcggcacggcatatgaagagcttcagaatacttatgacacttctttgacgttctgtgaaaggctatagataagtacctccaaacatcatgcctccagcctcactcttgcttaaggaaatactctgaaagtagattttctttcttttttgagacagtctctctgtctcccaggctggagtgcagtggcatgatcttggttcactgcagcctccacctcctgggttcaaccgattctccttcttcagcctcccgagtagctgggattacaggtgcccaccaccacgcctggctaatttttgttcttttagtagagacggggatttggttgcgccatgttggccaggctggtctcaaactcctgaccgcaagtgatccgcccacctcggcctcccaaagtgctgggattacgggcatgagttactgcgcccagccaaatatctgttcttttagctctttgatagttcctttgtagtgacaaattattttttaaaagcttataaattggtgtttctgtggaagatgttatttctcatcgaatgcgtattgatagtgttttaagtttagaccacaaagtatttgtcttccatgtgcctgatatttacatagtactctaagctgcactgttgagtactgtagcatctagcttatatggctatttaaatttatattaggctaaaaattcaccagtgcagccatatttcaagttttcagtggctgtgagtggccaatggctctgttgtattggacagtacagatataggacatatgcagaaattatcattggacaaccctgctgtagaatgcaggggtgtctccggaccacgctcgcgcggggtcctctataacgccgcggcagcaagcgg

SEQ ID NO: 359213 - DNA, 467 bp, Homo sapiens
  misc_feature (112)..(114): n is a, c, g, or t
  misc_feature (117)..(117): n is a, c, g, or t
  misc_feature (119)..(120): n is a, c, g, or t
tgcaaagcttacaaatttattagcagcttgtgcagtaagtttcttttaatgcgtctgtggcaatactagcaataaattaataaaagcttaatttttatacaaatagttttannncananntgaattcttaagaaatacacatttaaagaaattacttaaaggccgtcatttcattagtattcctcattctgcatcctggcttgaaaaacagctctgttgaatcacagtatcagtattttcacacgtaagcacattcgggccatttccgtggtttctcatgagctgtgttcacagacctcagcagggcatcgcatggaccgcaggagggcagattcggaccactaggcctgaaatgacatttcactaaaagtctccaaaacatttctaagactactaaggccttttatgtaatttctttaaatgtgtatttcttaagaattcaaatttgtaataaaactatttgtata

SEQ ID NO: 359214 - DNA, 6430 bp, Homo sapiens
gcttggagccgccgcacccgggacggtgcgtagcgctggaagtccggccttccgagagctagctgtccgccgcggcccccgcacgccgggcagccgtccctcgccgcctcgggcgcgccaccatggggccccggctcagcgtctggctgctgctgctgcccgccgcccttctgctccacgaggagcacagccgggccgctgcgaagggtggctgtgctggctctggctgtggcaaatgtgactgccatggagtgaagggacaaaagggtgaaagaggcctcccggggttacaaggtgtcattgggtttcctggaatgcaaggacctgaggggccacagggaccaccaggacaaaagggtgatactggagaaccaggactacctggaacaaaagggacaagaggacctccgggagcatctggctaccctggaaacccaggacttcccggaattcctggccaagacggcccgccaggccccccaggtattccaggatgcaatggcacaaagggggagagagggccgctcgggcctcctggcttgcctggtttcgcaggaaatcccggaccaccaggcttaccagggatgaagggtgatccaggtgagatacttggccatgtgcccgggatgctgttgaaaggtgaaagaggatttcccggaatcccagggactccaggcccaccaggactgccagggcttcaaggtcctgttgggcctccaggatttaccggaccaccaggtcccccaggccctcccggccctccaggtgaaaagggacaaatgggcttaagttttcaaggaccaaaaggtgacaagggtgaccaaggggtcagtgggcctccaggagtaccaggacaagctcaagttcaagaaaaaggagacttcgccaccaagggagaaaagggccaaaaaggtgaacctggatttcaggggatgccaggggtcggagagaaaggtgaacccggaaaaccaggacccagaggcaaacccggaaaagatggtgacaaaggggaaaaagggagtcccggttttcctggtgaacccgggtacccaggactcataggccgccagggcccgcagggagaaaagggtgaagcaggtcctcctggcccacctggaattgttataggcacaggacctttgggagaaaaaggagagaggggctaccctggaactccggggccaagaggagagccaggcccaaaaggtttcccaggactaccaggccaacccggacctccaggcctccctgtacctgggcaggctggtgcccctggcttccctggtgaaagaggagaaaaaggtgaccgaggatttcctggtacatctctgccaggaccaagtggaagagatgggctcccgggtcctcctggttcccctgggccccctgggcagcctggctacacaaatggaattgtggaatgtcagcccggacctccaggtgaccagggtcctcctggaattccagggcagccaggatttataggcgaaattggagagaaaggtcaaaaaggagagagttgcctcatctgtgatatagacggatatcgggggcctcccgggccacagggacccccgggagaaataggtttcccagggcagccaggggccaagggcgacagaggtttgcctggcagagatggtgttgcaggagtgccaggccctcaaggtacaccagggctgataggccagccaggagccaagggggagcctggtgagttttatttcgacttgcggctcaaaggtgacaaaggagacccaggctttccaggacagcccggcatgccagggagagcgggttctcctggaagagatggccatccgggtcttcctggccccaagggctcgccgggttctgtaggattgaaaggagagcgtggcccccctggaggagttggattcccaggcagtcgtggtgacaccggcccccctgggcctccaggatatggtcctgctggtcccattggtgacaaaggacaagcaggctttcctggaggccctggatccccaggcctgccaggtccaaagggtgaaccaggaaaaattgttcctttaccaggcccccctggagcagaaggactgccggggtccccaggcttcccaggtccccaaggagaccgaggctttcccggaaccccaggaaggccaggcctgccaggagagaagggcgctgtgggccagccaggcattggatttccagggccccccggccccaaaggtgttgacggcttacctggagacatggggccaccggggactccaggtcgcccgggatttaatggcttacctgggaacccaggtgtgcagggccagaagggagagcctggagttggtctaccgggactcaaaggtttgccaggtcttcccggcattcctggcacacccggggagaaggggagcattggggtaccaggcgttcctggagaacatggagcgatcggaccccctgggcttcaggggatcagaggtgaaccgggacctcctggattgccaggctccgtggggtctccaggagttccaggaataggcccccctggagctaggggtccccctggaggacagggaccaccggggttgtcaggccctcctggaataaaaggagagaagggtttccccggattccctggactggacatgccgggccctaaaggagataaaggggctcaaggactccctggcataacgggacagtcggggctccctggccttcctggacagcagggggctcctgggattcctgggtttccaggttccaagggagaaatgggcgtcatggggacccccgggcagccgggctcaccaggaccagtgggtgctcctggattaccgggtgaaaaaggggaccatggctttccgggctcctcaggacccaggggagaccctggcttgaaaggtgataagggggatgtcggtctccctggcaagcctggctccatggataaggtggacatgggcagcatgaagggccagaaaggagaccaaggagagaaaggacaaattggaccaattggtgagaagggatcccgaggagaccctgggaccccaggagtgcctggaaaggacgggcaggcaggacagcctgggcagccaggacctaaaggtgatccaggtataagtggaaccccaggtgctccaggacttccgggaccaaaaggatctgttggtggaatgggcttgccaggaacacctggagagaaaggtgtgcctggcatccctggcccacaaggttcacctggcttacctggagacaaaggtgcaaaaggagagaaagggcaggcaggcccacctggcataggcatcccagggctgcgaggtgaaaagggagatcaagggatagcgggtttcccaggaagccctggagagaagggagaaaaaggaagcattgggatcccaggaatgccagggtccccaggccttaaagggtctcccgggagtgttggctatccaggaagtcctgggctacctggagaaaaaggtgacaaaggcctcccaggattggatggcatccctggtgtcaaaggagaagcaggtcttcctgggactcctggccccacaggcccagctggccagaaaggggagccaggcagtgatggaatcccggggtcagcaggagagaagggtgaaccaggtctaccaggaagaggattcccagggtttccaggggccaaaggagacaaaggttcaaagggtgaggtgggtttcccaggattagccgggagcccaggaattcctggatccaaaggagagcaaggattcatgggtcctccggggccccagggacagccggggttaccgggatccccaggccatgccacggaggggcccaaaggagaccgcggacctcagggccagcctggcctgccaggacttccgggacccatggggcctccagggcttcctgggattgatggagttaaaggtgacaaaggaaatccaggctggccaggagcacccggtgtcccagggcccaagggagaccctggattccagggcatgcctggtattggtggctctccaggaatcacaggctctaagggtgatatggggcctccaggagttccaggatttcaaggtccaaaaggtcttcctggcctccagggaattaaaggtgatcaaggcgatcaaggcgtcccgggagctaaaggtctcccgggtcctcctggccccccaggtccttacgacatcatcaaaggggagcccgggctccctggtcctgagggccccccagggctgaaagggcttcagggactgccaggcccgaaaggccagcaaggtgttacaggattggtgggtatacctggacctccaggtattcctgggtttgacggtgcccctggccagaaaggagagatgggacctgccgggcctactggtccaagaggatttccaggtccaccaggccccgatgggttgccaggatccatggggcccccaggcaccccatctgttgatcacggcttccttgtgaccaggcatagtcaaacaatagatgacccacagtgtccttctgggaccaaaattctttaccacgggtactctttgctctacgtgcaaggcaatgaacgggcccatggccaggacttgggcacggccggcagctgcctgcgcaagttcagcacaatgcccttcctgttctgcaatattaacaacgtgtgcaactttgcatcacgaaatgactactcgtactggctgtccacccctgagcccatgcccatgtcaatggcacccatcacgggggaaaacataagaccatttattagtaggtgtgctgtgtgtgaggcgcctgccatggtgatggccgtgcacagccagaccattcagatcccaccgtgccccagcgggtggtcctcgctgtggatcggctactcttttgtgatgcacaccagcgctggtgcagaaggctctggccaagccctggcgtcccccggctcctgcctggaggagtttagaagtgcgccattcatcgagtgtcacggccgtgggacctgcaattactacgcaaacgcttacagcttttggctcgccaccatagagaggagcgagatgttcaagaagcctacgccgtccaccttgaaggcaggggagctgcgcacgcacgtcagccgctgccaagtctgtatgagaagaacataatgaagcctgactcagctaatgtcacaacatggtgctacttcttcttctttttgttaacagcaacgaaccctagaaatatatcctgtgtacctcactgtccaatatgaaaaccgtaaagtgccttataggaatttgcgtaactaacacaccctgcttcattgacctctacttgctgaaggagaaaaagacagcgataagctttcaatagtggcataccaaatggcacttttgatgaaataaaatatcaatattttctgcaatccaatgcactgatgtgtgaagtgagaactccatcagaaaaccaaagggtgctaggaggtgtgggtgccttccatactgtttgcccattttcattcttgtattataattaattttctacccccagagataaatgtttgtttatatcactgtctagctgtttcaaaatttaggtcccttggtctgtacaaataatagcaatgtaaaaatggttttttgaacctccaaatggaattacagactcagtagccatatcttccaaccccccagtataaatttctgtctttctgctatgtgtggtactttgcagctgcttttgcagaaatcacaattttcctgtggaataaagatggtccaaaaatagtcaaaaattaaatatatatatatattagtaatttatatagatgtcagcaattaggcagatcaaggtttagtttaacttccactgttaaaataaagcttacatagttttcttcctttgaaagactgtgctgtcctttaacataggtttttaaagactaggatattgaatgtgaaacatccgttttcattgttcacttctaaaccaaaaattatgtgttgccaaaaccaaacccaggttcatgaatatggtgtctattatagtgaaacatgtactttgagcttattgtttttattctgtattaaatattttcagggttttaaacactaatcacaaactgaatgacttgacttcaaaagcaacaaccttaaaggccgtcatttcattagtattcctcattctgcatcctggcttgaaaaacagctctgttgaatcacagtatcagtattttcacacgtaagcacattcgggccatttccgtggtttctcatgagctgtgttcacagacctcagcagggcatcgcatggaccgcaggagggcagattcggaccactaggcctgaaatgacatttcactaaaagtctccaaaacatttctaagactactaaggccttttatgtaatttctttaaatgtgtatttcttaagaattcaaatttgtaataaaactatttgtata

SEQ ID NO: 359215 - DNA, 6612 bp, Homo sapiens
ttcgggagcctggcgtgggtgtctcagaactgatctgctttcagtctgagttttgccatcctctgcggcgagcctgcgagcttgcacacttgggcaggatgcgctcagcgccctagctcagaggccgacccagggcagagccagtcagcgggcgctgggacgcaggactctgaacatgggtcctctgcctccctcccacctcctccaggcccggccactcggcttcctggtgaggaattcttaacgaccgccaaatccggtttctagagataaaagacggttgaagggtggctgtgctggctctggctgtggcaaatgtgactgccatggagtgaagggacaaaagggtgaaagaggcctcccggggttacaaggtgtcattgggtttcctggaatgcaaggacctgaggggccacagggaccaccaggacaaaagggtgatactggagaaccaggactacctggaacaaaagggacaagaggacctccgggagcatctggctaccctggaaacccaggacttcccggaattcctggccaagacggcccgccaggccccccaggtattccaggatgcaatggcacaaagggggagagagggccgctcgggcctcctggcttgcctggtttcgcaggaaatcccggaccaccaggcttaccagggatgaagggtgatccaggtgagatacttggccatgtgcccgggatgctgttgaaaggtgaaagaggatttcccggaatcccagggactccaggcccaccaggactgccagggcttcaaggtcctgttgggcctccaggatttaccggaccaccaggtcccccaggccctcccggccctccaggtgaaaagggacaaatgggcttaagttttcaaggaccaaaaggtgacaagggtgaccaaggggtcagtgggcctccaggagtaccaggacaagctcaagttcaagaaaaaggagacttcgccaccaagggagaaaagggccaaaaaggtgaacctggatttcaggggatgccaggggtcggagagaaaggtgaacccggaaaaccaggacccagaggcaaacccggaaaagatggtgacaaaggggaaaaagggagtcccggttttcctggtgaacccgggtacccaggactcataggccgccagggcccgcagggagaaaagggtgaagcaggtcctcctggcccacctggaattgttataggcacaggacctttgggagaaaaaggagagaggggctaccctggaactccggggccaagaggagagccaggcccaaaaggtttcccaggactaccaggccaacccggacctccaggcctccctgtacctgggcaggctggtgcccctggcttccctggtgaaagaggagaaaaaggtgaccgaggatttcctggtacatctctgccaggaccaagtggaagagatgggctcccgggtcctcctggttcccctgggccccctgggcagcctggctacacaaatggaattgtggaatgtcagcccggacctccaggtgaccagggtcctcctggaattccagggcagccaggatttataggcgaaattggagagaaaggtcaaaaaggagagagttgcctcatctgtgatatagacggatatcgggggcctcccgggccacagggacccccgggagaaataggtttcccagggcagccaggggccaagggcgacagaggtttgcctggcagagatggtgttgcaggagtgccaggccctcaaggtacaccagggctgataggccagccaggagccaagggggagcctggtgagttttatttcgacttgcggctcaaaggtgacaaaggagacccaggctttccaggacagcccggcatgccagggagagcgggttctcctggaagagatggccatccgggtcttcctggccccaagggctcgccgggttctgtaggattgaaaggagagcgtggcccccctggaggagttggattcccaggcagtcgtggtgacaccggcccccctgggcctccaggatatggtcctgctggtcccattggtgacaaaggacaagcaggctttcctggaggccctggatccccaggcctgccaggtccaaagggtgaaccaggaaaaattgttcctttaccaggcccccctggagcagaaggactgccggggtccccaggcttcccaggtccccaaggagaccgaggctttcccggaaccccaggaaggccaggcctgccaggagagaagggcgctgtgggccagccaggcattggatttccagggccccccggccccaaaggtgttgacggcttacctggagacatggggccaccggggactccaggtcgcccgggatttaatggcttacctgggaacccaggtgtgcagggccagaagggagagcctggagttggtctaccgggactcaaaggtttgccaggtcttcccggcattcctggcacacccggggagaaggggagcattggggtaccaggcgttcctggagaacatggagcgatcggaccccctgggcttcaggggatcagaggtgaaccgggacctcctggattgccaggctccgtggggtctccaggagttccaggaataggcccccctggagctaggggtccccctggaggacagggaccaccggggttgtcaggccctcctggaataaaaggagagaagggtttccccggattccctggactggacatgccgggccctaaaggagataaaggggctcaaggactccctggcataacgggacagtcggggctccctggccttcctggacagcagggggctcctgggattcctgggtttccaggttccaagggagaaatgggcgtcatggggacccccgggcagccgggctcaccaggaccagtgggtgctcctggattaccgggtgaaaaaggggaccatggctttccgggctcctcaggacccaggggagaccctggcttgaaaggtgataagggggatgtcggtctccctggcaagcctggctccatggataaggtggacatgggcagcatgaagggccagaaaggagaccaaggagagaaaggacaaattggaccaattggtgagaagggatcccgaggagaccctgggaccccaggagtgcctggaaaggacgggcaggcaggacagcctgggcagccaggacctaaaggtgatccaggtataagtggaaccccaggtgctccaggacttccgggaccaaaaggatctgttggtggaatgggcttgccaggaacacctggagagaaaggtgtgcctggcatccctggcccacaaggttcacctggcttacctggagacaaaggtgcaaaaggagagaaagggcaggcaggcccacctggcataggcatcccagggctgcgaggtgaaaagggagatcaagggatagcgggtttcccaggaagccctggagagaagggagaaaaaggaagcattgggatcccaggaatgccagggtccccaggccttaaagggtctcccgggagtgttggctatccaggaagtcctgggctacctggagaaaaaggtgacaaaggcctcccaggattggatggcatccctggtgtcaaaggagaagcaggtcttcctgggactcctggccccacaggcccagctggccagaaaggggagccaggcagtgatggaatcccggggtcagcaggagagaagggtgaaccaggtctaccaggaagaggattcccagggtttccaggggccaaaggagacaaaggttcaaagggtgaggtgggtttcccaggattagccgggagcccaggaattcctggatccaaaggagagcaaggattcatgggtcctccggggccccagggacagccggggttaccgggatccccaggccatgccacggaggggcccaaaggagaccgcggacctcagggccagcctggcctgccaggacttccgggacccatggggcctccagggcttcctgggattgatggagttaaaggtgacaaaggaaatccaggctggccaggagcacccggtgtcccagggcccaagggagaccctggattccagggcatgcctggtattggtggctctccaggaatcacaggctctaagggtgatatggggcctccaggagttccaggatttcaaggtccaaaaggtcttcctggcctccagggaattaaaggtgatcaaggcgatcaaggcgtcccgggagctaaaggtctcccgggtcctcctggccccccaggtccttacgacatcatcaaaggggagcccgggctccctggtcctgagggccccccagggctgaaagggcttcagggactgccaggcccgaaaggccagcaaggtgttacaggattggtgggtatacctggacctccaggtattcctgggtttgacggtgcccctggccagaaaggagagatgggacctgccgggcctactggtccaagaggatttccaggtccaccaggccccgatgggttgccaggatccatggggcccccaggcaccccatctgttgatcacggcttccttgtgaccaggcatagtcaaacaatagatgacccacagtgtccttctgggaccaaaattctttaccacgggtactctttgctctacgtgcaaggcaatgaacgggcccatggccaggacttgggcacggccggcagctgcctgcgcaagttcagcacaatgcccttcctgttctgcaatattaacaacgtgtgcaactttgcatcacgaaatgactactcgtactggctgtccacccctgagcccatgcccatgtcaatggcacccatcacgggggaaaacataagaccatttattagtaggtgtgctgtgtgtgaggcgcctgccatggtgatggccgtgcacagccagaccattcagatcccaccgtgccccagcgggtggtcctcgctgtggatcggctactcttttgtgatgcacaccagcgctggtgcagaaggctctggccaagccctggcgtcccccggctcctgcctggaggagtttagaagtgcgccattcatcgagtgtcacggccgtgggacctgcaattactacgcaaacgcttacagcttttggctcgccaccatagagaggagcgagatgttcaagaagcctacgccgtccaccttgaaggcaggggagctgcgcacgcacgtcagccgctgccaagtctgtatgagaagaacataatgaagcctgactcagctaatgtcacaacatggtgctacttcttcttctttttgttaacagcaacgaaccctagaaatatatcctgtgtacctcactgtccaatatgaaaaccgtaaagtgccttataggaatttgcgtaactaacacaccctgcttcattgacctctacttgctgaaggagaaaaagacagcgataagctttcaatagtggcataccaaatggcacttttgatgaaataaaatatcaatattttctgcaatccaatgcactgatgtgtgaagtgagaactccatcagaaaaccaaagggtgctaggaggtgtgggtgccttccatactgtttgcccattttcattcttgtattataattaattttctacccccagagataaatgtttgtttatatcactgtctagctgtttcaaaatttaggtcccttggtctgtacaaataatagcaatgtaaaaatggttttttgaacctccaaatggaattacagactcagtagccatatcttccaaccccccagtataaatttctgtctttctgctatgtgtggtactttgcagctgcttttgcagaaatcacaattttcctgtggaataaagatggtccaaaaatagtcaaaaattaaatatatatatatattagtaatttatatagatgtcagcaattaggcagatcaaggtttagtttaacttccactgttaaaataaagcttacatagttttcttcctttgaaagactgtgctgtcctttaacataggtttttaaagactaggatattgaatgtgaaacatccgttttcattgttcacttctaaaccaaaaattatgtgttgccaaaaccaaacccaggttcatgaatatggtgtctattatagtgaaacatgtactttgagcttattgtttttattctgtattaaatattttcagggttttaaacactaatcacaaactgaatgacttgacttcaaaagcaacaaccttaaaggccgtcatttcattagtattcctcattctgcatcctggcttgaaaaacagctctgttgaatcacagtatcagtattttcacacgtaagcacattcgggccatttccgtggtttctcatgagctgtgttcacagacctcagcagggcatcgcatggaccgcaggagggcagattcggaccactaggcctgaaatgacatttcactaaaagtctccaaaacatttctaagactactaaggccttttatgtaatttctttaaatgtgtatttcttaagaattcaaatttgtaataaaactatttgtataaaaattaagcttttattaatttgttgctagtattgccacagacgcattaaaagaaacttactgcacaagctgctaataaatttgtaagctttgcatacctta

SEQ ID NO: 359216 - DNA, 6744 bp, Homo sapiens
ttcgggagcctggcgtgggtgtctcagaactgatctgctttcagtctgagttttgccatcctctgcggcgagcctgcgagcttgcacacttgggcaggatgcgctcagcgccctagctcagaggccgacccagggcagagccagtcagcgggcgctgggacgcaggactctgaacatgggtcctctgcctccctcccacctcctccaggcccggccactcggcttcctggtgaggaattcttaacgaccgccaaatccggtttctagagataaaagacggttgaagggtggctgtgctggctctggctgtggcaaatgtgactgccatggagtgaagggacaaaagggtgaaagaggcctcccggggttacaaggtgtcattgggtttcctggaatgcaaggacctgaggggccacagggaccaccaggacaaaagggtgatactggagaaccaggactacctggaacaaaagggacaagaggacctccgggagcatctggctaccctggaaacccaggacttcccggaattcctggccaagacggcccgccaggccccccaggtattccaggatgcaatggcacaaagggggagagagggccgctcgggcctcctggcttgcctggtttcgcaggaaatcccggaccaccaggcttaccagggatgaagggtgatccaggtgagatacttggccatgtgcccgggatgctgttgaaaggtgaaagaggatttcccggaatcccagggactccaggcccaccaggactgccagggcttcaaggtcctgttgggcctccaggatttaccggaccaccaggtcccccaggccctcccggccctccaggtgaaaagggacaaatgggcttaagttttcaaggaccaaaaggtgacaagggtgaccaaggggtcagtgggcctccaggagtaccaggacaagctcaagttcaagaaaaaggagacttcgccaccaagggagaaaagggccaaaaaggtgaacctggatttcaggggatgccaggggtcggagagaaaggtgaacccggaaaaccaggacccagaggcaaacccggaaaagatggtgacaaaggggaaaaagggagtcccggttttcctggtgaacccgggtacccaggactcataggccgccagggcccgcagggagaaaagggtgaagcaggtcctcctggcccacctggaattgttataggcacaggacctttgggagaaaaaggagagaggggctaccctggaactccggggccaagaggagagccaggcccaaaaggtttcccaggactaccaggccaacccggacctccaggcctccctgtacctgggcaggctggtgcccctggcttccctggtgaaagaggagaaaaaggtgaccgaggatttcctggtacatctctgccaggaccaagtggaagagatgggctcccgggtcctcctggttcccctgggccccctgggcagcctggctacacaaatggaattgtggaatgtcagcccggacctccaggtgaccagggtcctcctggaattccagggcagccaggatttataggcgaaattggagagaaaggtcaaaaaggagagagttgcctcatctgtgatatagacggatatcgggggcctcccgggccacagggacccccgggagaaataggtttcccagggcagccaggggccaagggcgacagaggtttgcctggcagagatggtgttgcaggagtgccaggccctcaaggtacaccagggctgataggccagccaggagccaagggggagcctggtgagttttatttcgacttgcggctcaaaggtgacaaaggagacccaggctttccaggacagcccggcatgccagggagagcgggttctcctggaagagatggccatccgggtcttcctggccccaagggctcgccgggttctgtaggattgaaaggagagcgtggcccccctggaggagttggattcccaggcagtcgtggtgacaccggcccccctgggcctccaggatatggtcctgctggtcccattggtgacaaaggacaagcaggctttcctggaggccctggatccccaggcctgccaggtccaaagggtgaaccaggaaaaattgttcctttaccaggcccccctggagcagaaggactgccggggtccccaggcttcccaggtccccaaggagaccgaggctttcccggaaccccaggaaggccaggcctgccaggagagaagggcgctgtgggccagccaggcattggatttccagggccccccggccccaaaggtgttgacggcttacctggagacatggggccaccggggactccaggtcgcccgggatttaatggcttacctgggaacccaggtgtgcagggccagaagggagagcctggagttggtctaccgggactcaaaggtttgccaggtcttcccggcattcctggcacacccggggagaaggggagcattggggtaccaggcgttcctggagaacatggagcgatcggaccccctgggcttcaggggatcagaggtgaaccgggacctcctggattgccaggctccgtggggtctccaggagttccaggaataggcccccctggagctaggggtccccctggaggacagggaccaccggggttgtcaggccctcctggaataaaaggagagaagggtttccccggattccctggactggacatgccgggccctaaaggagataaaggggctcaaggactccctggcataacgggacagtcggggctccctggccttcctggacagcagggggctcctgggattcctgggtttccaggtaagtgatttttgaacttctgcctggatccatcatgaagacatgggcctcaccttattctttttatgactcagcatttactgtcagcattcagagcaagaaaatgttcacagtcctttcctttggccacaggttccaagggagaaatgggcgtcatggggacccccgggcagccgggctcaccaggaccagtgggtgctcctggattaccgggtgaaaaaggggaccatggctttccgggctcctcaggacccaggggagaccctggcttgaaaggtgataagggggatgtcggtctccctggcaagcctggctccatggataaggtggacatgggcagcatgaagggccagaaaggagaccaaggagagaaaggacaaattggaccaattggtgagaagggatcccgaggagaccctgggaccccaggagtgcctggaaaggacgggcaggcaggacagcctgggcagccaggacctaaaggtgatccaggtataagtggaaccccaggtgctccaggacttccgggaccaaaaggatctgttggtggaatgggcttgccaggaacacctggagagaaaggtgtgcctggcatccctggcccacaaggttcacctggcttacctggagacaaaggtgcaaaaggagagaaagggcaggcaggcccacctggcataggcatcccagggctgcgaggtgaaaagggagatcaagggatagcgggtttcccaggaagccctggagagaagggagaaaaaggaagcattgggatcccaggaatgccagggtccccaggccttaaagggtctcccgggagtgttggctatccaggaagtcctgggctacctggagaaaaaggtgacaaaggcctcccaggattggatggcatccctggtgtcaaaggagaagcaggtcttcctgggactcctggccccacaggcccagctggccagaaaggggagccaggcagtgatggaatcccggggtcagcaggagagaagggtgaaccaggtctaccaggaagaggattcccagggtttccaggggccaaaggagacaaaggttcaaagggtgaggtgggtttcccaggattagccgggagcccaggaattcctggatccaaaggagagcaaggattcatgggtcctccggggccccagggacagccggggttaccgggatccccaggccatgccacggaggggcccaaaggagaccgcggacctcagggccagcctggcctgccaggacttccgggacccatggggcctccagggcttcctgggattgatggagttaaaggtgacaaaggaaatccaggctggccaggagcacccggtgtcccagggcccaagggagaccctggattccagggcatgcctggtattggtggctctccaggaatcacaggctctaagggtgatatggggcctccaggagttccaggatttcaaggtccaaaaggtcttcctggcctccagggaattaaaggtgatcaaggcgatcaaggcgtcccgggagctaaaggtctcccgggtcctcctggccccccaggtccttacgacatcatcaaaggggagcccgggctccctggtcctgagggccccccagggctgaaagggcttcagggactgccaggcccgaaaggccagcaaggtgttacaggattggtgggtatacctggacctccaggtattcctgggtttgacggtgcccctggccagaaaggagagatgggacctgccgggcctactggtccaagaggatttccaggtccaccaggccccgatgggttgccaggatccatggggcccccaggcaccccatctgttgatcacggcttccttgtgaccaggcatagtcaaacaatagatgacccacagtgtccttctgggaccaaaattctttaccacgggtactctttgctctacgtgcaaggcaatgaacgggcccatggccaggacttgggcacggccggcagctgcctgcgcaagttcagcacaatgcccttcctgttctgcaatattaacaacgtgtgcaactttgcatcacgaaatgactactcgtactggctgtccacccctgagcccatgcccatgtcaatggcacccatcacgggggaaaacataagaccatttattagtaggtgtgctgtgtgtgaggcgcctgccatggtgatggccgtgcacagccagaccattcagatcccaccgtgccccagcgggtggtcctcgctgtggatcggctactcttttgtgatgcacaccagcgctggtgcagaaggctctggccaagccctggcgtcccccggctcctgcctggaggagtttagaagtgcgccattcatcgagtgtcacggccgtgggacctgcaattactacgcaaacgcttacagcttttggctcgccaccatagagaggagcgagatgttcaagaagcctacgccgtccaccttgaaggcaggggagctgcgcacgcacgtcagccgctgccaagtctgtatgagaagaacataatgaagcctgactcagctaatgtcacaacatggtgctacttcttcttctttttgttaacagcaacgaaccctagaaatatatcctgtgtacctcactgtccaatatgaaaaccgtaaagtgccttataggaatttgcgtaactaacacaccctgcttcattgacctctacttgctgaaggagaaaaagacagcgataagctttcaatagtggcataccaaatggcacttttgatgaaataaaatatcaatattttctgcaatccaatgcactgatgtgtgaagtgagaactccatcagaaaaccaaagggtgctaggaggtgtgggtgccttccatactgtttgcccattttcattcttgtattataattaattttctacccccagagataaatgtttgtttatatcactgtctagctgtttcaaaatttaggtcccttggtctgtacaaataatagcaatgtaaaaatggttttttgaacctccaaatggaattacagactcagtagccatatcttccaaccccccagtataaatttctgtctttctgctatgtgtggtactttgcagctgcttttgcagaaatcacaattttcctgtggaataaagatggtccaaaaatagtcaaaaattaaatatatatatatattagtaatttatatagatgtcagcaattaggcagatcaaggtttagtttaacttccactgttaaaataaagcttacatagttttcttcctttgaaagactgtgctgtcctttaacataggtttttaaagactaggatattgaatgtgaaacatccgttttcattgttcacttctaaaccaaaaattatgtgttgccaaaaccaaacccaggttcatgaatatggtgtctattatagtgaaacatgtactttgagcttattgtttttattctgtattaaatattttcagggttttaaacactaatcacaaactgaatgacttgacttcaaaagcaacaaccttaaaggccgtcatttcattagtattcctcattctgcatcctggcttgaaaaacagctctgttgaatcacagtatcagtattttcacacgtaagcacattcgggccatttccgtggtttctcatgagctgtgttcacagacctcagcagggcatcgcatggaccgcaggagggcagattcggaccactaggcctgaaatgacatttcactaaaagtctccaaaacatttctaagactactaaggccttttatgtaatttctttaaatgtgtatttcttaagaattcaaatttgtaataaaactatttgtataaaaattaagcttttattaatttgttgctagtattgccacagacgcattaaaagaaacttactgcacaagctgctaataaatttgtaagctttgcatacctta

SEQ ID NO: 359217 - DNA, 3136 bp, Homo sapiens
  misc_feature (2)..(2): n is a, c, g, or t
angcaggctgggtccggaattcccgggatcccgggagtgttggctatccaggaagtcctgggctacctggagaaaaaggtgacaaaggcctcccaggattggatggcatccctggtgtcaaaggagaagcaggtcttcctgggactcctggccccacaggcccagctggccagaaaggggagccaggcagtgatggaatcccggggtcagcaggagagaagggtgaaccaggtctaccaggaagaggattcccagggtttccaggggccaaaggagacaaaggttcaaagggtgaggtgggtttcccaggattagccgggagcccaggaattcctggatccaaaggagagcaaggattcatgggtcctccggggccccagggacagccggggttaccgggatccccaggccatgccacggaggggcccaaaggagaccgcggacctcagggccagcctggcctgccaggacttccgggacccatggggcctccagggcttcctgggattgatggagttaaaggtgacaaaggaaatccaggctggccaggagcacccggtgtcccagggcccaagggagaccctggattccagggcatgcctggtattggtggctctccaggaatcacaggctctaagggtgatatggggcctccaggagttccaggatttcaaggtccaaaaggtcttcctggcctccagggaattaaaggtgatcaaggcgatcaaggcgtcccgggagctaaaggtctcccgggtcctcctggccccccaggtccttacgacatcatcaaaggggagcccgggctccctggtcctgagggccccccagggctgaaagggcttcagggactgccaggcccgaaaggccagcaaggtgttacaggattggtgggtatacctggacctccaggtattcctgggtttgacggtgcccctggccagaaaggagagatgggacctgccgggcctactggtccaagaggatttccaggtccaccaggccccgatgggttgccaggatccatggggcccccaggcaccccatctgttgatcacggcttccttgtgaccaggcatagtcaaacaatagatgacccacagtgtccttctgggaccaaaattctttaccacgggtactctttgctctacgtgcaaggcaatgaacgggcccatggccaggacttgggcacggccggcagctgcctgcgcaagttcagcacaatgcccttcctgttctgcaatattaacaacgtgtgcaactttgcatcacgaaatgactactcgtactggctgtccacccctgagcccatgcccatgtcaatggcacccatcacgggggaaaacataagaccatttattagtaggtgtgctgtgtgtgaggcgcctgccatggtgatggccgtgcacagccagaccattcagatcccaccgtgccccagcgggtggtcctcgctgtggatcggctactcttttgtgatgcacaccagcgctggtgcagaaggctctggccaagccctggcgtcccccggctcctgcctggaggagtttagaagtgcgccattcatcgagtgtcacggccgtgggacctgcaattactacgcaaacgcttacagcttttggctcgccaccatagagaggagcgagatgttcaagaagcctacgccgtccaccttgaaggcaggggagctgcgcacgcacgtcagccgctgccaagtctgtatgagaagaacataatgaagcctgactcagctaatgtcacaacatggtgctacttcttcttctttttgttaacagcaacgaaccctagaaatatatcctgtgtacctcactgtccaatatgaaaaccgtaaagtgccttataggaatttgcgtaactaacacaccctgcttcattgacctctacttgctgaaggagaaaaagacagcgataagctttcaatagtggcataccaaatggcacttttgatgaaataaaatatcaatattttctgcaatccaatgcactgatgtgtgaagtgagaactccatcagaaaaccaaagggtgctaggaggtgtgggtgccttccatactgtttgcccattttcattcttgtattataattaattttctacccccagagataaatgtttgtttatatcactgtctagctgtttcaaaatttaggtcccttggtctgtacaaataatagcaatgtaaaaatggttttttgaacctccaaatggaattacagactcagtagccatatcttccaaccccccagtataaatttctgtctttctgctatgtgtggtactttgcagctgcttttgcagaaatcacaattttcctgtggaataaagatggtccaaaaatagtcaaaaattaaatatatatatatattagtaatttatatagatgtcagcaattaggcagatcaaggtttagtttaacttccactgttaaaataaagcttacatagttttcttcctttgaaagactgtgctgtcctttaacataggtttttaaagactaggatattgaatgtgaaacatccgttttcattgttcacttctaaaccaaaaattatgtgttgccaaaaccaaacccaggttcatgaatatggtgtctattatagtgaaacatgtactttgagcttattgtttttattctgtattaaatattttcagggttttaaacactaatcacaaactgaatgacttgacttcaaaagcaacaaccttaaaggccgtcatttcattagtattcctcattctgcatcctggcttgaaaaacagctctgttgaatcacagtatcagtattttcacacgtaagcacattcgggccatttccgtggtttctcatgagctgtgttcacagacctcagcagggcatcgcatggaccgcaggagggcagattcggaccactaggcctgaaatgacatttcactaaaagtctccaaaacatttctaagactactaaggccttttatgtaatttctttaaatgtgtatttcttaagaattcaaatttgtaataaaactatttgtataaaaattaagcttttattaatttgttgctagtattgccacagacgcattaaaagaaacttactgcacaagctgctaataaatttgtaagctttgcatacctta

SEQ ID NO: 359218 - DNA, 6377 bp, Homo sapiens
gcttggagccgccgcacccgggacggtgcgtagcgctggaagtccggccttccgagagctagctgtccgccgcggcccccgcacgccgggcagccgtccctcgccgcctcgggcgcgccaccatggggccccggctcagcgtctggctgctgctgctgcccgccgcccttctgctccacgaggagcacagccgggccgctgcgaagggtggctgtgctggctctggctgtggcaaatgtgactgccatggagtgaagggacaaaagggtgaaagaggcctcccggggttacaaggtgtcattgggtttcctggaatgcaaggacctgaggggccacagggaccaccaggacaaaagggtgatactggagaaccaggactacctggaacaaaagggacaagaggacctccgggagcatctggctaccctggaaacccaggacttcccggaattcctggccaagacggcccgccaggccccccaggtattccaggatgcaatggcacaaagggggagagagggccgctcgggcctcctggcttgcctggtttcgcaggaaatcccggaccaccaggcttaccagggatgaagggtgatccaggtgagatacttggccatgtgcccgggatgctgttgaaaggtgaaagaggatttcccggaatcccagggactccaggcccaccaggactgccagggcttcaaggtcctgttgggcctccaggatttaccggaccaccaggtcccccaggccctcccggccctccaggtgaaaagggacaaatgggcttaagttttcaaggaccaaaaggtgacaagggtgaccaaggggtcagtgggcctccaggagtaccaggacaagctcaagttcaagaaaaaggagacttcgccaccaagggagaaaagggccaaaaaggtgaacctggatttcaggggatgccaggggtcggagagaaaggtgaacccggaaaaccaggacccagaggcaaacccggaaaagatggtgacaaaggggaaaaagggagtcccggttttcctggtgaacccgggtacccaggactcataggccgccagggcccgcagggagaaaagggtgaagcaggtcctcctggcccacctggaattgttataggcacaggacctttgggagaaaaaggagagaggggctaccctggaactccggggccaagaggagagccaggcccaaaaggtttcccaggactaccaggccaacccggacctccaggcctccctgtacctgggcaggctggtgcccctggcttccctggtgaaagaggagaaaaaggtgaccgaggatttcctggtacatctctgccaggaccaagtggaagagatgggctcccgggtcctcctggttcccctgggccccctgggcagcctggctacacaaatggaattgtggaatgtcagcccggacctccaggtgaccagggtcctcctggaattccagggcagccaggatttataggcgaaattggagagaaaggtcaaaaaggagagagttgcctcatctgtgatatagacggatatcgggggcctcccgggccacagggacccccgggagaaataggtttcccagggcagccaggggccaagggcgacagaggtttgcctggcagagatggtgttgcaggagtgccaggccctcaaggtacaccagggctgataggccagccaggagccaagggggagcctggtgagttttatttcgacttgcggctcaaaggtgacaaaggagacccaggctttccaggacagcccggcatgccagggagagcgggttctcctggaagagatggccatccgggtcttcctggccccaagggctcgccgggttctgtaggattgaaaggagagcgtggcccccctggaggagttggattcccaggcagtcgtggtgacaccggcccccctgggcctccaggatatggtcctgctggtcccattggtgacaaaggacaagcaggctttcctggaggccctggatccccaggcctgccaggtccaaagggtgaaccaggaaaaattgttcctttaccaggcccccctggagcagaaggactgccggggtccccaggcttcccaggtccccaaggagaccgaggctttcccggaaccccaggaaggccaggcctgccaggagagaagggcgctgtgggccagccaggcattggatttccagggccccccggccccaaaggtgttgacggcttacctggagacatggggccaccggggactccaggtcgcccgggatttaatggcttacctgggaacccaggtgtgcagggccagaagggagagcctggagttggtctaccgggactcaaaggtttgccaggtcttcccggcattcctggcacacccggggagaaggggagcattggggtaccaggcgttcctggagaacatggagcgatcggaccccctgggcttcaggggatcagaggtgaaccgggacctcctggattgccaggctccgtggggtctccaggagttccaggaataggcccccctggagctaggggtccccctggaggacagggaccaccggggttgtcaggccctcctggaataaaaggagagaagggtttccccggattccctggactggacatgccgggccctaaaggagataaaggggctcaaggactccctggcataacgggacagtcggggctccctggccttcctggacagcagggggctcctgggattcctgggtttccaggttccaagggagaaatgggcgtcatggggacccccgggcagccgggctcaccaggaccagtgggtgctcctggattaccgggtgaaaaaggggaccatggctttccgggctcctcaggacccaggggagaccctggcttgaaaggtgataagggggatgtcggtctccctggcaagcctggctccatggataaggtggacatgggcagcatgaagggccagaaaggagaccaaggagagaaaggacaaattggaccaattggtgagaagggatcccgaggagaccctgggaccccaggagtgcctggaaaggacgggcaggcaggacagcctgggcagccaggacctaaaggtgatccaggtataagtggaaccccaggtgctccaggacttccgggaccaaaaggatctgttggtggaatgggcttgccaggaacacctggagagaaaggtgtgcctggcatccctggcccacaaggttcacctggcttacctggagacaaaggtgcaaaaggagagaaagggcaggcaggcccacctggcataggcatcccagggctgcgaggtgaaaagggagatcaagggatagcgggtttcccaggaagccctggagagaagggagaaaaaggaagcattgggatcccaggaatgccagggtccccaggccttaaagggtctcccgggagtgttggctatccaggaagtcctgggctacctggagaaaaaggtgacaaaggcctcccaggattggatggcatccctggtgtcaaaggagaagcaggtcttcctgggactcctggccccacaggcccagctggccagaaaggggagccaggcagtgatggaatcccggggtcagcaggagagaagggtgaaccaggtctaccaggaagaggattcccagggtttccaggggccaaaggagacaaaggttcaaagggtgaggtgggtttcccaggattagccgggagcccaggaattcctggatccaaaggagagcaaggattcatgggtcctccggggccccagggacagccggggttaccgggatccccaggccatgccacggaggggcccaaaggagaccgcggacctcagggccagcctggcctgccaggacttccgggacccatggggcctccagggcttcctgggattgatggagttaaaggtgacaaaggaaatccaggctggccaggagcacccggtgtcccagggcccaagggagaccctggattccagggcatgcctggtattggtggctctccaggaatcacaggctctaagggtgatatggggcctccaggagttccaggatttcaaggtccaaaaggtcttcctggcctccagggaattaaaggtgatcaaggcgatcaaggcgtcccgggagctaaaggtctcccgggtcctcctggccccccaggtccttacgacatcatcaaaggggagcccgggctccctggtcctgagggccccccagggctgaaagggcttcagggactgccaggcccgaaaggccagcaaggtgttacaggattggtgggtatacctggacctccaggtattcctgggtttgacggtgcccctggccagaaaggagagatgggacctgccgggcctactggtccaagaggatttccaggtccaccaggccccgatgggttgccaggatccatggggcccccaggcaccccatctgttgatcacggcttccttgtgaccaggcatagtcaaacaatagatgacccacagtgtccttctgggaccaaaattctttaccacgggtactctttgctctacgtgcaaggcaatgaacgggcccatggccaggacttgggcacggccggcagctgcctgcgcaagttcagcacaatgcccttcctgttctgcaatattaacaacgtgtgcaactttgcatcacgaaatgactactcgtactggctgtccacccctgagcccatgcccatgtcaatggcacccatcacgggggaaaacataagaccatttattagtaggtgtgctgtgtgtgaggcgcctgccatggtgatggccgtgcacagccagaccattcagatcccaccgtgccccagcgggtggtcctcgctgtggatcggctactcttttgtgatgcacaccagcgctggtgcagaaggctctggccaagccctggcgtcccccggctcctgcctggaggagtttagaagtgcgccattcatcgagtgtcacggccgtgggacctgcaattactacgcaaacgcttacagcttttggctcgccaccatagagaggagcgagatgttcaagaagcctacgccgtccaccttgaaggcaggggagctgcgcacgcacgtcagccgctgccaagtctgtatgagaagaacataatgaagcctgactcagctaatgtcacaacatggtgctacttcttcttctttttgttaacagcaacgaaccctagaaatatatcctgtgtacctcactgtccaatatgaaaaccgtaaagtgccttataggaatttgcgtaactaacacaccctgcttcattgacctctacttgctgaaggagaaaaagacagcgataagctttcaatagtggcataccaaatggcacttttgatgaaataaaatatcaatattttctgcaatccaatgcactgatgtgtgaagtgagaactccatcagaaaaccaaagggtgctaggaggtgtgggtgccttccatactgtttgcccattttcattcttgtattataattaattttctacccccagagataaatgtttgtttatatcactgtctagctgtttcaaaatttaggtcccttggtctgtacaaataatagcaatgtaaaaatggttttttgaacctccaaatggaattacagactcagtagccatatcttccaaccccccagtataaatttctgtctttctgctatgtgtggtactttgcagctgcttttgcagaaatcacaattttcctgtggaataaagatggtccaaaaatagtcaaaaattaaatatatatatatattagtaatttatatagatgtcagcaattaggcagatcaaggtttagtttaacttccactgttaaaataaagcttacatagttttcttcctttgaaagactgtgctgtcctttaacataggtttttaaagactaggatattgaatgtgaaacatccgttttcattgttcacttctaaaccaaaaattatgtgttgccaaaaccaaacccaggttcatgaatatggtgtctattatagtgaaacatgtactttgagcttattgtttttattctgtattaaatattttcagggttttaaacactaatcacaaactgaatgacttgacttcaaaagcaacaaccttaaaggccgtcatttcattagtattcctcattctgcatcctggcttgaaaaacagctctgttgaatcacagtatcagtattttcacacgtaagcacattcgggccatttccgtggtttctcatgagctgtgttcacagacctcagcagggcatcgcatggaccgcaggagggcagattcggaccactaggcctgaaatgacatttcactccagcctcccttttcagagcacagcattaaagtttggggaattctgtaa

SEQ ID NO: 359219 - DNA, 3028 bp, Homo sapiens
aaagagaaggagggatcggagcccttgctgcagtttcctgtggtgtccctggaagctccctctgagcggtacctacaggatgaggcacgcctcatcccatctctgccgtccacgctggagattactgttctgctgctgcgtttcccatcacctcaaactgtttttcttgttcaggttcaaagggtgaggtgggtttcccaggattagccgggagcccaggaattcctggatccaaaggagagcaaggattcatgggtcctccggggccccagggacagccggggttaccgggatccccaggccatgccacggaggggcccaaaggagaccgcggacctcagggccagcctggcctgccaggacttccgggacccatggggcctccagggcttcctgggattgatggagttaaaggtgacaaaggaaatccaggctggccaggagcacccggtgtcccagggcccaagggagaccctggattccagggcatgcctggtattggtggctctccaggaatcacaggctctaagggtgatatggggcctccaggagttccaggatttcaaggtccaaaaggtcttcctggcctccagggaattaaaggtgatcaaggcgatcaaggcgtcccgggagctaaaggtctcccgggtcctcctggccccccaggtccttacgacatcatcaaaggggagcccgggctccctggtcctgagggccccccagggctgaaagggcttcagggactgccaggcccgaaaggccagcaaggtgttacaggattggtgggtatacctggacctccaggtattcctgggtttgacggtgcccctggccagaaaggagagatgggacctgccgggcctactggtccaagaggatttccaggtccaccaggccccgatgggttgccaggatccatggggcccccaggcaccccatctgttgatcacggcttccttgtgaccaggcatagtcaaacaatagatgacccacagtgtccttctgggaccaaaattctttaccacgggtactctttgctctacgtgcaaggcaatgaacgggcccatggccaggacttgggcacggccggcagctgcctgcgcaagttcagcacaatgcccttcctgttctgcaatattaacaacgtgtgcaactttgcatcacgaaatgactactcgtactggctgtccacccctgagcccatgcccatgtcaatggcacccatcacgggggaaaacataagaccatttattagtaggtgtgctgtgtgtgaggcgcctgccatggtgatggccgtgcacagccagaccattcagatcccaccgtgccccagcgggtggtcctcgctgtggatcggctactcttttgtgatgcacaccagcgctggtgcagaaggctctggccaagccctggcgtcccccggctcctgcctggaggagtttagaagtgcgccattcatcgagtgtcacggccgtgggacctgcaattactacgcaaacgcttacagcttttggctcgccaccatagagaggagcgagatgttcaagaagcctacgccgtccaccttgaaggcaggggagctgcgcacgcacgtcagccgctgccaagtctgtatgagaagaacataatgaagcctgactcagctaatgtcacaacatggtgctacttcttcttctttttgttaacagcaacgaaccctagaaatatatcctgtgtacctcactgtccaatatgaaaaccgtaaagtgccttataggaatttgcgtaactaacacaccctgcttcattgacctctacttgctgaaggagaaaaagacagcgataagctttcaatagtggcataccaaatggcacttttgatgaaataaaatatcaatattttctgcaatccaatgcactgatgtgtgaagtgagaactccatcagaaaaccaaagggtgctaggaggtgtgggtgccttccatactgtttgcccattttcattcttgtattataattaattttctacccccagagataaatgtttgtttatatcactgtctagctgtttcaaaatttaggtcccttggtctgtacaaataatagcaatgtaaaaatggttttttgaacctccaaatggaattacagactcagtagccatatcttccaaccccccagtataaatttctgtctttctgctatgtgtggtactttgcagctgcttttgcagaaatcacaattttcctgtggaataaagatggtccaaaaatagtcaaaaattaaatatatatatatattagtaatttatatagatgtcagcaattaggcagatcaaggtttagtttaacttccactgttaaaataaagcttacatagttttcttcctttgaaagactgtgctgtcctttaacataggtttttaaagactaggatattgaatgtgaaacatccgttttcattgttcacttctaaaccaaaaattatgtgttgccaaaaccaaacccaggttcatgaatatggtgtctattatagtgaaacatgtactttgagcttattgtttttattctgtattaaatattttcagggttttaaacactaatcacaaactgaatgacttgacttcaaaagcaacaaccttaaaggccgtcatttcattagtattcctcattctgcatcctggcttgaaaaacagctctgttgaatcacagtatcagtattttcacacgtaagcacattcgggccatttccgtggtttctcatgagctgtgttcacagacctcagcagggcatcgcatggaccgcaggagggcagattcggaccactaggcctgaaatgacatttcactaaaagtctccaaaacatttctaagactactaaggccttttatgtaatttctttaaatgtgtatttcttaagaattcaaatttgtaataaaactatttgtataaaaattaagcttttattaatttgttgctagtattgccacagacgcattaaaagaaacttactgcacaagctgctaataaatttgtaagctttgcatacctta

SEQ ID NO: 359220 - DNA, 6478 bp, Homo sapiens
gcttggagccgccgcacccgggacggtgcgtagcgctggaagtccggccttccgagagctagctgtccgccgcggcccccgcacgccgggcagccgtccctcgccgcctcgggcgcgccaccatggggccccggctcagcgtctggctgctgctgctgcccgccgcccttctgctccacgaggagcacagccgggccgctgcgaagggtggctgtgctggctctggctgtggcaaatgtgactgccatggagtgaagggacaaaagggtgaaagaggcctcccggggttacaaggtgtcattgggtttcctggaatgcaaggacctgaggggccacagggaccaccaggacaaaagggtgatactggagaaccaggactacctggaacaaaagggacaagaggacctccgggagcatctggctaccctggaaacccaggacttcccggaattcctggccaagacggcccgccaggccccccaggtattccaggatgcaatggcacaaagggggagagagggccgctcgggcctcctggcttgcctggtttcgcaggaaatcccggaccaccaggcttaccagggatgaagggtgatccaggtgagatacttggccatgtgcccgggatgctgttgaaaggtgaaagaggatttcccggaatcccagggactccaggcccaccaggactgccagggcttcaaggtcctgttgggcctccaggatttaccggaccaccaggtcccccaggccctcccggccctccaggtgaaaagggacaaatgggcttaagttttcaaggaccaaaaggtgacaagggtgaccaaggggtcagtgggcctccaggagtaccaggacaagctcaagttcaagaaaaaggagacttcgccaccaagggagaaaagggccaaaaaggtgaacctggatttcaggggatgccaggggtcggagagaaaggtgaacccggaaaaccaggacccagaggcaaacccggaaaagatggtgacaaaggggaaaaagggagtcccggttttcctggtgaacccgggtacccaggactcataggccgccagggcccgcagggagaaaagggtgaagcaggtcctcctggcccacctggaattgttataggcacaggacctttgggagaaaaaggagagaggggctaccctggaactccggggccaagaggagagccaggcccaaaaggtttcccaggactaccaggccaacccggacctccaggcctccctgtacctgggcaggctggtgcccctggcttccctggtgaaagaggagaaaaaggtgaccgaggatttcctggtacatctctgccaggaccaagtggaagagatgggctcccgggtcctcctggttcccctgggccccctgggcagcctggctacacaaatggaattgtggaatgtcagcccggacctccaggtgaccagggtcctcctggaattccagggcagccaggatttataggcgaaattggagagaaaggtcaaaaaggagagagttgcctcatctgtgatatagacggatatcgggggcctcccgggccacagggacccccgggagaaataggtttcccagggcagccaggggccaagggcgacagaggtttgcctggcagagatggtgttgcaggagtgccaggccctcaaggtacaccagggctgataggccagccaggagccaagggggagcctggtgagttttatttcgacttgcggctcaaaggtgacaaaggagacccaggctttccaggacagcccggcatgccagggagagcgggttctcctggaagagatggccatccgggtcttcctggccccaagggctcgccgggttctgtaggattgaaaggagagcgtggcccccctggaggagttggattcccaggcagtcgtggtgacaccggcccccctgggcctccaggatatggtcctgctggtcccattggtgacaaaggacaagcaggctttcctggaggccctggatccccaggcctgccaggtccaaagggtgaaccaggaaaaattgttcctttaccaggcccccctggagcagaaggactgccggggtccccaggcttcccaggtccccaaggagaccgaggctttcccggaaccccaggaaggccaggcctgccaggagagaagggcgctgtgggccagccaggcattggatttccagggccccccggccccaaaggtgttgacggcttacctggagacatggggccaccggggactccaggtcgcccgggatttaatggcttacctgggaacccaggtgtgcagggccagaagggagagcctggagttggtctaccgggactcaaaggtttgccaggtcttcccggcattcctggcacacccggggagaaggggagcattggggtaccaggcgttcctggagaacatggagcgatcggaccccctgggcttcaggggatcagaggtgaaccgggacctcctggattgccaggctccgtggggtctccaggagttccaggaataggcccccctggagctaggggtccccctggaggacagggaccaccggggttgtcaggccctcctggaataaaaggagagaagggtttccccggattccctggactggacatgccgggccctaaaggagataaaggggctcaaggactccctggcataacgggacagtcggggctccctggccttcctggacagcagggggctcctgggattcctgggtttccaggttccaagggagaaatgggcgtcatggggacccccgggcagccgggctcaccaggaccagtgggtgctcctggattaccgggtgaaaaaggggaccatggctttccgggctcctcaggacccaggggagaccctggcttgaaaggtgataagggggatgtcggtctccctggcaagcctggctccatggataaggtggacatgggcagcatgaagggccagaaaggagaccaaggagagaaaggacaaattggaccaattggtgagaagggatcccgaggagaccctgggaccccaggagtgcctggaaaggacgggcaggcaggacagcctgggcagccaggacctaaaggtgatccaggtataagtggaaccccaggtgctccaggacttccgggaccaaaaggatctgttggtggaatgggcttgccaggaacacctggagagaaaggtgtgcctggcatccctggcccacaaggttcacctggcttacctggagacaaaggtgcaaaaggagagaaagggcaggcaggcccacctggcataggcatcccagggctgcgaggtgaaaagggagatcaagggatagcgggtttcccaggaagccctggagagaagggagaaaaaggaagcattgggatcccaggaatgccagggtccccaggccttaaagggtctcccgggagtgttggctatccaggaagtcctgggctacctggagaaaaaggtgacaaaggcctcccaggattggatggcatccctggtgtcaaaggagaagcaggtcttcctgggactcctggccccacaggcccagctggccagaaaggggagccaggcagtgatggaatcccggggtcagcaggagagaagggtgaaccaggtctaccaggaagaggattcccagggtttccaggggccaaaggagacaaaggttcaaagggtgaggtgggtttcccaggattagccgggagcccaggaattcctggatccaaaggagagcaaggattcatgggtcctccggggccccagggacagccggggttaccgggatccccaggccatgccacggaggggcccaaaggagaccgcggacctcagggccagcctggcctgccaggacttccgggacccatggggcctccagggcttcctgggattgatggagttaaaggtgacaaaggaaatccaggctggccaggagcacccggtgtcccagggcccaagggagaccctggattccagggcatgcctggtattggtggctctccaggaatcacaggctctaagggtgatatggggcctccaggagttccaggatttcaaggtccaaaaggtcttcctggcctccagggaattaaaggtgatcaaggcgatcaaggcgtcccgggagctaaaggtctcccgggtcctcctggccccccaggtccttacgacatcatcaaaggggagcccgggctccctggtcctgagggccccccagggctgaaagggcttcagggactgccaggcccgaaaggccagcaaggtgttacaggattggtgggtatacctggacctccaggtattcctgggtttgacggtgcccctggccagaaaggagagatgggacctgccgggcctactggtccaagaggatttccaggtccaccaggccccgatgggttgccaggatccatggggcccccaggcaccccatctgttgatcacggcttccttgtgaccaggcatagtcaaacaatagatgacccacagtgtccttctgggaccaaaattctttaccacgggtactctttgctctacgtgcaaggcaatgaacgggcccatggccaggacttgggcacggccggcagctgcctgcgcaagttcagcacaatgcccttcctgttctgcaatattaacaacgtgtgcaactttgcatcacgaaatgactactcgtactggctgtccacccctgagcccatgcccatgtcaatggcacccatcacgggggtgatggccgtgcacagccagaccattcagatcccaccgtgccccagcgggtggtcctcgctgtggatcggctactcttttgtgatgcacaccagcgctggtgcagaaggctctggccaagccctggcgtcccccggctcctgcctggaggagtttagaagtgcgccattcatcgagtgtcacggccgtgggacctgcaattactacgcaaacgcttacagcttttggctcgccaccatagagaggagcgagatgttcaagaagcctacgccgtccaccttgaaggcaggggagctgcgcacgcacgtcagccgctgccaagtctgtatgagaagaacataatgaagcctgactcagctaatgtcacaacatggtgctacttcttcttctttttgttaacagcaacgaaccctagaaatatatcctgtgtacctcactgtccaatatgaaaaccgtaaagtgccttataggaatttgcgtaactaacacaccctgcttcattgacctctacttgctgaaggagaaaaagacagcgataagctttcaatagtggcataccaaatggcacttttgatgaaataaaatatcaatattttctgcaatccaatgcactgatgtgtgaagtgagaactccatcagaaaaccaaagggtgctaggaggtgtgggtgccttccatactgtttgcccattttcattcttgtattataattaattttctacccccagagataaatgtttgtttatatcactgtctagctgtttcaaaatttaggtcccttggtctgtacaaataatagcaatgtaaaaatggttttttgaacctccaaatggaattacagactcagtagccatatcttccaaccccccagtataaatttctgtctttctgctatgtgtggtactttgcagctgcttttgcagaaatcacaattttcctgtggaataaagatggtccaaaaatagtcaaaaattaaatatatatatatattagtaatttatatagatgtcagcaattaggcagatcaaggtttagtttaacttccactgttaaaataaagcttacatagttttcttcctttgaaagactgtgctgtcctttaacataggtttttaaagactaggatattgaatgtgaaacatccgttttcattgttcacttctaaaccaaaaattatgtgttgccaaaaccaaacccaggttcatgaatatggtgtctattatagtgaaacatgtactttgagcttattgtttttattctgtattaaatattttcagggttttaaacactaatcacaaactgaatgacttgacttcaaaagcaacaaccttaaaggccgtcatttcattagtattcctcattctgcatcctggcttgaaaaacagctctgttgaatcacagtatcagtattttcacacgtaagcacattcgggccatttccgtggtttctcatgagctgtgttcacagacctcagcagggcatcgcatggaccgcaggagggcagattcggaccactaggcctgaaatgacatttcactaaaagtctccaaaacatttctaagactactaaggccttttatgtaatttctttaaatgtgtatttcttaagaattcaaatttgtaataaaactatttgtataaaaattaagcttttattaatttgttgctagtattgccacagacgcattaaaagaaacttactgcacaagctgctaataaatttgtaagctttgcatacctta

SEQ ID NO: 359221 - DNA, 2521 bp, Homo sapiens
gctttttaaatgaccccaggcgtggggatatggggcctccaggagttccaggatttcaaggtccaaaaggtcttcctggcctccagggaattaaaggtgatcaaggcgatcaaggcgtcccgggagctaaaggtctcccgggtcctcctggccccccaggtccttacgacatcatcaaaggggagcccgggctccctggtcctgagggccccccagggctgaaagggcttcagggactgccaggcccgaaaggccagcaaggtgttacaggattggtgggtatacctggacctccaggtattcctgggtttgacggtgcccctggccagaaaggagagatgggacctgccgggcctactggtccaagaggatttccaggtccaccaggccccgatgggttgccaggatccatggggcccccaggcaccccatctgttgatcacggcttccttgtgaccaggcatagtcaaacaatagatgacccacagtgtccttctgggaccaaaattctttaccacgggtactctttgctctacgtgcaaggcaatgaacgggcccatggccaggacttgggcacggccggcagctgcctgcgcaagttcagcacaatgcccttcctgttctgcaatattaacaacgtgtgcaactttgcatcacgaaatgactactcgtactggctgtccacccctgagcccatgcccatgtcaatggcacccatcacgggggaaaacataagaccatttattagtaggtgtgctgtgtgtgaggcgcctgccatggtgatggccgtgcacagccagaccattcagatcccaccgtgccccagcgggtggtcctcgctgtggatcggctactcttttgtgatgcacaccagcgctggtgcagaaggctctggccaagccctggcgtcccccggctcctgcctggaggagtttagaagtgcgccattcatcgagtgtcacggccgtgggacctgcaattactacgcaaacgcttacagcttttggctcgccaccatagagaggagcgagatgttcaagaagcctacgccgtccaccttgaaggcaggggagctgcgcacgcacgtcagccgctgccaagtctgtatgagaagaacataatgaagcctgactcagctaatgtcacaacatggtgctacttcttcttctttttgttaacagcaacgaaccctagaaatatatcctgtgtacctcactgtccaatatgaaaaccgtaaagtgccttataggaatttgcgtaactaacacaccctgcttcattgacctctacttgctgaaggagaaaaagacagcgataagctttcaatagtggcataccaaatggcacttttgatgaaataaaatatcaatattttctgcaatccaatgcactgatgtgtgaagtgagaactccatcagaaaaccaaagggtgctaggaggtgtgggtgccttccatactgtttgcccattttcattcttgtattataattaattttctacccccagagataaatgtttgtttatatcactgtctagctgtttcaaaatttaggtcccttggtctgtacaaataatagcaatgtaaaaatggttttttgaacctccaaatggaattacagactcagtagccatatcttccaaccccccagtataaatttctgtctttctgctatgtgtggtactttgcagctgcttttgcagaaatcacaattttcctgtggaataaagatggtccaaaaatagtcaaaaattaaatatatatatatattagtaatttatatagatgtcagcaattaggcagatcaaggtttagtttaacttccactgttaaaataaagcttacatagttttcttcctttgaaagactgtgctgtcctttaacataggtttttaaagactaggatattgaatgtgaaacatccgttttcattgttcacttctaaaccaaaaattatgtgttgccaaaaccaaacccaggttcatgaatatggtgtctattatagtgaaacatgtactttgagcttattgtttttattctgtattaaatattttcagggttttaaacactaatcacaaactgaatgacttgacttcaaaagcaacaaccttaaaggccgtcatttcattagtattcctcattctgcatcctggcttgaaaaacagctctgttgaatcacagtatcagtattttcacacgtaagcacattcgggccatttccgtggtttctcatgagctgtgttcacagacctcagcagggcatcgcatggaccgcaggagggcagattcggaccactaggcctgaaatgacatttcactaaaagtctccaaaacatttctaagactactaaggccttttatgtaatttctttaaatgtgtatttcttaagaattcaaatttgtaataaaactatttgtataaaaattaagcttttattaatttgttgctagtattgccacagacgcattaaaagaaacttactgcacaagctgctaataaatttgtaagctttgcatacctta

SEQ ID NO: 359222 - DNA, 6461 bp, Homo sapiens
gcttggagccgccgcacccgggacggtgcgtagcgctggaagtccggccttccgagagctagctgtccgccgcggcccccgcacgccgggcagccgtccctcgccgcctcgggcgcgccaccatggggccccggctcagcgtctggctgctgctgctgcccgccgcccttctgctccacgaggagcacagccgggccgctgcgaagggtggctgtgctggctctggctgtggcaaatgtgactgccatggagtgaagggacaaaagggtgaaagaggcctcccggggttacaaggtgtcattgggtttcctggaatgcaaggacctgaggggccacagggaccaccaggacaaaagggtgatactggagaaccaggactacctggaacaaaagggacaagaggacctccgggagcatctggctaccctggaaacccaggacttcccggaattcctggccaagacggcccgccaggccccccaggtattccaggatgcaatggcacaaagggggagagagggccgctcgggcctcctggcttgcctggtttcgcaggaaatcccggaccaccaggcttaccagggatgaagggtgatccaggtgagatacttggccatgtgcccgggatgctgttgaaaggtgaaagaggatttcccggaatcccagggactccaggcccaccaggactgccagggcttcaaggtcctgttgggcctccaggatttaccggaccaccaggtcccccaggccctcccggccctccaggtgaaaagggacaaatgggcttaagttttcaaggaccaaaaggtgacaagggtgaccaaggggtcagtgggcctccaggagtaccaggacaagctcaagttcaagaaaaaggagacttcgccaccaagggagaaaagggccaaaaaggtgaacctggatttcaggggatgccaggggtcggagagaaaggtgaacccggaaaaccaggacccagaggcaaacccggaaaagatggtgacaaaggggaaaaagggagtcccggttttcctggtgaacccgggtacccaggactcataggccgccagggcccgcagggagaaaagggtgaagcaggtcctcctggcccacctggaattgttataggcacaggacctttgggagaaaaaggagagaggggctaccctggaactccggggccaagaggagagccaggcccaaaaggtttcccaggactaccaggccaacccggacctccaggcctccctgtacctgggcaggctggtgcccctggcttccctggtgaaagaggagaaaaaggtgaccgaggatttcctggtacatctctgccaggaccaagtggaagagatgggctcccgggtcctcctggttcccctgggccccctgggcagcctggctacacaaatggaattgtggaatgtcagcccggacctccaggtgaccagggtcctcctggaattccagggcagccaggatttataggcgaaattggagagaaaggtcaaaaaggagagagttgcctcatctgtgatatagacggatatcgggggcctcccgggccacagggacccccgggagaaataggtttcccagggcagccaggggccaagggcgacagaggtttgcctggcagagatggtgttgcaggagtgccaggccctcaaggtacaccagggctgataggccagccaggagccaagggggagcctggtgagttttatttcgacttgcggctcaaaggtgacaaaggagacccaggctttccaggacagcccggcatgccagggagagcgggttctcctggaagagatggccatccgggtcttcctggccccaagggctcgccgggttctgtaggattgaaaggagagcgtggcccccctggaggagttggattcccaggcagtcgtggtgacaccggcccccctgggcctccaggatatggtcctgctggtcccattggtgacaaaggacaagcaggctttcctggaggccctggatccccaggcctgccaggtccaaagggtgaaccaggaaaaattgttcctttaccaggcccccctggagcagaaggactgccggggtccccaggcttcccaggtccccaaggagaccgaggctttcccggaaccccaggaaggccaggcctgccaggagagaagggcgctgtgggccagccaggcattggatttccagggccccccggccccaaaggtgttgacggcttacctggagacatggggccaccggggactccaggtcgcccgggatttaatggcttacctgggaacccaggtgtgcagggccagaagggagagcctggagttggtctaccgggactcaaaggtttgccaggtcttcccggcattcctggcacacccggggagaaggggagcattggggtaccaggcgttcctggagaacatggagcgatcggaccccctgggcttcaggggatcagaggtgaaccgggacctcctggattgccaggctccgtggggtctccaggagttccaggaataggcccccctggagctaggggtccccctggaggacagggaccaccggggttgtcaggccctcctggaataaaaggagagaagggtttccccggattccctggactggacatgccgggccctaaaggagataaaggggctcaaggactccctggcataacgggacagtcggggctccctggccttcctggacagcagggggctcctgggattcctgggtttccaggttccaagggagaaatgggcgtcatggggacccccgggcagccgggctcaccaggaccagtgggtgctcctggattaccgggtgaaaaaggggaccatggctttccgggctcctcaggacccaggggagaccctggcttgaaaggtgataagggggatgtcggtctccctggcaagcctggctccatggataaggtggacatgggcagcatgaagggccagaaaggagaccaaggagagaaaggacaaattggaccaattggtgagaagggatcccgaggagaccctgggaccccaggagtgcctggaaaggacgggcaggcaggacagcctgggcagccaggacctaaaggtgatccaggtataagtggaaccccaggtgctccaggacttccgggaccaaaaggatctgttggtggaatgggcttgccaggaacacctggagagaaaggtgtgcctggcatccctggcccacaaggttcacctggcttacctggagacaaaggtgcaaaaggagagaaagggcaggcaggcccacctggcataggcatcccagggctgcgaggtgaaaagggagatcaagggatagcgggtttcccaggaagccctggagagaagggagaaaaaggaagcattgggatcccaggaatgccagggtccccaggccttaaagggtctcccgggagtgttggctatccaggaagtcctgggctacctggagaaaaaggtgacaaaggcctcccaggattggatggcatccctggtgtcaaaggagaagcaggtcttcctgggactcctggccccacaggcccagctggccagaaaggggagccaggcagtgatggaatcccggggtcagcaggagagaagggtgaaccaggtctaccaggaagaggattcccagggtttccaggggccaaaggagacaaaggttcaaagggtgaggtgggtttcccaggattagccgggagcccaggaattcctggatccaaaggagagcaaggattcatgggtcctccggggccccagggacagccggggttaccgggatccccaggccatgccacggaggggcccaaaggagaccgcggacctcagggccagcctggcctgccaggacttccgggacccatggggcctccagggcttcctgggattgatggagttaaaggtgacaaaggaaatccaggctggccaggagcacccggtgtcccagggcccaagggagaccctggattccagggcatgcctggtattggtggctctccaggaatcacaggctctaagggtgatatggggcctccaggagttccaggatttcaaggtccaaaaggtcttcctggcctccagggaattaaaggtgatcaaggcgatcaaggcgtcccgggagctaaaggtctcccgggtcctcctggccccccaggtccttacgacatcatcaaaggggagcccgggctccctggtcctgagggccccccagggctgaaagggcttcagggactgccaggcccgaaaggccagcaaggtgttacaggattggtgggtatacctggacctccaggtattcctgggtttgacggtgcccctggccagaaaggagagatgggacctgccgggcctactggtccaagaggatttccaggtccaccaggccccgatgggttgccaggatccatggggcccccaggcaccccatctgttgatcacggcttccttgtgaccaggcatagtcaaacaatagatgacccacagtgtccttctgggaccaaaattctttaccacgggtactctttgctctacgtgcaaggcaatgaacgggcccatggccaggacttgggcacggccggcagctgcctgcgcaagttcagcacaatgcccttcctgttctgcaatattaacaacgtgtgcaactttgcatcacgaaatgactactcgtactggctgtccacccctgagcccatgcccatgtcaatggcacccatcacgggggaaaacataagaccatttattagtaggtgtgctgtgtgtgaggcgcctgccatggtgatggccgtgcacagccagaccattcagatcccaccgtgccccagcgggtggtcctcgctgtggatcggctactcttttgtgatgaagtgcgccattcatcgagtgtcacggccgtgggacctgcaattactacgcaaacgcttacagcttttggctcgccaccatagagaggagcgagatgttcaagaagcctacgccgtccaccttgaaggcaggggagctgcgcacgcacgtcagccgctgccaagtctgtatgagaagaacataatgaagcctgactcagctaatgtcacaacatggtgctacttcttcttctttttgttaacagcaacgaaccctagaaatatatcctgtgtacctcactgtccaatatgaaaaccgtaaagtgccttataggaatttgcgtaactaacacaccctgcttcattgacctctacttgctgaaggagaaaaagacagcgataagctttcaatagtggcataccaaatggcacttttgatgaaataaaatatcaatattttctgcaatccaatgcactgatgtgtgaagtgagaactccatcagaaaaccaaagggtgctaggaggtgtgggtgccttccatactgtttgcccattttcattcttgtattataattaattttctacccccagagataaatgtttgtttatatcactgtctagctgtttcaaaatttaggtcccttggtctgtacaaataatagcaatgtaaaaatggttttttgaacctccaaatggaattacagactcagtagccatatcttccaaccccccagtataaatttctgtctttctgctatgtgtggtactttgcagctgcttttgcagaaatcacaattttcctgtggaataaagatggtccaaaaatagtcaaaaattaaatatatatatatattagtaatttatatagatgtcagcaattaggcagatcaaggtttagtttaacttccactgttaaaataaagcttacatagttttcttcctttgaaagactgtgctgtcctttaacataggtttttaaagactaggatattgaatgtgaaacatccgttttcattgttcacttctaaaccaaaaattatgtgttgccaaaaccaaacccaggttcatgaatatggtgtctattatagtgaaacatgtactttgagcttattgtttttattctgtattaaatattttcagggttttaaacactaatcacaaactgaatgacttgacttcaaaagcaacaaccttaaaggccgtcatttcattagtattcctcattctgcatcctggcttgaaaaacagctctgttgaatcacagtatcagtattttcacacgtaagcacattcgggccatttccgtggtttctcatgagctgtgttcacagacctcagcagggcatcgcatggaccgcaggagggcagattcggaccactaggcctgaaatgacatttcactaaaagtctccaaaacatttctaagactactaaggccttttatgtaatttctttaaatgtgtatttcttaagaattcaaatttgtaataaaactatttgtataaaaattaagcttttattaatttgttgctagtattgccacagacgcattaaaagaaacttactgcacaagctgctaataaatttgtaagctttgcatacctta

SEQ ID NO: 359223 - DNA, 2817 bp, Homo sapiens
gcttggagccgccgcacccgggacggtgcgtagcgctggaagtccggccttccgagagctagctgtccgccgcggcccccgcacgccgggcagccgtccctcgccgcctcgggcgcgccaccatggggccccggctcagcgtctggctgctgctgctgcccgccgcccttctgctccacgaggagcacagccgggccgctgcgaagggtggctgtgctggctctggctgtggcaaatgtgactgccatggagtgaagggacaaaagggtgaaagaggcctcccggggttacaaggtgtcattgggtttcctggaatgcaaggacctgaggggccacagggaccaccaggacaaaagggtgatactggagaaccaggactacctggaacaaaagggacaagaggacctccgggagcatctggctaccctggaaacccaggacttcccggaattcctggccaagacggcccgccaggccccccaggtattccaggatgcaatggcacaaagggggagagagggccgctcgggcctcctggcttgcctggtttcgcaggaaatcccggaccaccaggcttaccagggatgaagggtgatccaggtgagatacttggccatgtgcccgggatgctgttgaaaggtgaaagaggatttcccggaatcccagggactccaggcccaccaggactgccagggcttcaaggtcctgttgggcctccaggatttaccggaccaccaggtcccccaggccctcccggccctccaggtgaaaagatgacccacagtgtccttctgggaccaaaattctttaccacgggtactctttgctctacgtgcaaggcaatgaacgggcccatggccaggacttgggcacggccggcagctgcctgcgcaagttcagcacaatgcccttcctgttctgcaatattaacaacgtgtgcaactttgcatcacgaaatgactactcgtactggctgtccacccctgagcccatgcccatgtcaatggcacccatcacgggggaaaacataagaccatttattagtaggtgtgctgtgtgtgaggcgcctgccatggtgatggccgtgcacagccagaccattcagatcccaccgtgccccagcgggtggtcctcgctgtggatcggctactcttttgtgatgcacaccagcgctggtgcagaaggctctggccaagccctggcgtcccccggctcctgcctggaggagtttagaagtgcgccattcatcgagtgtcacggccgtgggacctgcaattactacgcaaacgcttacagcttttggctcgccaccatagagaggagcgagatgttcaagaagcctacgccgtccaccttgaaggcaggggagctgcgcacgcacgtcagccgctgccaagtctgtatgagaagaacataatgaagcctgactcagctaatgtcacaacatggtgctacttcttcttctttttgttaacagcaacgaaccctagaaatatatcctgtgtacctcactgtccaatatgaaaaccgtaaagtgccttataggaatttgcgtaactaacacaccctgcttcattgacctctacttgctgaaggagaaaaagacagcgataagctttcaatagtggcataccaaatggcacttttgatgaaataaaatatcaatattttctgcaatccaatgcactgatgtgtgaagtgagaactccatcagaaaaccaaagggtgctaggaggtgtgggtgccttccatactgtttgcccattttcattcttgtattataattaattttctacccccagagataaatgtttgtttatatcactgtctagctgtttcaaaatttaggtcccttggtctgtacaaataatagcaatgtaaaaatggttttttgaacctccaaatggaattacagactcagtagccatatcttccaaccccccagtataaatttctgtctttctgctatgtgtggtactttgcagctgcttttgcagaaatcacaattttcctgtggaataaagatggtccaaaaatagtcaaaaattaaatatatatatatattagtaatttatatagatgtcagcaattaggcagatcaaggtttagtttaacttccactgttaaaataaagcttacatagttttcttcctttgaaagactgtgctgtcctttaacataggtttttaaagactaggatattgaatgtgaaacatccgttttcattgttcacttctaaaccaaaaattatgtgttgccaaaaccaaacccaggttcatgaatatggtgtctattatagtgaaacatgtactttgagcttattgtttttattctgtattaaatattttcagggttttaaacactaatcacaaactgaatgacttgacttcaaaagcaacaaccttaaaggccgtcatttcattagtattcctcattctgcatcctggcttgaaaaacagctctgttgaatcacagtatcagtattttcacacgtaagcacattcgggccatttccgtggtttctcatgagctgtgttcacagacctcagcagggcatcgcatggaccgcaggagggcagattcggaccactaggcctgaaatgacatttcactaaaagtctccaaaacatttctaagactactaaggccttttatgtaatttctttaaatgtgtatttcttaagaattcaaatttgtaataaaactatttgtataaaaattaagcttttattaatttgttgctagtattgccacagacgcattaaaagaaacttactgcacaagctgctaataaatttgtaagctttgcatacctta

SEQ ID NO: 359224 - DNA, 6115 bp, Homo sapiens
gcttggagccgccgcacccgggacggtgcgtagcgctggaagtccggccttccgagagctagctgtccgccgcggcccccgcacgccgggcagccgtccctcgccgcctcgggcgcgccaccatggggccccggctcagcgtctggctgctgctgctgcccgccgcccttctgctccacgaggagcacagccgggccgctgcgaagggtggctgtgctggctctggctgtggcaaatgtgactgccatggagtgaagggacaaaagggtgaaagaggcctcccggggttacaaggtgtcattgggtttcctggaatgcaaggacctgaggggccacagggaccaccaggacaaaagggtgatactggagaaccaggactacctggaacaaaagggacaagaggacctccgggagcatctggctaccctggaaacccaggacttcccggaattcctggccaagacggcccgccaggccccccaggtattccaggatgcaatggcacaaagggggagagagggccgctcgggcctcctggcttgcctggtttcgcaggaaatcccggaccaccaggcttaccagggatgaagggtgatccaggtgagatacttggccatgtgcccgggatgctgttgaaaggtgaaagaggatttcccggaatcccagggactccaggcccaccaggactgccagggcttcaaggtcctgttgggcctccaggatttaccggaccaccaggtcccccaggccctcccggccctccaggtgaaaagggacaaatgggcttaagttttcaaggaccaaaaggtgacaagggtgaccaaggggtcagtgggcctccaggagtaccaggacaagctcaagttcaagaaaaaggagacttcgccaccaagggagaaaagggccaaaaaggtgaacctggatttcaggggatgccaggggtcggagagaaaggtgaacccggaaaaccaggacccagaggcaaacccggaaaagatggtgacaaaggggaaaaagggagtcccggttttcctggtgaacccgggtacccaggactcataggccgccagggcccgcagggagaaaagggtgaagcaggtcctcctggcccacctggaattgttataggcacaggacctttgggagaaaaaggagagaggggctaccctggaactccggggccaagaggagagccaggcccaaaaggtttcccaggactaccaggccaacccggacctccaggcctccctgtacctgggcaggctggtgcccctggcttccctggtgaaagaggagaaaaaggtgaccgaggatttcctggtacatctctgccaggaccaagtggaagagatgggctcccgggtcctcctggttcccctgggccccctgggcagcctggctacacaaatggaattgtggaatgtcagcccggacctccaggtgaccagggtcctcctggaattccagggcagccaggatttataggcgaaattggagagaaaggtcaaaaaggagagagttgcctcatctgtgatatagacggatatcgggggcctcccgggccacagggacccccgggagaaataggtttcccagggcagccaggggccaagggcgacagaggtttgcctggcagagatggtgttgcaggagtgccaggccctcaaggtacaccagggctgataggccagccaggagccaagggggagcctggtgagttttatttcgacttgcggctcaaaggtgacaaaggagacccaggctttccaggacagcccggcatgccagggagagcgggttctcctggaagagatggccatccgggtcttcctggccccaagggctcgccgggttctgtaggattgaaaggagagcgtggcccccctggaggagttggattcccaggcagtcgtggtgacaccggcccccctgggcctccaggatatggtcctgctggtcccattggtgacaaaggacaagcaggctttcctggaggccctggatccccaggcctgccaggtccaaagggtgaaccaggaaaaattgttcctttaccaggcccccctggagcagaaggactgccggggtccccaggcttcccaggtccccaaggagaccgaggctttcccggaaccccaggaaggccaggcctgccaggagagaagggcgctgtgggccagccaggcattggatttccagggccccccggccccaaaggtgttgacggcttacctggagacatggggccaccggggactccaggtcgcccgggatttaatggcttacctgggaacccaggtgtgcagggccagaagggagagcctggagttggtctaccgggactcaaaggtttgccaggtcttcccggcattcctggcacacccggggagaaggggagcattggggtaccaggcgttcctggagaacatggagcgatcggaccccctgggcttcaggggatcagaggtgaaccgggacctcctggattgccaggctccgtggggtctccaggagttccaggaataggcccccctggagctaggggtccccctggaggacagggaccaccggggttgtcaggccctcctggaataaaaggagagaagggtttccccggattccctggactggacatgccgggccctaaaggagataaaggggctcaaggactccctggcataacgggacagtcggggctccctggccttcctggacagcagggggctcctgggattcctgggtttccaggttccaagggagaaatgggcgtcatggggacccccgggcagccgggctcaccaggaccagtgggtgctcctggattaccgggtgaaaaaggggaccatggctttccgggctcctcaggacccaggggagaccctggcttgaaaggtgataagggggatgtcggtctccctggcaagcctggctccatggataaggtggacatgggcagcatgaagggccagaaaggagaccaaggagagaaaggacaaattggaccaattggtgagaagggatcccgaggagaccctgggaccccaggagtgcctggaaaggacgggcaggcaggacagcctgggcagccaggacctaaaggtgatccaggtataagtggaaccccaggtgctccaggacttccgggaccaaaaggatctgttggtggaatgggcttgccaggaacacctggagagaaaggtgtgcctggcatccctggcccacaaggttcacctggcttacctggagacaaaggtgcaaaaggagagaaagggcaggcaggcccacctggcataggcatcccagggctgcgaggtgaaaagggagatcaagggatagcgggtttcccaggaagccctggagagaagggagaaaaaggaagcattgggatcccaggaatgccagggtccccaggccttaaagggtctcccgggagtgttggctatccaggaagtcctgggctacctggagaaaaaggtgacaaaggcctcccaggattggatggcatccctggtgtcaaaggagaagcaggtcttcctgggactcctggccccacaggcccagctggccagaaaggggagccaggcagtgatggaatcccggggtcagcaggagagaagggtgaaccaggtctaccaggaagaggattcccagggtttccaggggccaaaggagacaaaggttcaaagggtgaggtgggtttcccaggattagccgggagcccaggaattcctggatccaaaggagagcaaggattcatgggtcctccggggccccagggacagccggggttaccgggatccccaggccatgccacggaggggcccaaaggagaccgcggacctcagggccagcctggcctgccaggacttccgggacccatggggcctccagggcttcctgggattgatggagttaaaggtgacaaaggaaatccaggctggccaggagcacccggtgtcccagggcccaagggagaccctggattccagggcatgcctggtattggtggctctccaggaatcacaggctctaagggtgatatggggcctccaggagttccaggatttcaaggtccaaaaggtcttcctggcctccagggaattaaaggtgatcaaggcgatcaaggcgtcccgggagctaaaggtctcccgggtcctcctggccccccaggtccttacgacatcatcaaaggggagcccgggctccctggtcctgagggccccccagggctgaaagggcttcagggactgccaggcccgaaaggccagcaaggtgttacaggattggtgggtatacctggacctccaggtattcctgggtttgacggtgcccctggccagaaaggagagatgggacctgccgggcctactggtccaagaggatttccaggtccaccaggccccgatgggttgccaggatccatggggcccccaggcaccccatctgttgatcacggcttccttgtgaccaggcatagtcaaacaatagatgacccacagtgtccttctgggaccaaaattctttaccacgggtactctttgctctacgtgcaaggcaatgaacgggcccatggccaggacttgggcacggccggcagctgcctgcgcaagttcagcacaatgcccttcctgttctgcaatattaacaacgtgtgcaactttgcatcacgaaatgactactcgtactggctgtccacccctgagcccatgcccatgtcaatggcacccatcacgggggaaaacataagaccatttattagtaggtgtgctgtgtgtgaggcgcctgccatggtgatggccgtgcacagccagaccattcagatcccaccgtgccccagcgggtggtcctcgctgtggatcggctactcttttgtgatgcacaccagcgctggtgcagaaggctctggccaagccctggcgtcccccggctcctgcctggaggagtttagaagtgcgccattcatcgagtgtcacggccgtgggacctgcaattactacgcaaacgcttacagcttttggctcgccaccatagagaggagcgagatgttcaagaagcctacgccgtccaccttgaaggcaggggagctgcgcacgcacgtcagccgctgccaagtctgtatgagaagaacataatgaagcctgactcagctaatgtcacaacatggtgctacttcttcttctttttgttaacagcaacgaaccctagaaatatatcctgtgtacctcactgtccaatatgaaaaccgtaaagtgccttataggaatttgcgtaactaacacaccctgcttcattgacctctacttgctgaaggagaaaaagacagcgataagctttcaatagtggcataccaaatggcacttttgatgaaataaaatatcaatattttctgcaatccaatgcactgatgtgtgaagtgagaactccatcagaaaaccaaagggtgctaggaggtgtgggtgccttccatactgtttgcccattttcattcttgtattataattaattttctacccccagagataaatgtttgtttatatcactgtctagctgtttcaaaatttaggtcccttggtctgtacaaataatagcaatgtaaaaatggttttttgaacctccaaatggaattacagactcagtagccatatcttccaaccccccagtataaatttctgtctttctgctatgtgtggtactttgcagctgcttttgcagaaatcacaattttcctgtggaataaagatggtccaaaaatagtcaaaaattaaatatatatatatattagtaatttatatagatgtcagcaattaggcagatcaaggtttagtttaacttccactgttaaaataaagcttacatagttttcttcctttgaaagactgtgctgtcctttaacataggtttttaaagactaggatattgaatgtgaaacatccgttttcattgttcacttctaaaccaaaaattatgtgttgccaaaaccaaacccaggttcatgaatatggtgtctattatagtcagtcattccgtttgtgattagtgtttaaaatcctgaaaatatttaatacagaataaaaccataagctccaagtacattttcactataataacccatact

SEQ ID NO: 359225 - DNA, 5818 bp, Homo sapiens
gcttggagccgccgcacccgggacggtgcgtagcgctggaagtccggccttccgagagctagctgtccgccgcggcccccgcacgccgggcagccgtccctcgccgcctcgggcgcgccaccatggggccccggctcagcgtctggctgctgctgctgcccgccgcccttctgctccacgaggagcacagccgggccgctgcgaagggtggctgtgctggctctggctgtggcaaatgtgactgccatggagtgaagggacaaaagggtgaaagaggcctcccggggttacaaggtgtcattgggtttcctggaatgcaaggacctgaggggccacagggaccaccaggacaaaagggtgatactggagaaccaggactacctggaacaaaagggacaagaggacctccgggagcatctggctaccctggaaacccaggacttcccggaattcctggccaagacggcccgccaggccccccaggtattccaggatgcaatggcacaaagggggagagagggccgctcgggcctcctggcttgcctggtttcgcaggaaatcccggaccaccaggcttaccagggatgaagggtgatccaggtgagatacttggccatgtgcccgggatgctgttgaaaggtgaaagaggatttcccggaatcccagggactccaggcccaccaggactgccagggcttcaaggtcctgttgggcctccaggatttaccggaccaccaggtcccccaggccctcccggccctccaggtgaaaagggacaaatgggcttaagttttcaaggaccaaaaggtgacaagggtgaccaaggggtcagtgggcctccaggagtaccaggacaagctcaagttcaagaaaaaggagacttcgccaccaagggagaaaagggccaaaaaggtgaacctggatttcaggggatgccaggggtcggagagaaaggtgaacccggaaaaccaggacccagaggcaaacccggaaaagatggtgacaaaggggaaaaagggagtcccggttttcctggtgaacccgggtacccaggactcataggccgccagggcccgcagggagaaaagggtgaagcaggtcctcctggcccacctggaattgttataggcacaggacctttgggagaaaaaggagagaggggctaccctggaactccggggccaagaggagagccaggcccaaaaggtttcccaggactaccaggccaacccggacctccaggcctccctgtacctgggcaggctggtgcccctggcttccctggtgaaagaggagaaaaaggtgaccgaggatttcctggtacatctctgccaggaccaagtggaagagatgggctcccgggtcctcctggttcccctgggccccctgggcagcctggctacacaaatggaattgtggaatgtcagcccggacctccaggtgaccagggtcctcctggaattccagggcagccaggatttataggcgaaattggagagaaaggtcaaaaaggagagagttgcctcatctgtgatatagacggatatcgggggcctcccgggccacagggacccccgggagaaataggtttcccagggcagccaggggccaagggcgacagaggtttgcctggcagagatggtgttgcaggagtgccaggccctcaaggtacaccagggctgataggccagccaggagccaagggggagcctggtgagttttatttcgacttgcggctcaaaggtgacaaaggagacccaggctttccaggacagcccggcatgccagggagagcgggttctcctggaagagatggccatccgggtcttcctggccccaagggctcgccgggttctgtaggattgaaaggagagcgtggcccccctggaggagttggattcccaggcagtcgtggtgacaccggcccccctgggcctccaggatatggtcctgctggtcccattggtgacaaaggacaagcaggctttcctggaggccctggatccccaggcctgccaggtccaaagggtgaaccaggaaaaattgttcctttaccaggcccccctggagcagaaggactgccggggtccccaggcttcccaggtccccaaggagaccgaggctttcccggaaccccaggaaggccaggcctgccaggagagaagggcgctgtgggccagccaggcattggatttccagggccccccggccccaaaggtgttgacggcttacctggagacatggggccaccggggactccaggtcgcccgggatttaatggcttacctgggaacccaggtgtgcagggccagaagggagagcctggagttggtctaccgggactcaaaggtttgccaggtcttcccggcattcctggcacacccggggagaaggggagcattggggtaccaggcgttcctggagaacatggagcgatcggaccccctgggcttcaggggatcagaggtgaaccgggacctcctggattgccaggctccgtggggtctccaggagttccaggaataggcccccctggagctaggggtccccctggaggacagggaccaccggggttgtcaggccctcctggaataaaaggagagaagggtttccccggattccctggactggacatgccgggccctaaaggagataaaggggctcaaggactccctggcataacgggacagtcggggctccctggccttcctggacagcagggggctcctgggattcctgggtttccaggttccaagggagaaatgggcgtcatggggacccccgggcagccgggctcaccaggaccagtgggtgctcctggattaccgggtgaaaaaggggaccatggctttccgggctcctcaggacccaggggagaccctggcttgaaaggtgataagggggatgtcggtctccctggcaagcctggctccatggataaggtggacatgggcagcatgaagggccagaaaggagaccaaggagagaaaggacaaattggaccaattggtgagaagggatcccgaggagaccctgggaccccaggagtgcctggaaaggacgggcaggcaggacagcctgggcagccaggacctaaaggtgatccaggtataagtggaaccccaggtgctccaggacttccgggaccaaaaggatctgttggtggaatgggcttgccaggaacacctggagagaaaggtgtgcctggcatccctggcccacaaggttcacctggcttacctggagacaaaggtgcaaaaggagagaaagggcaggcaggcccacctggcataggcatcccagggctgcgaggtgaaaagggagatcaagggatagcgggtttcccaggaagccctggagagaagggagaaaaaggaagcattgggatcccaggaatgccagggtccccaggccttaaagggtctcccgggagtgttggctatccaggaagtcctgggctacctggagaaaaaggtgacaaaggcctcccaggattggatggcatccctggtgtcaaaggagaagcaggtcttcctgggactcctggccccacaggcccagctggccagaaaggggagccaggcagtgatggaatcccggggtcagcaggagagaagggtgaaccaggtctaccaggaagaggattcccagggtttccaggggccaaaggagacaaaggttcaaagggtgaggtgggtttcccaggattagccgggagcccaggaattcctggatccaaaggagagcaaggattcatgggtcctccggggccccagggacagccggggttaccgggatccccaggccatgccacggaggggcccaaaggagaccgcggacctcagggccagcctggcctgccaggacttccgggacccatggggcctccagggcttcctgggattgatggagttaaaggtgacaaaggaaatccaggctggccaggagcacccggtgtcccagggcccaagggagaccctggattccagggcatgcctggtattggtggctctccaggaatcacaggctctaagggtgatatggggcctccaggagttccaggatttcaaggtccaaaaggtcttcctggcctccagggaattaaaggtgatcaaggcgatcaaggcgtcccgggagctaaaggtctcccgggtcctcctggccccccaggtccttacgacatcatcaaaggggagcccgggctccctggtcctgagggccccccagggctgaaagggcttcagggactgccaggcccgaaaggccagcaaggtgttacaggattggtgggtatacctggacctccaggtattcctgggtttgacggtgcccctggccagaaaggagagatgggacctgccgggcctactggtccaagaggatttccaggtccaccaggccccgatgggttgccaggatccatggggcccccaggcaccccatctgttgatcacggcttccttgtgaccaggcatagtcaaacaatagatgacccacagtgtccttctgggaccaaaattctttaccacgggtactctttgctctacgtgcaaggcaatgaacgggcccatggccaggacttgggcacggccggcagctgcctgcgcaagttcagcacaatgcccttcctgttctgcaatattaacaacgtgtgcaactttgcatcacgaaatgactactcgtactggctgtccacccctgagcccatgcccatgtcaatggcacccatcacgggggaaaacataagaccatttattagtaggtgtgctgtgtgtgaggcgcctgccatggtgatggccgtgcacagccagaccattcagatcccaccgtgccccagcgggtggtcctcgctgtggatcggctactcttttgtgatgcacaccagcgctggtgcagaaggctctggccaagccctggcgtcccccggctcctgcctggaggagtttagaagtgcgccattcatcgagtgtcacggccgtgggacctgcaattactacgcaaacgcttacagcttttggctcgccaccatagagaggagcgagatgttcaagaagcctacgccgtccaccttgaaggcaggggagctgcgcacgcacgtcagccgctgccaagtctgtatgagaagaacataatgaagcctgactcagctaatgtcacaacatggtgctacttcttcttctttttgttaacagcaacgaaccctagaaatatatcctgtgtacctcactgtccaatatgaaaaccgtaaagtgccttataggaatttgcgtaactaacacaccctgcttcattgacctctacttgctgaaggagaaaaagacagcgataagctttcaatagtggcataccaaatggcacttttgatgaaataaaatatcaatattttctgcaatccaatgcactgatgtgtgaagtgagaactccatcagaaaaccaaagggtgctaggaggtgtgggtgccttccatactgtttgcccattttcattcttgtattataattaattttctacccccagagataaatgtttgtttatatcactagacctcagcagggcatcgcatggaccgcaggagggcagattcggaccactaggcctgaaatgacatttcactaaaagtctccaaaacatttctaagactactaaggccttttatgtaatttctttaaatgtgtatttcttaagaattcaaatttgtaataaaactatttgtataaaaattaagcttttattaatttgttgctagtattgccacagacgcattaaaagaaacttactgcacaagctgctaataaatttgtaagctttgcatacctta

SEQ ID NO: 359226 - DNA, 5391 bp, Homo sapiens
gcttggagccgccgcacccgggacggtgcgtagcgctggaagtccggccttccgagagctagctgtccgccgcggcccccgcacgccgggcagccgtccctcgccgcctcgggcgcgccaccatggggccccggctcagcgtctggctgctgctgctgcccgccgcccttctgctccacgaggagcacagccgggccgctgcgaagggtggctgtgctggctctggctgtggcaaatgtgactgccatggagtgaagggacaaaagggtgaaagaggcctcccggggttacaaggtgtcattgggtttcctggaatgcaaggacctgaggggccacagggaccaccaggacaaaagggtgatactggagaaccaggactacctggaacaaaagggacaagaggacctccgggagcatctggctaccctggaaacccaggacttcccggaattcctggccaagacggcccgccaggccccccaggtattccaggatgcaatggcacaaagggggagagagggccgctcgggcctcctggcttgcctggtttcgcaggaaatcccggaccaccaggcttaccagggatgaagggtgatccaggtgagatacttggccatgtgcccgggatgctgttgaaaggtgaaagaggatttcccggaatcccagggactccaggcccaccaggactgccagggcttcaaggtcctgttgggcctccaggatttaccggaccaccaggtcccccaggccctcccggccctccaggtgaaaagggacaaatgggcttaagttttcaaggaccaaaaggtgacaagggtgaccaaggggtcagtgggcctccaggagtaccaggacaagctcaagttcaagaaaaaggagacttcgccaccaagggagaaaagggccaaaaaggtgaacctggatttcaggggatgccaggggtcggagagaaaggtgaacccggaaaaccaggacccagaggcaaacccggaaaagatggtgacaaaggggaaaaagggagtcccggttttcctggtgaacccgggtacccaggactcataggccgccagggcccgcagggagaaaagggtgaagcaggtcctcctggcccacctggaattgttataggcacaggacctttgggagaaaaaggagagaggggctaccctggaactccggggccaagaggagagccaggcccaaaaggtttcccaggactaccaggccaacccggacctccaggcctccctgtacctgggcaggctggtgcccctggcttccctggtgaaagaggagaaaaaggtgaccgaggatttcctggtacatctctgccaggaccaagtggaagagatgggctcccgggtcctcctggttcccctgggccccctgggcagcctggctacacaaatggaattgtggaatgtcagcccggacctccaggtgaccagggtcctcctggaattccagggcagccaggatttataggcgaaattggagagaaaggtcaaaaaggagagagttgcctcatctgtgatatagacggatatcgggggcctcccgggccacagggacccccgggagaaataggtttcccagggcagccaggggccaagggcgacagaggtttgcctggcagagatggtgttgcaggagtgccaggccctcaaggtacaccagggctgataggccagccaggagccaagggggagcctggtgagttttatttcgacttgcggctcaaaggtgacaaaggagacccaggctttccaggacagcccggcatgccagggagagcgggttctcctggaagagatggccatccgggtcttcctggccccaagggctcgccgggttctgtaggattgaaaggagagcgtggcccccctggaggagttggattcccaggcagtcgtggtgacaccggcccccctgggcctccaggatatggtcctgctggtcccattggtgacaaaggacaagcaggctttcctggaggccctggatccccaggcctgccaggtccaaagggtgaaccaggaaaaattgttcctttaccaggcccccctggagcagaaggactgccggggtccccaggcttcccaggtccccaaggagaccgaggctttcccggaaccccaggaaggccaggcctgccaggagagaagggcgctgtgggccagccaggcattggatttccagggccccccggccccaaaggtgttgacggcttacctggagacatggggccaccggggactccaggtcgcccgggatttaatggcttacctgggaacccaggtgtgcagggccagaagggagagcctggagttggtctaccgggactcaaaggtttgccaggtcttcccggcattcctggcacacccggggagaaggggagcattggggtaccaggcgttcctggagaacatggagcgatcggaccccctgggcttcaggggatcagaggtgaaccgggacctcctggattgccaggctccgtggggtctccaggagttccaggaataggcccccctggagctaggggtccccctggaggacagggaccaccggggttgtcaggccctcctggaataaaaggagagaagggtttccccggattccctggactggacatgccgggccctaaaggagataaaggggctcaaggactccctggcataacgggacagtcggggctccctggccttcctggacagcagggggctcctgggattcctgggtttccaggttccaagggagaaatgggcgtcatggggacccccgggcagccgggctcaccaggaccagtgggtgctcctggattaccgggtgaaaaaggggaccatggctttccgggctcctcaggacccaggggagaccctggcttgaaaggtgataagggggatgtcggtctccctggcaagcctggctccatggataaggtggacatgggcagcatgaagggccagaaaggagaccaaggagagaaaggacaaattggaccaattggtgagaagggatcccgaggagaccctgggaccccaggagtgcctggaaaggacgggcaggcaggacagcctgggcagccaggacctaaaggtgatccaggtataagtggaaccccaggtgctccaggacttccgggaccaaaaggatctgttggtggaatgggcttgccaggaacacctggagagaaaggtgtgcctggcatccctggcccacaaggttcacctggcttacctggagacaaaggtgcaaaaggagagaaagggcaggcaggcccacctggcataggcatcccagggctgcgaggtgaaaagggagatcaagggatagcgggtttcccaggaagccctggagagaagggagaaaaaggaagcattgggatcccaggaatgccagggtccccaggccttaaagggtctcccgggagtgttggctatccaggaagtcctgggctacctggagaaaaaggtgacaaaggcctcccaggattggatggcatccctggtgtcaaaggagaagcaggtcttcctgggactcctggccccacaggcccagctggccagaaaggggagccaggcagtgatggaatcccggggtcagcaggagagaagggtgaaccaggtctaccaggaagaggattcccagggtttccaggggccaaaggagacaaaggttcaaagggtgaggtgggtttcccaggattagccgggagcccaggaattcctggatccaaaggagagcaaggattcatgggtcctccggggccccagggacagccggggttaccgggatccccaggccatgccacggaggggcccaaaggagaccgcggacctcagggccagcctggcctgccaggacttccgggacccatggggcctccagggcttcctgggattgatggagttaaaggtgacaaaggaaatccaggctggccaggagcacccggtgtcccagggcccaagggagaccctggattccagggcatgcctggtattggtggctctccaggaatcacaggctctaagggtgatatggggcctccaggagttccaggatttcaaggtccaaaaggtcttcctggcctccagggaattaaaggtgatcaaggcgatcaaggcgtcccgggagctaaaggtctcccgggtcctcctggccccccaggtccttacgacatcatcaaaggggagcccgggctccctggtcctgagggccccccagggctgaaagggcttcagggactgccaggcccgaaaggccagcaaggtgttacaggattggtgggtatacctggacctccaggtattcctgggtttgacggtgcccctggccagaaaggagagatgggacctgccgggcctactggtccaagaggatttccaggtccaccaggccccgatgggttgccaggatccatggggcccccaggcaccccatctgttgatcacggcttccttgtgaccaggcatagtcaaacaatagatgacccacagtgtccttctgggaccaaaattctttaccacgggtactctttgctctacgtgcaaggcaatgaacgggcccatggccaggacttgggcacggccggcagctgcctgcgcaagttcagcacaatgcccttcctgttctgcaatattaacaacgtgtgcaactttgcatcacgaaatgactactcgtactggctgtccacccctgagcccatgcccatgtcaatggcacccatcacgggggaaaacataagaccatttattagtaggtgtgctgtgtgtgaggcgcctgccatggtgatggccgtgcacagccagaccattcagatcccaccgtgccccagcgggtggtcctcgctgtggatcggctactcttttgtgatgcacaccagcgctggtgcagaaggctctggccaagccctggcgtcccccggctcctgcctggaggagtttagaagtgcgccattcatcgagtgtcacggccgtgggacctgcaattactacgcaaacgcttacagcttttggctcgccaccatagagaggagcgagatgttcaagaagcctacgccgtccaccttgaaggcaggggagctgcgcacgcacgtcagccgctgccaagtctgtatgagaagaacataatgaagcctgactcagctaatgtcacaacatggtgctacttcttcttctttttgttaacagcaacgaaccctagaaatatatcctgtgtacctcactgtccaatatgaaaaccgtaaagtgccttataggaatttgcgtaactaacacaccctgcttcattgacctctacttgctgaaggagaaaaagacagcgataagctttcaatagtggcataccaaatggcacttttgatgaaataaaatatcaatattttctgca

SEQ ID NO: 359227 - DNA, 1117 bp, Homo sapiens
aaaggtgcttagagcgatgtggttgggtgccagactgtaggacgcatattgatcctggtcttatctgtaactctactagcccctgatattgatgtgtgtttgtatcattgtcaatctcgtgacgccacagtgtctgggtccctatgcggttcgtgaccaaaatatctagcatagggtgttcaagtggtcgattagagctccaaatggaattacagactcagtagccatatcttccaaccccccagtataaatttctgtctttctgctatgtgtggtactttgcagctgcttttgcagaaatcacaattttcctgtggaataaagatggtccaaaaatagtcaaaaattaaatatatatatatattagtaatttatatagatgtcagcaattaggcagatcaaggtttagtttaacttccactgttaaaataaagcttacatagttttcttcctttgaaagactgtgctgtcctttaacataggtttttaaagactaggatattgaatgtgaaacatccgttttcattgttcacttctaaaccaaaaattatgtgttgccaaaaccaaacccaggttcatgaatatggtgtctattatagtgaaacatgtactttgagcttattgtttttattctgtattaaatattttcagggttttaaacactaatcacaaactgaatgacttgacttcaaaagcaacaaccttaaaggccgtcatttcattagtattcctcattctgcatcctggcttgaaaaacagctctgttgaatcacagtatcagtattttcacacgtaagcacattcgggccatttccgtggtttctcatgagctgtgttcacagacctcagcagggcatcgcatggaccgcaggagggcagattcggaccactaggcctgaaatgacatttcactaaaagtctccaaaacatttctaagactactaaggccttttatgtaatttctttaaatgtgtatttcttaagaattcaaatttgtaataaaactatttgtataaaaattaagcttttattaatttgttgctagtattgccacagacgcattaaaagaaacttactgcacaagctgctaataaatttgtaagctttgcatacctta

SEQ ID NO: 359228 - DNA, 5573 bp, Homo sapiens
gcttggagccgccgcacccgggacggtgcgtagcgctggaagtccggccttccgagagctagctgtccgccgcggcccccgcacgccgggcagccgtccctcgccgcctcgggcgcgccaccatggggccccggctcagcgtctggctgctgctgctgcccgccgcccttctgctccacgaggagcacagccgggccgctgcgaagggtggctgtgctggctctggctgtggcaaatgtgactgccatggagtgaagggacaaaagggtgaaagaggcctcccggggttacaaggtgtcattgggtttcctggaatgcaaggacctgaggggccacagggaccaccaggacaaaagggtgatactggagaaccaggactacctggaacaaaagggacaagaggacctccgggagcatctggctaccctggaaacccaggacttcccggaattcctggccaagacggcccgccaggccccccaggtattccaggatgcaatggcacaaagggggagagagggccgctcgggcctcctggcttgcctggtttcgcaggaaatcccggaccaccaggcttaccagggatgaagggtgatccaggtgagatacttggccatgtgcccgggatgctgttgaaaggtgaaagaggatttcccggaatcccagggactccaggcccaccaggactgccagggcttcaaggtcctgttgggcctccaggatttaccggaccaccaggtcccccaggccctcccggccctccaggtgaaaagggacaaatgggcttaagttttcaaggaccaaaaggtgacaagggtgaccaaggggtcagtgggcctccaggagtaccaggacaagctcaagttcaagaaaaaggagacttcgccaccaagggagaaaagggccaaaaaggtgaacctggatttcaggggatgccaggggtcggagagaaaggtgaacccggaaaaccaggacccagaggcaaacccggaaaagatggtgacaaaggggaaaaagggagtcccggttttcctggtgaacccgggtacccaggactcataggccgccagggcccgcagggagaaaagggtgaagcaggtcctcctggcccacctggaattgttataggcacaggacctttgggagaaaaaggagagaggggctaccctggaactccggggccaagaggagagccaggcccaaaaggtttcccaggactaccaggccaacccggacctccaggcctccctgtacctgggcaggctggtgcccctggcttccctggtgaaagaggagaaaaaggtgaccgaggatttcctggtacatctctgccaggaccaagtggaagagatgggctcccgggtcctcctggttcccctgggccccctgggcagcctggctacacaaatggaattgtggaatgtcagcccggacctccaggtgaccagggtcctcctggaattccagggcagccaggatttataggcgaaattggagagaaaggtcaaaaaggagagagttgcctcatctgtgatatagacggatatcgggggcctcccgggccacagggacccccgggagaaataggtttcccagggcagccaggggccaagggcgacagaggtttgcctggcagagatggtgttgcaggagtgccaggccctcaaggtacaccagggctgataggccagccaggagccaagggggagcctggtgagttttatttcgacttgcggctcaaaggtgacaaaggagacccaggctttccaggacagcccggcatgccagggagagcgggttctcctggaagagatggccatccgggtcttcctggccccaagggctcgccgggttctgtaggattgaaaggagagcgtggcccccctggaggagttggattcccaggcagtcgtggtgacaccggcccccctgggcctccaggatatggtcctgctggtcccattggtgacaaaggacaagcaggctttcctggaggccctggatccccaggcctgccaggtccaaagggtgaaccaggaaaaattgttcctttaccaggcccccctggagcagaaggactgccggggtccccaggcttcccaggtccccaaggagaccgaggctttcccggaaccccaggaaggccaggcctgccaggagagaagggcgctgtgggccagccaggcattggatttccagggccccccggccccaaaggtgttgacggcttacctggagacatggggccaccggggactccaggtcgcccgggatttaatggcttacctgggaacccaggtgtgcagggccagaagggagagcctggagttggtctaccgggactcaaaggtttgccaggtcttcccggcattcctggcacacccggggagaaggggagcattggggtaccaggcgttcctggagaacatggagcgatcggaccccctgggcttcaggggatcagaggtgaaccgggacctcctggattgccaggctccgtggggtctccaggagttccaggaataggcccccctggagctaggggtccccctggaggacagggaccaccggggttgtcaggccctcctggaataaaaggagagaagggtttccccggattccctggactggacatgccgggccctaaaggagataaaggggctcaaggactccctggcataacgggacagtcggggctccctggccttcctggacagcagggggctcctgggattcctgggtttccaggttccaagggagaaatgggcgtcatggggacccccgggcagccgggctcaccaggaccagtgggtgctcctggattaccgggtgaaaaaggggaccatggctttccgggctcctcaggacccaggggagaccctggcttgaaaggtgataagggggatgtcggtctccctggcaagcctggctccatggataaggtggacatgggcagcatgaagggccagaaaggagaccaaggagagaaaggacaaattggaccaattggtgagaagggatcccgaggagaccctgggaccccaggagtgcctggaaaggacgggcaggcaggacagcctgggcagccaggacctaaaggtgatccaggtataagtggaaccccaggtgctccaggacttccgggaccaaaaggatctgttggtggaatgggcttgccaggaacacctggagagaaaggtgtgcctggcatccctggcccacaaggttcacctggcttacctggagacaaaggtgcaaaaggagagaaagggcaggcaggcccacctggcataggcatcccagggctgcgaggtgaaaagggagatcaagggatagcgggtttcccaggaagccctggagagaagggagaaaaaggaagcattgggatcccaggaatgccagggtccccaggccttaaagggtctcccgggagtgttggctatccaggaagtcctgggctacctggagaaaaaggtgacaaaggcctcccaggattggatggcatccctggtgtcaaaggagaagcaggtcttcctgggactcctggccccacaggcccagctggccagaaaggggagccaggcagtgatggaatcccggggtcagcaggagagaagggtgaaccaggtctaccaggaagaggattcccagggtttccaggggccaaaggagacaaaggttcaaagggtgaggtgggtttcccaggattagccgggagcccaggaattcctggatccaaaggagagcaaggattcatgggtcctccggggccccagggacagccggggttaccgggatccccaggccatgccacggaggggcccaaaggagaccgcggacctcagggccagcctggcctgccaggacttccgggacccatggggcctccagggcttcctgggattgatggagttaaaggtgacaaaggaaatccaggctggccaggagcacccggtgtcccagggcccaagggagaccctggattccagggcatgcctggtattggtggctctccaggaatcacaggctctaagggtgatatggggcctccaggagttccaggatttcaaggtccaaaaggtcttcctggcctccagggaattaaaggtgatcaaggcgatcaaggcgtcccgggagctaaaggtctcccgggtcctcctggccccccaggtccttacgacatcatcaaaggggagcccgggctccctggtcctgagggccccccagggctgaaagggcttcagggactgccaggcccgaaaggccagcaaggtgttacaggattggtgggtatacctggacctccaggtattcctgggtttgacggtgcccctggccagaaaggagagatgggacctgccgggcctactggtccaagaggatttccaggtccaccaggccccgatgggttgccaggatccatggggcccccaggcaccccatctgttgatcacggcttccttgtgaccaggcatagtcaaacaatagatgacccacagtgtccttctgggaccaaaattctttaccacgggtactctttgctctacgtgcaaggcaatgaacgggcccatggccaggacttgggcacggccggcagctgcctgcgcaagttcagcacaatgcccttcctgttctgcaatattaacaacgtgtgcaactttgcatcacgaaatgactactcgtactggctgtccacccctgagcccatgcccatgtcaatggcacccatcacgggggaaaacataagaccatttattagtaggtgtgctgtgtgtgaggcgcctgccatggtgatggccgtgcacagccagaccattcagatcccaccgtgccccagcgggtggtcctcgctgtggatcggctactcttttgtgatgcacaccagcgctggtgcagaaggctctggccaagccctggcgtcccccggctcctgcctggaggagtttagaagtgcgccattcatcgagtgtcacggccgtgggacctgcaattactacgcaaacgcttacagcttttggctcgccaccatagagaggagcgagatgttcaagaagcctacgccgtccaccttgaaggcaggggagctgcgcacgcacgtcagccgctgccaagtctgtatgagaagaacataatgaagcctgactcagctaatgtcacaacatggtgctacttcttcttctttttgttaacagcaacgaaccctagaaatatatcctgtgtacctcactgtccaatatgaaaaccgtaaagtgccttataggaatttgcgtaactaacacactcggctgccattgggccccaatggcagccggcagcatgtacccttggtaaatggctcttatttttaagaatgtctttatatagagccagagtgcataccagtgtgattttgccattgccttccaactccagaaagaaaactaactttgccttctctagtacatgagcaccctggagatactaaaactcttattctgactaaatgtctttcaagagcagcctccagatttttctgcattcttgctaccttgttaacttgcagtgccttacagtttaccatcggctgccattgg

SEQ ID NO: 359229 - DNA, 848 bp, Homo sapiens
  misc_feature (112)..(114): n is a, c, g, or t
  misc_feature (117)..(117): n is a, c, g, or t
  misc_feature (119)..(120): n is a, c, g, or t
tgcaaagcttacaaatttattagcagcttgtgcagtaagtttcttttaatgcgtctgtggcaatactagcaataaattaataaaagcttaatttttatacaaatagttttannncananntgaattcttaagaaatacacatttaaagaaattacataaaaggccttagtagtcttagaaatgtttgaaagactgtgctgtcctttaacataggtttttaaagactaggatattgaatgtgaaacatccgttttcattgttcacttctaaaccaaaaattatgtgttgccaaaaccaaacccaggttcatgaatatggtgtctattatagtgaaacatgtactttgagcttattgtttttattctgtattaaatattttcagggttttaaacactaatcacaaactgaatgacttgacttcaaaagcaacaaccttaaaggccgtcatttcattagtattcctcattctgcatcctggcttgaaaaacagctctgttgaatcacagtatcagtattttcacacgtaagcacattcgggccatttccgtggtttctcatgagctgtgttcacagacctcagcagggcatcgcatggaccgcaggagggcagattcggaccactaggcctgaaatgacatttcactaaaagtctccaaaacatttctaagactactaaggccttttatgtaatttctttaaatgtgtatttcttaagaattcaaatttgtaataaaactatttgtataaaaattaagcttttattaatttgttgctagtattgccacagacgcattaaaagaaacttactgcacaagctgctaataaatttgtaagctttgcatacctta

SEQ ID NO: 359230 - DNA, 933 bp, Homo sapiens
gcttggagccgccgcacccgggacggtgcgtagcgctggaagtccggccttccgagagctagctgtccgccgcggcccccgcacgccgggcagccgtccctcgccgcctcgggcgcgccaccatggggccccggctcagcgtctggctgctgctgctgcccgccgcccttctgctccacgaggagcacagccgggccgctgcgaagggtggctgtgctggctctggctgtggcaaatgtgactgccatggagtgaagggacaaaagggtgaaagaggcctcccggggttacaaggtgtcattgggtttcctggaatgcaaggacctgaggggccacagggaccaccaggacaaaagggtgatactggagaaccaggactacctggaacaaaagggacaagaggacctccgggagcatctggctaccctggaaacccaggacttcccggaattcctggccaagacggcccgccaggccccccaggtattccaggatgcaatggcacaaagggggagagagggccgctcgggcctcctggcttgcctggtttcgcaggaaatcccggaccaccaggcttaccagggatgaagggtgatccaggtgagatacttggccatgtgcccgggatgctgttgaaaggtgaaagaggatttcccggaatcccagggactccaggcccaccaggactgccagggcttcaaggtcctgttgggcctccaggatttaccggaccaccaggtcccccaggccctcccggccctccaggtgaaaagggacaaatgggcttaagttttcaaggaccaaaaggtgacaagggtgacatcgacaaccacgtaccaagccaccgcagctgctgccactctgctgcctgtacagaagaaactgaatctttttcatattctaataaatcaatccgagttttaaaaaaaaaaa

SEQ ID NO: 359231 - DNA, 451 bp, Homo sapiens
gaaaagggtgaagcaggtcctcctggcccacctggaattgtgagtaagagtgctgtccctgggtctgtgagagcgctgggggaggaaggagaggaccctgggtctgtgagagcactggggggaggaaggagaggaccctgggtctgtgagagcgctgggagaggaaggagaggagatgcagggcacacacccacagctgtctctagaattgcatttgttatgtaaagtggttcatgctacttgaaatgattttctaatttgttgtacggagtttcgtgtttattatttttattatattttgataatttctgcacatctttaaatcactgaaaatgaaaaggtttgcacatgaatgagaatattagcaacatatttgactcctttttttttttgaaatggagtcttgctctgttgcccaggctggagtgcagtggtgcgatcttggctcact

SEQ ID NO: 359232 - DNA, 205 bp, Homo sapiens
ccgggtacccaggactcataggccgccagggcccgcaggtaaacgctggcactattgtgagcctttatcttcactttccaattcaacccagaagtctgtttattctttcctagaataaaggactctgtactcaagggaaaaaaatcatttatgcttcttctgggtaaaaacacaatttagtggtttcctttatgttcatgatttt

SEQ ID NO: 359233 - DNA, 365 bp, Homo sapiens
ccacaaggttcacctggcttacctggagacaaaggtgcaaaaggagagaaagggcaggcaggcccacctggcataggcatcccagggctgcgaggtgaaaaggtaaccagcgctctgcgtggaaaggtccccttctcccagctcagtggagatgctgcctgagaaatgctcagcaaatatctcagcacactcaatgagccataacacacagggagtcccataaggcagcacaagtcgcctctccttccccttgtattcactacctctcccccaaggaagaatctagagactggtgagaggctaaggtgggagacagctgtcagtgggataaaacagagaggatggaggacgaagaggaatggcag

SEQ ID NO: 359234 - DNA, 187 bp, Homo sapiens
gagatttccgagcagggcaggagtgccatgtttctgacgtgctgtgagatgatggccaatggtctgtctctgtgtcgtgttttaggaagcctacgccgtccaccttgaaggcaggggagctgcgcacgcacgtcagccgctgccaagtctgtatgagaagaacataatgaagcctgactcagctaat

SEQ ID NO: 359235 - DNA, 6532 bp, Homo sapiens
gcttggagccgccgcacccgggacggtgcgtagcgctggaagtccggccttccgagagctagctgtccgccgcggcccccgcacgccgggcagccgtccctcgccgcctcgggcgcgccaccatggggccccggctcagcgtctggctgctgctgctgcccgccgcccttctgctccacgaggagcacagccgggccgctgcgaagggtggctgtgctggctctggctgtggcaaatgtgactgccatggagtgaagggacaaaagggtgaaagaggcctcccggggttacaaggtgtcattgggtttcctggaatgcaaggacctgaggggccacagggaccaccaggacaaaagggtgatactggagaaccaggactacctggaacaaaagggacaagaggacctccgggagcatctggctaccctggaaacccaggacttcccggaattcctggccaagacggcccgccaggccccccaggtattccaggatgcaatggcacaaagggggagagagggccgctcgggcctcctggcttgcctggtttcgcaggaaatcccggaccaccaggcttaccagggatgaagggtgatccaggtgagatacttggccatgtgcccgggatgctgttgaaaggtgaaagaggatttcccggaatcccagggactccaggcccaccaggactgccagggcttcaaggtcctgttgggcctccaggatttaccggaccaccaggtcccccaggccctcccggccctccaggtgaaaagggacaaatgggcttaagttttcaaggaccaaaaggtgacaagggtgaccaaggggtcagtgggcctccaggagtaccaggacaagctcaagttcaagaaaaaggagacttcgccaccaagggagaaaagggccaaaaaggtgaacctggatttcaggggatgccaggggtcggagagaaaggtgaacccggaaaaccaggacccagaggcaaacccggaaaagatggtgacaaaggggaaaaagggagtcccggttttcctggtgaacccgggtacccaggactcataggccgccagggcccgcagggagaaaagggtgaagcaggtcctcctggcccacctggaattgttataggcacaggacctttgggagaaaaaggagagaggggctaccctggaactccggggccaagaggagagccaggcccaaaaggtttcccaggactaccaggccaacccggacctccaggcctccctgtacctgggcaggctggtgcccctggcttccctggtgaaagaggagaaaaaggtgaccgaggatttcctggtacatctctgccaggaccaagtggaagagatgggctcccgggtcctcctggttcccctgggccccctgggcagcctggctacacaaatggaattgtggaatgtcagcccggacctccaggtgaccagggtcctcctggaattccagggcagccaggatttataggcgaaattggagagaaaggtcaaaaaggagagagttgcctcatctgtgatatagacggatatcgggggcctcccgggccacagggacccccgggagaaataggtttcccagggcagccaggggccaagggcgacagaggtttgcctggcagagatggtgttgcaggagtgccaggccctcaaggtacaccagggctgataggccagccaggagccaagggggagcctggtgagttttatttcgacttgcggctcaaaggtgacaaaggagacccaggctttccaggacagcccggcatgccagggagagcgggttctcctggaagagatggccatccgggtcttcctggccccaagggctcgccgggttctgtaggattgaaaggagagcgtggcccccctggaggagttggattcccaggcagtcgtggtgacaccggcccccctgggcctccaggatatggtcctgctggtcccattggtgacaaaggacaagcaggctttcctggaggccctggatccccaggcctgccaggtccaaagggtgaaccaggaaaaattgttcctttaccaggcccccctggagcagaaggactgccggggtccccaggcttcccaggtccccaaggagaccgaggctttcccggaaccccaggaaggccaggcctgccaggagagaagggcgctgtgggccagccaggcattggatttccagggccccccggccccaaaggtgttgacggcttacctggagacatggggccaccggggactccaggtcgcccgggatttaatggcttacctgggaacccaggtgtgcagggccagaagggagagcctggagttggtctaccgggactcaaaggtttgccaggtcttcccggcattcctggcacacccggggagaaggggagcattggggtaccaggcgttcctggagaacatggagcgatcggaccccctgggcttcaggggatcagaggtgaaccgggacctcctggattgccaggctccgtggggtctccaggagttccaggaataggcccccctggagctaggggtccccctggaggacagggaccaccggggttgtcaggccctcctggaataaaaggagagaagggtttccccggattccctggactggacatgccgggccctaaaggagataaaggggctcaaggactccctggcataacgggacagtcggggctccctggccttcctggacagcagggggctcctgggattcctgggtttccaggttccaagggagaaatgggcgtcatggggacccccgggcagccgggctcaccaggaccagtgggtgctcctggattaccgggtgaaaaaggggaccatggctttccgggctcctcaggacccaggggagaccctggcttgaaaggtgataagggggatgtcggtctccctggcaagcctggctccatggataaggtggacatgggcagcatgaagggccagaaaggagaccaaggagagaaaggacaaattggaccaattggtgagaagggatcccgaggagaccctgggaccccaggagtgcctggaaaggacgggcaggcaggacagcctgggcagccaggacctaaaggtgatccaggtataagtggaaccccaggtgctccaggacttccgggaccaaaaggatctgttggtggaatgggcttgccaggaacacctggagagaaaggtgtgcctggcatccctggcccacaaggttcacctggcttacctggagacaaaggtgcaaaaggagagaaagggcaggcaggcccacctggcataggcatcccagggctgcgaggtgaaaagggagatcaagggatagcgggtttcccaggaagccctggagagaagggagaaaaaggaagcattgggatcccaggaatgccagggtccccaggccttaaagggtctcccgggagtgttggctatccaggaagtcctgggctacctggagaaaaaggtgacaaaggcctcccaggattggatggcatccctggtgtcaaaggagaagcaggtcttcctgggactcctggccccacaggcccagctggccagaaaggggagccaggcagtgatggaatcccggggtcagcaggagagaagggtgaaccaggtctaccaggaagaggattcccagggtttccaggggccaaaggagacaaaggttcaaagggtgaggtgggtttcccaggattagccgggagcccaggaattcctggatccaaaggagagcaaggattcatgggtcctccggggccccagggacagccggggttaccgggatccccaggccatgccacggaggggcccaaaggagaccgcggacctcagggccagcctggcctgccaggacttccgggacccatggggcctccagggcttcctgggattgatggagttaaaggtgacaaaggaaatccaggctggccaggagcacccggtgtcccagggcccaagggagaccctggattccagggcatgcctggtattggtggctctccaggaatcacaggctctaagggtgatatggggcctccaggagttccaggatttcaaggtccaaaaggtcttcctggcctccagggaattaaaggtgatcaaggcgatcaaggcgtcccgggagctaaaggtctcccgggtcctcctggccccccaggtccttacgacatcatcaaaggggagcccgggctccctggtcctgagggccccccagggctgaaagggcttcagggactgccaggcccgaaaggccagcaaggtgttacaggattggtgggtatacctggacctccaggtattcctgggtttgacggtgcccctggccagaaaggagagatgggacctgccgggcctactggtccaagaggatttccaggtccaccaggccccgatgggttgccaggatccatggggcccccaggcaccccatctgttgatcacggcttccttgtgaccaggcatagtcaaacaatagatgacccacagtgtccttctgggaccaaaattctttaccacgggtactctttgctctacgtgcaaggcaatgaacgggcccatggccaggacttgggcacggccggcagctgcctgcgcaagttcagcacaatgcccttcctgttctgcaatattaacaacgtgtgcaactttgcatcacgaaatgactactcgtactggctgtccacccctgagcccatgcccatgtcaatggcacccatcacgggggaaaacataagaccatttattagtaggtgtgctgtgtgtgaggcgcctgccatggtgatggccgtgcacagccagaccattcagatcccaccgtgccccagcgggtggtcctcgctgtggatcggctactcttttgtgatgcacaccagcgctggtgcagaaggctctggccaagccctggcgtcccccggctcctgcctggaggagtttagaagtgcgccattcatcgagtgtcacggccgtgggacctgcaattactacgcaaacgcttacagcttttggctcgccaccatagagaggagcgagatgttcaagaagcctacgccgtccaccttgaaggcaggggagctgcgcacgcacgtcagccgctgccaagtctgtatgagaagaacataatgaagcctgactcagctaatgtcacaacatggtgctacttcttcttctttttgttaacagcaacgaaccctagaaatatatcctgtgtacctcactgtccaatatgaaaaccgtaaagtgccttataggaatttgcgtaactaacacaccctgcttcattgacctctacttgctgaaggagaaaaagacagcgataagctttcaatagtggcataccaaatggcacttttgatgaaataaaatatcaatattttctgcaatccaatgcactgatgtgtgaagtgagaactccatcagaaaaccaaagggtgctaggaggtgtgggtgccttccatactgtttgcccattttcattcttgtattataattaattttctacccccagagataaatgtttgtttatatcactgtctagctgtttcaaaatttaggtcccttggtctgtacaaataatagcaatgtaaaaatggttttttgaacctccaaatggaattacagactcagtagccatatcttccaaccccccagtataaatttctgtctttctgctatgtgtggtactttgcagctgcttttgcagaaatcacaattttcctgtggaataaagatggtccaaaaatagtcaaaaattaaatatatatatatattagtaatttatatagatgtcagcaattaggcagatcaaggtttagtttaacttccactgttaaaataaagcttacatagttttcttcctttgaaagactgtgctgtcctttaacataggtttttaaagactaggatattgaatgtgaaacatccgttttcattgttcacttctaaaccaaaaattatgtgttgccaaaaccaaacccaggttcatgaatatggtgtctattatagtgaaacatgtactttgagcttattgtttttattctgtattaaatattttcagggttttaaacactaatcacaaactgaatgacttgacttcaaaagcaacaaccttaaaggccgtcatttcattagtattcctcattctgcatcctggcttgaaaaacagctctgttgaatcacagtatcagtattttcacacgtaagcacattcgggccatttccgtggtttctcatgagctgtgttcacagacctcagcagggcatcgcatggaccgcaggagggcagattcggaccactaggcctgaaatgacatttcactaaaagtctccaaaacatttctaagactactaaggccttttatgtaatttctttaaatgtgtatttcttaagaattcaaatttgtaataaaactatttgtataaaaattaagcttttattaatttgttgctagtattgccacagacgcattaaaagaaacttactgcacaagctgctaataaatttgtaagctttgcatacctta

SEQ ID NO: 359236 - DNA, 5429 bp, Homo sapiens
  misc_feature (87)..(87): n is a, c, g, or t
catttttttcacgtggattttgcttggatcttgccagagatatatatgcgtctgccaagaagaaaccttttgaaggttggcctttgnaggataggagaaagctggagctgatcgaatcggggccctggaagggatatgttccttctctggaagggcctgtgctcaggaagtcttaagttggtcagtgtggatgtgttagcagcagtgcttggcagagatatatctctgccaggaccaagtggaagagatgggctcccgggtcctcctggttcccctgggccccctgggcagcctggctacacaaatggaattgtggaatgtcagcccggacctccaggtgaccagggtcctcctggaattccagggcagccaggatttataggcgaaattggagagaaaggtcaaaaaggagagagttgcctcatctgtgatatagacggatatcgggggcctcccgggccacagggacccccgggagaaataggtttcccagggcagccaggggccaagggcgacagaggtttgcctggcagagatggtgttgcaggagtgccaggccctcaaggtacaccagggctgataggccagccaggagccaagggggagcctggtgagttttatttcgacttgcggctcaaaggtgacaaaggagacccaggctttccaggacagcccggcatgccagggagagcgggttctcctggaagagatggccatccgggtcttcctggccccaagggctcgccgggttctgtaggattgaaaggagagcgtggcccccctggaggagttggattcccaggcagtcgtggtgacaccggcccccctgggcctccaggatatggtcctgctggtcccattggtgacaaaggacaagcaggctttcctggaggccctggatccccaggcctgccaggtccaaagggtgaaccaggaaaaattgttcctttaccaggcccccctggagcagaaggactgccggggtccccaggcttcccaggtccccaaggagaccgaggctttcccggaaccccaggaaggccaggcctgccaggagagaagggcgctgtgggccagccaggcattggatttccagggccccccggccccaaaggtgttgacggcttacctggagacatggggccaccggggactccaggtcgcccgggatttaatggcttacctgggaacccaggtgtgcagggccagaagggagagcctggagttggtctaccgggactcaaaggtttgccaggtcttcccggcattcctggcacacccggggagaaggggagcattggggtaccaggcgttcctggagaacatggagcgatcggaccccctgggcttcaggggatcagaggtgaaccgggacctcctggattgccaggctccgtggggtctccaggagttccaggaataggcccccctggagctaggggtccccctggaggacagggaccaccggggttgtcaggccctcctggaataaaaggagagaagggtttccccggattccctggactggacatgccgggccctaaaggagataaaggggctcaaggactccctggcataacgggacagtcggggctccctggccttcctggacagcagggggctcctgggattcctgggtttccaggttccaagggagaaatgggcgtcatggggacccccgggcagccgggctcaccaggaccagtgggtgctcctggattaccgggtgaaaaaggggaccatggctttccgggctcctcaggacccaggggagaccctggcttgaaaggtgataagggggatgtcggtctccctggcaagcctggctccatggataaggtggacatgggcagcatgaagggccagaaaggagaccaaggagagaaaggacaaattggaccaattggtgagaagggatcccgaggagaccctgggaccccaggagtgcctggaaaggacgggcaggcaggacagcctgggcagccaggacctaaaggtgatccaggtataagtggaaccccaggtgctccaggacttccgggaccaaaaggatctgttggtggaatgggcttgccaggaacacctggagagaaaggtgtgcctggcatccctggcccacaaggttcacctggcttacctggagacaaaggtgcaaaaggagagaaagggcaggcaggcccacctggcataggcatcccagggctgcgaggtgaaaagggagatcaagggatagcgggtttcccaggaagccctggagagaagggagaaaaaggaagcattgggatcccaggaatgccagggtccccaggccttaaagggtctcccgggagtgttggctatccaggaagtcctgggctacctggagaaaaaggtgacaaaggcctcccaggattggatggcatccctggtgtcaaaggagaagcaggtcttcctgggactcctggccccacaggcccagctggccagaaaggggagccaggcagtgatggaatcccggggtcagcaggagagaagggtgaaccaggtctaccaggaagaggattcccagggtttccaggggccaaaggagacaaaggttcaaagggtgaggtgggtttcccaggattagccgggagcccaggaattcctggatccaaaggagagcaaggattcatgggtcctccggggccccagggacagccggggttaccgggatccccaggccatgccacggaggggcccaaaggagaccgcggacctcagggccagcctggcctgccaggacttccgggacccatggggcctccagggcttcctgggattgatggagttaaaggtgacaaaggaaatccaggctggccaggagcacccggtgtcccagggcccaagggagaccctggattccagggcatgcctggtattggtggctctccaggaatcacaggctctaagggtgatatggggcctccaggagttccaggatttcaaggtccaaaaggtcttcctggcctccagggaattaaaggtgatcaaggcgatcaaggcgtcccgggagctaaaggtctcccgggtcctcctggccccccaggtccttacgacatcatcaaaggggagcccgggctccctggtcctgagggccccccagggctgaaagggcttcagggactgccaggcccgaaaggccagcaaggtgttacaggattggtgggtatacctggacctccaggtattcctgggtttgacggtgcccctggccagaaaggagagatgggacctgccgggcctactggtccaagaggatttccaggtccaccaggccccgatgggttgccaggatccatggggcccccaggcaccccatctgttgatcacggcttccttgtgaccaggcatagtcaaacaatagatgacccacagtgtccttctgggaccaaaattctttaccacgggtactctttgctctacgtgcaaggcaatgaacgggcccatggccaggacttgggcacggccggcagctgcctgcgcaagttcagcacaatgcccttcctgttctgcaatattaacaacgtgtgcaactttgcatcacgaaatgactactcgtactggctgtccacccctgagcccatgcccatgtcaatggcacccatcacgggggaaaacataagaccatttattagtaggtgtgctgtgtgtgaggcgcctgccatggtgatggccgtgcacagccagaccattcagatcccaccgtgccccagcgggtggtcctcgctgtggatcggctactcttttgtgatgcacaccagcgctggtgcagaaggctctggccaagccctggcgtcccccggctcctgcctggaggagtttagaagtgcgccattcatcgagtgtcacggccgtgggacctgcaattactacgcaaacgcttacagcttttggctcgccaccatagagaggagcgagatgttcaagaagcctacgccgtccaccttgaaggcaggggagctgcgcacgcacgtcagccgctgccaagtctgtatgagaagaacataatgaagcctgactcagctaatgtcacaacatggtgctacttcttcttctttttgttaacagcaacgaaccctagaaatatatcctgtgtacctcactgtccaatatgaaaaccgtaaagtgccttataggaatttgcgtaactaacacaccctgcttcattgacctctacttgctgaaggagaaaaagacagcgataagctttcaatagtggcataccaaatggcacttttgatgaaataaaatatcaatattttctgcaatccaatgcactgatgtgtgaagtgagaactccatcagaaaaccaaagggtgctaggaggtgtgggtgccttccatactgtttgcccattttcattcttgtattataattaattttctacccccagagataaatgtttgtttatatcactgtctagctgtttcaaaatttaggtcccttggtctgtacaaataatagcaatgtaaaaatggttttttgaacctccaaatggaattacagactcagtagccatatcttccaaccccccagtataaatttctgtctttctgctatgtgtggtactttgcagctgcttttgcagaaatcacaattttcctgtggaataaagatggtccaaaaatagtcaaaaattaaatatatatatatattagtaatttatatagatgtcagcaattaggcagatcaaggtttagtttaacttccactgttaaaataaagcttacatagttttcttcctttgaaagactgtgctgtcctttaacataggtttttaaagactaggatattgaatgtgaaacatccgttttcattgttcacttctaaaccaaaaattatgtgttgccaaaaccaaacccaggttcatgaatatggtgtctattatagtgaaacatgtactttgagcttattgtttttattctgtattaaatattttcagggttttaaacactaatcacaaactgaatgacttgacttcaaaagcaacaaccttaaaggccgtcatttcattagtattcctcattctgcatcctggcttgaaaaacagctctgttgaatcacagtatcagtattttcacacgtaagcacattcgggccatttccgtggtttctcatgagctgtgttcacagacctcagcagggcatcgcatggaccgcaggagggcagattcggaccactaggcctgaaatgacatttcactaaaagtctccaaaacatttctaagactactaaggccttttatgtaatttctttaaatgtgtatttcttaagaattcaaatttgtaataaaactatttgtataaaaattaagcttttattaatttgttgctagtattgccacagacgcattaaaagaaacttactgcacaagctgctaataaatttgtaagctttgcatacctta

SEQ ID NO: 359237 - DNA, 3418 bp, Homo sapiens
  misc_feature (33)..(33): n is a, c, g, or t
tcgctcctctctatggtggcgaagccaaaaagntgtaaccgtttccgtagtaattgcaggtcccacggcccgtgacactcgatgaatggcgcacttctaaactcccacaaggttcacctggcttacctggagacaaaggtgcaaaaggagagaaagggcaggcaggcccacctggcataggcatcccagggctgcgaggtgaaaagggagatcaagggatagcgggtttcccaggaagccctggagagaagggagaaaaaggaagcattgggatcccaggaatgccagggtccccaggccttaaagggtctcccgggagtgttggctatccaggaagtcctgggctacctggagaaaaaggtgacaaaggcctcccaggattggatggcatccctggtgtcaaaggagaagcaggtcttcctgggactcctggccccacaggcccagctggccagaaaggggagccaggcagtgatggaatcccggggtcagcaggagagaagggtgaaccaggtctaccaggaagaggattcccagggtttccaggggccaaaggagacaaaggttcaaagggtgaggtgggtttcccaggattagccgggagcccaggaattcctggatccaaaggagagcaaggattcatgggtcctccggggccccagggacagccggggttaccgggatccccaggccatgccacggaggggcccaaaggagaccgcggacctcagggccagcctggcctgccaggacttccgggacccatggggcctccagggcttcctgggattgatggagttaaaggtgacaaaggaaatccaggctggccaggagcacccggtgtcccagggcccaagggagaccctggattccagggcatgcctggtattggtggctctccaggaatcacaggctctaagggtgatatggggcctccaggagttccaggatttcaaggtccaaaaggtcttcctggcctccagggaattaaaggtgatcaaggcgatcaaggcgtcccgggagctaaaggtctcccgggtcctcctggccccccaggtccttacgacatcatcaaaggggagcccgggctccctggtcctgagggccccccagggctgaaagggcttcagggactgccaggcccgaaaggccagcaaggtgttacaggattggtgggtatacctggacctccaggtattcctgggtttgacggtgcccctggccagaaaggagagatgggacctgccgggcctactggtccaagaggatttccaggtccaccaggccccgatgggttgccaggatccatggggcccccaggcaccccatctgttgatcacggcttccttgtgaccaggcatagtcaaacaatagatgacccacagtgtccttctgggaccaaaattctttaccacgggtactctttgctctacgtgcaaggcaatgaacgggcccatggccaggacttgggcacggccggcagctgcctgcgcaagttcagcacaatgcccttcctgttctgcaatattaacaacgtgtgcaactttgcatcacgaaatgactactcgtactggctgtccacccctgagcccatgcccatgtcaatggcacccatcacgggggaaaacataagaccatttattagtaggtgtgctgtgtgtgaggcgcctgccatggtgatggccgtgcacagccagaccattcagatcccaccgtgccccagcgggtggtcctcgctgtggatcggctactcttttgtgatgcacaccagcgctggtgcagaaggctctggccaagccctggcgtcccccggctcctgcctggaggagtttagaagtgcgccattcatcgagtgtcacggccgtgggacctgcaattactacgcaaacgcttacagcttttggctcgccaccatagagaggagcgagatgttcaagaagcctacgccgtccaccttgaaggcaggggagctgcgcacgcacgtcagccgctgccaagtctgtatgagaagaacataatgaagcctgactcagctaatgtcacaacatggtgctacttcttcttctttttgttaacagcaacgaaccctagaaatatatcctgtgtacctcactgtccaatatgaaaaccgtaaagtgccttataggaatttgcgtaactaacacaccctgcttcattgacctctacttgctgaaggagaaaaagacagcgataagctttcaatagtggcataccaaatggcacttttgatgaaataaaatatcaatattttctgcaatccaatgcactgatgtgtgaagtgagaactccatcagaaaaccaaagggtgctaggaggtgtgggtgccttccatactgtttgcccattttcattcttgtattataattaattttctacccccagagataaatgtttgtttatatcactgtctagctgtttcaaaatttaggtcccttggtctgtacaaataatagcaatgtaaaaatggttttttgaacctccaaatggaattacagactcagtagccatatcttccaaccccccagtataaatttctgtctttctgctatgtgtggtactttgcagctgcttttgcagaaatcacaattttcctgtggaataaagatggtccaaaaatagtcaaaaattaaatatatatatatattagtaatttatatagatgtcagcaattaggcagatcaaggtttagtttaacttccactgttaaaataaagcttacatagttttcttcctttgaaagactgtgctgtcctttaacataggtttttaaagactaggatattgaatgtgaaacatccgttttcattgttcacttctaaaccaaaaattatgtgttgccaaaaccaaacccaggttcatgaatatggtgtctattatagtgaaacatgtactttgagcttattgtttttattctgtattaaatattttcagggttttaaacactaatcacaaactgaatgacttgacttcaaaagcaacaaccttaaaggccgtcatttcattagtattcctcattctgcatcctggcttgaaaaacagctctgttgaatcacagtatcagtattttcacacgtaagcacattcgggccatttccgtggtttctcatgagctgtgttcacagacctcagcagggcatcgcatggaccgcaggagggcagattcggaccactaggcctgaaatgacatttcactaaaagtctccaaaacatttctaagactactaaggccttttatgtaatttctttaaatgtgtatttcttaagaattcaaatttgtaataaaactatttgtataaaaattaagcttttattaatttgttgctagtattgccacagacgcattaaaagaaacttactgcacaagctgctaataaatttgtaagctttgcatacctta

SEQ ID NO: 359238 - DNA, 1790 bp, Homo sapiens
tgtctctgctccacttccaggtgtgctgtgtgtgaggcgcctgccatggtgatggccgtgcacagccagaccattcagatcccaccgtgccccagcgggtggtcctcgctgtggatcggctactcttttgtgatgcacaccagcgctggtgcagaaggctctggccaagccctggcgtcccccggctcctgcctggaggagtttagaagtgcgccattcatcgagtgtcacggccgtgggacctgcaattactacgcaaacgcttacagcttttggctcgccaccatagagaggagcgagatgttcaagaagcctacgccgtccaccttgaaggcaggggagctgcgcacgcacgtcagccgctgccaagtctgtatgagaagaacataatgaagcctgactcagctaatgtcacaacatggtgctacttcttcttctttttgttaacagcaacgaaccctagaaatatatcctgtgtacctcactgtccaatatgaaaaccgtaaagtgccttataggaatttgcgtaactaacacaccctgcttcattgacctctacttgctgaaggagaaaaagacagcgataagctttcaatagtggcataccaaatggcacttttgatgaaataaaatatcaatattttctgcaatccaatgcactgatgtgtgaagtgagaactccatcagaaaaccaaagggtgctaggaggtgtgggtgccttccatactgtttgcccattttcattcttgtattataattaattttctacccccagagataaatgtttgtttatatcactgtctagctgtttcaaaatttaggtcccttggtctgtacaaataatagcaatgtaaaaatggttttttgaacctccaaatggaattacagactcagtagccatatcttccaaccccccagtataaatttctgtctttctgctatgtgtggtactttgcagctgcttttgcagaaatcacaattttcctgtggaataaagatggtccaaaaatagtcaaaaattaaatatatatatatattagtaatttatatagatgtcagcaattaggcagatcaaggtttagtttaacttccactgttaaaataaagcttacatagttttcttcctttgaaagactgtgctgtcctttaacataggtttttaaagactaggatattgaatgtgaaacatccgttttcattgttcacttctaaaccaaaaattatgtgttgccaaaaccaaacccaggttcatgaatatggtgtctattatagtgaaacatgtactttgagcttattgtttttattctgtattaaatattttcagggttttaaacactaatcacaaactgaatgacttgacttcaaaagcaacaaccttaaaggccgtcatttcattagtattcctcattctgcatcctggcttgaaaaacagctctgttgaatcacagtatcagtattttcacacgtaagcacattcgggccatttccgtggtttctcatgagctgtgttcacagacctcagcagggcatcgcatggaccgcaggagggcagattcggaccactaggcctgaaatgacatttcactaaaagtctccaaaacatttctaagactactaaggccttttatgtaatttctttaaatgtgtatttcttaagaattcaaatttgtaataaaactatttgtataaaaattaagcttttattaatttgttgctagtattgccacagacgcattaaaagaaacttactgcacaagctgctaataaatttgtaagctttgcatacctta

SEQ ID NO: 359239 - DNA, 5948 bp, Homo sapiens
gcttggagccgccgcacccgggacggtgcgtagcgctggaagtccggccttccgagagctagctgtccgccgcggcccccgcacgccgggcagccgtccctcgccgcctcgggcgcgccaccatggggccccggctcagcgtctggctgctgctgctgcccgccgcccttctgctccacgaggagcacagccgggccgctgcgaagggtggctgtgctggctctggctgtggcaaatgtgactgccatggagtgaagggacaaaagggtgaaagaggcctcccggggttacaaggtgtcattgggtttcctggaatgcaaggacctgaggggccacagggaccaccaggacaaaagggtgatactggagaaccaggactacctggaacaaaagggacaagaggacctccgggagcatctggctaccctggaaacccaggacttcccggaattcctggccaagacggcccgccaggccccccaggtattccaggatgcaatggcacaaagggggagagagggccgctcgggcctcctggcttgcctggtttcgcaggaaatcccggaccaccaggcttaccagggatgaagggtgatccaggtgagatacttggccatgtgcccgggatgctgttgaaaggtgaaagaggatttcccggaatcccagggactccaggcccaccaggactgccagggcttcaaggtcctgttgggcctccaggatttaccggaccaccaggtcccccaggccctcccggccctccaggtgaaaagggacaaatgggcttaagttttcaaggaccaaaaggtgacaagggtgaccaaggggtcagtgggcctccaggagtaccaggacaagctcaagttcaagaaaaaggagacttcgccaccaagggagaaaagggccaaaaaggtgaacctggatttcaggggatgccaggggtcggagagaaaggtgaacccggaaaaccaggacccagaggcaaacccggaaaagatggtgacaaaggggaaaaagggagtcccggttttcctggtgaacccgggtacccaggactcataggccgccagggcccgcagggagaaaagggtgaagcaggtcctcctggcccacctggaattgttataggcacaggacctttgggagaaaaaggagagaggggctaccctggaactccggggccaagaggagagccaggcccaaaaggtttcccaggactaccaggccaacccggacctccaggcctccctgtacctgggcaggctggtgcccctggcttccctggtgaaagaggagaaaaaggtgaccgaggatttcctggtacatctctgccaggaccaagtggaagagatgggctcccgggtcctcctggttcccctgggccccctgggcagcctggctacacaaatggaattgtggaatgtcagcccggacctccaggtgaccagggtcctcctggaattccagggcagccaggatttataggcgaaattggagagaaaggtcaaaaaggagagagttgcctcatctgtgatatagacggatatcgggggcctcccgggccacagggacccccgggagaaataggtttcccagggcagccaggggccaagggcgacagaggtttgcctggcagagatggtgttgcaggagtgccaggccctcaaggtacaccagggctgataggccagccaggagccaagggggagcctggtgagttttatttcgacttgcggctcaaaggtgacaaaggagacccaggctttccaggacagcccggcatgccagggagagcgggttctcctggaagagatggccatccgggtcttcctggccccaagggctcgccgggttctgtaggattgaaaggagagcgtggcccccctggaggagttggattcccaggcagtcgtggtgacaccggcccccctgggcctccaggatatggtcctgctggtcccattggtgacaaaggacaagcaggctttcctggaggccctggatccccaggcctgccaggtccaaagggtgaaccaggaaaaattgttcctttaccaggcccccctggagcagaaggactgccggggtccccaggcttcccaggtccccaaggagaccgaggctttcccggaaccccaggaaggccaggcctgccaggagagaagggcgctgtgggccagccaggcattggatttccagggccccccggccccaaaggtgttgacggcttacctggagacatggggccaccggggactccaggtcgcccgggatttaatggcttacctgggaacccaggtgtgcagggccagaagggagagcctggagttggtctaccgggactcaaaggtttgccaggtcttcccggcattcctggcacacccggggagaaggggagcattggggtaccaggcgttcctggagaacatggagcgatcggaccccctgggcttcaggggatcagaggtgaaccgggacctcctggattgccaggctccgtggggtctccaggagttccaggaataggcccccctggagctaggggtccccctggaggacagggaccaccggggttgtcaggccctcctggaataaaaggagagaagggtttccccggattccctggactggacatgccgggccctaaaggagataaaggggctcaaggactccctggcataacgggacagtcggggctccctggccttcctggacagcagggggctcctgggattcctgggtttccaggttccaagggagaaatgggcgtcatggggacccccgggcagccgggctcaccaggaccagtgggtgctcctggattaccgggtgaaaaaggggaccatggctttccgggctcctcaggacccaggggagaccctggcttgaaaggtgataagggggatgtcggtctccctggcaagcctggctccatggataaggtggacatgggcagcatgaagggccagaaaggagaccaaggagagaaaggacaaattggaccaattggtgagaagggatcccgaggagaccctgggaccccaggagtgcctggaaaggacgggcaggcaggacagcctgggcagccaggacctaaaggtgatccaggtataagtggaaccccaggtgctccaggacttccgggaccaaaaggatctgttggtggaatgggcttgccaggaacacctggagagaaaggtgtgcctggcatccctggcccacaaggttcacctggcttacctggagacaaaggtgcaaaaggagagaaagggcaggcaggcccacctggcataggcatcccagggctgcgaggtgaaaagggagatcaagggatagcgggtttcccaggaagccctggagagaagggagaaaaaggaagcattgggatcccaggaatgccagggtccccaggccttaaagggtctcccgggagtgttggctatccaggaagtcctgggctacctggagaaaaaggtgacaaaggcctcccaggattggatggcatccctggtgtcaaaggagaagcaggtcttcctgggactcctggccccacaggcccagctggccagaaaggggagccaggcagtgatggaatcccggggtcagcaggagagaagggtgaaccaggtctaccaggaagaggattcccagggtttccaggggccaaaggagacaaaggttcaaagggtgaggtgggtttcccaggattagccgggagcccaggaattcctggatccaaaggagagcaaggattcatgggtcctccggggccccagggacagccggggttaccgggatccccaggccatgccacggaggggcccaaaggagaccgcggacctcagggccagcctggcctgccaggacttccgggacccatggggcctccagggcttcctgggattgatggagttaaaggtgacaaaggaaatccaggctggccaggagcacccggtgtcccagggcccaagggagaccctggattccagggcatgcctggtattggtggctctccaggaatcacaggctctaagggtgatatggggcctccaggagttccaggatttcaaggtccaaaaggtcttcctggcctccagggaattaaaggtgatcaaggcgatcaaggcgtcccgggagctaaaggtctcccgggtcctcctggccccccaggtccttacgacatcatcaaaggggagcccgggctccctggtcctgagggccccccagggctgaaagggcttcagggactgccaggcccgaaaggccagcaaggtgttacaggattggtgggtatacctggacctccaggtattcctgggtttgacggtgcccctggccagaaaggagagatgggacctgccgggcctactggtccaagaggatttccaggtccaccaggccccgatgggttgccaggatccatggggcccccaggcaccccatctgttgatcacggcttccttgtgaccaggcatagtcaaacaatagatgacccacagtgtccttctgggaccaaaattctttaccacgggtactctttgctctacgtgcaaggcaatgaacgggcccatggccaggacttgggcacggccggcagctgcctgcgcaagttcagcacaatgcccttcctgttctgcaatattaacaacgtgtgcaactttgcatcacgaaatgactactcgtactggctgtccacccctgagcccatgcccatgtcaatggcacccatcacgggggaaaacataagaccatttattagtaggtgtgctgtgtgtgaggcgcctgccatggtgatggccgtgcacagccagaccattcagatcccaccgtgccccagcgggtggtcctcgctgtggatcggctactcttttgtgatgcacaccagcgctggtgcagaaggctctggccaagccctggcgtcccccggctcctgcctggaggagtttagaagtgcgccattcatcgagtgtcacggccgtgggacctgcaattactacgcaaacgcttacagcttttggctcgccaccatagagaggagcgagatgttcaagaagcctacgccgtccaccttgaaggcaggggagctgcgcacgcacgtcagccgctgccaagtctgtatgagaagaacataatgaagcctgactcagctaatgtcacaacatggtgctacttcttcttctttttgttaacagcaacgaaccctagaaatatatcctgtgtacctcactgtccaatatgaaaaccgtaaagtgccttataggaatttgcgtaactaacacaccctgcttcattgacctctacttgctgaaggagaaaaagacagcgataagctttcaatagtggcataccaaatggcacttttgatgaaataaaatatcaatattttctgcaatccaatgcactgatgtgtgaagtgagaactccatcagaaaaccaaagggtgctaggaggtgtgggtgccttccatactgtttgcccattttcattcttgtattataattaattttctacccccagagataaatgtttgtttatatcactgtctagctgtttcaaaatttaggtcccttggtctgtacaaataatagcaatgtaaaaatggttttttgaacctccaaatggaattacagactcagtagccatatcttccaaccccccagtataaatttctgtctttctgctatgtgtggtactttgcagctgcttttgcagaaatcacaattttcctgtggaataaagatggaacggtctcagaactgtttgtttcaattggccatttaagtttagtagtaaaagacttggttaatgatacaatgcatcgtaaaaccttcagagggaaggagagtgttttgtggaccactttggtttctttttgcgtgtgcagttttaggtatagttttaaatcagtacttttaatggaacacttgacacaatttgtcacagatttg

SEQ ID NO: 359240 - DNA, 5716 bp, Homo sapiens
gcttggagccgccgcacccgggacggtgcgtagcgctggaagtccggccttccgagagctagctgtccgccgcggcccccgcacgccgggcagccgtccctcgccgcctcgggcgcgccaccatggggccccggctcagcgtctggctgctgctgctgcccgccgcccttctgctccacgaggagcacagccgggccgctgcgaagggtggctgtgctggctctggctgtggcaaatgtgactgccatggagtgaagggacaaaagggtgaaagaggcctcccggggttacaaggtgtcattgggtttcctggaatgcaaggacctgaggggccacagggaccaccaggacaaaagggtgatactggagaaccaggactacctggaacaaaagggacaagaggacctccgggagcatctggctaccctggaaacccaggacttcccggaattcctggccaagacggcccgccaggccccccaggtattccaggatgcaatggcacaaagggggagagagggccgctcgggcctcctggcttgcctggtttcgcaggaaatcccggaccaccaggcttaccagggatgaagggtgatccaggtgagatacttggccatgtgcccgggatgctgttgaaaggtgaaagaggatttcccggaatcccagggactccaggcccaccaggactgccagggcttcaaggtcctgttgggcctccaggatttaccggaccaccaggtcccccaggccctcccggccctccaggtgaaaagggacaaatgggcttaagttttcaaggaccaaaaggtgacaagggtgaccaaggggtcagtgggcctccaggagtaccaggacaagctcaagttcaagaaaaaggagacttcgccaccaagggagaaaagggccaaaaaggtgaacctggatttcaggggatgccaggggtcggagagaaaggtgaacccggaaaaccaggacccagaggcaaacccggaaaagatggtgacaaaggggaaaaagggagtcccggttttcctggtgaacccgggtacccaggactcataggccgccagggcccgcagggagaaaagggtgaagcaggtcctcctggcccacctggaattgttataggcacaggacctttgggagaaaaaggagagaggggctaccctggaactccggggccaagaggagagccaggcccaaaaggtttcccaggactaccaggccaacccggacctccaggcctccctgtacctgggcaggctggtgcccctggcttccctggtgaaagaggagaaaaaggtgaccgaggatttcctggtacatctctgccaggaccaagtggaagagatgggctcccgggtcctcctggttcccctgggccccctgggcagcctggctacacaaatggaattgtggaatgtcagcccggacctccaggtgaccagggtcctcctggaattccagggcagccaggatttataggcgaaattggagagaaaggtcaaaaaggagagagttgcctcatctgtgatatagacggatatcgggggcctcccgggccacagggacccccgggagaaataggtttcccagggcagccaggggccaagggcgacagaggtttgcctggcagagatggtgttgcaggagtgccaggccctcaaggtacaccagggctgataggccagccaggagccaagggggagcctggtgagttttatttcgacttgcggctcaaaggtgacaaaggagacccaggctttccaggacagcccggcatgccagggagagcgggttctcctggaagagatggccatccgggtcttcctggccccaagggctcgccgggttctgtaggattgaaaggagagcgtggcccccctggaggagttggattcccaggcagtcgtggtgacaccggcccccctgggcctccaggatatggtcctgctggtcccattggtgacaaaggacaagcaggctttcctggaggccctggatccccaggcctgccaggtccaaagggtgaaccaggaaaaattgttcctttaccaggcccccctggagcagaaggactgccggggtccccaggcttcccaggtccccaaggagaccgaggctttcccggaaccccaggaaggccaggcctgccaggagagaagggcgctgtgggccagccaggcattggatttccagggccccccggccccaaaggtgttgacggcttacctggagacatggggccaccggggactccaggtcgcccgggatttaatggcttacctgggaacccaggtgtgcagggccagaagggagagcctggagttggtctaccgggactcaaaggtttgccaggtcttcccggcattcctggcacacccggggagaaggggagcattggggtaccaggcgttcctggagaacatggagcgatcggaccccctgggcttcaggggatcagaggtgaaccgggacctcctggattgccaggctccgtggggtctccaggagttccaggaataggcccccctggagctaggggtccccctggaggacagggaccaccggggttgtcaggccctcctggaataaaaggagagaagggtttccccggattccctggactggacatgccgggccctaaaggagataaaggggctcaaggactccctggcataacgggacagtcggggctccctggccttcctggacagcagggggctcctgggattcctgggtttccaggttccaagggagaaatgggcgtcatggggacccccgggcagccgggctcaccaggaccagtgggtgctcctggattaccgggtgaaaaaggggaccatggctttccgggctcctcaggacccaggggagaccctggcttgaaaggtgataagggggatgtcggtctccctggcaagcctggctccatggataaggtggacatgggcagcatgaagggccagaaaggagaccaaggagagaaaggacaaattggaccaattggtgagaagggatcccgaggagaccctgggaccccaggagtgcctggaaaggacgggcaggcaggacagcctgggcagccaggacctaaaggtgatccaggtataagtggaaccccaggtgctccaggacttccgggaccaaaaggatctgttggtggaatgggcttgccaggaacacctggagagaaaggtgtgcctggcatccctggcccacaaggttcacctggcttacctggagacaaaggtgcaaaaggagagaaagggcaggcaggcccacctggcataggcatcccagggctgcgaggtgaaaagggagatcaagggatagcgggtttcccaggaagccctggagagaagggagaaaaaggaagcattgggatcccaggaatgccagggtccccaggccttaaagggtctcccgggagtgttggctatccaggaagtcctgggctacctggagaaaaaggtgacaaaggcctcccaggattggatggcatccctggtgtcaaaggagaagcaggtcttcctgggactcctggccccacaggcccagctggccagaaaggggagccaggcagtgatggaatcccggggtcagcaggagagaagggtgaaccaggtctaccaggaagaggattcccagggtttccaggggccaaaggagacaaaggttcaaagggtgaggtgggtttcccaggattagccgggagcccaggaattcctggatccaaaggagagcaaggattcatgggtcctccggggccccagggacagccggggttaccgggatccccaggccatgccacggaggggcccaaaggagaccgcggacctcagggccagcctggcctgccaggacttccgggacccatggggcctccagggcttcctgggattgatggagttaaaggtgacaaaggaaatccaggctggccaggagcacccggtgtcccagggcccaagggagaccctggattccagggcatgcctggtattggtggctctccaggaatcacaggctctaagggtgatatggggcctccaggagttccaggatttcaaggtccaaaaggtcttcctggcctccagggaattaaaggtgatcaaggcgatcaaggcgtcccgggagctaaaggtctcccgggtcctcctggccccccaggtccttacgacatcatcaaaggggagcccgggctccctggtcctgagggccccccagggctgaaagggcttcagggactgccaggcccgaaaggccagcaaggtgttacaggattggtgggtatacctggacctccaggtattcctgggtttgacggtgcccctggccagaaaggagagatgggacctgccgggcctactggtccaagaggatttccaggtccaccaggccccgatgggttgccaggatccatggggcccccaggcaccccatctgttgatcacggcttccttgtgaccaggcatagtcaaacaatagatgacccacagtgtccttctgggaccaaaattctttaccacgggtactctttgctctacgtgcaaggcaatgaacgggcccatggccaggacttgggcacggccggcagctgcctgcgcaagttcagcacaatgcccttcctgttctgcaatattaacaacgtgtgcaactttgcatcacgaaatgactactcgtactggctgtccacccctgagcccatgcccatgtcaatggcacccatcacgggggaaaacataagaccatttattagtaggtgtgctgtgtgtgaggcgcctgccatggtgatggccgtgcacagccagaccattcagatcccaccgtgccccagcgggtggtcctcgctgtggatcggctactcttttgtgatgcacaccagcgctggtgcagaaggctctggccaagccctggcgtcccccggctcctgcctggaggagtttagaagtgcgccattcatcgagtgtcacggccgtgggacctgcaattactacgcaaacgcttacagcttttggctcgccaccatagagaggagcgagatgttcaagaagcctacgccgtccaccttgaaggcaggggagctgcgcacgcacgtcagccgctgccaagtctgtatgagaagaacataatgaagcctgactcagctaatgtcacaacatggtgctacttcttcttctttttgttaacagcaacgaaccctagaaatatatcctgtgtacctcactgtccaatatgaaaaccgtaaagtgccttataggaatttgcgtaactaacacaccctgcttcattgacctctacttgctgaaggagaaaaagacagcgataagctttcaatagtggcataccaaatggcacttttgatgaaataaaatatcaatattttctgcaatccaatgcactgatgtgtgaagtgagaactccatcagaaaaccaaagggtgctaggaggtgtgggtgccttccatactgtttgcccattttcattcttgtattataattaattttctacccccagagataaatgtttgtttatatcactagacctcagcagggcatcgcatggaccgcaggagggcagattcggaccactaggcctgaaatgacatttcactaaaagtctccaaaacatttctaagactactaaggccttttatgtaatttctttaaatgtgtatttcttaagaattcaaatttgtaataaaactatttgtata

SEQ ID NO: 359241 - DNA, 1231 bp, Homo sapiens
gcttggagccgccgcacccgggacggtgcgtagcgctggaagtccggccttccgagagctagctgtccgccgcggcccccgcacgccgggcagccgtccctcgccgcctcgggcgcgccaccatggggccccggctcagcgtctggctgctgctgctgcccgccgcccttctgctccacgaggagcacagccgggccgctgcgaagggtggctgtgctggctctggctgtggcaaatgtgactgccatggagtgaagggacaaaagggtgaaagaggcctcccggggttacaaggtgtcattgggtttcctggaatgcaaggacctgaggggccacagggaccaccaggacaaaagggtgatactggagaaccaggactacctggaacaaaagggacaagaggacctccgggagcatctggctaccctggaaacccaggacttcccggaattcctggccaagacggcccgccaggccccccaggtattccaggatgcaatggcacaaagggggagagagggccgctcgggcctcctggcttgcctggtttcgcaggaaatcccggaccaccaggcttaccagggatgaagggtgatccaggtgagatacttggccatgtgcccgggatgctgttgaaaggtgaaagaggatttcccggaatcccagggactccaggcccaccaggactgccagggcttcaaggtcctgttgggcctccaggatttaccggaccaccaggtcccccaggccctcccggccctccaggtgaaaagggacaaatgggcttaagttttcaaggaccaaaaggtgacaagggtgaccaaggggtcagtgggcctccaggagtaccaggacaagctcaagttcaagaaaaaggagacttcgccaccaagggagaaaagggccaaaaaggtgaacctggatttcaggggatgccaggggtcggagagaaaggtgaacccggaaaaccaggacccagacgcaggagggcagattcggaccactaggcctgaaatgacatttcactaaaagtctccaaaacatttctaagactactaaggccttttatgtaatttctttaaatgtgtatttcttaagaattcaaatttgtaataaaactatttgtataaaaattaagcttttattaatttgttgctagtattgccacagacgcattaaaagaaacttactgcacaagctgctaataaatttgtaagctttgcatacctta

SEQ ID NO: 359242 - DNA, 304 bp, Homo sapiens
tgccaggaccaagtggaagagatgggctcccgggtcctcctggttcccctgggccccctgggcagcctggctacacaagtgagttccctcagaaatggtttaatgtggggtgcaagcagacaccagggtgccgggcagacccaggttgggggctgtgatagtcccccacagccagagtgtaatagaaaggcgtggattcttctaatcatccatattcctctaagggaatcttcagagaatgaaccatgctacaaaaagcaatagttaaaatttcaaaataaagctggtttaacggagtaaataa

SEQ ID NO: 359243 - DNA, 3731 bp, Homo sapiens
aacgcttcccgcgggagttttagccgtgttattgttggggaagggaatgtcaaattctgctcctgccttcccccaggggctggagactggaatctttattccagttcattgcgggtcgacgtggtctccagaatccccgagtgtagaggcggaggacagtggagctggggactcgggcgcctgggtcctggtccctgagcgtccagcgctcccctagtccgcggccctggctcctgtcctcacttccttccccttttggctcctgctctcggagcgggcggacgcgggggggagcggaaagggcgggagggcccaggagcccggcgggggggttcaagggggtacggaaaagccggggaggggactcggtccggggccggagaccgacggcaacagcggctcaggacccacgctgcccccacccctcccgagcaggcgcccccatggcccgaccccgctgattccttcactcggccatgctcccgcggcccctgcggctgcttttggacacgagcccccccgggggagtcgtactgagcagcttccgaagccgggaccccgaagagggtgggggcccaggtggcctggtcgtgggcggggggcaggaggaagaggaggaggaagaagaagaggcccctgtgtccgtctgggatgaggaggaggatggtgccgtgtttaccgtcacaagccgccaatatcgacctcttgatcccttggtccctatgcctcccccacgttcctcccgacggctccgagctggcactctggaggccctggtcagacacctactggatacccggacatcagggactgatgtgagcttcatgtcagccttcctggctacccaccgggccttcacctccacgcctgccttgctagggcttatggctgacaggctggaagcccttgaatctcatcctaccgacgaactagagaggacaacagaggtagccatctctgtactgtcaacctggctggcctctcaccctgaggattttggctctgaggccaagggtcagcttgaccggcttgagagcttcttacttcagacagggtatgcagcagggaagggtgttggggggggcagcgctgacctcatccgcaatctccggtcccgggtggacccccaggcccccgaccttcctaagcccctggccctccccggcgatccccctgctgaccccacggatgtcctggtgttcctcgctgaccacttggccgaacagctgaccctgctagatgcggaactttttctcaatttgatcccctctcagtgcctgggaggcctgtggggtcacagagaccggccaggacattctcacctctgcccatctgtccgagctactgtcacacagtttaacaaggtggcaggggcagtggttagttctgtcctgggggctacttccactggagagggacctggggaggtgaccatacggccactccgtcccccacagagggcccggctcctggagaagtggatccgcgtggcagaggagtgccggctgctccgaaacttctcttcagtttatgccgtggtgtcagccctgcagtccagccccatccacaggcttcgggcagcctggggggaagcaaccagggacagcctcagagtcttttccagcctctgccagattttctccgaggaggataattattcccagagtcgggagctgctcgtgcaggaggtgaagctgcagtctcctctggagccacactccaagaaggccccgaggtctggctcccggggtgggggtgtggtcccataccttggcaccttcctgaaggaccttgtgatgctggatgcagcctccaaggatgagttggagaatggatacatcaattttgacaagcggaggaaggagtttgcagtcctttctgagttgcgacggctccagaatgaatgtcgtggctataacctccaacctgaccatgatatccagaggtggctacaggggctccggccactgacagaggctcagagccatcgtgtatcctgtgaggtggagccacctggttccagtgaccctcctgccccacgggtgcttcggccaacattggtcatctcgcagtggacagaggttttgggctctgttggggtccctaccccgcttgtgtcctgtgaccggcccagtactgggggagatgaggcgcctacaactcctgctcctctgctgactcggctggcccagcacatgaagtggccatctgtctcgtcactagactctgccttggaaagcagtccatccctgcacagtccagctgaccccagccacctctccccaccagcctcctcccctaggccttctcgaggtcaccgccgctcagcctcctgtggctccccgctgagtgggggtgcagaagaggcctccggggggactggatatgggggagagggatctgggccaggggcctctgattgccgtatcatccgagtccagatggagttgggggaagatggcagtgtctataagagcattttggtgacaagccaggacaaggctccaagtgtcatcagtcgtgtccttaagaaaaacaatcgtgactctgcagtggcttcagagtatgagctggtacagctgctaccaggggagcgagagctgactatcccagcctcggctaatgtattctacgccatggatggagcttcacacgatttcctcctgcggcagcggcgaaggtcctctactgctacacctggcgtcaccagtggcccgtctgcctcaggaactcctccgagtgagggaggagggggctcctttcccaggatcaaggccacagggaggaagattgcacgggcactgttctgaggaggaagccccgttggcttacagaagtcatggtgttcataccagatgtgggtagccatcctgaatggtggcaattatatcacattgagacagaaattcagaaagggagccagccaccctggggcagtgaagtgccactggtttaccagacagctgagaaatccagccctgtgggaactggtgtcttataaccaagttggatacctgtgtatagcttcccaccttccatgagtgcagcacacaggtagtgctggaaaaacgcatcagtttctgattcttggccatatcctaacatgcaagggccaagcaaaggcttcaaggctctgagccccagggcagaggggaatggcaaaatgtaggtcctcgcaggagctcttcttcccactctgggggtttctatcactgtgacaacactaagataataaaccaaaacactacctgaattctactcccctgtccttgcagtacatatgaactggctgctatgagtgggggtggggaattggctgaaggtagatgccatggaacaggaaggggcacaatgttttctgtccccatgaacagagcaaaaagtgaggtattggtgaaaaaagtttcctcagaacagtttctctccagtaacctctctaccactggtcccttgctgcaaatgtgtataaaacaattttaggacaaggaaatggcagaacaactttatggacaacatataaacttgggaggacttataataccataaagcattacatgctgggattttaagtcagtttaaagctacattcaagcaaattctaggaagacagaggctgaaaagtactaatagagatgccagggctgttggcaaggagggtaaccacatttcatcctggggcctcaggttagagaactgtgtattctttttcaattaaaccgacattcctagca

SEQ ID NO: 359244 - DNA, 3736 bp, Homo sapiens
  misc_feature (634)..(636): n is a, c, g, or t
  misc_feature (642)..(643): n is a, c, g, or t
  misc_feature (657)..(658): n is a, c, g, or t
  misc_feature (700)..(700): n is a, c, g, or t
  misc_feature (702)..(702): n is a, c, g, or t
  misc_feature (706)..(706): n is a, c, g, or t
  misc_feature (708)..(708): n is a, c, g, or t
  misc_feature (710)..(710): n is a, c, g, or t
aacgcttcccgcgggagttttagccgtgttattgttggggaagggaatgtcaaattctgctcctgccttcccccaggggctggagactggaatctttattccagttcattgcgggtcgacgtggtctccagaatccccgagtgtagaggcggaggacagtggagctggggactcgggcgcctgggtcctggtccctgagcgtccagcgctcccctagtccgcggccctggctcctgtcctcacttccttccccttttggctcctgctctcggagcgggcggacgcgggggggagcggaaagggcgggagggcccaggagcccggcgggggggttcaagggggtacggaaaagccggggaggggactcggtccggggccggagaccgacggcaacagcggctcaggacccacgctgcccccacccctcccgagcaggcgcccccatggcccgaccccgctgattccttcactcggccatgctcccgcggcccctgcggctgcttttggacacgagcccccccgggggagtcgtactgagcagcttccgaagccgggaccccgaagagggtgggggcccaggtggcctggtcgtgggcggggggcaggaggaagaggaggaggaagaagaagagcnnntgtgtnngtttgtggattatnnttttttttttttttttttttttttttatatatattttttttntntttntntnttgatcccttggtccctatgcctcccccacgttcctcccgacggctccgagctggcactctggaggccctggtcagacacctactggatacccggacatcagggactgatgtgagcttcatgtcagccttcctggctacccaccgggccttcacctccacgcctgccttgctagggcttatggctgacaggctggaagcccttgaatctcatcctaccgacgaactagagaggacaacagaggtagccatctctgtactgtcaacctggctggcctctcaccctgaggattttggctctgaggccaagggtcagcttgaccggcttgagagcttcttacttcagacagggtatgcagcagggaagggtgttggggggggcagcgctgacctcatccgcaatctccggtcccgggtggacccccaggcccccgaccttcctaagcccctggccctccccggcgatccccctgctgaccccacggatgtcctggtgttcctcgctgaccacttggccgaacagctgaccctgctagatgcggaactttttctcaatttgatcccctctcagtgcctgggaggcctgtggggtcacagagaccggccaggacattctcacctctgcccatctgtccgagctactgtcacacagtttaacaaggtggcaggggcagtggttagttctgtcctgggggctacttccactggagagggacctggggaggtgaccatacggccactccgtcccccacagagggcccggctcctggagaagtggatccgcgtggcagaggagtgccggctgctccgaaacttctcttcagtttatgccgtggtgtcagccctgcagtccagccccatccacaggcttcgggcagcctggggggaagcaaccagggacagcctcagagtcttttccagcctctgccagattttctccgaggaggataattattcccagagtcgggagctgctcgtgcaggaggtgaagctgcagtctcctctggagccacactccaagaaggccccgaggtctggctcccggggtgggggtgtggtcccataccttggcaccttcctgaaggaccttgtgatgctggatgcagcctccaaggatgagttggagaatggatacatcaattttgacaagcggaggaaggagtttgcagtcctttctgagttgcgacggctccagaatgaatgtcgtggctataacctccaacctgaccatgatatccagaggtggctacaggggctccggccactgacagaggctcagagccatcgtgtatcctgtgaggtggagccacctggttccagtgaccctcctgccccacgggtgcttcggccaacattggtcatctcgcagtggacagaggttttgggctctgttggggtccctaccccgcttgtgtcctgtgaccggcccagtactgggggagatgaggcgcctacaactcctgctcctctgctgactcggctggcccagcacatgaagtggccatctgtctcgtcactagactctgccttggaaagcagtccatccctgcacagtccagctgaccccagccacctctccccaccagcctcctcccctaggccttctcgaggtcaccgccgctcagcctcctgtggctccccgctgagtgggggtgcagaagaggcctccggggggactggatatgggggagagggatctgggccaggggcctctgattgccgtatcatccgagtccagatggagttgggggaagatggcagtgtctataagagcattttggtgacaagccaggacaaggctccaagtgtcatcagtcgtgtccttaagaaaaacaatcgtgactctgcagtggcttcagagtatgagctggtacagctgctaccaggggagcgagagctgactatcccagcctcggctaatgtattctacgccatggatggagcttcacacgatttcctcctgcggcagcggcgaaggtcctctactgctacacctggcgtcaccagtggcccgtctgcctcaggaactcctccgagtgagggaggagggggctcctttcccaggatcaaggccacagggaggaagattgcacgggcactgttctgaggaggaagccccgttggcttacagaagtcatggtgttcataccagatgtgggtagccatcctgaatggtggcaattatatcacattgagacagaaattcagaaagggagccagccaccctggggcagtgaagtgccactggtttaccagacagctgagaaatccagccctgtgggaactggtgtcttataaccaagttggatacctgtgtatagcttcccaccttccatgagtgcagcacacaggtagtgctggaaaaacgcatcagtttctgattcttggccatatcctaacatgcaagggccaagcaaaggcttcaaggctctgagccccagggcagaggggaatggcaaaatgtaggtcctcgcaggagctcttcttcccactctgggggtttctatcactgtgacaacactaagataataaaccaaaacactacctgaattctactcccctgtccttgcagtacatatgaactggctgctatgagtgggggtggggaattggctgaaggtagatgccatggaacaggaaggggcacaatgttttctgtccccatgaacagagcaaaaagtgaggtattggtgaaaaaagtttcctcagaacagtttctctccagtaacctctctaccactggtcccttgctgcaaatgtgtataaaacaattttaggacaaggaaatggcagaacaactttatggacaacatataaacttgggaggacttataataccataaagcattacatgctgggattttaagtcagtttaaagctacattcaagcaaattctaggaagacagaggctgaaaagtactaatagagatgccagggctgttggcaaggagggtaaccacatttcatcctggggcctcaggttagagaactgtgtattctttttcaattaaaccgacattcctagca

SEQ ID NO: 359245 - DNA, 3370 bp, Homo sapiens
ccaggatcagaattcctgtactccatccacgcctccactgcagccccttcgactccaccggggccctgaggcggctggggtggggctgtctgggccccagtgggggagacctggggtcaccagctcccccaacccttcctcgcactcgctggtactatgccctgccaccacaggtgaggggtacagagggaggagcagggcctggggtgaaggctgagggcaatggggggtggtgtggaactgtctgacttccccttccttgctcctccaggcccctgtgtccgtctgggatgaggaggaggatggtgccgtgtttaccgtcacaagccgccaatatcgacctcttgatcccttggtccctatgcctcccccacgttcctcccgacggctccgagctggcactctggaggccctggtcagacacctactggatacccggacatcagggactgatgtgagcttcatgtcagccttcctggctacccaccgggccttcacctccacgcctgccttgctagggcttatggctgacaggctggaagcccttgaatctcatcctaccgacgaactagagaggacaacagaggtagccatctctgtactgtcaacctggctggcctctcaccctgaggattttggctctgaggccaagggtcagcttgaccggcttgagagcttcttacttcagacagggtatgcagcagggaagggtgttggggggggcagcgctgacctcatccgcaatctccggtcccgggtggacccccaggcccccgaccttcctaagcccctggccctccccggcgatccccctgctgaccccacggatgtcctggtgttcctcgctgaccacttggccgaacagctgaccctgctagatgcggaactttttctcaatttgatcccctctcagtgcctgggaggcctgtggggtcacagagaccggccaggacattctcacctctgcccatctgtccgagctactgtcacacagtttaacaaggtggcaggggcagtggttagttctgtcctgggggctacttccactggagagggacctggggaggtgaccatacggccactccgtcccccacagagggcccggctcctggagaagtggatccgcgtggcagaggagtgccggctgctccgaaacttctcttcagtttatgccgtggtgtcagccctgcagtccagccccatccacaggcttcgggcagcctggggggaagcaaccagggacagcctcagagtcttttccagcctctgccagattttctccgaggaggataattattcccagagtcgggagctgctcgtgcaggaggtgaagctgcagtctcctctggagccacactccaagaaggccccgaggtctggctcccggggtgggggtgtggtcccataccttggcaccttcctgaaggaccttgtgatgctggatgcagcctccaaggatgagttggagaatggatacatcaattttgacaagcggaggaaggagtttgcagtcctttctgagttgcgacggctccagaatgaatgtcgtggctataacctccaacctgaccatgatatccagaggtggctacaggggctccggccactgacagaggctcagagccatcgtgtatcctgtgaggtggagccacctggttccagtgaccctcctgccccacgggtgcttcggccaacattggtcatctcgcagtggacagaggttttgggctctgttggggtccctaccccgcttgtgtcctgtgaccggcccagtactgggggagatgaggcgcctacaactcctgctcctctgctgactcggctggcccagcacatgaagtggccatctgtctcgtcactagactctgccttggaaagcagtccatccctgcacagtccagctgaccccagccacctctccccaccagcctcctcccctaggccttctcgaggtcaccgccgctcagcctcctgtggctccccgctgagtgggggtgcagaagaggcctccggggggactggatatgggggagagggatctgggccaggggcctctgattgccgtatcatccgagtccagatggagttgggggaagatggcagtgtctataagagcattttggtgacaagccaggacaaggctccaagtgtcatcagtcgtgtccttaagaaaaacaatcgtgactctgcagtggcttcagagtatgagctggtacagctgctaccaggggagcgagagctgactatcccagcctcggctaatgtattctacgccatggatggagcttcacacgatttcctcctgcggcagcggcgaaggtcctctactgctacacctggcgtcaccagtggcccgtctgcctcaggaactcctccgagtgagggaggagggggctcctttcccaggatcaaggccacagggaggaagattgcacgggcactgttctgaggaggaagccccgttggcttacagaagtcatggtgttcataccagatgtgggtagccatcctgaatggtggcaattatatcacattgagacagaaattcagaaagggagccagccaccctggggcagtgaagtgccactggtttaccagacagctgagaaatccagccctgtgggaactggtgtcttataaccaagttggatacctgtgtatagcttcccaccttccatgagtgcagcacacaggtagtgctggaaaaacgcatcagtttctgattcttggccatatcctaacatgcaagggccaagcaaaggcttcaaggctctgagccccagggcagaggggaatggcaaaatgtaggtcctcgcaggagctcttcttcccactctgggggtttctatcactgtgacaacactaagataataaaccaaaacactacctgaattctactcccctgtccttgcagtacatatgaactggctgctatgagtgggggtggggaattggctgaaggtagatgccatggaacaggaaggggcacaatgttttctgtccccatgaacagagcaaaaagtgaggtattggtgaaaaaagtttcctcagaacagtttctctccagtaacctctctaccactggtcccttgctgcaaatgtgtataaaacaattttaggacaaggaaatggcagaacaactttatggacaacatataaacttgggaggacttataataccataaagcattacatgctgggattttaagtcagtttaaagctacattcaagcaaattctaggaagacagaggctgaaaagtactaatagagatgccagggctgttggcaaggagggtaaccacatttcatcctggggcctcaggttagagaactgtgtattctttttcaattaaaccgacattcctagca

SEQ ID NO: 359246 - DNA, 3534 bp, Homo sapiens
aacgcttcccgcgggagttttagccgtgttattgttggggaagggaatgtcaaattctgctcctgccttcccccaggggctggagactggaatctttattccagttcattgcgggtcgacgtggtctccagaatccccgagtgtagaggcggaggacagtggagctggggactcgggcgcctgggtcctggtccctgagcgtccagcgctcccctagtccgcggccctggctcctgtcctcacttccttccccttttggctcctgctctcggagcgggcggacgcgggggggagcggaaagggcgggagggcccaggagcccggcgggggggttcaagggggtacggaaaagccggggaggggactcggtccggggccggagaccgacggcaacagcggctcaggacccacgctgcccccacccctcccgagcaggcccctgtgtccgtctgggatgaggaggaggatggtgccgtgtttaccgtcacaagccgccaatatcgacctcttgatcccttggtccctatgcctcccccacgttcctcccgacggctccgagctggcactctggaggccctggtcagacacctactggatacccggacatcagggactgatgtgagcttcatgtcagccttcctggctacccaccgggccttcacctccacgcctgccttgctagggcttatggctgacaggctggaagcccttgaatctcatcctaccgacgaactagagaggacaacagaggtagccatctctgtactgtcaacctggctggcctctcaccctgaggattttggctctgaggccaagggtcagcttgaccggcttgagagcttcttacttcagacagggtatgcagcagggaagggtgttggggggggcagcgctgacctcatccgcaatctccggtcccgggtggacccccaggcccccgaccttcctaagcccctggccctccccggcgatccccctgctgaccccacggatgtcctggtgttcctcgctgaccacttggccgaacagctgaccctgctagatgcggaactttttctcaatttgatcccctctcagtgcctgggaggcctgtggggtcacagagaccggccaggacattctcacctctgcccatctgtccgagctactgtcacacagtttaacaaggtggcaggggcagtggttagttctgtcctgggggctacttccactggagagggacctggggaggtgaccatacggccactccgtcccccacagagggcccggctcctggagaagtggatccgcgtggcagaggagtgccggctgctccgaaacttctcttcagtttatgccgtggtgtcagccctgcagtccagccccatccacaggcttcgggcagcctggggggaagcaaccagggacagcctcagagtcttttccagcctctgccagattttctccgaggaggataattattcccagagtcgggagctgctcgtgcaggaggtgaagctgcagtctcctctggagccacactccaagaaggccccgaggtctggctcccggggtgggggtgtggtcccataccttggcaccttcctgaaggaccttgtgatgctggatgcagcctccaaggatgagttggagaatggatacatcaattttgacaagcggaggaaggagtttgcagtcctttctgagttgcgacggctccagaatgaatgtcgtggctataacctccaacctgaccatgatatccagaggtggctacaggggctccggccactgacagaggctcagagccatcgtgtatcctgtgaggtggagccacctggttccagtgaccctcctgccccacgggtgcttcggccaacattggtcatctcgcagtggacagaggttttgggctctgttggggtccctaccccgcttgtgtcctgtgaccggcccagtactgggggagatgaggcgcctacaactcctgctcctctgctgactcggctggcccagcacatgaagtggccatctgtctcgtcactagactctgccttggaaagcagtccatccctgcacagtccagctgaccccagccacctctccccaccagcctcctcccctaggccttctcgaggtcaccgccgctcagcctcctgtggctccccgctgagtgggggtgcagaagaggcctccggggggactggatatgggggagagggatctgggccaggggcctctgattgccgtatcatccgagtccagatggagttgggggaagatggcagtgtctataagagcattttggtgacaagccaggacaaggctccaagtgtcatcagtcgtgtccttaagaaaaacaatcgtgactctgcagtggcttcagagtatgagctggtacagctgctaccaggggagcgagagctgactatcccagcctcggctaatgtattctacgccatggatggagcttcacacgatttcctcctgcggcagcggcgaaggtcctctactgctacacctggcgtcaccagtggcccgtctgcctcaggaactcctccgagtgagggaggagggggctcctttcccaggatcaaggccacagggaggaagattgcacgggcactgttctgaggaggaagccccgttggcttacagaagtcatggtgttcataccagatgtgggtagccatcctgaatggtggcaattatatcacattgagacagaaattcagaaagggagccagccaccctggggcagtgaagtgccactggtttaccagacagctgagaaatccagccctgtgggaactggtgtcttataaccaagttggatacctgtgtatagcttcccaccttccatgagtgcagcacacaggtagtgctggaaaaacgcatcagtttctgattcttggccatatcctaacatgcaagggccaagcaaaggcttcaaggctctgagccccagggcagaggggaatggcaaaatgtaggtcctcgcaggagctcttcttcccactctgggggtttctatcactgtgacaacactaagataataaaccaaaacactacctgaattctactcccctgtccttgcagtacatatgaactggctgctatgagtgggggtggggaattggctgaaggtagatgccatggaacaggaaggggcacaatgttttctgtccccatgaacagagcaaaaagtgaggtattggtgaaaaaagtttcctcagaacagtttctctccagtaacctctctaccactggtcccttgctgcaaatgtgtataaaacaattttaggacaaggaaatggcagaacaactttatggacaacatataaacttgggaggacttataataccataaagcattacatgctgggattttaagtcagtttaaagctacattcaagcaaattctaggaagacagaggctgaaaagtactaatagagatgccagggctgttggcaaggagggtaaccacatttcatcctggggcctcaggttagagaactgtgtattctttttcaattaaaccgacattcctagca

SEQ ID NO: 359247 - DNA, 3552 bp, Homo sapiens
tcctgggtagaggccgggaagccacggttctgggacctggaggaaagatcctaggccccttcgactccaccggggccctgaggcggctggggtggggctgtctgggccccagtgggggagacctggggtcaccagctcccccaacccttcctcgcactcgctggtactatgccctgccaccacaggcccctgtgtccgtctgggatgaggaggaggatggtgccgtgtttaccgtcacaagccgccaatatcgacctcttgatcccttggtccctatgcctcccccacgttcctcccgacggctccgagctggcactctggaggccctggtcagacacctactggatacccggacatcagggactgatgtgagcttcatgtcagccttcctggctacccaccgggccttcacctccacgcctgccttgctagggcttatggctgacaggctggaagcccttgaatctcatcctaccgacgaactagagaggacaacagaggtagccatctctgtactgtcaacctggctggcctctcaccctgaggattttggctctgaggccaagggtcagcttgaccggcttgagagcttcttacttcagacagggtatgcagcagggaagggtgttggggggggcagcgctgacctcatccgcaatctccggtcccgggtggacccccaggcccccgaccttcctaagcccctggccctccccggcgatccccctgctgaccccacggatgtcctggtgttcctcgctgaccacttggccgaacagctgaccctgctagatgcggtgagaccctgacctctggcccctatgccccctgaccccttactaacctctccttgactccagatcctttccttgcttccaccccttcctgatccagctcctagcctcctccacctaccattttgattctccccttttccctttggtcgttacccttcaaaccctgtgcccctctggttccttggccacctgagatcctcagatccctgatattggaaggctgacctcacttgactatgaactttaacctctgacctctaccctgcaggaactttttctcaatttgatcccctctcagtgcctgggaggcctgtggggtcacagagaccggccaggacattctcacctctgcccatctgtccgagctactgtcacacagtttaacaaggtggcaggggcagtggttagttctgtcctgggggctacttccactggagagggacctggggaggtgaccatacggccactccgtcccccacagagggcccggctcctggagaagtggatccgcgtggcagaggagtgccggctgctccgaaacttctcttcagtttatgccgtggtgtcagccctgcagtccagccccatccacaggcttcgggcagcctggggggaagcaaccagggacagcctcagagtcttttccagcctctgccagattttctccgaggaggataattattcccagagtcgggagctgctcgtgcaggaggtgaagctgcagtctcctctggagccacactccaagaaggccccgaggtctggctcccggggtgggggtgtggtcccataccttggcaccttcctgaaggaccttgtgatgctggatgcagcctccaaggatgagttggagaatggatacatcaattttgacaagcggaggaaggagtttgcagtcctttctgagttgcgacggctccagaatgaatgtcgtggctataacctccaacctgaccatgatatccagaggtggctacaggggctccggccactgacagaggctcagagccatcgtgtatcctgtgaggtggagccacctggttccagtgaccctcctgccccacgggtgcttcggccaacattggtcatctcgcagtggacagaggttttgggctctgttggggtccctaccccgcttgtgtcctgtgaccggcccagtactgggggagatgaggcgcctacaactcctgctcctctgctgactcggctggcccagcacatgaagtggccatctgtctcgtcactagactctgccttggaaagcagtccatccctgcacagtccagctgaccccagccacctctccccaccagcctcctcccctaggccttctcgaggtcaccgccgctcagcctcctgtggctccccgctgagtgggggtgcagaagaggcctccggggggactggatatgggggagagggatctgggccaggggcctctgattgccgtatcatccgagtccagatggagttgggggaagatggcagtgtctataagagcattttggtgacaagccaggacaaggctccaagtgtcatcagtcgtgtccttaagaaaaacaatcgtgactctgcagtggcttcagagtatgagctggtacagctgctaccaggggagcgagagctgactatcccagcctcggctaatgtattctacgccatggatggagcttcacacgatttcctcctgcggcagcggcgaaggtcctctactgctacacctggcgtcaccagtggcccgtctgcctcaggaactcctccgagtgagggaggagggggctcctttcccaggatcaaggccacagggaggaagattgcacgggcactgttctgaggaggaagccccgttggcttacagaagtcatggtgttcataccagatgtgggtagccatcctgaatggtggcaattatatcacattgagacagaaattcagaaagggagccagccaccctggggcagtgaagtgccactggtttaccagacagctgagaaatccagccctgtgggaactggtgtcttataaccaagttggatacctgtgtatagcttcccaccttccatgagtgcagcacacaggtagtgctggaaaaacgcatcagtttctgattcttggccatatcctaacatgcaagggccaagcaaaggcttcaaggctctgagccccagggcagaggggaatggcaaaatgtaggtcctcgcaggagctcttcttcccactctgggggtttctatcactgtgacaacactaagataataaaccaaaacactacctgaattctactcccctgtccttgcagtacatatgaactggctgctatgagtgggggtggggaattggctgaaggtagatgccatggaacaggaaggggcacaatgttttctgtccccatgaacagagcaaaaagtgaggtattggtgaaaaaagtttcctcagaacagtttctctccagtaacctctctaccactggtcccttgctgcaaatgtgtataaaacaattttaggacaaggaaatggcagaacaactttatggacaacatataaacttgggaggacttataataccataaagcattacatgctgggattttaagtcagtttaaagctacattcaagcaaattctaggaagacagaggctgaaaagtactaatagagatgccagggctgttggcaaggagggtaaccacatttcatcctggggcctcaggttagagaactgtgtattctttttcaattaaaccgacattcctagca

SEQ ID NO: 359248 - DNA, 3810 bp, Homo sapiens
aacgcttcccgcgggagttttagccgtgttattgttggggaagggaatgtcaaattctgctcctgccttcccccaggggctggagactggaatctttattccagttcattgcgggtcgacgtggtctccagaatccccgagtgtagaggcggaggacagtggagctggggactcgggcgcctgggtcctggtccctgagcgtccagcgctcccctagtccgcggccctggctcctgtcctcacttccttccccttttggctcctgctctcggagcgggcggacgcgggggggagcggaaagggcgggagggcccaggagcccggcgggggggttcaagggggtacggaaaagccggggaggggactcggtccggggccggagaccgacggcaacagcggctcaggacccacgctgcccccacccctcccgagcaggcgcccccatggcccgaccccgctgattccttcactcggccatgctcccgcggcccctgcggctgcttttggacacgagcccccccgggggagtcgtactgagcagcttccgaagccgggaccccgaagagggtgggggcccaggtggcctggtcgtgggcggggggcaggaggaagaggaggaggaagaagaagaggcccctgtgtccgtctgggatgaggaggaggatggtgccgtgtttaccgtcacaagccgccaatatcgacctcttgatcccttggtccctatgcctcccccacgttcctcccgacggctccgagctggcactctggaggccctggtcagacacctactggatacccggacatcagggactgatgtgagcttcatgtcagccttcctggctacccaccgggccttcacctccacgcctgccttgctagggcttatggctgacaggctggaagcccttgaatctcatcctaccgacgaactagagaggacaacagaggtagccatctctgtactgtcaacctggctggcctctcaccctgaggattttggctctgaggccaagggtcagcttgaccggcttgagagcttcttacttcagacagggtatgcagcagggaagggtgttggggggggcagcgctgacctcatccgcaatctccggtcccgggtggacccccaggcccccgaccttcctaagcccctggccctccccggcgatccccctgctgaccccacggatgtcctggtgttcctcgctgaccacttggccgaacagctgaccctgctagatgcggaactttttctcaatttgatcccctctcagtgcctgggaggcctgtggggtcacagagaccggccaggacattctcacctctgcccatctgtccgagctactgtcacacagtttaacaaggtggcaggggcagtggttagttctgtcctgggggctacttccactggagagggacctggggaggtgaccatacggccactccgtcccccacagagggcccggctcctggagaagtggatccgcgtggcagaggagtgccggctgctccgaaacttctcttcagtttatgccgtggtgtcagccctgcagtccagccccatccacaggcttcgggcagcctggggggaagcaaccagggacagcctcagagtcttttccagcctctgccagattttctccgaggaggataattattcccagagtcgggagctgctcgtgcaggaggtgaagctgcagtctcctctggagccacactccaagaaggccccgaggtctggctcccggggtgggggtgtggtcccataccttggcaccttcctgaaggaccttgtgatgctggatgcagcctccaaggatgagttggagaatggatacatcaattttgacaagcggaggaaggagtttgcagtcctttctgagttgcgacggctccagaatgaatgtcgtggctataacctccaacctgaccatgatatccagaggtggctacaggggctccggccactgacagaggctcagagccatcgtgtatcctgtgaggtggagccacctggttccagtgaccctcctgccccacgggtgcttcggccaacattggtcatctcgcagtggacagagtgagagattcactggctggggggtggtttcttgggacttccacttttctctgatcctcccaatctcctgccactgcagggttttgggctctgttggggtccctaccccgcttgtgtcctgtgaccggcccagtactgggggagatgaggcgcctacaactcctgctcctctgctgactcggctggcccagcacatgaagtggccatctgtctcgtcactagactctgccttggaaagcagtccatccctgcacagtccagctgaccccagccacctctccccaccagcctcctcccctaggccttctcgaggtcaccgccgctcagcctcctgtggctccccgctgagtgggggtgcagaagaggcctccggggggactggatatgggggagagggatctgggccaggggcctctgattgccgtatcatccgagtccagatggagttgggggaagatggcagtgtctataagagcattttggtgacaagccaggacaaggctccaagtgtcatcagtcgtgtccttaagaaaaacaatcgtgactctgcagtggcttcagagtatgagctggtacagctgctaccaggggagcgagagctgactatcccagcctcggctaatgtattctacgccatggatggagcttcacacgatttcctcctgcggcagcggcgaaggtcctctactgctacacctggcgtcaccagtggcccgtctgcctcaggaactcctccgagtgagggaggagggggctcctttcccaggatcaaggccacagggaggaagattgcacgggcactgttctgaggaggaagccccgttggcttacagaagtcatggtgttcataccagatgtgggtagccatcctgaatggtggcaattatatcacattgagacagaaattcagaaagggagccagccaccctggggcagtgaagtgccactggtttaccagacagctgagaaatccagccctgtgggaactggtgtcttataaccaagttggatacctgtgtatagcttcccaccttccatgagtgcagcacacaggtagtgctggaaaaacgcatcagtttctgattcttggccatatcctaacatgcaagggccaagcaaaggcttcaaggctctgagccccagggcagaggggaatggcaaaatgtaggtcctcgcaggagctcttcttcccactctgggggtttctatcactgtgacaacactaagataataaaccaaaacactacctgaattctactcccctgtccttgcagtacatatgaactggctgctatgagtgggggtggggaattggctgaaggtagatgccatggaacaggaaggggcacaatgttttctgtccccatgaacagagcaaaaagtgaggtattggtgaaaaaagtttcctcagaacagtttctctccagtaacctctctaccactggtcccttgctgcaaatgtgtataaaacaattttaggacaaggaaatggcagaacaactttatggacaacatataaacttgggaggacttataataccataaagcattacatgctgggattttaagtcagtttaaagctacattcaagcaaattctaggaagacagaggctgaaaagtactaatagagatgccagggctgttggcaaggagggtaaccacatttcatcctggggcctcaggttagagaactgtgtattctttttcaattaaaccgacattcctagca

SEQ ID NO: 359249 - DNA, 3848 bp, Homo sapiens
aacgcttcccgcgggagttttagccgtgttattgttggggaagggaatgtcaaattctgctcctgccttcccccaggggctggagactggaatctttattccagttcattgcgggtcgacgtggtctccagaatccccgagtgtagaggcggaggacagtggagctggggactcgggcgcctgggtcctggtccctgagcgtccagcgctcccctagtccgcggccctggctcctgtcctcacttccttccccttttggctcctgctctcggagcgggcggacgcgggggggagcggaaagggcgggagggcccaggagcccggcgggggggttcaagggggtacggaaaagccggggaggggactcggtccggggccggagaccgacggcaacagcggctcaggacccacgctgcccccacccctcccgagcaggcgcccccatggcccgaccccgctgattccttcactcggccatgctcccgcggcccctgcggctgcttttggacacgagcccccccgggggagtcgtactgagcagcttccgaagccgggaccccgaagagggtgggggcccaggtggcctggtcgtgggcggggggcaggaggaagaggaggaggaagaagaagaggcccctgtgtccgtctgggatgaggaggaggatggtgccgtgtttaccgtcacaagccgccaatatcgacctcttgatcccttggtccctatgcctcccccacgttcctcccgacggctccgagctggcactctggaggccctggtcagacacctactggatacccggacatcagggactgatgtgagcttcatgtcagccttcctggctacccaccgggccttcacctccacgcctgccttgctagggcttatggctgacaggctggaagcccttgaatctcatcctaccgacgaactagagaggacaacagaggtagccatctctgtactgtcaacctggctggcctctcaccctgaggattttggctctgaggccaagggtcagcttgaccggcttgagagcttcttacttcagacagggtatgcagcagggaagggtgttggggggggcagcgctgacctcatccgcaatctccggtcccgggtggacccccaggcccccgaccttcctaagcccctggccctccccggcgatccccctgctgaccccacggatgtcctggtgttcctcgctgaccacttggccgaacagctgaccctgctagatgcggaactttttctcaatttgatcccctctcagtgcctgggaggcctgtggggtcacagagaccggccaggacattctcacctctgcccatctgtccgagctactgtcacacagtttaacaaggtggcaggggcagtggttagttctgtcctgggggctacttccactggagagggacctggggaggtgaccatacggccactccgtcccccacagagggcccggctcctggagaagtggatccgcgtggcagaggagtgccggctgctccgaaacttctcttcagtttatgccgtggtgtcagccctgcagtccagccccatccacaggcttcgggcagcctggggggaagcaaccagggacagcctcagagtcttttccagcctctgccagattttctccgaggaggataattattcccagagtcgggagctgctcgtgcaggaggtgaagctgcagtctcctctggagccacactccaagaaggccccgaggtctggctcccggggtgggggtgtggtcccataccttggcaccttcctgaaggaccttgtgatgctggatgcagcctccaaggatgagttggagaatggatacatcaattttgacaagcggaggaaggtgagcggagtgtctgggctggatgctggacttccctatccatgttccaggaaggggagggggaaaagtcaggggtccctgagttttggctcctgcagtttgagggctccttcccaggagtttgcagtcctttctgagttgcgacggctccagaatgaatgtcgtggctataacctccaacctgaccatgatatccagaggtggctacaggggctccggccactgacagaggctcagagccatcgtgtatcctgtgaggtggagccacctggttccagtgaccctcctgccccacgggtgcttcggccaacattggtcatctcgcagtggacagaggttttgggctctgttggggtccctaccccgcttgtgtcctgtgaccggcccagtactgggggagatgaggcgcctacaactcctgctcctctgctgactcggctggcccagcacatgaagtggccatctgtctcgtcactagactctgccttggaaagcagtccatccctgcacagtccagctgaccccagccacctctccccaccagcctcctcccctaggccttctcgaggtcaccgccgctcagcctcctgtggctccccgctgagtgggggtgcagaagaggcctccggggggactggatatgggggagagggatctgggccaggggcctctgattgccgtatcatccgagtccagatggagttgggggaagatggcagtgtctataagagcattttggtgacaagccaggacaaggctccaagtgtcatcagtcgtgtccttaagaaaaacaatcgtgactctgcagtggcttcagagtatgagctggtacagctgctaccaggggagcgagagctgactatcccagcctcggctaatgtattctacgccatggatggagcttcacacgatttcctcctgcggcagcggcgaaggtcctctactgctacacctggcgtcaccagtggcccgtctgcctcaggaactcctccgagtgagggaggagggggctcctttcccaggatcaaggccacagggaggaagattgcacgggcactgttctgaggaggaagccccgttggcttacagaagtcatggtgttcataccagatgtgggtagccatcctgaatggtggcaattatatcacattgagacagaaattcagaaagggagccagccaccctggggcagtgaagtgccactggtttaccagacagctgagaaatccagccctgtgggaactggtgtcttataaccaagttggatacctgtgtatagcttcccaccttccatgagtgcagcacacaggtagtgctggaaaaacgcatcagtttctgattcttggccatatcctaacatgcaagggccaagcaaaggcttcaaggctctgagccccagggcagaggggaatggcaaaatgtaggtcctcgcaggagctcttcttcccactctgggggtttctatcactgtgacaacactaagataataaaccaaaacactacctgaattctactcccctgtccttgcagtacatatgaactggctgctatgagtgggggtggggaattggctgaaggtagatgccatggaacaggaaggggcacaatgttttctgtccccatgaacagagcaaaaagtgaggtattggtgaaaaaagtttcctcagaacagtttctctccagtaacctctctaccactggtcccttgctgcaaatgtgtataaaacaattttaggacaaggaaatggcagaacaactttatggacaacatataaacttgggaggacttataataccataaagcattacatgctgggattttaagtcagtttaaagctacattcaagcaaattctaggaagacagaggctgaaaagtactaatagagatgccagggctgttggcaaggagggtaaccacatttcatcctggggcctcaggttagagaactgtgtattctttttcaattaaaccgacattcctagca

SEQ ID NO: 359250 - DNA, 3750 bp, Homo sapiens
aacgcttcccgcgggagttttagccgtgttattgttggggaagggaatgtcaaattctgctcctgccttcccccaggggctggagactggaatctttattccagttcattgcgggtcgacgtggtctccagaatccccgagtgtagaggcggaggacagtggagctggggactcgggcgcctgggtcctggtccctgagcgtccagcgctcccctagtccgcggccctggctcctgtcctcacttccttccccttttggctcctgctctcggagcgggcggacgcgggggggagcggaaagggcgggagggcccaggagcccggcgggggggttcaagggggtacggaaaagccggggaggggactcggtccggggccggagaccgacggcaacagcggctcaggacccacgctgcccccacccctcccgagcaggcgcccccatggcccgaccccgctgattccttcactcggccatgctcccgcggcccctgcggctgcttttggacacgagcccccccgggggagtcgtactgagcagcttccgaagccgggaccccgaagagggtgggggcccaggtggcctggtcgtgggcggggggcaggaggaagaggaggaggaagaagaagaggcccctgtgtccgtctgggatgaggaggaggatggtgccgtgtttaccgtcacaagccgccaatatcgacctcttgatcccttggtccctatgcctcccccacgttcctcccgacggctccgagctggcactctggaggccctggtcagacacctactggatacccggacatcagggactgatgtgagcttcatgtcagccttcctggctacccaccgggccttcacctccacgcctgccttgctagggcttatggctgacaggctggaagcccttgaatctcatcctaccgacgaactagagaggacaacagaggtagccatctctgtactgtcaacctggctggcctctcaccctgaggattttggctctgaggccaagggtcagcttgaccggcttgagagcttcttacttcagacagggtatgcagcagggaagggtgttggggggggcagcgctgacctcatccgcaatctccggtcccgggtggacccccaggcccccgaccttcctaagcccctggccctccccggcgatccccctgctgaccccacggatgtcctggtgttcctcgctgaccacttggccgaacagctgaccctgctagatgcggaactttttctcaatttgatcccctctcagtgcctgggaggcctgtggggtcacagagaccggccaggacattctcacctctgcccatctgtccgagctactgtcacacagtttaacaaggtggcaggggcagtggttagttctgtcctgggggctacttccactggagagggacctggggaggtgaccatacggccactccgtcccccacagagggcccggctcctggagaagtggatccgcgtggcagaggagtgccggctgctccgaaacttctcttcagtttatgccgtggtgtcagccctgcagtccagccccatccacaggcttcgggcagcctggggggaagcaaccagggacagcctcagagtcttttccagcctctgccagattttctccgaggaggataattattcccagagtcgggagctgctcgtgcaggaggtgaagctgcagtctcctctggagccacactccaagaaggccccgaggtctggctcccggggtgggggtgtggtcccataccttggcaccttcctgaaggaccttgtgatgctggatgcagcctccaaggatgagttggagaatggatacatcaattttgacaagcggaggaagtttgagggctccttcccaggagtttgcagtcctttctgagttgcgacggctccagaatgaatgtcgtggctataacctccaacctgaccatgatatccagaggtggctacaggggctccggccactgacagaggctcagagccatcgtgtatcctgtgaggtggagccacctggttccagtgaccctcctgccccacgggtgcttcggccaacattggtcatctcgcagtggacagaggttttgggctctgttggggtccctaccccgcttgtgtcctgtgaccggcccagtactgggggagatgaggcgcctacaactcctgctcctctgctgactcggctggcccagcacatgaagtggccatctgtctcgtcactagactctgccttggaaagcagtccatccctgcacagtccagctgaccccagccacctctccccaccagcctcctcccctaggccttctcgaggtcaccgccgctcagcctcctgtggctccccgctgagtgggggtgcagaagaggcctccggggggactggatatgggggagagggatctgggccaggggcctctgattgccgtatcatccgagtccagatggagttgggggaagatggcagtgtctataagagcattttggtgacaagccaggacaaggctccaagtgtcatcagtcgtgtccttaagaaaaacaatcgtgactctgcagtggcttcagagtatgagctggtacagctgctaccaggggagcgagagctgactatcccagcctcggctaatgtattctacgccatggatggagcttcacacgatttcctcctgcggcagcggcgaaggtcctctactgctacacctggcgtcaccagtggcccgtctgcctcaggaactcctccgagtgagggaggagggggctcctttcccaggatcaaggccacagggaggaagattgcacgggcactgttctgaggaggaagccccgttggcttacagaagtcatggtgttcataccagatgtgggtagccatcctgaatggtggcaattatatcacattgagacagaaattcagaaagggagccagccaccctggggcagtgaagtgccactggtttaccagacagctgagaaatccagccctgtgggaactggtgtcttataaccaagttggatacctgtgtatagcttcccaccttccatgagtgcagcacacaggtagtgctggaaaaacgcatcagtttctgattcttggccatatcctaacatgcaagggccaagcaaaggcttcaaggctctgagccccagggcagaggggaatggcaaaatgtaggtcctcgcaggagctcttcttcccactctgggggtttctatcactgtgacaacactaagataataaaccaaaacactacctgaattctactcccctgtccttgcagtacatatgaactggctgctatgagtgggggtggggaattggctgaaggtagatgccatggaacaggaaggggcacaatgttttctgtccccatgaacagagcaaaaagtgaggtattggtgaaaaaagtttcctcagaacagtttctctccagtaacctctctaccactggtcccttgctgcaaatgtgtataaaacaattttaggacaaggaaatggcagaacaactttatggacaacatataaacttgggaggacttataataccataaagcattacatgctgggattttaagtcagtttaaagctacattcaagcaaattctaggaagacagaggctgaaaagtactaatagagatgccagggctgttggcaaggagggtaaccacatttcatcctggggcctcaggttagagaactgtgtattctttttcaattaaaccgacattcctagca

SEQ ID NO: 359251 - DNA, 3956 bp, Homo sapiens
aacgcttcccgcgggagttttagccgtgttattgttggggaagggaatgtcaaattctgctcctgccttcccccaggggctggagactggaatctttattccagttcattgcgggtcgacgtggtctccagaatccccgagtgtagaggcggaggacagtggagctggggactcgggcgcctgggtcctggtccctgagcgtccagcgctcccctagtccgcggccctggctcctgtcctcacttccttccccttttggctcctgctctcggagcgggcggacgcgggggggagcggaaagggcgggagggcccaggagcccggcgggggggttcaagggggtacggaaaagccggggaggggactcggtccggggccggagaccgacggcaacagcggctcaggacccacgctgcccccacccctcccgagcaggcgcccccatggcccgaccccgctgattccttcactcggccatgctcccgcggcccctgcggctgcttttggacacgagcccccccgggggagtcgtactgagcagcttccgaagccgggaccccgaagagggtgggggcccaggtggcctggtcgtgggcggggggcaggaggaagaggaggaggaagaagaagaggcccctgtgtccgtctgggatgaggaggaggatggtgccgtgtttaccgtcacaagccgccaatatcgacctcttgatcccttggtccctatgcctcccccacgttcctcccgacggctccgagctggcactctggaggccctggtcagacacctactggatacccggacatcagggactgatgtgagcttcatgtcagccttcctggctacccaccgggccttcacctccacgcctgccttgctagggcttatggctgacaggctggaagcccttgaatctcatcctaccgacgaactagagaggacaacagaggtagccatctctgtactgtcaacctggctggcctctcaccctgaggattttggctctgaggccaagggtcagcttgaccggcttgagagcttcttacttcagacagggtatgcagcagggaagggtgttggggggggcagcgctgacctcatccgcaatctccggtcccgggtggacccccaggcccccgaccttcctaagcccctggccctccccggcgatccccctgctgaccccacggatgtcctggtgttcctcgctgaccacttggccgaacagctgaccctgctagatgcggaactttttctcaatttgatcccctctcagtgcctgggaggcctgtggggtcacagagaccggccaggacattctcacctctgcccatctgtccgagctactgtcacacagtttaacaaggtggcaggggcagtggttagttctgtcctgggggctacttccactggagagggacctggggaggtgaccatacggccactccgtcccccacagagggcccggctcctggagaagtggatccgcgtggcagaggagtgccggctgctccgaaacttctcttcagtttatgccgtggtgtcagccctgcagtccagccccatccacaggcttcgggcagcctggggggaagcaaccagggacagcctcagagtcttttccagcctctgccagattttctccgaggaggataattattcccagagtcgggagctgctcgtgcaggaggtgaagctgcagtctcctctggagccacactccaagaaggccccgaggtctggctcccggggtgggggtgtggtcccataccttggcaccttcctgaaggaccttgtgatgctggatgcagcctccaaggatgagttggagaatggatacatcaattttgacaagcggaggaaggagtttgcagtcctttctgagttgcgacggctccagaatgaatgtcgtggctataacctccaacctgaccatgatatccagaggtggctacaggggctccggccactgacagaggctcagagccatcgtgtatcctgtgaggtggagccacctggttccagtgaccctcctgccccacgggtgcttcggccaacattggtcatctcgcagtggacagaggttttgggctctgttggggtccctaccccgcttgtgtcctgtgaccggcccagtactgggggagatgaggcgcctacaactcctgctcctctgctgactcggctggcccagcacatgaagtggccatctgtctcgtcactagactctgccttggaaagcagtccatccctgcacagtccagctgaccccagccacctctccccaccagcctcctcccctaggccttctcgaggtcaccgccgctcagcctcctgtggctccccgctgagtgggggtgcagaagaggcctccggggggactggatatgggggagagggatctgggccaggggcctctgattgccgtatcatccgagtccagatggagttgggggaagatggcagtgtctataagagcattttggtgacaagccaggacaaggctccaagtgtcatcagtcgtgtccttaagaaaaacaatcgtgactctgcagtggcttcagagtatgagctggtacagctgctaccaggggagcgagagctgactatcccagcctcggctaatgtattctacgccatggatggagcttcacacgatttcctcctgcggcagcggcgaaggtcctctactgctacacctggcgtcaccagtggcccgtctgcctcaggaactcctccgagtgagggaggagggggctcctttcccaggatcaaggccacagggaggaagattgcacgggcactgttctgaggaggaagccccgttggcttacagaagtcatggtgttcataccagatgtgggtagccatcctgaatggtggcaattatatcacattgagacagaaattcagaaagggagccagccaccctggggcagtgaagtgccactggtttaccagacagctgagaaatccagccctgtgggaactggtgtcttataaccaagttggatacctgtgtatagcttcccaccttccatgagtgcagcacacaggtagtgctggaaaaacgcatcagtttctgattcttggccatatcctaacatgcaagggccaagcaaaggcttcaaggctctgagccccagggcagaggggaatggcaaaatgtaggtcctcgcaggagctcttcttcccactctgggggtttctatcactgtgacaacactaagataataaaccaaaacactacctgaaaaaaaaacaaaaaaaaaaaaaaaaaaaaaaaaaaaaaaaaaaaaaaaaaaaaaaaaaaaaaaaaaaaaaaaaaaaaaaaaaaaaaaaaaaaaaaaaaaaaaaaaagggggggggggcggcggcgaacaactctcctccccacggggcggcgcgcgacacccgacgccgacccagcacgcattgaggaagcagagacggagcgcaccccaccacaggggagcggagtctattattagaacggaaagagagagcgagagagacgcgcacgcgaggagcgcacagagaacagagcacaaaacgaaggagagcggaggcgcgtacgaacgcgcaagcgcacatgcgaggaagggagtgttgcggcgggagggagagaggagagagagcgcacacggagcgaccgcggaggggaggagcagagcgagcagagaagtcacagagggcgagcgacacaccgagaaacacccgccacacccgcgagcgcggcgcgggaaacgacaaacacagaggggtgagagggtgtgaggagaggggagggtagagtaaatggagaggagtatagaagtgggaggggaggagtatgagggtggaatgattatgattcgaagctggaggagtggtggattgaaagagatgtagagaggtggtgatggatttgagcaggtttggagggtaggactggtggcgggaggaagagggggaggat

SEQ ID NO: 359252 - DNA, 3756 bp, Homo sapiens
aacgcttcccgcgggagttttagccgtgttattgttggggaagggaatgtcaaattctgctcctgccttcccccaggggctggagactggaatctttattccagttcattgcgggtcgacgtggtctccagaatccccgagtgtagaggcggaggacagtggagctggggactcgggcgcctgggtcctggtccctgagcgtccagcgctcccctagtccgcggccctggctcctgtcctcacttccttccccttttggctcctgctctcggagcgggcggacgcgggggggagcggaaagggcgggagggcccaggagcccggcgggggggttcaagggggtacggaaaagccggggaggggactcggtccggggccggagaccgacggcaacagcggctcaggacccacgctgcccccacccctcccgagcaggcgcccccatggcccgaccccgctgattccttcactcggccatgctcccgcggcccctgcggctgcttttggacacgagcccccccgggggagtcgtactgagcagcttccgaagccgggaccccgaagagggtgggggcccaggtggcctggtcgtgggcggggggcaggaggaagaggaggaggaagaagaagaggcccctgtgtccgtctgggatgaggaggaggatggtgccgtgtttaccgtcacaagccgccaatatcgacctcttgatcccttggtccctatgcctcccccacgttcctcccgacggctccgagctggcactctggaggccctggtcagacacctactggatacccggacatcagggactgatgtgagcttcatgtcagccttcctggctacccaccgggccttcacctccacgcctgccttgctagggcttatggctgacaggctggaagcccttgaatctcatcctaccgacgaactagagaggacaacagaggtagccatctctgtactgtcaacctggctggcctctcaccctgaggattttggctctgaggccaagggtcagcttgaccggcttgagagcttcttacttcagacagggtatgcagcagggaagggtgttggggggggcagcgctgacctcatccgcaatctccggtcccgggtggacccccaggcccccgaccttcctaagcccctggccctccccggcgatccccctgctgaccccacggatgtcctggtgttcctcgctgaccacttggccgaacagctgaccctgctagatgcggaactttttctcaatttgatcccctctcagtgcctgggaggcctgtggggtcacagagaccggccaggacattctcacctctgcccatctgtccgagctactgtcacacagtttaacaaggtggcaggggcagtggttagttctgtcctgggggctacttccactggagagggacctggggaggtgaccatacggccactccgtcccccacagagggcccggctcctggagaagtggatccgcgtggcagaggagtgccggctgctccgaaacttctcttcagtttatgccgtggtgtcagccctgcagtccagccccatccacaggcttcgggcagcctggggggaagcaaccagggacagcctcagagtcttttccagcctctgccagattttctccgaggaggataattattcccagagtcgggagctgctcgtgcaggaggtgaagctgcagtctcctctggagccacactccaagaaggccccgaggtctggctcccggggtgggggtgtggtcccataccttggcaccttcctgaaggaccttgtgatgctggatgcagcctccaaggatgagttggagaatggatacatcaattttgacaagcggaggaaggagtttgcagtcctttctgagttgcgacggctccagaatgaatgtcgtggctataacctccaacctgaccatgatatccagaggtggctacaggggctccggccactgacagaggctcagagccatcgtgtatcctgtgaggtggagccacctggttccagtgaccctcctgccccacgggtgcttcggccaacattggtcatctcgcagtggacagagtgagagattcactggctggggggtggtttcttgggacttccacttttctctgatcctcccaatctcctgccactgcagggttttgggctctgttggggtccctaccccgcttgtgtcctgtgaccggcccagtactgggggagatgaggcgcctacaactcctgctcctctgctgactcggctggcccagcacatgaagtggccatctgtctcgtcactagactctgccttggaaagcagtccatccctgcacagtccagctgaccccagccacctctccccaccagcctcctcccctaggccttctcgaggtcaccgccgctcagcctcctgtggctccccgctgagtgggggtgcagaagaggcctccggggggactggatatgggggagagggatctgggccaggggcctctgattgccgtatcatccgagtccagatggagttgggggaagatggcagtgtctataagagcattttggtgacaagccaggacaaggctccaagtgtcatcagtcgtgtccttaagaaaaacaatcgtgactctgcagtggcttcagagtatgagctggtacagctgctaccaggggagcgagagctgactatcccagcctcggctaatgtattctacgccatggatggagcttcacacgatttcctcctgcggcagcggcgaaggtcctctactgctacacctggcgtcaccagtggcccgtctgcctcaggaactcctccgagtgagggaggagggggctcctttcccaggatcaaggccacagggaggaagattgcacgggcactgttctgaggaggaagccccgttggcttacagaagtcatggtgttcataccagatgtgggtagccatcctgaatggtggcaattatatcacattgagacagaaattcagaaagggagccagccaccctggggcagtgaagtgccactggtttaccagacagctgagaaatccagccctgtgggaactggtgtcttataaccaagttggatacctgtgtatagcttcccaccttccatgagtgcagcacacaggtagtgctggaaaaacgcatcagtttctgattcttggccatatcctaacatgcaagggccaagcaaaggcttcaaggctctgagccccagggcagaggggaatggcaaaatgtaggtcctcgcaggagctcttcttcccactctgggggtttctatcactgtgacaacactaagataataaaccctatgagtgggggtggggaattggctgaaggtagatgccatggaacaggaaggggcacaatgttttctgtccccatgaacagagcaaaaagtgaggtattggtgaaaaaagtttcctcagaacagtttctctccagtaacctctctaccactggtcccttgctgcaaatgtgtataaaacaattttaggacaaggaaatggcagaacaactttatggacaacatataaacttgggaggacttataataccataaagcattacatgctgggattttaagtcagtttaaagctacattcaagcaaattctaggaagacagaggctgaaaagtactaatagagatgccagggctgttggcaaggagggtaaccacatttcatcctggggcctcaggttagagaactgtgtattctttttcaattaaaccgacattcctagca

SEQ ID NO: 359253 - DNA, 3450 bp, Homo sapiens
aacgcttcccgcgggagttttagccgtgttattgttggggaagggaatgtcaaattctgctcctgccttcccccaggggctggagactggaatctttattccagttcattgcgggtcgacgtggtctccagaatccccgagtgtagaggcggaggacagtggagctggggactcgggcgcctgggtcctggtccctgagcgtccagcgctcccctagtccgcggccctggctcctgtcctcacttccttccccttttggctcctgctctcggagcgggcggacgcgggggggagcggaaagggcgggagggcccaggagcccggcgggggggttcaagggggtacggaaaagccggggaggggactcggtccggggccggagaccgacggcaacagcggctcaggacccacgctgcccccacccctcccgagcaggcgcccccatggcccgaccccgctgattccttcactcggccatgctcccgcggcccctgcggctgcttttggacacgagcccccccgggggagtcgtactgagcagcttccgaagccgggaccccgaagagggtgggggcccaggtggcctggtcgtgggcggggggcaggaggaagaggaggaggaagaagaagaggcccctgtgtccgtctgggatgaggaggaggatggtgccgtgtttaccgtcacaagccgccaatatcgacctcttgatcccttggtccctatgcctcccccacgttcctcccgacggctccgagctggcactctggaggccctggtcagacacctactggatacccggacatcagggactgatgtgagcttcatgtcagccttcctggctacccaccgggccttcacctccacgcctgccttgctagggcttatggctgacaggctggaagcccttgaatctcatcctaccgacgaactagagaggacaacagaggtagccatctctgtactgtcaacctggctggcctctcaccctgaggattttggctctgaggccaagggtcagcttgaccggcttgagagcttcttacttcagacagggtatgcagcagggaagggtgttggggggggcagcgctgacctcatccgcaatctccggtcccgggtggacccccaggcccccgaccttcctaagcccctggccctccccggcgatccccctgctgaccccacggatgtcctggtgttcctcgctgaccacttggccgaacagctgaccctgctagatgcggaactttttctcaatttgatcccctctcagtgcctgggaggcctgtggggtcacagagaccggccaggacattctcacctctgcccatctgtccgagctactgtcacacagtttaacaaggtggcaggggcagtggttagttctgtcctgggggctacttccactggagagggacctggggaggtgaccatacggccactccgtcccccacagagggcccggctcctggagaagtggatccgcgtggcagaggagtgccggctgctccgaaacttctcttcagtttatgccgtggtgtcagccctgcagtccagccccatccacaggcttcgggcagcctggggggaagcaaccagggacagcctcagagtcttttccagcctctgccagattttctccgaggaggataattattcccagagtcgggagctgctcgtgcaggaggtgaagctgcagtctcctctggagccacactccaagaaggccccgaggtctggctcccggggtgggggtgtggtcccataccttggcaccttcctgaaggaccttgtgatgctggatgcagcctccaaggatgagttggagaatggatacatcaattttgacaagcggaggaaggagtttgcagtcctttctgagttgcgacggctccagaatgaatgtcgtggctataacctccaacctgaccatgatatccagaggtggctacaggggctccggccactgacagaggctcagagccatcgtgtatcctgtgaggtggagccacctggttccagtgaccctcctgccccacgggtgcttcggccaacattggtcatctcgcagtggacagaggttttgggctctgttggggtccctaccccgcttgtgtcctgtgaccggcccagtactgggggagatgaggcgcctacaactcctgctcctctgctgactcggctggcccagcacatgaagtggccatctgtctcgtcactagactctgccttggaaagcagtccatccctgcacagtccagctgaccccagccacctctccccaccagcctcctcccctaggccttctcgaggtcaccgccgctcagcctcctgtggctccccgctgagtgggggtgcagaagaggcctccggggggactggatatgggggagagggatctgggccaggggcctctgattgccgtatcatccgagtccagatggagttgggggaagatggcagtgtctataagagcattttggtgacaagccaggacaaggctccaagtgtcatcagtcgtgtccttaagaaaaacaatcgtgaagctgactatcccagcctcggctaatgtattctacgccatggatggagcttcacacgatttcctcctgcggcagcggcgaaggtcctctactgctacacctggcgtcaccatgaagtgccactggtttaccagacagctgagaaatccagccctgtgggaactggtgtcttataaccaagttggatacctgtgtatagcttcccaccttccatgagtgcagcacacaggtagtgctggaaaaacgcatcagtttctgattcttggccatatcctaacatgcaagggccaagcaaaggcttcaaggctctgagccccagggcagaggggaatggcaaaatgtaggtcctcgcaggagctcttcttcccactctgggggtttctatcactgtgacaacactaagataataaaccaaaacactacctgaattctactcccctgtccttgcagtacatatgaactggctgctatgagtgggggtggggaattggctgaaggtagatgccatggaacaggaaggggcacaatgttttctgtccccatgaacagagcaaaaagtgaggtattggtgaaaaaagtttcctcagaacagtttctctccagtaacctctctaccactggtcccttgctgcaaatgtgtataaaacaattttaggacaaggaaatggcagaacaactttatggacaacatataaacttgggaggacttataataccataaagcattacatgctgggattttaagtcagtttaaagctacattcaagcaaattctaggaagacagaggctgaaaagtactaatagagatgccagggctgttggcaaggagggtaaccacatttcatcctggggcctcaggttagagaactgtgtattctttttcaattaaaccgacattcctagca

SEQ ID NO: 359254 - DNA, 476 bp, Homo sapiens
ggctccagaatgaatgtcgtggctataacctccaacctgaccatgatatccagaggtggctacaggggctccggccactgacagaggctcagaggtgactggcgggtgaggttgggactccagggttctggccaggtgtgggggattggtgtcatgtcctgagctctgcctattgcccccctaacccagccatcgtgtatcctgtgaggtggagccacctggttccagtgaccctcctgccccacgggtgcttcggccaacattggtcatctcgcagtggacagagtgagagattcactggctggggggtggtttcttgggacttccacttttctctgatcctcccaatctcctgccactgcagggttttgggctctgttggggtccctaccccgcttgtgtcctgtgaccggcccagtactgggggagatgaggcgcctacaactcctgctcctctgctgactcggctggcccag

SEQ ID NO: 359255 - DNA, 3455 bp, Homo sapiens
accaagggcccccctattccacccttctgttgccccctcccccaaccttcctgcagaactcccttccggtcttcttgacacccacccacgtcccttccctgcccggttcccccgcgcctgcctgactctccacccccaccccaccccgtctctccccaggcgcccccatggcccgaccccgctgattccttcactcggccatgctcccgcggcccctgcggctgcttttggacacgagcccccccgggggagtcgtactgagcagcttccgaagccgggaccccgaagagggtgggggcccaggtggcctggtcgtgggcggggggcaggaggaagaggaggaggaagaagaagaggcccctgtgtccgtctgggatgaggaggaggatggtgccgtgtttaccgtcacaagccgccaatatcgacctcttgatcccttggtccctatgcctcccccacgttcctcccgacggctccgagctggcactctggaggccctggtcagacacctactggatacccggacatcagggactgatgtgagcttcatgtcagccttcctggctacccaccgggccttcacctccacgcctgccttgctagggcttatggctgacaggctggaagcccttgaatctcatcctaccgacgaactagagaggacaacagaggtagccatctctgtactgtcaacctggctggcctctcaccctgaggattttggctctgaggccaagggtcagcttgaccggcttgagagcttcttacttcagacagggtatgcagcagggaagggtgttggggggggcagcgctgacctcatccgcaatctccggtcccgggtggacccccaggcccccgaccttcctaagcccctggccctccccggcgatccccctgctgaccccacggatgtcctggtgttcctcgctgaccacttggccgaacagctgaccctgctagatgcggaactttttctcaatttgatcccctctcagtgcctgggaggcctgtggggtcacagagaccggccaggacattctcacctctgcccatctgtccgagctactgtcacacagtttaacaaggtggcaggggcagtggttagttctgtcctgggggctacttccactggagagggacctggggaggtgaccatacggccactccgtcccccacagagggcccggctcctggagaagtggatccgcgtggcagaggagtgccggctgctccgaaacttctcttcagtttatgccgtggtgtcagccctgcagtccagccccatccacaggcttcgggcagcctggggggaagcaaccagggacagcctcagagtcttttccagcctctgccagattttctccgaggaggataattattcccagagtcgggagctgctcgtgcaggaggtgaagctgcagtctcctctggagccacactccaagaaggccccgaggtctggctcccggggtgggggtgtggtcccataccttggcaccttcctgaaggaccttgtgatgctggatgcagcctccaaggatgagttggagaatggatacatcaattttgacaagcggaggaaggagtttgcagtcctttctgagttgcgacggctccagaatgaatgtcgtggctataacctccaacctgaccatgatatccagaggtggctacaggggctccggccactgacagaggctcagagccatcgtgtatcctgtgaggtggagccacctggttccagtgaccctcctgccccacgggtgcttcggccaacattggtcatctcgcagtggacagaggttttgggctctgttggggtccctaccccgcttgtgtcctgtgaccggcccagtactgggggagatgaggcgcctacaactcctgctcctctgctgactcggctggcccagcacatgaagtggccatctgtctcgtcactagactctgccttggaaagcagtccatccctgcacagtccagctgaccccagccacctctccccaccagcctcctcccctaggccttctcgaggtcaccgccgctcagcctcctgtggctccccgctgagtgggggtgcagaagaggcctccggggggactggatatgggggagagggatctgggccaggggcctctgattgccgtatcatccgagtccagatggagttgggggaagatggcagtgtctataagagcattttggtgacaagccaggacaaggctccaagtgtcatcagtcgtgtccttaagaaaaacaatcgtgactctgcagtggcttcagagtatgagctggtacagctgctaccaggggagcgagagctgactatcccagcctcggctaatgtattctacgccatggatggagcttcacacgatttcctcctgcggcagcggcgaaggtcctctactgctacacctggcgtcaccagtggcccgtctgcctcaggaactcctccgagtgagggaggagggggctcctttcccaggatcaaggccacagggaggaagattgcacgggcactgttctgaggaggaagccccgttggcttacagaagtcatggtgttcataccagatgtgggtagccatcctgaatggtggcaattatatcacattgagacagaaattcagaaagggagccagccaccctggggcagtgaagtgccactggtttaccagacagctgagaaatccagccctgtgggaactggtgtcttataaccaagttggatacctgtgtatagcttcccaccttccatgagtgcagcacacaggtagtgctggaaaaacgcatcagtttctgattcttggccatatcctaacatgcaagggccaagcaaaggcttcaaggctctgagccccagggcagaggggaatggcaaaatgtaggtcctcgcaggagctcttcttcccactctgggggtttctatcactgtgacaacactaagataataaaccaaaacactacctgaattctactcccctgtccttgcagtacatatgaactggctgctatgagtgggggtggggaattggctgaaggtagatgccatggaacaggaaggggcacaatgttttctgtccccatgaacagagcaaaaagtgaggtattggtgaaaaaagtttcctcagaacagtttctctccagtaacctctctaccactggtcccttgctgcaaatgtgtataaaacaattttaggacaaggaaatggcagaacaactttatggacaacatataaacttgggaggacttataataccataaagcattacatgctgggattttaagtcagtttaaagctacattcaagcaaattctaggaagacagaggctgaaaagtactaatagagatgccagggctgttggcaaggagggtaaccacatttcatcctggggcctcaggttagagaactgtgtattctttttcaattaaaccgacattcctagca

SEQ ID NO: 359256 - DNA, 4004 bp, Homo sapiens
  misc_feature (634)..(636): n is a, c, g, or t
  misc_feature (642)..(643): n is a, c, g, or t
  misc_feature (657)..(658): n is a, c, g, or t
  misc_feature (700)..(700): n is a, c, g, or t
  misc_feature (702)..(702): n is a, c, g, or t
  misc_feature (706)..(706): n is a, c, g, or t
  misc_feature (708)..(708): n is a, c, g, or t
  misc_feature (710)..(710): n is a, c, g, or t
aacgcttcccgcgggagttttagccgtgttattgttggggaagggaatgtcaaattctgctcctgccttcccccaggggctggagactggaatctttattccagttcattgcgggtcgacgtggtctccagaatccccgagtgtagaggcggaggacagtggagctggggactcgggcgcctgggtcctggtccctgagcgtccagcgctcccctagtccgcggccctggctcctgtcctcacttccttccccttttggctcctgctctcggagcgggcggacgcgggggggagcggaaagggcgggagggcccaggagcccggcgggggggttcaagggggtacggaaaagccggggaggggactcggtccggggccggagaccgacggcaacagcggctcaggacccacgctgcccccacccctcccgagcaggcgcccccatggcccgaccccgctgattccttcactcggccatgctcccgcggcccctgcggctgcttttggacacgagcccccccgggggagtcgtactgagcagcttccgaagccgggaccccgaagagggtgggggcccaggtggcctggtcgtgggcggggggcaggaggaagaggaggaggaagaagaagagcnnntgtgtnngtttgtggattatnnttttttttttttttttttttttttttatatatattttttttntntttntntnttgatcccttggtccctatgcctcccccacgttcctcccgacggctccgagctggcactctggaggccctggtcagacacctactggatacccggacatcagggactgatgtgagcttcatgtcagccttcctggctacccaccgggccttcacctccacgcctgccttgctagggcttatggctgacaggctggaagcccttgaatctcatcctaccgacgaactagagaggacaacagaggtagccatctctgtactgtcaacctggctggcctctcaccctgaggattttggctctgaggccaagggtcagcttgaccggcttgagagcttcttacttcagacagggtatgcagcagggaagggtgttggggggggcagcgctgacctcatccgcaatctccggtcccgggtggacccccaggcccccgaccttcctaagcccctggccctccccggcgatccccctgctgaccccacggatgtcctggtgttcctcgctgaccacttggccgaacagctgaccctgctagatgcggtgagaccctgacctctggcccctatgccccctgaccccttactaacctctccttgactccagatcctttccttgcttccaccccttcctgatccagctcctagcctcctccacctaccattttgattctccccttttccctttggtcgttacccttcaaaccctgtgcccctctggttccttggccacctgagatcctcagatccctgatattggaaggctgacctcacttgactatgaactttaacctctgacctctaccctgcaggaactttttctcaatttgatcccctctcagtgcctgggaggcctgtggggtcacagagaccggccaggacattctcacctctgcccatctgtccgagctactgtcacacagtttaacaaggtggcaggggcagtggttagttctgtcctgggggctacttccactggagagggacctggggaggtgaccatacggccactccgtcccccacagagggcccggctcctggagaagtggatccgcgtggcagaggagtgccggctgctccgaaacttctcttcagtttatgccgtggtgtcagccctgcagtccagccccatccacaggcttcgggcagcctggggggaagcaaccagggacagcctcagagtcttttccagcctctgccagattttctccgaggaggataattattcccagagtcgggagctgctcgtgcaggaggtgaagctgcagtctcctctggagccacactccaagaaggccccgaggtctggctcccggggtgggggtgtggtcccataccttggcaccttcctgaaggaccttgtgatgctggatgcagcctccaaggatgagttggagaatggatacatcaattttgacaagcggaggaaggagtttgcagtcctttctgagttgcgacggctccagaatgaatgtcgtggctataacctccaacctgaccatgatatccagaggtggctacaggggctccggccactgacagaggctcagagccatcgtgtatcctgtgaggtggagccacctggttccagtgaccctcctgccccacgggtgcttcggccaacattggtcatctcgcagtggacagaggttttgggctctgttggggtccctaccccgcttgtgtcctgtgaccggcccagtactgggggagatgaggcgcctacaactcctgctcctctgctgactcggctggcccagcacatgaagtggccatctgtctcgtcactagactctgccttggaaagcagtccatccctgcacagtccagctgaccccagccacctctccccaccagcctcctcccctaggccttctcgaggtcaccgccgctcagcctcctgtggctccccgctgagtgggggtgcagaagaggcctccggggggactggatatgggggagagggatctgggccaggggcctctgattgccgtatcatccgagtccagatggagttgggggaagatggcagtgtctataagagcattttggtgacaagccaggacaaggctccaagtgtcatcagtcgtgtccttaagaaaaacaatcgtgactctgcagtggcttcagagtatgagctggtacagctgctaccaggggagcgagagctgactatcccagcctcggctaatgtattctacgccatggatggagcttcacacgatttcctcctgcggcagcggcgaaggtcctctactgctacacctggcgtcaccagtggcccgtctgcctcaggaactcctccgagtgagggaggagggggctcctttcccaggatcaaggccacagggaggaagattgcacgggcactgttctgaggaggaagccccgttggcttacagaagtcatggtgttcataccagatgtgggtagccatcctgaatggtggcaattatatcacattgagacagaaattcagaaagggagccagccaccctggggcagtgaagtgccactggtttaccagacagctgagaaatccagccctgtgggaactggtgtcttataaccaagttggatacctgtgtatagcttcccaccttccatgagtgcagcacacaggtagtgctggaaaaacgcatcagtttctgattcttggccatatcctaacatgcaagggccaagcaaaggcttcaaggctctgagccccagggcagaggggaatggcaaaatgtaggtcctcgcaggagctcttcttcccactctgggggtttctatcactgtgacaacactaagataataaaccaaaacactacctgaattctactcccctgtccttgcagtacatatgaactggctgctatgagtgggggtggggaattggctgaaggtagatgccatggaacaggaaggggcacaatgttttctgtccccatgaacagagcaaaaagtgaggtattggtgaaaaaagtttcctcagaacagtttctctccagtaacctctctaccactggtcccttgctgcaaatgtgtataaaacaattttaggacaaggaaatggcagaacaactttatggacaacatataaacttgggaggacttataataccataaagcattacatgctgggattttaagtcagtttaaagctacattcaagcaaattctaggaagacagaggctgaaaagtactaatagagatgccagggctgttggcaaggagggtaaccacatttcatcctggggcctcaggttagagaactgtgtattctttttcaattaaaccgacattcctagca

SEQ ID NO: 359257 - DNA, 4202 bp, Homo sapiens
aacgcttcccgcgggagttttagccgtgttattgttggggaagggaatgtcaaattctgctcctgccttcccccaggggctggagactggaatctttattccagttcattgcgggtcgacgtggtctccagaatccccgagtgtagaggcggaggacagtggagctggggactcgggcgcctgggtcctggtccctgagcgtccagcgctcccctagtccgcggccctggctcctgtcctcacttccttccccttttggctcctgctctcggagcgggcggacgcgggggggagcggaaagggcgggagggcccaggagcccggcgggggggttcaagggggtacggaaaagccggggaggggactcggtccggggccggagaccgacggcaacagcggctcaggacccacgctgcccccacccctcccgagcaggcgcccccatggcccgaccccgctgattccttcactcggccatgctcccgcggcccctgcggctgcttttggacacgagcccccccgggggagtcgtactgagcagcttccgaagccgggaccccgaagagggtgggggcccaggtggcctggtcgtgggcggggggcaggaggaagaggaggaggaagaagaagaggcccctgtgtccgtctgggatgaggaggaggatggtgccgtgtttaccgtcacaagccgccaatatcgacctcttgatcccttggtccctatgcctcccccacgttcctcccgacggctccgagctggcactctggaggccctggtcagacacctactggatacccggacatcagggactgatgtgagcttcatgtcagccttcctggctacccaccgggccttcacctccacgcctgccttgctagggcttatggctgacaggctggaagcccttgaatctcatcctaccgacgaactagagaggacaacagaggtagccatctctgtactgtcaacctggctggcctctcaccctgaggattttggctctgaggccaagggtcagcttgaccggcttgagagcttcttacttcagacagggtatgcagcagggaagggtgttggggggggcagcgctgacctcatccgcaatctccggtcccgggtggacccccaggcccccgaccttcctaagcccctggccctccccggcgatccccctgctgaccccacggatgtcctggtgttcctcgctgaccacttggccgaacagctgaccctgctagatgcggaactttttctcaatttgatcccctctcagtgcctgggaggcctgtggggtcacagagaccggccaggacattctcacctctgcccatctgtccgagctactgtcacacagtttaacaaggtggcaggggcagtggttagttctgtcctgggggctacttccactggagagggacctggggaggtgaccatacggccactccgtcccccacagagggcccggctcctggagaagtggatccgcgtggcagaggagtgccggctgctccgaaacttctcttcagtttatgccgtggtgtcagccctgcagtccagccccatccacaggcttcgggcagcctggggggaagcaaccagggacagcctcagagtcttttccagcctctgccagattttctccgaggaggataattattcccagagtcgggagctgctcgtgcaggaggtgaagctgcagtctcctctggagccacactccaagaaggccccgaggtctggctcccggggtgggggtgtggtcccataccttggcaccttcctgaaggaccttgtgatgctggatgcagcctccaaggatgagttggagaatggatacatcaattttgacaagcggaggaaggagtttgcagtcctttctgagttgcgacggctccagaatgaatgtcgtggctataacctccaacctgaccatgatatccagaggtggctacaggggctccggccactgacagaggctcagagccatcgtgtatcctgtgaggtggagccacctggttccagtgaccctcctgccccacgggtgcttcggccaacattggtcatctcgcagtggacagaggttttgggctctgttggggtccctaccccgcttgtgtcctgtgaccggcccagtactgggggagatgaggcgcctacaactcctgctcctctgctgactcggctggcccagcacatgaagtggccatctgtctcgtcactagactctgccttggaaagcagtccatccctgcacagtccagctgaccccagccacctctccccaccagcctcctcccctaggccttctcgaggtcaccgccgctcagcctcctgtggctccccgctgagtgggggtgcagaagaggcctccggggggactggatatgggggagagggatctgggccaggggcctctgattgccgtatcatccgagtccagatggagttgggggaagatggcagtgtctataagagcattttggtgagggagccttgggatggagttggggtgaaggatggtgtcttgttggactataaatgttgtctgaggtttgggcagccaaatggaattgaatgtagttttaattttgacctttggttttggcagttatgttttatttttaattttatcttctaaactctagtcttcaatagaagctgaaatttgttttattttgatggctattttgcattagttgctacaccttaaacttttggtcgccgtgttaaaatttcagaatcaacagcagtttccccacagggaagcagctctgtttcactgggcaccatgtgggctggcttatggggtataggaagccaccatattgggttttcctgttcattttaaagccttggacacaagtaacattttgtggttgggttcagtggctgagggtagaaggatgggaaatcatggctgattgattgctcttttggtctcctgttctgccaggtgacaagccaggacaaggctccaagtgtcatcagtcgtgtccttaagaaaaacaatcgtgactctgcagtggcttcagagtatgagctggtacagctgctaccaggggagcgagagctgactatcccagcctcggctaatgtattctacgccatggatggagcttcacacgatttcctcctgcggcagcggcgaaggtcctctactgctacacctggcgtcaccagtggcccgtctgcctcaggaactcctccgagtgagggaggagggggctcctttcccaggatcaaggccacagggaggaagattgcacgggcactgttctgaggaggaagccccgttggcttacagaagtcatggtgttcataccagatgtgggtagccatcctgaatggtggcaattatatcacattgagacagaaattcagaaagggagccagccaccctggggcagtgaagtgccactggtttaccagacagctgagaaatccagccctgtgggaactggtgtcttataaccaagttggatacctgtgtatagcttcccaccttccatgagtgcagcacacaggtagtgctggaaaaacgcatcagtttctgattcttggccatatcctaacatgcaagggccaagcaaaggcttcaaggctctgagccccagggcagaggggaatggcaaaatgtaggtcctcgcaggagctcttcttcccactctgggggtttctatcactgtgacaacactaagataataaaccaaaacactacctgaattctactcccctgtccttgcagtacatatgaactggctgctatgagtgggggtggggaattggctgaaggtagatgccatggaacaggaaggggcacaatgttttctgtccccatgaacagagcaaaaagtgaggtattggtgaaaaaagtttcctcagaacagtttctctccagtaacctctctaccactggtcccttgctgcaaatgtgtataaaacaattttaggacaaggaaatggcagaacaactttatggacaacatataaacttgggaggacttataataccataaagcattacatgctgggattttaagtcagtttaaagctacattcaagcaaattctaggaagacagaggctgaaaagtactaatagagatgccagggctgttggcaaggagggtaaccacatttcatcctggggcctcaggttagagaactgtgtattctttttcaattaaaccgacattcctagca

SEQ ID NO: 359258 - DNA, 1747 bp, Homo sapiens
agccaagtcgagaggagcaggagttgtaggcgcctcatctcccccagtactgggccggtcacaggacacaagcggggtagggaccccaacagagcccaaaacctctgtccactgcgagatgaccaatgttggccgaagcacccacagggctggatttctcagctgtctggtaaaccagtggcacttcactgccccagggtggctggctcacatgaagtggccatctgtctcgtcactagactctgccttggaaagcagtccatccctgcacagtccagctgaccccagccacctctccccaccagcctcctcccctaggccttctcgaggtcaccgccgctcagcctcctgtggctccccgctgagtgggggtgcagaagaggcctccggggggactggatatgggggagagggatctgggccaggggcctctgattgccgtatcatccgagtccagatggagttgggggaagatggcagtgtctataagagcattttggtgacaagccaggacaaggctccaagtgtcatcagtcgtgtccttaagaaaaacaatcgtgactctgcagtggcttcagagtatgagctggtacagctgctaccaggggagcgagagctgactatcccagcctcggctaatgtattctacgccatggatggagcttcacacgatttcctcctgcggcagcggcgaaggtcctctactgctacacctggcgtcaccagtggcccgtctgcctcaggaactcctccgagtgagggaggagggggctcctttcccaggatcaaggccacagggaggaagattgcacgggcactgttctgaggaggaagccccgttggcttacagaagtcatggtgttcataccagatgtgggtagccatcctgaatggtggcaattatatcacattgagacagaaattcagaaagggagccagccaccctggggcagtgaagtgccactggtttaccagacagctgagaaatccagccctgtgggaactggtgtcttataaccaagttggatacctgtgtatagcttcccaccttccatgagtgcagcacacaggtagtgctggaaaaacgcatcagtttctgattcttggccatatcctaacatgcaagggccaagcaaaggcttcaaggctctgagccccagggcagaggggaatggcaaaatgtaggtcctcgcaggagctcttcttcccactctgggggtttctatcactgtgacaacactaagataataaaccaaaacactacctgaattctactcccctgtccttgcagtacatatgaactggctgctatgagtgggggtggggaattggctgaaggtagatgccatggaacaggaaggggcacaatgttttctgtccccatgaacagagcaaaaagtgaggtattggtgaaaaaagtttcctcagaacagtttctctccagtaacctctctaccactggtcccttgctgcaaatgtgtataaaacaattttaggacaaggaaatggcagaacaactttatggacaacatataaacttgggaggacttataataccataaagcattacatgctgggattttaagtcagtttaaagctacattcaagcaaattctaggaagacagaggctgaaaagtactaatagagatgccagggctgttggcaaggagggtaaccacatttcatcctggggcctcaggttagagaactgtgtattctttttcaattaaaccgacattcctagca

SEQ ID NO: 359259 - DNA, 3677 bp, Homo sapiens
aacgcttcccgcgggagttttagccgtgttattgttggggaagggaatgtcaaattctgctcctgccttcccccaggggctggagactggaatctttattccagttcattgcgggtcgacgtggtctccagaatccccgagtgtagaggcggaggacagtggagctggggactcgggcgcctgggtcctggtccctgagcgtccagcgctcccctagtccgcggccctggctcctgtcctcacttccttccccttttggctcctgctctcggagcgggcggacgcgggggggagcggaaagggcgggagggcccaggagcccggcgggggggttcaagggggtacggaaaagccggggaggggactcggtccggggccggagaccgacggcaacagcggctcaggacccacgctgcccccacccctcccgagcaggcgcccccatggcccgaccccgctgattccttcactcggccatgctcccgcggcccctgcggctgcttttggacacgagcccccccgggggagtcgtactgagcagcttccgaagccgggaccccgaagagggtgggggcccaggtggcctggtcgtgggcggggggcaggaggaagaggaggaggaagaagaagaggcccctgtgtccgtctgggatgaggaggaggatggtgccgtgtttaccgtcacaagccgccaatatcgacctcttgatcccttggtccctatgcctcccccacgttcctcccgacggctccgagctggcactctggaggccctggtcagacacctactggatacccggacatcagggactgatgtgagcttcatgtcagccttcctggctacccaccgggccttcacctccacgcctgccttgctagggcttatggctgacaggctggaagcccttgaatctcatcctaccgacgaactagagaggacaacagaggtagccatctctgtactgtcaacctggctggcctctcaccctgaggattttggctctgaggccaagggtcagcttgaccggcttgagagcttcttacttcagacagggtatgcagcagggaagggtgttggggggggcagcgctgacctcatccgcaatctccggtcccgggtggacccccaggcccccgaccttcctaagcccctggccctccccggcgatccccctgctgaccccacggatgtcctggtgttcctcgctgaccacttggccgaacagctgaccctgctagatgcggaactttttctcaatttgatcccctctcagtgcctgggaggcctgtggggtcacagagaccggccaggacattctcacctctgcccatctgtccgagctactgtcacacagtttaacaaggtggcaggggcagtggttagttctgtcctgggggctacttccactggagagggacctggggaggtgaccatacggccactccgtcccccacagagggcccggctcctggagaagtggatccgcgtggcagaggagtgccggctgctccgaaacttctcttcagtttatgccgtggtgtcagccctgcagtccagccccatccacaggcttcgggcagcctggggggaagcaaccagggacagcctcagagtcttttccagcctctgccagattttctccgaggaggataattattcccagagtcgggagctgctcgtgcaggaggtgaagctgcagtctcctctggagccacactccaagaaggccccgaggtctggctcccggggtgggggtgtggtcccataccttggcaccttcctgaaggaccttgtgatgctggatgcagcctccaaggatgagttggagaatggatacatcaattttgacaagcggaggaaggagtttgcagtcctttctgagttgcgacggctccagaatgaatgtcgtggctataacctccaacctgaccatgatatccagaggtggctacaggggctccggccactgacagaggctcagagccatcgtgtatcctgtgaggtggagccacctggttccagtgaccctcctgccccacgggtgcttcggccaacattggtcatctcgcagtggacagaggttttgggctctgttggggtccctaccccgcttgtgtcctgtgaccggcccagtactgggggagatgaggcgcctacaactcctgctcctctgctgactcggctggcccagcacatgaagtggccatctgtctcgtcactagactctgccttggaaagcagtccatccctgcacagtccagctgaccccagccacctctccccaccagcctcctcccctaggccttctcgaggtcaccgccgctcagcctcctgtggctccccgctgagtgggggtgcagaagaggcctccggggggactggatatgggggagagggatctgggccaggggcctctgattgccgtatcatccgagtccagatggagttgggggaagatggcagtgtctataagagcattttggtgacaagccaggacaaggctccaagtgtcatcagtcgtgtccttaagaaaaacaatcgtgactctgcagtggcttcagagtatgagctggtacagctgctaccaggggagcgagagctgactatcccagcctcggctaatgtattctacgccatggatggagcttcacacgatttcctcctgcggcagcggcgaaggtcctctactgctacacctggcgtcaccagtggcccgtctgcctcaggaactcctccgagtgagggaggagggggctcctttcccaggatcaaggccacagggaggaagattgcacgggcactgttctgaggaggaagccccgttggcttacagaagtcatggtgttcataccagatgtgggtagccatcctgaatggtggcaattatatcacattgagacagaaattcagaaagggagccagccaccctggggcagtgaagtgccactggtttaccagacagctgagaaatccagccctgtgggaactggtgtcttataaccaagttggatacctgtgtatagcttcccaccttccatgagtgcagcacacaggtagtgctggaaaaacgcatcagtttctgattcttggccatatcctaacatgcaagggccaagcaaaggcttcaaggctctgagccccagggcagaggggaatggcaaaatgtaggtcctcgcaggagctcttcttcccactctgggggtttctatcactgtgacaacactaagataataaaccctatgagtgggggtggggaattggctgaaggtagatgccatggaacaggaaggggcacaatgttttctgtccccatgaacagagcaaaaagtgaggtattggtgaaaaaagtttcctcagaacagtttctctccagtaacctctctaccactggtcccttgctgcaaatgtgtataaaacaattttaggacaaggaaatggcagaacaactttatggacaacatataaacttgggaggacttataataccataaagcattacatgctgggattttaagtcagtttaaagctacattcaagcaaattctaggaagacagaggctgaaaagtactaatagagatgccagggctgttggcaaggagggtaaccacatttcatcctggggcctcaggttagagaactgtgtattctttttcaattaaaccgacattcctagca

SEQ ID NO: 359260 - DNA, 3503 bp, Homo sapiens
aacgcttcccgcgggagttttagccgtgttattgttggggaagggaatgtcaaattctgctcctgccttcccccaggggctggagactggaatctttattccagttcattgcgggtcgacgtggtctccagaatccccgagtgtagaggcggaggacagtggagctggggactcgggcgcctgggtcctggtccctgagcgtccagcgctcccctagtccgcggccctggctcctgtcctcacttccttccccttttggctcctgctctcggagcgggcggacgcgggggggagcggaaagggcgggagggcccaggagcccggcgggggggttcaagggggtacggaaaagccggggaggggactcggtccggggccggagaccgacggcaacagcggctcaggacccacgctgcccccacccctcccgagcaggcgcccccatggcccgaccccgctgattccttcactcggccatgctcccgcggcccctgcggctgcttttggacacgagcccccccgggggagtcgtactgagcagcttccgaagccgggaccccgaagagggtgggggcccaggtggcctggtcgtgggcggggggcaggaggaagaggaggaggaagaagaagaggcccctgtgtccgtctgggatgaggaggaggatggtgccgtgtttaccgtcacaagccgccaatatcgacctcttgatcccttggtccctatgcctcccccacgttcctcccgacggctccgagctggcactctggaggccctggtcagacacctactggatacccggacatcagggactgatgtgagcttcatgtcagccttcctggctacccaccgggccttcacctccacgcctgccttgctagggcttatggctgacaggctggaagcccttgaatctcatcctaccgacgaactagagaggacaacagaggtagccatctctgtactgtcaacctggctggcctctcaccctgaggattttggctctgaggccaagggtcagcttgaccggcttgagagcttcttacttcagacagggtatgcagcagggaagggtgttggggggggcagcgctgacctcatccgcaatctccggtcccgggtggacccccaggcccccgaccttcctaagcccctggccctccccggcgatccccctgctgaccccacggatgtcctggtgttcctcgctgaccacttggccgaacagctgaccctgctagatgcggaactttttctcaatttgatcccctctcagtgcctgggaggcctgtggggtcacagagaccggccaggacattctcacctctgcccatctgtccgagctactgtcacacagtttaacaaggtggcaggggcagtggttagttctgtcctgggggctacttccactggagagggacctggggaggtgaccatacggccactccgtcccccacagagggcccggctcctggagaagtggatccgcgtggcagaggagtgccggctgctccgaaacttctcttcagtttatgccgtggtgtcagccctgcagtccagccccatccacaggcttcgggcagcctggggggaagcaaccagggacagcctcagagtcttttccagcctctgccagattttctccgaggaggataattattcccagagtcgggagctgctcgtgcaggaggtgaagctgcagtctcctctggagccacactccaagaaggccccgaggtctggctcccggggtgggggtgtggtcccataccttggcaccttcctgaaggaccttgtgatgctggatgcagcctccaaggatgagttggagaatggatacatcaattttgacaagcggaggaaggagtttgcagtcctttctgagttgcgacggctccagaatgaatgtcgtggctataacctccaacctgaccatgatatccagaggtggctacaggggctccggccactgacagaggctcagagccatcgtgtatcctgtgaggtggagccacctggttccagtgaccctcctgccccacgggtgcttcggccaacattggtcatctcgcagtggacagaggttttgggctctgttggggtccctaccccgcttgtgtcctgtgaccggcccagtactgggggagatgaggcgcctacaactcctgctcctctgctgactcggctggcccagcacatgaagtggccatctgtctcgtcactagactctgccttggaaagcagtccatccctgcacagtccagctgaccccagccacctctccccaccagcctcctcccctaggccttctcgaggtcaccgccgctcagcctcctgtggctccccgctgagtgggggtgcagaagaggcctccggggggactggatatgggggagagggatctgggccaggggcctctgattgccgtatcatccgagtccagatggagttgggggaagatggcagtgtctataagagcattttggtgacaagccaggacaaggctccaagtgtcatcagtcgtgtccttaagaaaaacaatcgtgactctgcagtggcttcagagtatgagctggtacagctgctaccaggggagcgagagctgactatcccagcctcggctaatgtattctacgccatggatggagcttcacacgatttcctcctgcggcagcggcgaaggtcctctactgctacacctggcgtcaccatgaagtgccactggtttaccagacagctgagaaatccagccctgtgggaactggtgtcttataaccaagttggatacctgtgtatagcttcccaccttccatgagtgcagcacacaggtagtgctggaaaaacgcatcagtttctgattcttggccatatcctaacatgcaagggccaagcaaaggcttcaaggctctgagccccagggcagaggggaatggcaaaatgtaggtcctcgcaggagctcttcttcccactctgggggtttctatcactgtgacaacactaagataataaaccaaaacactacctgaattctactcccctgtccttgcagtacatatgaactggctgctatgagtgggggtggggaattggctgaaggtagatgccatggaacaggaaggggcacaatgttttctgtccccatgaacagagcaaaaagtgaggtattggtgaaaaaagtttcctcagaacagtttctctccagtaacctctctaccactggtcccttgctgcaaatgtgtataaaacaattttaggacaaggaaatggcagaacaactttatggacaacatataaacttgggaggacttataataccataaagcattacatgctgggattttaagtcagtttaaagctacattcaagcaaattctaggaagacagaggctgaaaagtactaatagagatgccagggctgttggcaaggagggtaaccacatttcatcctggggcctcaggttagagaactgtgtattctttttcaattaaaccgacattcctagca

SEQ ID NO: 359261 - DNA, 3728 bp, Homo sapiens
aacgcttcccgcgggagttttagccgtgttattgttggggaagggaatgtcaaattctgctcctgccttcccccaggggctggagactggaatctttattccagttcattgcgggtcgacgtggtctccagaatccccgagtgtagaggcggaggacagtggagctggggactcgggcgcctgggtcctggtccctgagcgtccagcgctcccctagtccgcggccctggctcctgtcctcacttccttccccttttggctcctgctctcggagcgggcggacgcgggggggagcggaaagggcgggagggcccaggagcccggcgggggggttcaagggggtacggaaaagccggggaggggactcggtccggggccggagaccgacggcaacagcggctcaggacccacgctgcccccacccctcccgagcaggcgcccccatggcccgaccccgctgattccttcactcggccatgctcccgcggcccctgcggctgcttttggacacgagcccccccgggggagtcgtactgagcagcttccgaagccgggaccccgaagagggtgggggcccaggtggcctggtcgtgggcggggggcaggaggaagaggaggaggaagaagaagaggcccctgtgtccgtctgggatgaggaggaggatggtgccgtgtttaccgtcacaagccgccaatatcgacctcttgatcccttggtccctatgcctcccccacgttcctcccgacggctccgagctggcactctggaggccctggtcagacacctactggatacccggacatcagggactgatgtgagcttcatgtcagccttcctggctacccaccgggccttcacctccacgcctgccttgctagggcttatggctgacaggctggaagcccttgaatctcatcctaccgacgaactagagaggacaacagaggtagccatctctgtactgtcaacctggctggcctctcaccctgaggattttggctctgaggccaagggtcagcttgaccggcttgagagcttcttacttcagacagggtatgcagcagggaagggtgttggggggggcagcgctgacctcatccgcaatctccggtcccgggtggacccccaggcccccgaccttcctaagcccctggccctccccggcgatccccctgctgaccccacggatgtcctggtgttcctcgctgaccacttggccgaacagctgaccctgctagatgcggaactttttctcaatttgatcccctctcagtgcctgggaggcctgtggggtcacagagaccggccaggacattctcacctctgcccatctgtccgagctactgtcacacagtttaacaaggtggcaggggcagtggttagttctgtcctgggggctacttccactggagagggacctggggaggtgaccatacggccactccgtcccccacagagggcccggctcctggagaagtggatccgcgtggcagaggagtgccggctgctccgaaacttctcttcagtttatgccgtggtgtcagccctgcagtccagccccatccacaggcttcgggcagcctggggggaagcaaccagggacagcctcagagtcttttccagcctctgccagattttctccgaggaggataattattcccagagtcgggagctgctcgtgcaggaggtgaagctgcagtctcctctggagccacactccaagaaggccccgaggtctggctcccggggtgggggtgtggtcccataccttggcaccttcctgaaggaccttgtgatgctggatgcagcctccaaggatgagttggagaatggatacatcaattttgacaagcggaggaaggagtttgcagtcctttctgagttgcgacggctccagaatgaatgtcgtggctataacctccaacctgaccatgatatccagaggtggctacaggggctccggccactgacagaggctcagagccatcgtgtatcctgtgaggtggagccacctggttccagtgaccctcctgccccacgggtgcttcggccaacattggtcatctcgcagtggacagaggttttgggctctgttggggtccctaccccgcttgtgtcctgtgaccggcccagtactgggggagatgaggcgcctacaactcctgctcctctgctgactcggctggcccagcacatgaagtggccatctgtctcgtcactagactctgccttggaaagcagtccatccctgcacagtccagctgaccccagccacctctccccaccagcctcctcccctaggccttctcgaggtcaccgccgctcagcctcctgtggctccccgctgagtgggggtgcagaagaggcctccggggggactggatatgggggagagggatctgggccaggggcctctgattgccgtatcatccgagtccagatggagttgggggaagatggcagtgtctataagagcattttggtgacaagccaggacaaggctccaagtgtcatcagtcgtgtccttaagaaaaacaatcgtgactctgcagtggcttcagagtatgagctggtacagctgctaccaggggagcgagagctgactatcccagcctcggctaatgtattctacgccatggatggagcttcacacgatttcctcctgcggcagcggcgaaggtcctctactgctacacctggcgtcaccatgaagtgccactggtttaccagacagctgagaaatccagccctgtgggaactggtgtcttataaccaagttggatacctgtgtatagcttcccaccttccatgagtgcagcacacaggtagtgctggaaaaacgcatcagtttctgattcttggccatatcctaacatgcaagggccaagcaaaggcttcaaggctctgagccccagggcagaggggaatggcaaaatgtaggtcctcgcaggagctcttcttcccactctgggggtttctatcactgtgacaacactaagataataaaccaaaacactacctgaaaaaaaaacaaaaaaaaaaaaaaaaaaaaaaaaaaaaaaaaaaaaaaaaaaaaaaaaaaaaaaaaaaaaaaaaaaaaaaaaaaaaaaaaaaaaaaaaaaaaaaaaagggggggggggcggcggcgaacaactctcctccccacggggcggcgcgcgacacccgacgccgacccagcacgcattgaggaagcagagacggagcgcaccccaccacaggggagcggagtctattattagaacggaaagagagagcgagagagacgcgcacgcgaggagcgcacagagaacagagcacaaaacgaaggagagcggaggcgcgtacgaacgcgcaagcgcacatgcgaggaagggagtgttgcggcgggagggagagaggagagagagcgcacacggagcgaccgcggaggggaggagcagagcgagcagagaagtcacagagggcgagcgacacaccgagaaacacccgccacacccgcgagcgcggcgcgggaaacgacaaacacagaggggtgagagggtgtgaggagaggggagggtagagtaaatggagaggagtatagaagtgggaggggaggagtatgagggtggaatgattatgattcgaagctggaggagtggtggattgaaagagatgtagagaggtggtgatggatttgagcaggtttggagggtaggactggtggcgggaggaagagggggaggat

SEQ ID NO: 359262 - DNA, 477 bp, Homo sapiens
tcacatatttattactgaatccagccaaccaacgtgttcataacagattcagagaggaaaacacgtcgaaatctccagatagtggtgacattttcagcttgatatggtaacatgatcgtgaccttcagacagcataaatatgtgtgccatctcatgtgcaattccttatagacccagcttggttcttctccaatgtctccttttggagttgtacctgattttatttccagttttcatccgaatccactggggaatgggacgattttgcttttgtttcttggccaggaatcgcttaatcctgaaagtcttgtgagaagacatggcgagcagcggagtcaagaacacaccacgatggcggagaaaggaagagggctgaggctgtgcaaggtggctcatgcctgtaatcccagcactttgtgaggatcctttgagcccagaaattggagaccttcctaggcgacagagagagaccccatc

SEQ ID NO: 359263 - DNA, 590 bp, Homo sapiens
cgattgcacctgtaaccaaacttggtgatctcctgcaactgctctacctctggtttctcctaacatactacccacagcaacctcaaacaatgaagttttgtaccattatagagtcctcttattggaatggattagaggggaaggaagaaacttaagtcattataccaggaaaatcattccctcactattgcaagagttaggtttcataatctgcctttcaaagagcaattacaaaagcaataagtaattttgttgtaaggattacaaatacacctacatgataaattgggggccggggaggatggtcctaatgtggtaacttgggtcaaacttgccagtgagtcagacatgtatttgagaagtgctgcatctcagacagcttagatgcaagtgaaggagatacactttgagaaatggactgtagataccatgaagacgttgatgtccaagatgcatgtagagagtgaataaaattgttacttgaaatgtgagaatgggaaaaaagcaatattttgtattaatgtattatatatataatgttattttaaatatgcatgtgtaactaaagtaataaattagatattataact

SEQ ID NO: 359264 - DNA, 5632 bp, Homo sapiens
ttttcttgatacagtaagtatattaagaatataaacgggtttgataaaatgaacatttaaaaaacatggcaccaggctgattcttcttcctgcacaccttaatgcctaacttttgaaaggacttgagacataagaatcacaattttaaaaaattatagtttccatgccttcatggtggatcaatttccatagaagtctaccaaaatgacttatctccatcccagggaagcaactgcaagagggaaaatgaaaggaatgcagtctttctatgtaggcagagtggacttaagtgtgagtcagaaacaccgatttcagtttgtgcgctgcaacttgataacttgggtgatgtttggcttctcagaactttgggaggtgaatttgaaaaacaggtaatgccacactatatagttcagaggattacctcagcttacaaacagcaaatgagacgcaaatgtgagccataattcacatttctaagcagttggagccctgatatggcactggggttacaaacaagcggggaaaaatgtcaacccagtgatgtcatactcctaggccgggccctaagatttttttggaacctggcgggctgagcacaacagggaaagcctcagcaccctgacttggcacaatggtacccttaaggctctttgctcactcagttcttagtagctctcctaaagcatggtggtgttctcttccagttctctgcgtagactttgctatgcttctccgcccactgcttcatccagagaaacactcgtatccacagcctctccccactttccctcacgcacggctctagaaagacggggatagggcgcggcttaggctttatacaccttgccagccaatgaccgcgccgtctcctttccggtcggcgatccgaccaatccaagaaggttggtgcaatcttcggctctactcggctgttttcgctgatgcgggcagcttgggggccgccgccgctaaacagacgctttcctttttaattttttttccatgtgttcacttccgggtccggcgtcgatccggatgcccgaggcagaaggatgtttgacctccggataagcgaggcgctgctgtgcattcattccgggctgcatcggtggcgacagcagaggctcgggcggcgactctccggccagcggcggcggtaggaggcaccagcggcagtgcagggaccgaatccgagcagcgctgcgttacctctctctctcgctccttcccccctacctcgctcgctcgctcgctcgctccctgcgtggctcgctttcctcctccggccgccggcgggtgtgatgtgccgccgccgctgcccccgccggcgctgacggactgggggcgccgcccgcgcccgggaccgacccctctgctcgcggccgcgcctttgagctctctatcaatatcagctcacatcattgaaaagataattttgaagacatgttttgctgaaaagacactaagaaaaattttacgaatgggatgaacatgctccagttaattgactacctactgcaatttgaatgttaacattacccatctggtacagttacctagtgatgtacctattttcacaataccctgtttcagtgtgcttgtcttgattaaagaattcaaagtggagtaccgcaaacttgatatggaaaataaaaagaaagacaaggacaaatcagatgatagaatggcacgacctagtggtcgatcgggacacaacactcgaggaactgggtcttcatcgtctggagttttaatggttggacctaactttagagttggaaaaaaaattggatgtggcaattttggagaattacgattagggaaaaatttatacacaaatgaatatgtggcaattaagttggagcccatgaaatcaagagcaccacagctacatttggaatacagattctataagcagttaggatctggagatggtatacctcaagtttactatttcggcccttgtggtaaatacaatgctatggtgctggaactgctgggacctagtttggaagacttgtttgacttgtgtgacagaacattttctcttaaaacagttctcatgatagctatacaactgatttctcgcatggaatatgtccattcaaagaacttgatatacagagatgtaaaacctgagaacttcttaataggacgaccaggaaacaaaacccagcaagttattcacattatagattttggtttggcaaaggaatatattgatccggagacaaagaaacacataccatacagagaacacaagagccttacaggaacagctagatatatgagcataaacacacatttaggaaaagaacaaagtagaagagacgatttagaagctttaggtcatatgttcatgtattttctgagaggcagtcttccttggcaaggcttaaaggctgacacattaaaggagaggtatcagaaaattggagatacaaaacgggctacaccaatagaagtgttatgtgaaaattttccagaaatggcaacatatcttcgttatgtaagaaggctagatttttttgaaaaaccagactatgactacttaagaaagctttttactgacttgtttgatcgaaaaggatatatgtttgattatgaatatgactggattggtaaacagttgcctactccagtgggtgcagttcagcaagatcctgctctgtcatcaaacagagaagcacatcaacacagagataagatgcaacaatccaaaaaccagtcggcagaccacagggcagcttgggactcccagcaggcaaatccccaccatttgagagctcaccttgcagcagacagacatggtggctcggtacaggttgtaagttctacaaatggagagttaaacacagatgaccccaccgcaggacgttcaaatgcacccatcacagcccctactgaagtagaagtgatggatgaaaccaagtgctgctgttttttcaaacgaaggaaaaggaaaaccatacagcgccacaaatgactctggacacagacagatcctggggagttacttacatgttcatctgctgtcttgtgattaaaatcatctctgtagtgaccacgtatattttcaaggactcactcttagaaacaaaaatgtcatactttcatacttcattttgtggttgtcttacattctttttctttttttttttttctctaatttaacctttatggaagctttaaagttttgtcaaaacatgagtgctttgcccatcagtgaatggaatggaccaatgaggtggtatcaatgaatatagttccatagaacattttccagaagttcttctgttgtagaaagcagtacagtatcttaagtgtcaaccagttatatacctaatctggttttttataacttctgtaagagcataatcaaacaggaattttcttttctcagtggataatacaacagagaaaacagagttgcccaaatatttaaaagaagttattccttgagaagttcatattttgtgacatctgcattgatttcagtattactgatggtactgttattcataagtcatattaacattctctccgtgaaatcatggtacagtcactgcccagaggtactgaggaaaaagcaatatgggttcggcagatggtggtggtaaaatgaatcttaaggagtgtggtaaatatgtgctccgcttttgttgcatcactatgtgaagtactgtgttgcagaagtggcaaaagcgcttatttttaaaaatgcaaaatatttgtacaatgtaactttatgcttccaaataataatgtatgttagacagcaagaaatgaatactttaaaaagtgatatatgttggagttataaagaaatacactaaggagaggtagtaaatgtgaaccttgttgcagtgtataaggtggaagcctaaagaaatctcaccgaaacttactgctgaatgattacattctcccttaagcagaaaactttggatgtgccatgcaatggtgtctgtgtaattattttgctctttgattaaaaaaaagacccccagcaataaaaagtgggtcactctatgccctctgtgcacattagtctcttgtattcaactttgctgattctctggaattttcctactctttagcataattttgatgattgaaaaatattttggaaaggatgggtcaggtgctttgcctccatagtcttttgaagtgcctgcatatgaacaacaacaacaacaacaaaaaattctgtaaaaaaggaagcccattccacttttcaagtatgctttgttttaagccataaagacacacatgtagttttgtcacattctactagccaaaattttcaagaagggttaaaacaaagactggctagaaagataattattttgaataaatctcatattcatctttcatttatataattgttacttattcctcccatgcagtctcttcgttgtctttaagtgtgtgcctccaggcatgcttatttatttttattgtctcaaggtaacatttaagatgtatattaaagtaaagctacatttttttacttcattattgcatttacagggatttaattgtactttgtaatttatttttcttattagccaaaagtttaatgcatttttttttgatgaattaggcacccacatgaacaccacaaatcaggacattgtttatcattgttgctatgaatcctatgaatgatcttttttttattttaaagacctacacttaacctacaaaacatttgctgtataatttggtcaacagtttctatctatctgtatactgtcatgatgtcttaaactgcaggagttacatactgagtttatatttttatttgctttgagcaaggtagataaacattttggccattataatgtgaaaccacttcttctttctttacagtatttgaccaaacttgtgtgtctatgatatttgtaaatacatgcgaatatctgtatttcttatcataagcctatttagttttattctcagtagggttttttggattgtacagtgtttatatgatctgaactccttatacataagaaggtgtgtatattaatccaattatggacttaaaatattttaaaagtataaatacccttatttgctgcaaagaccagtgtgtaggcatttgctttttagcaatatttttaagtgctccattttaatgccgaggaataagtcttttggcaacacaaactggtcaataataggtaatgcaggtatgttcaggttaagccaacaatgttttgcatttttatgcttattttctgtcaacactaatgaagtcaacattgcctgaatgtctgaataatgaaacacatccctgtttaaaagtatgtaactgaaaaagaaataaaaaaaaataaaagtagtttttttaaacttgctctttcccatttcctctaaagatgggtaaaataatgtcactccctaatttaagataggaattataaaaatttggtttatttagtctgttatatatgagaagcagagctaaaggaatatgcttttgttattttatgttttgttttgctttcttgaaatccagtggtaaaaagcacacactaggaaggatctaagctttctttaatataaaaaaaattatacttctctgaactgtttaatagagcaataattaaatacatcttctgat

SEQ ID NO: 359265 - DNA, 4173 bp, Homo sapiens
  misc_feature (1)..(1): n is a, c, g, or t
ncacacaacaccgaggaactgggtccatcgtctggagaatggttggacctaacagagttggaaaaaaaattggatgtggcattttggagaattccgattagggaaaaatttatacacaaatgaatatgtggcaattaagttggagcccatgaaatcagagcaccacagctacatttggaatacagattctataagcagttaggatctggagctctctatcaatatcagctcacatcattgaaaagataattttgaagacatgttttgctgaaaagacactaagaaaaattttacgaatgggatgaacatgctccagttaattgactacctactgcaatttgaatgttaacattacccatctggtacagttacctagtgatgtacctattttcacaataccctgtttcagtgtgcttgtcttgattaaagaattcaaagtggagtaccgcaaacttgatatggaaaataaaaagaaagacaaggacaaatcagatgatagaatggcacgacctagtggtcgatcgggacacaacactcgaggaactgggtcttcatcgtctggagttttaatggttggacctaactttagagttggaaaaaaaattggatgtggcaattttggagaattacgattagggaaaaatttatacacaaatgaatatgtggcaattaagttggagcccatgaaatcaagagcaccacagctacatttggaatacagattctataagcagttaggatctggagatggtatacctcaagtttactatttcggcccttgtggtaaatacaatgctatggtgctggaactgctgggacctagtttggaagacttgtttgacttgtgtgacagaacattttctcttaaaacagttctcatgatagctatacaactgatttctcgcatggaatatgtccattcaaagaacttgatatacagagatgtaaaacctgagaacttcttaataggacgaccaggaaacaaaacccagcaagttattcacattatagattttggtttggcaaaggaatatattgatccggagacaaagaaacacataccatacagagaacacaagagccttacaggaacagctagatatatgagcataaacacacatttaggaaaagaacaaagtagaagagacgatttagaagctttaggtcatatgttcatgtattttctgagaggcagtcttccttggcaaggcttaaaggctgacacattaaaggagaggtatcagaaaattggagatacaaaacgggctacaccaatagaagtgttatgtgaaaattttccagaaatggcaacatatcttcgttatgtaagaaggctagatttttttgaaaaaccagactatgactacttaagaaagctttttactgacttgtttgatcgaaaaggatatatgtttgattatgaatatgactggattggtaaacagttgcctactccagtgggtgcagttcagcaagatcctgctctgtcatcaaacagagaagcacatcaacacagagataagatgcaacaatccaaaaaccagtcggcagaccacagggcagcttgggactcccagcaggcaaatccccaccatttgagagctcaccttgcagcagacagacatggtggctcggtacaggttgtaagttctacaaatggagagttaaacacagatgaccccaccgcaggacgttcaaatgcacccatcacagcccctactgaagtagaagtgatggatgaaaccaagtgctgctgttttttcaaacgaaggaaaaggaaaaccatacagcgccacaaatgactctggacacagacagatcctggggagttacttacatgttcatctgctgtcttgtgattaaaatcatctctgtagtgaccacgtatattttcaaggactcactcttagaaacaaaaatgtcatactttcatacttcattttgtggttgtcttacattctttttctttttttttttttctctaatttaacctttatggaagctttaaagttttgtcaaaacatgagtgctttgcccatcagtgaatggaatggaccaatgaggtggtatcaatgaatatagttccatagaacattttccagaagttcttctgttgtagaaagcagtacagtatcttaagtgtcaaccagttatatacctaatctggttttttataacttctgtaagagcataatcaaacaggaattttcttttctcagtggataatacaacagagaaaacagagttgcccaaatatttaaaagaagttattccttgagaagttcatattttgtgacatctgcattgatttcagtattactgatggtactgttattcataagtcatattaacattctctccgtgaaatcatggtacagtcactgcccagaggtactgaggaaaaagcaatatgggttcggcagatggtggtggtaaaatgaatcttaaggagtgtggtaaatatgtgctccgcttttgttgcatcactatgtgaagtactgtgttgcagaagtggcaaaagcgcttatttttaaaaatgcaaaatatttgtacaatgtaactttatgcttccaaataataatgtatgttagacagcaagaaatgaatactttaaaaagtgatatatgttggagttataaagaaatacactaaggagaggtagtaaatgtgaaccttgttgcagtgtataaggtggaagcctaaagaaatctcaccgaaacttactgctgaatgattacattctcccttaagcagaaaactttggatgtgccatgcaatggtgtctgtgtaattattttgctctttgattaaaaaaaagacccccagcaataaaaagtgggtcactctatgccctctgtgcacattagtctcttgtattcaactttgctgattctctggaattttcctactctttagcataattttgatgattgaaaaatattttggaaaggatgggtcaggtgctttgcctccatagtcttttgaagtgcctgcatatgaacaacaacaacaacaacaaaaaattctgtaaaaaaggaagcccattccacttttcaagtatgctttgttttaagccataaagacacacatgtagttttgtcacattctactagccaaaattttcaagaagggttaaaacaaagactggctagaaagataattattttgaataaatctcatattcatctttcatttatataattgttacttattcctcccatgcagtctcttcgttgtctttaagtgtgtgcctccaggcatgcttatttatttttattgtctcaaggtaacatttaagatgtatattaaagtaaagctacatttttttacttcattattgcatttacagggatttaattgtactttgtaatttatttttcttattagccaaaagtttaatgcatttttttttgatgaattaggcacccacatgaacaccacaaatcaggacattgtttatcattgttgctatgaatcctatgaatgatcttttttttattttaaagacctacacttaacctacaaaacatttgctgtataatttggtcaacagtttctatctatctgtatactgtcatgatgtcttaaactgcaggagttacatactgagtttatatttttatttgctttgagcaaggtagataaacattttggccattataatgtgaaaccacttcttctttctttacagtatttgaccaaacttgtgtgtctatgatatttgtaaatacatgcgaatatctgtatttcttatcataagcctatttagttttattctcagtagggttttttggattgtacagtgtttatatgatctgaactccttatacataagaaggtgtgtatattaatccaattatggacttaaaatattttaaaagtataaatacccttatttgctgcaaagaccagtgtgtaggcatttgctttttagcaatatttttaagtgctccattttaatgccgaggaataagtcttttggcaacacaaactggtcaataataggtaatgcaggtatgttcaggttaagccaacaatgttttgcatttttatgcttattttctgtcaacactaatgaagtcaacattgcctgaatgtctgaataatgaaacacatccctgtttaaaagtatgtaactgaaaaagaaataaaaaaaaataaaagtagtttttt

SEQ ID NO: 359266 - DNA, 5381 bp, Homo sapiens
ttttcttgatacagtaagtatattaagaatataaacgggtttgataaaatgaacatttaaaaaacatggcaccaggctgattcttcttcctgcacaccttaatgcctaacttttgaaaggacttgagacataagaatcacaattttaaaaaattatagtttccatgccttcatggtggatcaatttccatagaagtctaccaaaatgacttatctccatcccagggaagcaactgcaagagggaaaatgaaaggaatgcagtctttctatgtaggcagagtggacttaagtgtgagtcagaaacaccgatttcagtttgtgcgctgcaacttgataacttgggtgatgtttggcttctcagaactttgggaggtgaatttgaaaaacaggtaatgccacactatatagttcagaggattacctcagcttacaaacagcaaatgagacgcaaatgtgagccataattcacatttctaagcagttggagccctgatatggcactggggttacaaacaagcggggaaaaatgtcaacccagtgatgtcatactcctaggccgggccctaagatttttttggaacctggcgggctgagcacaacagggaaagcctcagcaccctgacttggcacaatggtacccttaaggctctttgctcactcagttcttagtagctctcctaaagcatggtggtgttctcttccagttctctgcgtagactttgctatgcttctccgcccactgcttcatccagagaaacactcgtatccacagcctctccccactttccctcacgcacggctctagaaagacggggatagggcgcggcttaggctttatacaccttgccagccaatgaccgcgccgtctcctttccggtcggcgatccgaccaatccaagaaggttggtgcaatcttcggctctactcggctgttttcgctgatgcgggcagcttgggggccgccgccgctaaacagacgctttcctttttaattttttttccatgtgttcacttccgggtccggcgtcgatccggatgcccgaggcagaaggatgtttgacctccggataagcgaggcgctgctgtgcattcattccgggctgcatcggtggcgacagcagaggctcgggcggcgactctccggccagcggcggcggtaggaggcaccagcggcagtgcagggaccgaatccgagcagcgctgcgttacctctctctctcgctccttcccccctacctcgctcgctcgctcgctcgctccctgcgtggctcgctttcctcctccggccgccggcgggtgtgatgtgccgccgccgctgcccccgccggcgctgacggactgggggcgccgcccgcgcccgggaccgacccctctgctcgcggccgcgcctttgagctctctatcaatatcagctcacatcattgaaaagataattttgaagacatgttttgctgaaaagacactaagaaaaattttacgaatgggatgaacatgctccagttaattgactacctactgcaatttgaatgttaacattacccatctggtacagttacctagtgatgtacctattttcacaataccctgtttcagtgtgcttgtcttgattaaagaattcaaagtggagtaccgcaaacttgatatggaaaataaaaagaaagacaaggacaaatcagatgatagaatggcacgacctagtggtcgatcgggacacaacactcgaggaactgggtcttcatcgtctggagttttaatggttggacctaactttagagttggaaaaaaaattggatgtggcaattttggagaattacgattagggaaaaatttatacacaaatgaatatgtggcaattaagttggagcccatgaaatcaagagcaccacagctacatttggaatacagattctataagcagttaggatctggagatggtatacctcaagtttactatttcggcccttgtggtaaatacaatgctatggtgctggaactgctgggacctagtttggaagacttgtttgacttgtgtgacagaacattttctcttaaaacagttctcatgatagctatacaactgatttctcgcatggaatatgtccattcaaagaacttgatatacagagatgtaaaacctgagaacttcttaataggacgaccaggaaacaaaacccagcaagttattcacattatagattttggtttggcaaaggaatatattgatccggagacaaagaaacacataccatacagagaacacaagagccttacaggaacagctagatatatgagcataaacacacatttaggaaaagaacaaagtagaagagacgatttagaagctttaggtcatatgttcatgtattttctgagaggcagtcttccttggcaaggcttaaaggctgacacattaaaggagaggtatcagaaaattggagatacaaaacgggctacaccaatagaagtgttatgtgaaaattttccagaaatggcaacatatcttcgttatgtaagaaggctagatttttttgaaaaaccagactatgactacttaagaaagctttttactgacttgtttgatcgaaaaggatatatgtttgattatgaatatgactggattggtaaacagttgcctactccagtgggtgcagttcagcaagatcctgctctgtcatcaaacagagaagcacatcaacacagagataagatgcaacaatccaaaaaccagtcggcagaccacagggcagcttgggactcccagcaggcaaatccccaccatttgagagctcaccttgcagcagacagacatggtggctcggtacaggttgtaagttctacaaatggagagttaaacacagatgaccccaccgcaggacgttcaaatgcacccatcacagcccctactgaagtagaagtgatggatgaaaccaactgccagaaagtgttgaacatgtggtgctgctgttttttcaaacgaaggaaaaggaaaaccatacagcgccacaaatgactctggacacagacagatcctggggagttacttacatgttcatctgctgtcttgtgattaaaatcatctctgtagtgaccacgtatattttcaaggactcactcttagaaacaaaaatgtcatactttcatacttcattttgtggttgtcttacattctttttctttttttttttttctctaatttaacctttatggaagctttaaagttttgtcaaaacatgagtgctttgcccatcagtgaatggaatggaccaatgaggtggtatcaatgaatatagttccatagaacattttccagaagttcttctgttgtagaaagcagtacagtatcttaagtgtcaaccagttatatacctaatctggttttttataacttctgtaagagcataatcaaacaggaattttcttttctcagtggataatacaacagagaaaacagagttgcccaaatatttaaaagaagttattccttgagaagttcatattttgtgacatctgcattgatttcagtattactgatggtactgttattcataagtcatattaacattctctccgtgaaatcatggtacagtcactgcccagaggtactgaggaaaaagcaatatgggttcggcagatggtggtggtaaaatgaatcttaaggagtgtggtaaatatgtgctccgcttttgttgcatcactatgtgaagtactgtgttgcagaagtggcaaaagcgcttatttttaaaaatgcaaaatatttgtacaatgtaactttatgcttccaaataataatgtatgttagacagcaagaaatgaatactttaaaaagtgatatatgttggagttataaagaaatacactaaggagaggtagtaaatgtgaaccttgttgcagtgtataaggtggaagcctaaagaaatctcaccgaaacttactgctgaatgattacattctcccttaagcagaaaactttggatgtgccatgcaatggtgtctgtgtaattattttgctctttgattaaaaaaaagacccccagcaataaaaagtgggtcactctatgccctctgtgcacattagtctcttgtattcaactttgctgattctctggaattttcctactctttagcataattttgatgattgaaaaatattttggaaaggatgggtcaggtgctttgcctccatagtcttttgaagtgcctgcatatgaacaacaacaacaacaacaaaaaattctgtaaaaaaggaagcccattccacttttcaagtatgctttgttttaagccataaagacacacatgtagttttgtcacattctactagccaaaattttcaagaagggttaaaacaaagactggctagaaagataattattttgaataaatctcatattcatctttcatttatataattgttacttattcctcccatgcagtctcttcgttgtctttaagtgtgtgcctccaggcatgcttatttatttttattgtctcaaggtaacatttaagatgtatattaaagtaaagctacatttttttacttcattattgcatttacagggatttaattgtactttgtaatttatttttcttattagccaaaagtttaatgcatttttttttgatgaattaggcacccacatgaacaccacaaatcaggacattgtttatcattgttgctatgaatcctatgaatgatcttttttttattttaaagacctacacttaacctacaaaacatttgctgtataatttggtcaacagtttctatctatctgtatactgtcatgatgtcttaaactgcaggagttacatactgagtttatatttttatttgctttgagcaaggtagataaacattttggccattataatgtgaaaccacttcttctttctttacagtatttgaccaaacttgtgtgtctatgatatttgtaaatacatgcgaatatctgtatttcttatcataagcctatttagttttattctcagtagggttttttggattgtacagtgtttatatgatctgaactccttatacataagaaggtgtgtatattaatccaattatggacttaaaatattttaaaagtataaatacccttatttgctgcaaagaccagtgtgtaggcatttgctttttagcaatatttttaagtgctccattttaatgccgaggaataagtcttttggcaacacaaactggtcaataataggtaatgcaggtatgttcaggttaagccaacaatgttttgcatttttatgcttattttctgtcaacactaatgaagtcaacattgcctgaatgtctgaataatgaaacacatccctgtttaaaagtatgtaactgaaaaagaaataaaaaaaaataaaagtagtttttt

SEQ ID NO: 359267 - DNA, 5261 bp, Homo sapiens
ttttcttgatacagtaagtatattaagaatataaacgggtttgataaaatgaacatttaaaaaacatggcaccaggctgattcttcttcctgcacaccttaatgcctaacttttgaaaggacttgagacataagaatcacaattttaaaaaattatagtttccatgccttcatggtggatcaatttccatagaagtctaccaaaatgacttatctccatcccagggaagcaactgcaagagggaaaatgaaaggaatgcagtctttctatgtaggcagagtggacttaagtgtgagtcagaaacaccgatttcagtttgtgcgctgcaacttgataacttgggtgatgtttggcttctcagaactttgggaggtgaatttgaaaaacaggtaatgccacactatatagttcagaggattacctcagcttacaaacagcaaatgagacgcaaatgtgagccataattcacatttctaagcagttggagccctgatatggcactggggttacaaacaagcggggaaaaatgtcaacccagtgatgtcatactcctaggccgggccctaagatttttttggaacctggcgggctgagcacaacagggaaagcctcagcaccctgacttggcacaatggtacccttaaggctctttgctcactcagttcttagtagctctcctaaagcatggtggtgttctcttccagttctctgcgtagactttgctatgcttctccgcccactgcttcatccagagaaacactcgtatccacagcctctccccactttccctcacgcacggctctagaaagacggggatagggcgcggcttaggctttatacaccttgccagccaatgaccgcgccgtctcctttccggtcggcgatccgaccaatccaagaaggttggtgcaatcttcggctctactcggctgttttcgctgatgcgggcagcttgggggccgccgccgctaaacagacgctttcctttttaattttttttccatgtgttcacttccgggtccggcgtcgatccggatgcccgaggcagaaggatgtttgacctccggataagcgaggcgctgctgtgcattcattccgggctgcatcggtggcgacagcagaggctcgggcggcgactctccggccagcggcggcggtaggaggcaccagcggcagtgcagggaccgaatccgagcagcgctgcgttacctctctctctcgctccttcccccctacctcgctcgctcgctcgctcgctccctgcgtggctcgctttcctcctccggccgccggcgggtgtgatgtgccgccgccgctgcccccgccggcgctgacggactgggggcgccgcccgcgcccgggaccgacccctctgctcgcggccgcgcctttgagctctctatcaatatcagctcacatcattgaaaagataattttgaagacatgttttgctgaaaagacactaagaaaaattttacgaatgggatgaacatgctccagttaattgactacctactgcaatttgaatgttaacattacccatctggtacagttacctagtgatgtacctattttcacaataccctgtttcagtgtgcttgtcttgattaaagaattcaaagtggagtaccgcaaacttgatatggaaaataaaaagaaagacaaggacaaatcagatgatagaatggcacgacctagtggtcgatcgggacacaacactcgaggaactgggtcttcatcgtctggagttttaatggttggacctaactttagagttggaaaaaaaattggatgtggcaattttggagaattacgattagggaaaaatttatacacaaatgaatatgtggcaattaagttggagcccatgaaatcaagagcaccacagctacatttggaatacagattctataagcagttaggatctggagatggtatacctcaagtttactatttcggcccttgtggtaaatacaatgctatggtgctggaactgctgggacctagtttggaagacttgtttgacttgtgtgacagaacattttctcttaaaacagttctcatgatagctatacaactgatttctcgcatggaatatgtccattcaaagaacttgatatacagagatgtaaaacctgagaacttcttaataggacgaccaggaaacaaaacccagcaagttattcacattatagattttggtttggcaaaggaatatattgatccggagacaaagaaacacataccatacagagaacacaagagccttacaggaacagctagatatatgagcataaacacacatttaggaaaagaacaaagtagaagagacgatttagaagctttaggtcatatgttcatgtattttctgagaggcagtcttccttggcaaggcttaaaggctgacacattaaaggagaggtatcagaaaattggagatacaaaacgggctacaccaatagaagtgttatgtgaaaattttccagaaatggcaacatatcttcgttatgtaagaaggctagatttttttgaaaaaccagactatgactacttaagaaagctttttactgacttgtttgatcgaaaaggatatatgtttgattatgaatatgactggattggtaaacagttgcctactccagtgggtgcagttcagcaagatcctgctctgtcatcaaacagagaagcacatcaacacagagataagatgcaacaatccaaaaaccaggttgtaagttctacaaatggagagttaaacacagatgaccccaccgcaggacgttcaaatgcacccatcacagcccctactgaagtagaagtgatggatgaaaccaagtgctgctgttttttcaaacgaaggaaaaggaaaaccatacagcgccacaaatgactctggacacagacagatcctggggagttacttacatgttcatctgctgtcttgtgattaaaatcatctctgtagtgaccacgtatattttcaaggactcactcttagaaacaaaaatgtcatactttcatacttcattttgtggttgtcttacattctttttctttttttttttttctctaatttaacctttatggaagctttaaagttttgtcaaaacatgagtgctttgcccatcagtgaatggaatggaccaatgaggtggtatcaatgaatatagttccatagaacattttccagaagttcttctgttgtagaaagcagtacagtatcttaagtgtcaaccagttatatacctaatctggttttttataacttctgtaagagcataatcaaacaggaattttcttttctcagtggataatacaacagagaaaacagagttgcccaaatatttaaaagaagttattccttgagaagttcatattttgtgacatctgcattgatttcagtattactgatggtactgttattcataagtcatattaacattctctccgtgaaatcatggtacagtcactgcccagaggtactgaggaaaaagcaatatgggttcggcagatggtggtggtaaaatgaatcttaaggagtgtggtaaatatgtgctccgcttttgttgcatcactatgtgaagtactgtgttgcagaagtggcaaaagcgcttatttttaaaaatgcaaaatatttgtacaatgtaactttatgcttccaaataataatgtatgttagacagcaagaaatgaatactttaaaaagtgatatatgttggagttataaagaaatacactaaggagaggtagtaaatgtgaaccttgttgcagtgtataaggtggaagcctaaagaaatctcaccgaaacttactgctgaatgattacattctcccttaagcagaaaactttggatgtgccatgcaatggtgtctgtgtaattattttgctctttgattaaaaaaaagacccccagcaataaaaagtgggtcactctatgccctctgtgcacattagtctcttgtattcaactttgctgattctctggaattttcctactctttagcataattttgatgattgaaaaatattttggaaaggatgggtcaggtgctttgcctccatagtcttttgaagtgcctgcatatgaacaacaacaacaacaacaaaaaattctgtaaaaaaggaagcccattccacttttcaagtatgctttgttttaagccataaagacacacatgtagttttgtcacattctactagccaaaattttcaagaagggttaaaacaaagactggctagaaagataattattttgaataaatctcatattcatctttcatttatataattgttacttattcctcccatgcagtctcttcgttgtctttaagtgtgtgcctccaggcatgcttatttatttttattgtctcaaggtaacatttaagatgtatattaaagtaaagctacatttttttacttcattattgcatttacagggatttaattgtactttgtaatttatttttcttattagccaaaagtttaatgcatttttttttgatgaattaggcacccacatgaacaccacaaatcaggacattgtttatcattgttgctatgaatcctatgaatgatcttttttttattttaaagacctacacttaacctacaaaacatttgctgtataatttggtcaacagtttctatctatctgtatactgtcatgatgtcttaaactgcaggagttacatactgagtttatatttttatttgctttgagcaaggtagataaacattttggccattataatgtgaaaccacttcttctttctttacagtatttgaccaaacttgtgtgtctatgatatttgtaaatacatgcgaatatctgtatttcttatcataagcctatttagttttattctcagtagggttttttggattgtacagtgtttatatgatctgaactccttatacataagaaggtgtgtatattaatccaattatggacttaaaatattttaaaagtataaatacccttatttgctgcaaagaccagtgtgtaggcatttgctttttagcaatatttttaagtgctccattttaatgccgaggaataagtcttttggcaacacaaactggtcaataataggtaatgcaggtatgttcaggttaagccaacaatgttttgcatttttatgcttattttctgtcaacactaatgaagtcaacattgcctgaatgtctgaataatgaaacacatccctgtttaaaagtatgtaactgaaaaagaaataaaaaaaaataaaagtagtttttt

SEQ ID NO: 359268 - DNA, 4725 bp, Homo sapiens
ttttcttgatacagtaagtatattaagaatataaacgggtttgataaaatgaacatttaaaaaacatggcaccaggctgattcttcttcctgcacaccttaatgcctaacttttgaaaggacttgagacataagaatcacaattttaaaaaattatagtttccatgccttcatggtggatcaatttccatagaagtctaccaaaatgacttatctccatcccagggaagcaactgcaagagggaaaatgaaaggaatgcagtctttctatgtaggcagagtggacttaagtgtgagtcagaaacaccgatttcagtttgtgcgctgcaacttgataacttgggtgatgtttggcttctcagaactttgggaggtgaatttgaaaaacaggtaatgccacactatatagttcagaggattacctcagcttacaaacagcaaatgagacgcaaatgtgagccataattcacatttctaagcagttggagccctgatatggcactggggttacaaacaagcggggaaaaatgtcaacccagtgatgtcatactcctaggccgggccctaagatttttttggaacctggcgggctgagcacaacagggaaagcctcagcaccctgacttggcacaatggtacccttaaggctctttgctcactcagttcttagtagctctcctaaagcatggtggtgttctcttccagttctctgcgtagactttgctatgcttctccgcccactgcttcatccagagaaacactcgtatccacagcctctccccactttccctcacgcacggctctagaaagacggggatagggcgcggcttaggctttatacaccttgccagccaatgaccgcgccgtctcctttccggtcggcgatccgaccaatccaagaaggttggtgcaatcttcggctctactcggctgttttcgctgatgcgggcagcttgggggccgccgccgctaaacagacgctttcctttttaattttttttccatgtgttcacttccgggtccggcgtcgatccggatgcccgaggcagaaggatgtttgacctccggataagcgaggcgctgctgtgcattcattccgggctgcatcggtggcgacagcagaggctcgggcggcgactctccggccagcggcggcggtaggaggcaccagcggcagtgcagggaccgaatccgagcagcgctgcgttacctctctctctcgctccttcccccctacctcgctcgctcgctcgctcgctccctgcgtggctcgctttcctcctccggccgccggcgggtgtgatgtgccgccgccgctgcccccgccggcgctgacggactgggggcgccgcccgcgcccgggaccgacccctctgctcgcggccgcgcctttgagatggtatacctcaagtttactatttcggcccttgtggtaaatacaatgctatggtgctggaactgctgggacctagtttggaagacttgtttgacttgtgtgacagaacattttctcttaaaacagttctcatgatagctatacaactgatttctcgcatggaatatgtccattcaaagaacttgatatacagagatgtaaaacctgagaacttcttaataggacgaccaggaaacaaaacccagcaagttattcacattatagattttggtttggcaaaggaatatattgatccggagacaaagaaacacataccatacagagaacacaagagccttacaggaacagctagatatatgagcataaacacacatttaggaaaagaacaaagtagaagagacgatttagaagctttaggtcatatgttcatgtattttctgagaggcagtcttccttggcaaggcttaaaggctgacacattaaaggagaggtatcagaaaattggagatacaaaacgggctacaccaatagaagtgttatgtgaaaattttccagaaatggcaacatatcttcgttatgtaagaaggctagatttttttgaaaaaccagactatgactacttaagaaagctttttactgacttgtttgatcgaaaaggatatatgtttgattatgaatatgactggattggtaaacagttgcctactccagtgggtgcagttcagcaagatcctgctctgtcatcaaacagagaagcacatcaacacagagataagatgcaacaatccaaaaaccaggttgtaagttctacaaatggagagttaaacacagatgaccccaccgcaggacgttcaaatgcacccatcacagcccctactgaagtagaagtgatggatgaaaccaagtgctgctgttttttcaaacgaaggaaaaggaaaaccatacagcgccacaaatgactctggacacagacagatcctggggagttacttacatgttcatctgctgtcttgtgattaaaatcatctctgtagtgaccacgtatattttcaaggactcactcttagaaacaaaaatgtcatactttcatacttcattttgtggttgtcttacattctttttctttttttttttttctctaatttaacctttatggaagctttaaagttttgtcaaaacatgagtgctttgcccatcagtgaatggaatggaccaatgaggtggtatcaatgaatatagttccatagaacattttccagaagttcttctgttgtagaaagcagtacagtatcttaagtgtcaaccagttatatacctaatctggttttttataacttctgtaagagcataatcaaacaggaattttcttttctcagtggataatacaacagagaaaacagagttgcccaaatatttaaaagaagttattccttgagaagttcatattttgtgacatctgcattgatttcagtattactgatggtactgttattcataagtcatattaacattctctccgtgaaatcatggtacagtcactgcccagaggtactgaggaaaaagcaatatgggttcggcagatggtggtggtaaaatgaatcttaaggagtgtggtaaatatgtgctccgcttttgttgcatcactatgtgaagtactgtgttgcagaagtggcaaaagcgcttatttttaaaaatgcaaaatatttgtacaatgtaactttatgcttccaaataataatgtatgttagacagcaagaaatgaatactttaaaaagtgatatatgttggagttataaagaaatacactaaggagaggtagtaaatgtgaaccttgttgcagtgtataaggtggaagcctaaagaaatctcaccgaaacttactgctgaatgattacattctcccttaagcagaaaactttggatgtgccatgcaatggtgtctgtgtaattattttgctctttgattaaaaaaaagacccccagcaataaaaagtgggtcactctatgccctctgtgcacattagtctcttgtattcaactttgctgattctctggaattttcctactctttagcataattttgatgattgaaaaatattttggaaaggatgggtcaggtgctttgcctccatagtcttttgaagtgcctgcatatgaacaacaacaacaacaacaaaaaattctgtaaaaaaggaagcccattccacttttcaagtatgctttgttttaagccataaagacacacatgtagttttgtcacattctactagccaaaattttcaagaagggttaaaacaaagactggctagaaagataattattttgaataaatctcatattcatctttcatttatataattgttacttattcctcccatgcagtctcttcgttgtctttaagtgtgtgcctccaggcatgcttatttatttttattgtctcaaggtaacatttaagatgtatattaaagtaaagctacatttttttacttcattattgcatttacagggatttaattgtactttgtaatttatttttcttattagccaaaagtttaatgcatttttttttgatgaattaggcacccacatgaacaccacaaatcaggacattgtttatcattgttgctatgaatcctatgaatgatcttttttttattttaaagacctacacttaacctacaaaacatttgctgtataatttggtcaacagtttctatctatctgtatactgtcatgatgtcttaaactgcaggagttacatactgagtttatatttttatttgctttgagcaaggtagataaacattttggccattataatgtgaaaccacttcttctttctttacagtatttgaccaaacttgtgtgtctatgatatttgtaaatacatgcgaatatctgtatttcttatcataagcctatttagttttattctcagtagggttttttggattgtacagtgtttatatgatctgaactccttatacataagaaggtgtgtatattaatccaattatggacttaaaatattttaaaagtataaatacccttatttgctgcaaagaccagtgtgtaggcatttgctttttagcaatatttttaagtgctccattttaatgccgaggaataagtcttttggcaacacaaactggtcaataataggtaatgcaggtatgttcaggttaagccaacaatgttttgcatttttatgcttattttctgtcaacactaatgaagtcaacattgcctgaatgtctgaataatgaaacacatccctgtttaaaagtatgtaactgaaaaagaaataaaaaaaaataaaagtagtttttt

SEQ ID NO: 359269 - DNA, 3935 bp, Homo sapiens
ttttcttgatacagtaagtatattaagaatataaacgggtttgataaaatgaacatttaaaaaacatggcaccaggctgattcttcttcctgcacaccttaatgcctaacttttgaaaggacttgagacataagaatcacaattttaaaaaattatagtttccatgccttcatggtggatcaatttccatagaagtctaccaaaatgacttatctccatcccagggaagcaactgcaagagggaaaatgaaaggaatgcagtctttctatgtaggcagagtggacttaagtgtgagtcagaaacaccgatttcagtttgtgcgctgcaacttgataacttgggtgatgtttggcttctcagaactttgggaggtgaatttgaaaaacaggtaatgccacactatatagttcagaggattacctcagcttacaaacagcaaatgagacgcaaatgtgagccataattcacatttctaagcagttggagccctgatatggcactggggttacaaacaagcggggaaaaatgtcaacccagtgatgtcatactcctaggccgggccctaagatttttttggaacctggcgggctgagcacaacagggaaagcctcagcaccctgacttggcacaatggtacccttaaggctctttgctcactcagttcttagtagctctcctaaagcatggtggtgttctcttccagttctctgcgtagactttgctatgcttctccgcccactgcttcatccagagaaacactcgtatccacagcctctccccactttccctcacgcacggctctagaaagacggggatagggcgcggcttaggctttatacaccttgccagccaatgaccgcgccgtctcctttccggtcggcgatccgaccaatccaagaaggttggtgcaatcttcggctctactcggctgttttcgctgatgcgggcagcttgggggccgccgccgctaaacagacgctttcctttttaattttttttccatgtgttcacttccgggtccggcgtcgatccggatgcccgaggcagaaggatgtttgacctccggataagcgaggcgctgctgtgcattcattccgggctgcatcggtggcgacagcagaggctcgggcggcgactctccggccagcggcggcggtaggaggcaccagcggcagtgcagggaccgaatccgagcagcgctgcgttacctctctctctcgctccttcccccctacctcgctcgctcgctcgctcgctccctgcgtggctcgctttcctcctccggccgccggcgggtgtgatgtgccgccgccgctgcccccgccggcgctgacggactgggggcgccgcccgcgcccgggaccgacccctctgctcgcggccgcgcctttgagctctctatcaatatcagctcacatcattgaaaagataattttgaagacatgttttgctgaaaagacactaagaaaaattttacgaatgggatgaacatgctccagttaattgactacctactgcaatttgaatgttaacattacccatctggtacagttacctagtgatgtacctattttcacaataccctgtttcagtgtgcttgtcttgattaaagaattcaaagtggagtaccgcaaacttgatatggaaaataaaaagaaagacaaggacaaatcagatgatagaatggcacgacctagtggtcgatcgggacacaacactcgaggaactgggtcttcatcgtctggagttttaatggttggacctaactttagagttggaaaaaaaattggatgtggcaattttggagaattacgattagggaaaaatttatacacaaatgaatatgtggcaattaagttggagcccatgaaatcaagagcaccacagctacatttggaatacagattctataagcagttaggatctggagatggtatacctcaagtttactatttcggcccttgtggtaaatacaatgctatggtgctggaactgctgggacctagtttggaagacttgtttgacttgtgtgacagaacattttctcttaaaacagttctcatgatagctatacaactgatttctcgcatggaatatgtccattcaaagaacttgatatacagagatgtaaaacctgagaacttcttaataggacgaccaggaaacaaaacccagcaagttattcacattatagattttggtttggcaaaggaatatattgatccggagacaaagaaacacataccatacagagaacacaagagccttacaggaacagctagatatatgagcataaacacacatttaggaaaagaacaaagtagaagagacgatttagaagctttaggtcatatgttcatgtattttctgagaggcagtcttccttggcaaggcttaaaggctgacacattaaaggagaggtatcagaaaattggagatacaaaacgggctacaccaatagaagtgttatgtgaaaattttccagaaatggcaacatatcttcgttatgtaagaaggctagatttttttgaaaaaccagactatgactacttaagaaagctttttactgacttgtttgatcgaaaaggatatatgtttgattatgaatatgactggattggtaaacagttgcctactccagtgggtgcagttcagcaagatcctgctctgtcatcaaacagagaagcacatcaacacagagataagatgcaacaatccaaaaaccaggttgtaagttctacaaatggagagttaaacacagatgaccccaccgcaggacgttcaaatgcacccatcacagcccctactgaagtagaagtgatggatgaaaccaagtgctgctgttttttcaaacgaaggaaaaggaaaaccatacagcgccacaaatgactctggacacagacagatcctggggagttacttacatgttcatctgctgtcttgtgattaaaatcatctctgtagtgaccacgtatattttcaaggactcactcttagaaacaaaaatgtcatactttcatacttcattttgtggttgtcttacattctttttctttttttttttttctctaatttaacctttatggaagctttaaagttttgtcaaaacatgagtgctttgcccatcagtgaatggaatggaccaatgaggtggtatcaatgaatatagttccatagaacattttccagaagttcttctgttgtagaaagcagtacagtatcttaagtgtcaaccagttatatacctaatctggttttttataacttctgtaagagcataatcaaacaggaattttcttttctcagtggataatacaacagagaaaacagagttgcccaaatatttaaaagaagttattccttgagaagttcatattttgtgacatctgcattgatttcagtattactgatggtactgttattcataagtcatattaacattctctccgtgaaatcatggtacagtcactgcccagaggtactgaggaaaaagcaatatgggttcggcagatggtggtggtaaaatgaatcttaaggagtgtggtaaatatgtgctccgcttttgttgcatcactatgtgaagtactgtgttgcagaagtggcaaaagcgcttatttttaaaaatgcaaaatatttgtacaatgtaactttatgcttccaaataataatgtatgttagacagcaagaaatgaatactttaaaaagtgatatatgttggagttataaagaaatacactaaggagaggtagtaaatgtgaaccttgttgcagtgtataaggtggaagcctaaagaaatctcaccgaaacttactgctgaatgattacattctcccttaagcagaaaactttggatgtgccatgcaatggtgtctgtgtaattattttgctctttgattaaaaaaaagacccccagcaataaaaagtgggtcactct

SEQ ID NO: 359270 - DNA, 2569 bp, Homo sapiens
acagacaccccacaacacccaaaacccacggccctcgttgtaagttctacaaatggagagttaaacacagatgaccccaccgcaggacgttcaaatgcacccatcacagcccctactgaagtagaagtgatggatgaaaccaagtgctgctgttttttcaaacgaaggaaaaggaaaaccatacagcgccacaaatgactctggacacagacagatcctggggagttacttacatgttcatctgctgtcttgtgattaaaatcatctctgtagtgaccacgtatattttcaaggactcactcttagaaacaaaaatgtcatactttcatacttcattttgtggttgtcttacattctttttctttttttttttttctctaatttaacctttatggaagctttaaagttttgtcaaaacatgagtgctttgcccatcagtgaatggaatggaccaatgaggtggtatcaatgaatatagttccatagaacattttccagaagttcttctgttgtagaaagcagtacagtatcttaagtgtcaaccagttatatacctaatctggttttttataacttctgtaagagcataatcaaacaggaattttcttttctcagtggataatacaacagagaaaacagagttgcccaaatatttaaaagaagttattccttgagaagttcatattttgtgacatctgcattgatttcagtattactgatggtactgttattcataagtcatattaacattctctccgtgaaatcatggtacagtcactgcccagaggtactgaggaaaaagcaatatgggttcggcagatggtggtggtaaaatgaatcttaaggagtgtggtaaatatgtgctccgcttttgttgcatcactatgtgaagtactgtgttgcagaagtggcaaaagcgcttatttttaaaaatgcaaaatatttgtacaatgtaactttatgcttccaaataataatgtatgttagacagcaagaaatgaatactttaaaaagtgatatatgttggagttataaagaaatacactaaggagaggtagtaaatgtgaaccttgttgcagtgtataaggtggaagcctaaagaaatctcaccgaaacttactgctgaatgattacattctcccttaagcagaaaactttggatgtgccatgcaatggtgtctgtgtaattattttgctctttgattaaaaaaaagacccccagcaataaaaagtgggtcactctatgccctctgtgcacattagtctcttgtattcaactttgctgattctctggaattttcctactctttagcataattttgatgattgaaaaatattttggaaaggatgggtcaggtgctttgcctccatagtcttttgaagtgcctgcatatgaacaacaacaacaacaacaaaaaattctgtaaaaaaggaagcccattccacttttcaagtatgctttgttttaagccataaagacacacatgtagttttgtcacattctactagccaaaattttcaagaagggttaaaacaaagactggctagaaagataattattttgaataaatctcatattcatctttcatttatataattgttacttattcctcccatgcagtctcttcgttgtctttaagtgtgtgcctccaggcatgcttatttatttttattgtctcaaggtaacatttaagatgtatattaaagtaaagctacatttttttacttcattattgcatttacagggatttaattgtactttgtaatttatttttcttattagccaaaagtttaatgcatttttttttgatgaattaggcacccacatgaacaccacaaatcaggacattgtttatcattgttgctatgaatcctatgaatgatcttttttttattttaaagacctacacttaacctacaaaacatttgctgtataatttggtcaacagtttctatctatctgtatactgtcatgatgtcttaaactgcaggagttacatactgagtttatatttttatttgctttgagcaaggtagataaacattttggccattataatgtgaaaccacttcttctttctttacagtatttgaccaaacttgtgtgtctatgatatttgtaaatacatgcgaatatctgtatttcttatcataagcctatttagttttattctcagtagggttttttggattgtacagtgtttatatgatctgaactccttatacataagaaggtgtgtatattaatccaattatggacttaaaatattttaaaagtataaatacccttatttgctgcaaagaccagtgtgtaggcatttgctttttagcaatatttttaagtgctccattttaatgccgaggaataagtcttttggcaacacaaactggtcaataataggtaatgcaggtatgttcaggttaagccaacaatgttttgcatttttatgcttattttctgtcaacactaatgaagtcaacattgcctgaatgtctgaataatgaaacacatccctgtttaaaagtatgtaactgaaaaagaaataaaaaaaaataaaagtagtttttt

SEQ ID NO: 359271 - DNA, 3284 bp, Homo sapiens
ttttcttgatacagtaagtatattaagaatataaacgggtttgataaaatgaacatttaaaaaacatggcaccaggctgattcttcttcctgcacaccttaatgcctaacttttgaaaggacttgagacataagaatcacaattttaaaaaattatagtttccatgccttcatggtggatcaatttccatagaagtctaccaaaatgacttatctccatcccagggaagcaactgcaagagggaaaatgaaaggaatgcagtctttctatgtaggcagagtggacttaagtgtgagtcagaaacaccgatttcagtttgtgcgctgcaacttgataacttgggtgatgtttggcttctcagaactttgggaggtgaatttgaaaaacaggtaatgccacactatatagttcagaggattacctcagcttacaaacagcaaatgagacgcaaatgtgagccataattcacatttctaagcagttggagccctgatatggcactggggttacaaacaagcggggaaaaatgtcaacccagtgatgtcatactcctaggccgggccctaagatttttttggaacctggcgggctgagcacaacagggaaagcctcagcaccctgacttggcacaatggtacccttaaggctctttgctcactcagttcttagtagctctcctaaagcatggtggtgttctcttccagttctctgcgtagactttgctatgcttctccgcccactgcttcatccagagaaacactcgtatccacagcctctccccactttccctcacgcacggctctagaaagacggggatagggcgcggcttaggctttatacaccttgccagccaatgaccgcgccgtctcctttccggtcggcgatccgaccaatccaagaaggttggtgcaatcttcggctctactcggctgttttcgctgatgcgggcagcttgggggccgccgccgctaaacagacgctttcctttttaattttttttccatgtgttcacttccgggtccggcgtcgatccggatgcccgaggcagaaggatgtttgacctccggataagcgaggcgctgctgtgcattcattccgggctgcatcggtggcgacagcagaggctcgggcggcgactctccggccagcggcggcggtaggaggcaccagcggcagtgcagggaccgaatccgagcagcgctgcgttacctctctctctcgctccttcccccctacctcgctcgctcgctcgctcgctccctgcgtggctcgctttcctcctccggccgccggcgggtgtgatgtgccgccgccgctgcccccgccggcgctgacggactgggggcgccgcccgcgcccgggaccgacccctctgctcgcggccgcgcctttgagctctctatcaatatcagctcacatcattgaaaagataattttgaagacatgttttgctgaaaagacactaagaaaaattttacgaatgggatgaacatgctccagttaattgactacctactgcaatttgaatgttaacattacccatctggtacagttacctagtgatgtacctattttcacaataccctgtttcagtgtgcttgtcttgattaaagaattcaaagtggagtaccgcaaacttgatatggaaaataaaaagaaagacaaggacaaatcagatgatagaatggcacgacctagtggtcgatcgggacacaacactcgaggaactgggtcttcatcgtctggagttttaatggttggacctaactttagagttggaaaaaaaattggatgtggcaattttggagaattacgattagggaaaaatttatacacaaatgaatatgtggcaattaagttggagcccatgaaatcaagagcaccacagctacatttggaatacagattctataagcagttaggatctggagatggtatacctcaagtttactatttcggcccttgtggtaaatacaatgctatggtgctggaactgctgggacctagtttggaagacttgtttgacttgtgtgacagaacattttctcttaaaacagttctcatgatagctatacaactgatttctcgcatggaatatgtccattcaaagaacttgatatacagagatgtaaaacctgagaacttcttaataggacgaccaggaaacaaaacccagcaagttattcacattatagattttggtttggcaaaggaatatattgatccggagacaaagaaacacataccatacagagaacacaagagccttacaggaacagctagatatatgagcataaacacacatttaggaaaagaacaaagtagaagagacgatttagaagctttaggtcatatgttcatgtattttctgagaggcagtcttccttggcaaggcttaaaggctgacacattaaaggagaggtatcagaaaattggagatacaaaacgggctacaccaatagaagtgttatgtgaaaattttccagaaatggcaacatatcttcgttatgtaagaaggctagatttttttgaaaaaccagactatgactacttaagaaagctttttactgacttgtttgatcgaaaaggatatatgtttgattatgaatatgactggattggtaaacagttgcctactccagtgggtgcagttcagcaagatcctgctctgtcatcaaacagagaagcacatcaacacagagataagatgcaacaatccaaaaaccaggttgtaagttctacaaatggagagttaaacacagatgaccccaccgcaggacgttcaaatgcacccatcacagcccctactgaagtagaagtgatggatgaaaccaagtgctgctgttttttcaaacgaaggaaaaggaaaaccatacagcgccacaaatgactctggacacagacagatcctggggagttacttacatgttcatctgctgtcttgtgattaaaatcatctctgtagtgaccacgtatattttcaaggactcactcttagaaacaaaaatgtcatactttcatacttcattttgtggttgtcttacattctttttctttttttttttttctctaatttaacctttatggaagctttaaagttttgtcaaaacatgagtgctttgcccatcagtgaatggaatggaccaatgaggtggtatcaatgaatatagttccatagaacattttccagaagttcttctgttgtagaaagcagaagttataaaaaaccagattaggtatataactggttgacacttaagatactgtactgctttctgtcgagc

SEQ ID NO: 359272 - DNA, 1675 bp, Homo sapiens
aagcagtggtatcaacgcagagtgcccattacggccgggtgcaaaatatttgtacaatgtaactttatgcttccaaataataatgtatgttagacagcaagaaatgaatactttaaaaagtgatatatgttggagttataaagaaatacactaaggagaggtagtaaatgtgaaccttgttgcagtgtataaggtggaagcctaaagaaatctcaccgaaacttactgctgaatgattacattctcccttaagcagaaaactttggatgtgccatgcaatggtgtctgtgtaattattttgctctttgattaaaaaaaagacccccagcaataaaaagtgggtcactctatgccctctgtgcacattagtctcttgtattcaactttgctgattctctggaattttcctactctttagcataattttgatgattgaaaaatattttggaaaggatgggtcaggtgctttgcctccatagtcttttgaagtgcctgcatatgaacaacaacaacaacaacaaaaaattctgtaaaaaaggaagcccattccacttttcaagtatgctttgttttaagccataaagacacacatgtagttttgtcacattctactagccaaaattttcaagaagggttaaaacaaagactggctagaaagataattattttgaataaatctcatattcatctttcatttatataattgttacttattcctcccatgcagtctcttcgttgtctttaagtgtgtgcctccaggcatgcttatttatttttattgtctcaaggtaacatttaagatgtatattaaagtaaagctacatttttttacttcattattgcatttacagggatttaattgtactttgtaatttatttttcttattagccaaaagtttaatgcatttttttttgatgaattaggcacccacatgaacaccacaaatcaggacattgtttatcattgttgctatgaatcctatgaatgatcttttttttattttaaagacctacacttaacctacaaaacatttgctgtataatttggtcaacagtttctatctatctgtatactgtcatgatgtcttaaactgcaggagttacatactgagtttatatttttatttgctttgagcaaggtagataaacattttggccattataatgtgaaaccacttcttctttctttacagtatttgaccaaacttgtgtgtctatgatatttgtaaatacatgcgaatatctgtatttcttatcataagcctatttagttttattctcagtagggttttttggattgtacagtgtttatatgatctgaactccttatacataagaaggtgtgtatattaatccaattatggacttaaaatattttaaaagtataaatacccttatttgctgcaaagaccagtgtgtaggcatttgctttttagcaatatttttaagtgctccattttaatgccgaggaataagtcttttggcaacacaaactggtcaataataggtaatgcaggtatgttcaggttaagccaacaatgttttgcatttttatgcttattttctgtcaacactaatgaagtcaacattgcctgaatgtctgaataatgaaacacatccctgtttaaaagtatgtaactgaaaaagaaataaaaaaaaataaaagtagtttttt

SEQ ID NO: 359273 - DNA, 2155 bp, Homo sapiens
ttttcttgatacagtaagtatattaagaatataaacgggtttgataaaatgaacatttaaaaaacatggcaccaggctgattcttcttcctgcacaccttaatgcctaacttttgaaaggacttgagacataagaatcacaattttaaaaaattatagtttccatgccttcatggtggatcaatttccatagaagtctaccaaaatgacttatctccatcccagggaagcaactgcaagagggaaaatgaaaggaatgcagtctttctatgtaggcagagtggacttaagtgtgagtcagaaacaccgatttcagtttgtgcgctgcaacttgataacttgggtgatgtttggcttctcagaactttgggaggtgaatttgaaaaacaggtaatgccacactatatagttcagaggattacctcagcttacaaacagcaaatgagacgcaaatgtgagccataattcacatttctaagcagttggagccctgatatggcactggggttacaaacaagcggggaaaaatgtcaacccagtgatgtcatactcctaggccgggccctaagatttttttggaacctggcgggctgagcacaacagggaaagcctcagcaccctgacttggcacaatggtacccttaaggctctttgctcactcagttcttagtagctctcctaaagcatggtggtgttctcttccagttctctgcgtagactttgctatgcttctccgcccactgcttcatccagagaaacactcgtatccacagcctctccccactttccctcacgcacggctctagaaagacggggatagggcgcggcttaggctttatacaccttgccagccaatgaccgcgccgtctcctttccggtcggcgatccgaccaatccaagaaggttggtgcaatcttcggctctactcggctgttttcgctgatgcgggcagcttgggggccgccgccgctaaacagacgctttcctttttaattttttttccatgtgttcacttccgggtccggcgtcgatccggatgcccgaggcagaaggatgtttgacctccggataagcgaggcgctgctgtgcattcattccgggctgcatcggtggcgacagcagaggctcgggcggcgactctccggccagcggcggcggtaggaggcaccagcggcagtgcagggaccgaatccgagcagcgctgcgttacctctctctctcgctccttcccccctacctcgctcgctcgctcgctcgctccctgcgtggctcgctttcctcctccggccgccggcgggtgtgatgtgccgccgccgctgcccccgccggcgctgacggactgggggcgccgcccgcgcccgggaccgacccctctgctcgcggccgcgcctttgagctctctatcaatatcagctcacatcattgaaaagataattttgaagacatgttttgctgaaaagacactaagaaaaattttacgaatgggatgaacatgctccagttaattgactacctactgcaatttgaatgttaacattacccatctggtacagttacctagtgatgtacctattttcacaataccctgtttcagtgtgcttgtcttgattaaagaattcaaagtggagtaccgcaaacttgatatggaaaataaaaagaaagacaaggacaaatcagatgatagaatggcacgacctagtggtcgatcgggacacaacactcgaggaactgggtcttcatcgtctggagttttaatggttggacctaactttagagttggaaaaaaaattggatgtggcaattttggagaattacgattaggtaagactattttgtttattccattatgttagaaacattttaaaaattggaagatactttttaatgaaaatgatttagttatttaattgtttagttgtttaatggttgtggtaattttaaagaataaagatgttggaaatttcttttgtagttgtattttcatgtgtaaggaattccctagtataggagtgtctactttagccatccagagattgactatccagattatgagaaaacaaacaattaaattaaaatagcccagtaggctgaaatagctgccagtaaagcctttgcaatgttctttaggaatgatatttaggccactttttcagatt

SEQ ID NO: 359274 - DNA, 1011 bp, Homo sapiens
ttgtacgttttttttgccaatagaagcaaaaacctatgctttagttaaatgtattatgtgctttttttcagagtacagttttatataatgtatctttaaaatcaattactggcagaatctgatttttttttctttttcaagggaaaaatttatacacaaatgaatatgtggcaattaagttggagcccatgaaatcagagcaccacagctacatttggaatacagattctataagcagttaggatctggagctctctatcaatatcagctcacatcattgaaaagataattttgaagacatgttttgctgaaaagacactaagaaaaattttacgaatgggatgaacatgctccagttaattgactacctactgcaatttgaatgttaacattacccatctggtacagttacctagtgatgtacctattttcacaataccctgtttcagtgtgcttgtcttgattaaagaattcaaagtggagtaccgcaaacttgatatggaaaataaaaagaaagacaaggacaaatcagatgatagaatggcacgacctagtggtcgatcgggacacaacactcgaggaactgggtcttcatcgtctggagttttaatggttggacctaactttagagttggaaaaaaaattggatgtggcaattttggagaattacgattaggtaagactattttgtttattccattatgttagaaacattttaaaaattggaagatactttttaatgaaaatgatttagttatttaattgtttagttgtttaatggttgtggtaattttaaagaataaagatgttggaaatttcttttgtagttgtattttcatgtgtaaggaattccctagtataggagtgtctactttagccatccagagattgactatccagattatgagaaaacaaacaattaaattaaaatagcccagtaggctgaaatagctgccagtaaagcctttgcaatgttctttaggaatgatatttaggccactttttcagatt

SEQ ID NO: 359275 - DNA, 5357 bp, Homo sapiens
ttttcttgatacagtaagtatattaagaatataaacgggtttgataaaatgaacatttaaaaaacatggcaccaggctgattcttcttcctgcacaccttaatgcctaacttttgaaaggacttgagacataagaatcacaattttaaaaaattatagtttccatgccttcatggtggatcaatttccatagaagtctaccaaaatgacttatctccatcccagggaagcaactgcaagagggaaaatgaaaggaatgcagtctttctatgtaggcagagtggacttaagtgtgagtcagaaacaccgatttcagtttgtgcgctgcaacttgataacttgggtgatgtttggcttctcagaactttgggaggtgaatttgaaaaacaggtaatgccacactatatagttcagaggattacctcagcttacaaacagcaaatgagacgcaaatgtgagccataattcacatttctaagcagttggagccctgatatggcactggggttacaaacaagcggggaaaaatgtcaacccagtgatgtcatactcctaggccgggccctaagatttttttggaacctggcgggctgagcacaacagggaaagcctcagcaccctgacttggcacaatggtacccttaaggctctttgctcactcagttcttagtagctctcctaaagcatggtggtgttctcttccagttctctgcgtagactttgctatgcttctccgcccactgcttcatccagagaaacactcgtatccacagcctctccccactttccctcacgcacggctctagaaagacggggatagggcgcggcttaggctttatacaccttgccagccaatgaccgcgccgtctcctttccggtcggcgatccgaccaatccaagaaggttggtgcaatcttcggctctactcggctgttttcgctgatgcgggcagcttgggggccgccgccgctaaacagacgctttcctttttaattttttttccatgtgttcacttccgggtccggcgtcgatccggatgcccgaggcagaaggatgtttgacctccggataagcgaggcgctgctgtgcattcattccgggctgcatcggtggcgacagcagaggctcgggcggcgactctccggccagcggcggcggtaggaggcaccagcggcagtgcagggaccgaatccgagcagcgctgcgttacctctctctctcgctccttcccccctacctcgctcgctcgctcgctcgctccctgcgtggctcgctttcctcctccggccgccggcgggtgtgatgtgccgccgccgctgcccccgccggcgctgacggactgggggcgccgcccgcgcccgggaccgacccctctgctcgcggccgcgcctttgagctctctatcaatatcagctcacatcattgaaaagataattttgaagacatgttttgctgaaaagacactaagaaaaattttacgaatgggatgaacatgctccagttaattgactacctactgcaatttgaatgttaacattacccatctggtacagttacctagtgatgtacctattttcacaataccctgtttcagtgtgcttgtcttgattaaagaattcaaagtggagtaccgcaaacttgatatggaaaataaaaagaaagacaaggacaaatcagatgatagaatggcacgacctagtggtcgatcgggacacaacactcgaggaactgggtcttcatcgtctggagttttaatggttggacctaactttagagttggaaaaaaaattggatgtggcaattttggagaattacgattagggaaaaatttatacacaaatgaatatgtggcaattaagttggagcccatgaaatcaagagcaccacagctacatttggaatacagattctataagcagttaggatctggagatggtatacctcaagtttactatttcggcccttgtggtaaatacaatgctatggtgctggaactgctgggacctagtttggaagacttgtttgacttgtgtgacagaacattttctcttaaaacagttctcatgatagctatacaactgatttctcgcatggaatatgtccattcaaagaacttgatatacagagatgtaaaacctgagaacttcttaataggacgaccaggaaacaaaacccagcaagttattcacattatagattttggtttggcaaaggaatatattgatccggagacaaagaaacacataccatacagagaacacaagagccttacaggaacagctagatatatgagcataaacacacatttaggaaaagaacaaagtagaagagacgatttagaagctttaggtcatatgttcatgtattttctgagaggcagtcttccttggcaaggcttaaaggctgacacattaaaggagaggtatcagaaaattggagatacaaaacgggctacaccaatagaagtgttatgtgaaaattttccagaaatggcaacatatcttcgttatgtaagaaggctagatttttttgaaaaaccagactatgactacttaagaaagctttttactgacttgtttgatcgaaaaggatatatgtttgattatgaatatgactggattggtaaacagttgcctactccagtgggtgcagttcagcaagatcctgctctgtcatcaaacagagaagcacatcaacacagagataagatgcaacaatccaaaaaccagtcggcagaccacagggcagcttgggactcccagcaggcaaatccccaccatttgagagctcaccttgcagcagacagacatggtggctcggtacaggttgtaagttctacaaatggagagttaaacacagatgaccccaccgcaggacgttcaaatgcacccatcacagcccctactgaagtagaagtgatggatgaaaccaagtgctgctgttttttcaaacgaaggaaaaggaaaaccatacagcgccacaaatgactctggacacagacagatcctggggagttacttacatgttcatctgctgtcttgtgattaaaatcatctctgtagtgaccacgtatattttcaaggactcactcttagaaacaaaaatgtcatactttcatacttcattttgtggttgtcttacattctttttctttttttttttttctctaatttaacctttatggaagctttaaagttttgtcaaaacatgagtgctttgcccatcagtgaatggaatggaccaatgaggtggtatcaatgaatatagttccatagaacattttccagaagttcttctgttgtagaaagcagtacagtatcttaagtgtcaaccagttatatacctaatctggttttttataacttctgtaagagcataatcaaacaggaattttcttttctcagtggataatacaacagagaaaacagagttgcccaaatatttaaaagaagttattccttgagaagttcatattttgtgacatctgcattgatttcagtattactgatggtactgttattcataagtcatattaacattctctccgtgaaatcatggtacagtcactgcccagaggtactgaggaaaaagcaatatgggttcggcagatggtggtggtaaaatgaatcttaaggagtgtggtaaatatgtgctccgcttttgttgcatcactatgtgaagtactgtgttgcagaagtggcaaaagcgcttatttttaaaaatgcaaaatatttgtacaatgtaactttatgcttccaaataataatgtatgttagacagcaagaaatgaatactttaaaaagtgatatatgttggagttataaagaaatacactaaggagaggtagtaaatgtgaaccttgttgcagtgtataaggtggaagcctaaagaaatctcaccgaaacttactgctgaatgattacattctcccttaagcagaaaactttggatgtgccatgcaatggtgtctgtgtaattattttgctctttgattaaaaaaaagacccccagcaataaaaagtgggtcactctatgccctctgtgcacattagtctcttgtattcaactttgctgattctctggaattttcctactctttagcataattttgatgattgaaaaatattttggaaaggatgggtcaggtgctttgcctccatagtcttttgaagtgcctgcatatgaacaacaacaacaacaacaaaaaattctgtaaaaaaggaagcccattccacttttcaagtatgctttgttttaagccataaagacacacatgtagttttgtcacattctactagccaaaattttcaagaagggttaaaacaaagactggctagaaagataattattttgaataaatctcatattcatctttcatttatataattgttacttattcctcccatgcagtctcttcgttgtctttaagtgtgtgcctccaggcatgcttatttatttttattgtctcaaggtaacatttaagatgtatattaaagtaaagctacatttttttacttcattattgcatttacagggatttaattgtactttgtaatttatttttcttattagccaaaagtttaatgcatttttttttgatgaattaggcacccacatgaacaccacaaatcaggacattgtttatcattgttgctatgaatcctatgaatgatcttttttttattttaaagacctacacttaacctacaaaacatttgctgtataatttggtcaacagtttctatctatctgtatactgtcatgatgtcttaaactgcaggagttacatactgagtttatatttttatttgctttgagcaaggtagataaacattttggccattataatgtgaaaccacttcttctttctttacagtatttgaccaaacttgtgtgtctatgatatttgtaaatacatgcgaatatctgtatttcttatcataagcctatttagttttattctcagtagggttttttggattgtacagtgtttatatgatctgaactccttatacataagaaggtgtgtatattaatccaattatggacttaaaatattttaaaagtataaatacccttatttgctgcaaagaccagtgtgtaggcatttgctttttagcaatatttttaagtgctccattttaatgccgaggaataagtcttttggcaacacaaactggtcaataataggtaatgcaggtatgttcaggttaagccaacaatgttttgcatttttatgcttattttctgtcaacactaatgaagtcaacattgcctgaatgtctgaataatgaaacacatccctgtttaaaagtatgtaactgaaaaagaaataaaaaaaaataaaagtagtttttt

SEQ ID NO: 359276 - DNA, 4213 bp, Homo sapiens
ttgtacgttttttttgccaatagaagcaaaaacctatgctttagttaaatgtattatgtgctttttttcagagtacagttttatataatgtatctttaaaatcaattactggcagaatctgatttttttttctttttcaagggaaaaatttatacacaaatgaatatgtggcaattaagttggagcccatgaaatcagagcaccacagctacatttggaatacagattctataagcagttaggatctggagctctctatcaatatcagctcacatcattgaaaagataattttgaagacatgttttgctgaaaagacactaagaaaaattttacgaatgggatgaacatgctccagttaattgactacctactgcaatttgaatgttaacattacccatctggtacagttacctagtgatgtacctattttcacaataccctgtttcagtgtgcttgtcttgattaaagaattcaaagtggagtaccgcaaacttgatatggaaaataaaaagaaagacaaggacaaatcagatgatagaatggcacgacctagtggtcgatcgggacacaacactcgaggaactgggtcttcatcgtctggagttttaatggttggacctaactttagagttggaaaaaaaattggatgtggcaattttggagaattacgattagggaaaaatttatacacaaatgaatatgtggcaattaagttggagcccatgaaatcaagagcaccacagctacatttggaatacagattctataagcagttaggatctggagatggtatacctcaagtttactatttcggcccttgtggtaaatacaatgctatggtgctggaactgctgggacctagtttggaagacttgtttgacttgtgtgacagaacattttctcttaaaacagttctcatgatagctatacaactgatttctcgcatggaatatgtccattcaaagaacttgatatacagagatgtaaaacctgagaacttcttaataggacgaccaggaaacaaaacccagcaagttattcacattatagattttggtttggcaaaggaatatattgatccggagacaaagaaacacataccatacagagaacacaagagccttacaggaacagctagatatatgagcataaacacacatttaggaaaagaacaaagtagaagagacgatttagaagctttaggtcatatgttcatgtattttctgagaggcagtcttccttggcaaggcttaaaggctgacacattaaaggagaggtatcagaaaattggagatacaaaacgggctacaccaatagaagtgttatgtgaaaattttccagaaatggcaacatatcttcgttatgtaagaaggctagatttttttgaaaaaccagactatgactacttaagaaagctttttactgacttgtttgatcgaaaaggatatatgtttgattatgaatatgactggattggtaaacagttgcctactccagtgggtgcagttcagcaagatcctgctctgtcatcaaacagagaagcacatcaacacagagataagatgcaacaatccaaaaaccagtcggcagaccacagggcagcttgggactcccagcaggcaaatccccaccatttgagagctcaccttgcagcagacagacatggtggctcggtacaggttgtaagttctacaaatggagagttaaacacagatgaccccaccgcaggacgttcaaatgcacccatcacagcccctactgaagtagaagtgatggatgaaaccaagtgctgctgttttttcaaacgaaggaaaaggaaaaccatacagcgccacaaatgactctggacacagacagatcctggggagttacttacatgttcatctgctgtcttgtgattaaaatcatctctgtagtgaccacgtatattttcaaggactcactcttagaaacaaaaatgtcatactttcatacttcattttgtggttgtcttacattctttttctttttttttttttctctaatttaacctttatggaagctttaaagttttgtcaaaacatgagtgctttgcccatcagtgaatggaatggaccaatgaggtggtatcaatgaatatagttccatagaacattttccagaagttcttctgttgtagaaagcagtacagtatcttaagtgtcaaccagttatatacctaatctggttttttataacttctgtaagagcataatcaaacaggaattttcttttctcagtggataatacaacagagaaaacagagttgcccaaatatttaaaagaagttattccttgagaagttcatattttgtgacatctgcattgatttcagtattactgatggtactgttattcataagtcatattaacattctctccgtgaaatcatggtacagtcactgcccagaggtactgaggaaaaagcaatatgggttcggcagatggtggtggtaaaatgaatcttaaggagtgtggtaaatatgtgctccgcttttgttgcatcactatgtgaagtactgtgttgcagaagtggcaaaagcgcttatttttaaaaatgcaaaatatttgtacaatgtaactttatgcttccaaataataatgtatgttagacagcaagaaatgaatactttaaaaagtgatatatgttggagttataaagaaatacactaaggagaggtagtaaatgtgaaccttgttgcagtgtataaggtggaagcctaaagaaatctcaccgaaacttactgctgaatgattacattctcccttaagcagaaaactttggatgtgccatgcaatggtgtctgtgtaattattttgctctttgattaaaaaaaagacccccagcaataaaaagtgggtcactctatgccctctgtgcacattagtctcttgtattcaactttgctgattctctggaattttcctactctttagcataattttgatgattgaaaaatattttggaaaggatgggtcaggtgctttgcctccatagtcttttgaagtgcctgcatatgaacaacaacaacaacaacaaaaaattctgtaaaaaaggaagcccattccacttttcaagtatgctttgttttaagccataaagacacacatgtagttttgtcacattctactagccaaaattttcaagaagggttaaaacaaagactggctagaaagataattattttgaataaatctcatattcatctttcatttatataattgttacttattcctcccatgcagtctcttcgttgtctttaagtgtgtgcctccaggcatgcttatttatttttattgtctcaaggtaacatttaagatgtatattaaagtaaagctacatttttttacttcattattgcatttacagggatttaattgtactttgtaatttatttttcttattagccaaaagtttaatgcatttttttttgatgaattaggcacccacatgaacaccacaaatcaggacattgtttatcattgttgctatgaatcctatgaatgatcttttttttattttaaagacctacacttaacctacaaaacatttgctgtataatttggtcaacagtttctatctatctgtatactgtcatgatgtcttaaactgcaggagttacatactgagtttatatttttatttgctttgagcaaggtagataaacattttggccattataatgtgaaaccacttcttctttctttacagtatttgaccaaacttgtgtgtctatgatatttgtaaatacatgcgaatatctgtatttcttatcataagcctatttagttttattctcagtagggttttttggattgtacagtgtttatatgatctgaactccttatacataagaaggtgtgtatattaatccaattatggacttaaaatattttaaaagtataaatacccttatttgctgcaaagaccagtgtgtaggcatttgctttttagcaatatttttaagtgctccattttaatgccgaggaataagtcttttggcaacacaaactggtcaataataggtaatgcaggtatgttcaggttaagccaacaatgttttgcatttttatgcttattttctgtcaacactaatgaagtcaacattgcctgaatgtctgaataatgaaacacatccctgtttaaaagtatgtaactgaaaaagaaataaaaaaaaataaaagtagtttttt

SEQ ID NO: 359277 - DNA, 4529 bp, Homo sapiens
ttttcttgatacagtaagtatattaagaatataaacgggtttgataaaatgaacatttaaaaaacatggcaccaggctgattcttcttcctgcacaccttaatgcctaacttttgaaaggacttgagacataagaatcacaattttaaaaaattatagtttccatgccttcatggtggatcaatttccatagaagtctaccaaaatgacttatctccatcccagggaagcaactgcaagagggaaaatgaaaggaatgcagtctttctatgtaggcagagtggacttaagtgtgagtcagaaacaccgatttcagtttgtgcgctgcaacttgataacttgggtgatgtttggcttctcagaactttgggaggtgaatttgaaaaacaggtaatgccacactatatagttcagaggattacctcagcttacaaacagcaaatgagacgcaaatgtgagccataattcacatttctaagcagttggagccctgatatggcactggggttacaaacaagcggggaaaaatgtcaacccagtgatgtcatactcctaggccgggccctaagatttttttggaacctggcgggctgagcacaacagggaaagcctcagcaccctgacttggcacaatggtacccttaaggctctttgctcactcagttcttagtagctctcctaaagcatggtggtgttctcttccagttctctgcgtagactttgctatgcttctccgcccactgcttcatccagagaaacactcgtatccacagcctctccccactttccctcacgcacggctctagaaagacggggatagggcgcggcttaggctttatacaccttgccagccaatgaccgcgccgtctcctttccggtcggcgatccgaccaatccaagaaggttggtgcaatcttcggctctactcggctgttttcgctgatgcgggcagcttgggggccgccgccgctaaacagacgctttcctttttaattttttttccatgtgttcacttccgggtccggcgtcgatccggatgcccgaggcagaaggatgtttgacctccggataagcgaggcgctgctgtgcattcattccgggctgcatcggtggcgacagcagaggctcgggcggcgactctccggccagcggcggcggtaggaggcaccagcggcagtgcagggaccgaatccgagcagcgctgcgttacctctctctctcgctccttcccccctacctcgctcgctcgctcgctcgctccctgcgtggctcgctttcctcctccggccgccggcgggtgtgatgtgccgccgccgctgcccccgccggcgctgacggactgggggcgccgcccgcgcccgggaccgacccctctgctcgcggccgcgcctttgagctctctatcaatatcagctcacatcattgaaaagataattttgaagacatgttttgctgaaaagacactaagaaaaattttacgaatgggatgaacatgctccagttaattgactacctactgcaatttgaatgttaacattacccatctggtacagttacctagtgatgtacctattttcacaataccctgtttcagtgtgcttgtcttgattaaagaattcaaagtggagtaccgcaaacttgatatggaaaataaaaagaaagacaaggacaaatcagatgatagaatggcacgacctagtggtcgatcgggacacaacactcgaggaactgggtcttcatcgtctggagttttaatggttggacctaactttagagttggaaaaaaaattggatgtggcaattttggagaattacgattagggaaaaatttatacacaaatgaatatgtggcaattaagttggagcccatgaaatcaagagcaccacagctacatttggaatacagattctataagcagttaggatctggagatggtatacctcaagtttactatttcggcccttgtggtaaatacaatgctatggtgctggaactgctgggacctagtttggaagacttgtttgacttgtgtgacagaacattttctcttaaaacagttctcatgatagctatacaactgatttctcgcatggaatatgtccattcaaagaacttgatatacagagatgtaaaacctgagaacttcttaataggacgaccaggaaacaaaacccagcaagttattcacattatagattttggtttggcaaaggaatatattgatccggagacaaagaaacacataccatacagagaacacaagagccttacaggaacagctagatatatgagcataaacacacatttaggaaaagaacaaagtagaagagacgatttagaagctttaggtcatatgttcatgtattttctgagaggcagtcttccttggcaaggcttaaaggctgacacattaaaggagaggtatcagaaaattggagatacaaaacgggctacaccaatagaagtgttatgtgaaaattttccagaaatggcaacatatcttcgttatgtaagaaggctagatttttttgaaaaaccagactatgactacttaagaaagctttttactgacttgtttgatcgaaaaggatatatgtttgattatgaatatgactggattggtaaacagttgcctactccagtgggtgcagttcagcaagatcctgctctgtcatcaaacagagaagcacatcaacacagagataagatgcaacaatccaaaaaccagtcggcagaccacagggcagcttgggactcccagcaggcaaatccccaccatttgagagctcaccttgcagcagacagacatggtggctcggtacaggttgtaagttctacaaatggagagttaaacacagatgaccccaccgcaggacgttcaaatgcacccatcacagcccctactgaagtagaagtgatggatgaaaccaagtgctgctgttttttcaaacgaaggaaaaggaaaaccatacagcgccacaaatgactctggacacagacagatcctggggagttacttacatgttcatctgctgtcttgtgattaaaatcatctctgtagtgaccacgtatattttcaaggactcactcttagaaacaaaaatgtcatactttcatacttcattttgtggttgtcttacattctttttctttttttttttttctctaatttaacctttatggaagctttaaagttttgtcaaaacatgagtgctttgcccatcagtgaatggaatggaccaatgaggtggtatcaatgaatatagttccatagaacattttccagaagttcttctgttgtagaaagcagtacagtatcttaagtgtcaaccagttatatacctaatctggttttttataacttctgtaagagcataatcaaacaggaattttcttttctcagtggataatacaacagagaaaacagagttgcccaaatatttaaaagaagttattccttgagaagttcatattttgtgacatctgcattgatttcagtattactgatggtactgttattcataagtcatattaacattctctccgtgaaatcatggtacagtcactgcccagaggtactgaggaaaaagcaatatgggttcggcagatggtggtggtaaaatgaatcttaaggagtgtggtaaatatgtgctccgcttttgttgcatcactatgtgaagtactgtgttgcagaagtggcaaaagcgcttatttttaaaaatgcaaaatatttgtacaatgtaactttatgcttccaaataataatgtatgttagacagcaagaaatgaatactttaaaaagtgatatatgttggagttataaagaaatacactaaggagaggtagtaaatgtgaaccttgttgcagtgtataaggtggaagcctaaagaaatctcaccgaaacttactgctgaatgattacattctcccttaagcagaaaactttggatgtgccatgcaatggtgtctgtgtaattattttgctctttgattaaaaaaaagacccccagcaataaaaagtgggtcactctatgccctctgtgcacattagtctcttgtattcaactttgctgattctctggaattttcctactctttagcataattttgatgattgaaaaatattttggaaaggatgggtcaggtgctttgcctccatagtcttttgaagtgcctgcatatgaacaacaacaacaacaacaaaaaattctgtaaaaaaggaagcccattccacttttcaagtatgctttgttttaagccataaagacacacatgtagttttgtcacattctactagccaaaattttcaagaagggttaaaacaaagactggctagaaagataattattttgaataaatctcatattcatctttcatttatataattgttacttattcctcccatgcagtgatatctcattgtggtttgaagctgcattttctaatggctaatgtggcagaacatcttttcatgtgcttattttgccatctgtacaccctcaggtgaaatagctcttcaaatctcccat

SEQ ID NO: 359278 - DNA, 5207 bp, Homo sapiens
ttttcttgatacagtaagtatattaagaatataaacgggtttgataaaatgaacatttaaaaaacatggcaccaggctgattcttcttcctgcacaccttaatgcctaacttttgaaaggacttgagacataagaatcacaattttaaaaaattatagtttccatgccttcatggtggatcaatttccatagaagtctaccaaaatgacttatctccatcccagggaagcaactgcaagagggaaaatgaaaggaatgcagtctttctatgtaggcagagtggacttaagtgtgagtcagaaacaccgatttcagtttgtgcgctgcaacttgataacttgggtgatgtttggcttctcagaactttgggaggtgaatttgaaaaacaggtaatgccacactatatagttcagaggattacctcagcttacaaacagcaaatgagacgcaaatgtgagccataattcacatttctaagcagttggagccctgatatggcactggggttacaaacaagcggggaaaaatgtcaacccagtgatgtcatactcctaggccgggccctaagatttttttggaacctggcgggctgagcacaacagggaaagcctcagcaccctgacttggcacaatggtacccttaaggctctttgctcactcagttcttagtagctctcctaaagcatggtggtgttctcttccagttctctgcgtagactttgctatgcttctccgcccactgcttcatccagagaaacactcgtatccacagcctctccccactttccctcacgcacggctctagaaagacggggatagggcgcggcttaggctttatacaccttgccagccaatgaccgcgccgtctcctttccggtcggcgatccgaccaatccaagaaggttggtgcaatcttcggctctactcggctgttttcgctgatgcgggcagcttgggggccgccgccgctaaacagacgctttcctttttaattttttttccatgtgttcacttccgggtccggcgtcgatccggatgcccgaggcagaaggatgtttgacctccggataagcgaggcgctgctgtgcattcattccgggctgcatcggtggcgacagcagaggctcgggcggcgactctccggccagcggcggcggtaggaggcaccagcggcagtgcagggaccgaatccgagcagcgctgcgttacctctctctctcgctccttcccccctacctcgctcgctcgctcgctcgctccctgcgtggctcgctttcctcctccggccgccggcgggtgtgatgtgccgccgccgctgcccccgccggcgctgacggactgggggcgccgcccgcgcccgggaccgacccctctgctcgcggccgcgcctttgagctctctatcaatatcagctcacatcattgaaaagataattttgaagacatgttttgctgaaaagacactaagaaaaattttacgaatgggatgaacatgctccagttaattgactacctactgcaatttgaatgttaacattacccatctggtacagttacctagtgatgtacctattttcacaataccctgtttcagtgtgcttgtcttgattaaagaattcaaagtggagtaccgcaaacttgatatggaaaataaaaagaaagacaaggacaaatcagatgatagaatggcacgacctagtggtcgatcgggacacaacactcgaggaactgggtcttcatcgtctggagttttaatggttggacctaactttagagttggaaaaaaaattggatgtggcaattttggagaattacgattagggaaaaatttatacacaaatgaatatgtggcaattaagttggagcccatgaaatcaagagcaccacagctacatttggaatacagattctataagcagttaggatctggagatggtatacctcaagtttactatttcggcccttgtggtaaatacaatgctatggtgctggaactgctgggacctagtttggaagacttgtttgacttgtgtgacagaacattttctcttaaaacagttctcatgatagctatacaactgatttctcgcatggaatatgtccattcaaagaacttgatatacagagatgtaaaacctgagaacttcttaataggacgaccaggaaacaaaacccagcaagttattcacattatagattttggtttggcaaaggaatatattgatccggagacaaagaaacacataccatacagagaacacaagagccttacaggaacagctagatatatgagcataaacacacatttaggaaaagaacaaagtagaagagacgatttagaagctttaggtcatatgttcatgtattttctgagaggcagtcttccttggcaaggcttaaaggctgacacattaaaggagaggtatcagaaaattggagatacaaaacgggctacaccaatagaagtgttatgtgaaaattttccagaaatggcaacatatcttcgttatgtaagaaggctagatttttttgaaaaaccagactatgactacttaagaaagctttttactgacttgtttgatcgaaaaggatatatgtttgattatgaatatgactggattggtaaacagttgcctactccagtgggtgcagttcagcaagatcctgctctgtcatcaaacagagaagcacatcaacacagagataagatgcaacaatccaaaaaccaggttgtaagttctacaaatggagagttaaacacagatgaccccaccgcaggacgttcaaatgcacccatcacagcccctactgaagtagaagtgatggatgaaaccaagtgctgctgttttttcaaacgaaggaaaaggaaaaccatacagcgccacaaatgactctggacacagacagatcctggggagttacttacatgttcatctgctgtcttgtgattaaaatcatctctgtagtgaccacgtatattttcaaggactcactcttagaaacaaaaatgtcatactttcatacttcattttgtggttgtcttacattctttttctttttttttttttctctaatttaacctttatggaagctttaaagtggtatcaatgaatatagttccatagaacattttccagaagttcttctgttgtagaaagcagtacagtatcttaagtgtcaaccagttatatacctaatctggttttttataacttctgtaagagcataatcaaacaggaattttcttttctcagtggataatacaacagagaaaacagagttgcccaaatatttaaaagaagttattccttgagaagttcatattttgtgacatctgcattgatttcagtattactgatggtactgttattcataagtcatattaacattctctccgtgaaatcatggtacagtcactgcccagaggtactgaggaaaaagcaatatgggttcggcagatggtggtggtaaaatgaatcttaaggagtgtggtaaatatgtgctccgcttttgttgcatcactatgtgaagtactgtgttgcagaagtggcaaaagcgcttatttttaaaaatgcaaaatatttgtacaatgtaactttatgcttccaaataataatgtatgttagacagcaagaaatgaatactttaaaaagtgatatatgttggagttataaagaaatacactaaggagaggtagtaaatgtgaaccttgttgcagtgtataaggtggaagcctaaagaaatctcaccgaaacttactgctgaatgattacattctcccttaagcagaaaactttggatgtgccatgcaatggtgtctgtgtaattattttgctctttgattaaaaaaaagacccccagcaataaaaagtgggtcactctatgccctctgtgcacattagtctcttgtattcaactttgctgattctctggaattttcctactctttagcataattttgatgattgaaaaatattttggaaaggatgggtcaggtgctttgcctccatagtcttttgaagtgcctgcatatgaacaacaacaacaacaacaaaaaattctgtaaaaaaggaagcccattccacttttcaagtatgctttgttttaagccataaagacacacatgtagttttgtcacattctactagccaaaattttcaagaagggttaaaacaaagactggctagaaagataattattttgaataaatctcatattcatctttcatttatataattgttacttattcctcccatgcagtctcttcgttgtctttaagtgtgtgcctccaggcatgcttatttatttttattgtctcaaggtaacatttaagatgtatattaaagtaaagctacatttttttacttcattattgcatttacagggatttaattgtactttgtaatttatttttcttattagccaaaagtttaatgcatttttttttgatgaattaggcacccacatgaacaccacaaatcaggacattgtttatcattgttgctatgaatcctatgaatgatcttttttttattttaaagacctacacttaacctacaaaacatttgctgtataatttggtcaacagtttctatctatctgtatactgtcatgatgtcttaaactgcaggagttacatactgagtttatatttttatttgctttgagcaaggtagataaacattttggccattataatgtgaaaccacttcttctttctttacagtatttgaccaaacttgtgtgtctatgatatttgtaaatacatgcgaatatctgtatttcttatcataagcctatttagttttattctcagtagggttttttggattgtacagtgtttatatgatctgaactccttatacataagaaggtgtgtatattaatccaattatggacttaaaatattttaaaagtataaatacccttatttgctgcaaagaccagtgtgtaggcatttgctttttagcaatatttttaagtgctccattttaatgccgaggaataagtcttttggcaacacaaactggtcaataataggtaatgcaggtatgttcaggttaagccaacaatgttttgcatttttatgcttattttctgtcaacactaatgaagtcaacattgcctgaatgtctgaataatgaaacacatccctgtttaaaagtatgtaactgaaaaagaaataaaaaaaaataaaagtagtttttt

SEQ ID NO: 359279 - DNA, 5085 bp, Homo sapiens
ttttcttgatacagtaagtatattaagaatataaacgggtttgataaaatgaacatttaaaaaacatggcaccaggctgattcttcttcctgcacaccttaatgcctaacttttgaaaggacttgagacataagaatcacaattttaaaaaattatagtttccatgccttcatggtggatcaatttccatagaagtctaccaaaatgacttatctccatcccagggaagcaactgcaagagggaaaatgaaaggaatgcagtctttctatgtaggcagagtggacttaagtgtgagtcagaaacaccgatttcagtttgtgcgctgcaacttgataacttgggtgatgtttggcttctcagaactttgggaggtgaatttgaaaaacaggtaatgccacactatatagttcagaggattacctcagcttacaaacagcaaatgagacgcaaatgtgagccataattcacatttctaagcagttggagccctgatatggcactggggttacaaacaagcggggaaaaatgtcaacccagtgatgtcatactcctaggccgggccctaagatttttttggaacctggcgggctgagcacaacagggaaagcctcagcaccctgacttggcacaatggtacccttaaggctctttgctcactcagttcttagtagctctcctaaagcatggtggtgttctcttccagttctctgcgtagactttgctatgcttctccgcccactgcttcatccagagaaacactcgtatccacagcctctccccactttccctcacgcacggctctagaaagacggggatagggcgcggcttaggctttatacaccttgccagccaatgaccgcgccgtctcctttccggtcggcgatccgaccaatccaagaaggttggtgcaatcttcggctctactcggctgttttcgctgatgcgggcagcttgggggccgccgccgctaaacagacgctttcctttttaattttttttccatgtgttcacttccgggtccggcgtcgatccggatgcccgaggcagaaggatgtttgacctccggataagcgaggcgctgctgtgcattcattccgggctgcatcggtggcgacagcagaggctcgggcggcgactctccggccagcggcggcggtaggaggcaccagcggcagtgcagggaccgaatccgagcagcgctgcgttacctctctctctcgctccttcccccctacctcgctcgctcgctcgctcgctccctgcgtggctcgctttcctcctccggccgccggcgggtgtgatgtgccgccgccgctgcccccgccggcgctgacggactgggggcgccgcccgcgcccgggaccgacccctctgctcgcggccgcgcctttgagctctctatcaatatcagctcacatcattgaaaagataattttgaagacatgttttgctgaaaagacactaagaaaaattttacgaatgggatgaacatgctccagttaattgactacctactgcaatttgaatgttaacattacccatctggtacagttacctagtgatgtacctattttcacaataccctgtttcagtgtgcttgtcttgattaaagaattcaaagtggagtaccgcaaacttgatatggaaaataaaaagaaagacaaggacaaatcagatgatagaatggcacgacctagtggtcgatcgggacacaacactcgaggaactgggtcttcatcgtctggagttttaatggttggacctaactttagagttggaaaaaaaattggatgtggcaattttggagaattacgattagggaaaaatttatacacaaatgaatatgtggcaattaagttggagcccatgaaatcaagagcaccacagctacatttggaatacagattctataagcagttaggatctggagatggtatacctcaagtttactatttcggcccttgtggtaaatacaatgctatggtgctggaactgctgggacctagtttggaagacttgtttgacttgtgtgacagaacattttctcttaaaacagttctcatgatagctatacaactgatttctcgcatggaatatgtccattcaaagaacttgatatacagagatgtaaaacctgagaacttcttaataggacgaccaggaaacaaaacccagcaagttattcacattatagattttggtttggcaaaggaatatattgatccggagacaaagaaacacataccatacagagaacacaagagccttacaggaacagctagatatatgagcataaacacacatttaggaaaagaacaaagtagaagagacgatttagaagctttaggtcatatgttcatgtattttctgagaggcagtcttccttggcaaggcttaaaggctgacacattaaaggagaggtatcagaaaattggagatacaaaacgggctacaccaatagaagtgttatgtgaaaattttccagaaatggcaacatatcttcgttatgtaagaaggctagatttttttgaaaaaccagactatgactacttaagaaagctttttactgacttgtttgatcgaaaaggatatatgtttgattatgaatatgactggattggtaaacagttgcctactccagtgggtgcagttcagcaagatcctgctctgtcatcaaacagagaagcacatcaacacagagataagatgcaacaatccaaaaaccaggttgtaagttctacaaatggagagttaaacacagatgaccccaccgcaggacgttcaaatgcacccatcacagcccctactgaagtagaagtgatggatgaaaccaagtgctgctgttttttcaaacgaaggaaaaggaaaaccatacagcgccacaaatgactctggacacagacagatcctggggagttacttacatgttcatctgctgtcttgtgattaaaatcatctctgtagtgaccacgtatattttcaaggactcactcttagaaacaaaaatgtcatactttcatacttcattttgtggttgtcttacattctttttctttttttttttttctctaatttaacctttatggaagctttaaagttttgtcaaaacatgagtgctttgcccatcagtgaatggaatggaccaatgaggtggtatcaatgaatatagttccatagaacattttccagaagttcttctgttgtagaaagcagtacagtatcttaagtgtcaaccagttatatacctaatctggttttttataacttctgtaagagcataatcaaacaggaattttcttttctcagtggataatacaacagagaaaacagagttgcccaaatatttaaatgaatcttaaggagtgtggtaaatatgtgctccgcttttgttgcatcactatgtgaagtactgtgttgcagaagtggcaaaagcgcttatttttaaaaatgcaaaatatttgtacaatgtaactttatgcttccaaataataatgtatgttagacagcaagaaatgaatactttaaaaagtgatatatgttggagttataaagaaatacactaaggagaggtagtaaatgtgaaccttgttgcagtgtataaggtggaagcctaaagaaatctcaccgaaacttactgctgaatgattacattctcccttaagcagaaaactttggatgtgccatgcaatggtgtctgtgtaattattttgctctttgattaaaaaaaagacccccagcaataaaaagtgggtcactctatgccctctgtgcacattagtctcttgtattcaactttgctgattctctggaattttcctactctttagcataattttgatgattgaaaaatattttggaaaggatgggtcaggtgctttgcctccatagtcttttgaagtgcctgcatatgaacaacaacaacaacaacaaaaaattctgtaaaaaaggaagcccattccacttttcaagtatgctttgttttaagccataaagacacacatgtagttttgtcacattctactagccaaaattttcaagaagggttaaaacaaagactggctagaaagataattattttgaataaatctcatattcatctttcatttatataattgttacttattcctcccatgcagtctcttcgttgtctttaagtgtgtgcctccaggcatgcttatttatttttattgtctcaaggtaacatttaagatgtatattaaagtaaagctacatttttttacttcattattgcatttacagggatttaattgtactttgtaatttatttttcttattagccaaaagtttaatgcatttttttttgatgaattaggcacccacatgaacaccacaaatcaggacattgtttatcattgttgctatgaatcctatgaatgatcttttttttattttaaagacctacacttaacctacaaaacatttgctgtataatttggtcaacagtttctatctatctgtatactgtcatgatgtcttaaactgcaggagttacatactgagtttatatttttatttgctttgagcaaggtagataaacattttggccattataatgtgaaaccacttcttctttctttacagtatttgaccaaacttgtgtgtctatgatatttgtaaatacatgcgaatatctgtatttcttatcataagcctatttagttttattctcagtagggttttttggattgtacagtgtttatatgatctgaactccttatacataagaaggtgtgtatattaatccaattatggacttaaaatattttaaaagtataaatacccttatttgctgcaaagaccagtgtgtaggcatttgctttttagcaatatttttaagtgctccattttaatgccgaggaataagtcttttggcaacacaaactggtcaataataggtaatgcaggtatgttcaggttaagccaacaatgttttgcatttttatgcttattttctgtcaacactaatgaagtcaacattgcctgaatgtctgaataatgaaacacatccctgtttaaaagtatgtaactgaaaaagaaataaaaaaaaataaaagtagtttttt

SEQ ID NO: 359280 - DNA, 5109 bp, Homo sapiens
ttttcttgatacagtaagtatattaagaatataaacgggtttgataaaatgaacatttaaaaaacatggcaccaggctgattcttcttcctgcacaccttaatgcctaacttttgaaaggacttgagacataagaatcacaattttaaaaaattatagtttccatgccttcatggtggatcaatttccatagaagtctaccaaaatgacttatctccatcccagggaagcaactgcaagagggaaaatgaaaggaatgcagtctttctatgtaggcagagtggacttaagtgtgagtcagaaacaccgatttcagtttgtgcgctgcaacttgataacttgggtgatgtttggcttctcagaactttgggaggtgaatttgaaaaacaggtaatgccacactatatagttcagaggattacctcagcttacaaacagcaaatgagacgcaaatgtgagccataattcacatttctaagcagttggagccctgatatggcactggggttacaaacaagcggggaaaaatgtcaacccagtgatgtcatactcctaggccgggccctaagatttttttggaacctggcgggctgagcacaacagggaaagcctcagcaccctgacttggcacaatggtacccttaaggctctttgctcactcagttcttagtagctctcctaaagcatggtggtgttctcttccagttctctgcgtagactttgctatgcttctccgcccactgcttcatccagagaaacactcgtatccacagcctctccccactttccctcacgcacggctctagaaagacggggatagggcgcggcttaggctttatacaccttgccagccaatgaccgcgccgtctcctttccggtcggcgatccgaccaatccaagaaggttggtgcaatcttcggctctactcggctgttttcgctgatgcgggcagcttgggggccgccgccgctaaacagacgctttcctttttaattttttttccatgtgttcacttccgggtccggcgtcgatccggatgcccgaggcagaaggatgtttgacctccggataagcgaggcgctgctgtgcattcattccgggctgcatcggtggcgacagcagaggctcgggcggcgactctccggccagcggcggcggtaggaggcaccagcggcagtgcagggaccgaatccgagcagcgctgcgttacctctctctctcgctccttcccccctacctcgctcgctcgctcgctcgctccctgcgtggctcgctttcctcctccggccgccggcgggtgtgatgtgccgccgccgctgcccccgccggcgctgacggactgggggcgccgcccgcgcccgggaccgacccctctgctcgcggccgcgcctttgagctctctatcaatatcagctcacatcattgaaaagataattttgaagacatgttttgctgaaaagacactaagaaaaattttacgaatgggatgaacatgctccagttaattgactacctactgcaatttgaatgttaacattacccatctggtacagttacctagtgatgtacctattttcacaataccctgtttcagtgtgcttgtcttgattaaagaattcaaagtggagtaccgcaaacttgatatggaaaataaaaagaaagacaaggacaaatcagatgatagaatggcacgacctagtggtcgatcgggacacaacactcgaggaactgggtcttcatcgtctggagttttaatggttggacctaactttagagttggaaaaaaaattggatgtggcaattttggagaattacgattagggaaaaatttatacacaaatgaatatgtggcaattaagttggagcccatgaaatcaagagcaccacagctacatttggaatacagattctataagcagttaggatctggagatggtatacctcaagtttactatttcggcccttgtggtaaatacaatgctatggtgctggaactgctgggacctagtttggaagacttgtttgacttgtgtgacagaacattttctcttaaaacagttctcatgatagctatacaactgatttctcgcatggaatatgtccattcaaagaacttgatatacagagatgtaaaacctgagaacttcttaataggacgaccaggaaacaaaacccagcaagttattcacattatagattttggtttggcaaaggaatatattgatccggagacaaagaaacacataccatacagagaacacaagagccttacaggaacagctagatatatgagcataaacacacatttaggaaaagaacaaagtagaagagacgatttagaagctttaggtcatatgttcatgtattttctgagaggcagtcttccttggcaaggcttaaaggctgacacattaaaggagaggtatcagaaaattggagatacaaaacgggctacaccaatagaagtgttatgtgaaaattttccagaaatggcaacatatcttcgttatgtaagaaggctagatttttttgaaaaaccagactatgactacttaagaaagctttttactgacttgtttgatcgaaaaggatatatgtttgattatgaatatgactggattggtaaacagttgcctactccagtgggtgcagttcagcaagatcctgctctgtcatcaaacagagaagcacatcaacacagagataagatgcaacaatccaaaaaccaggttgtaagttctacaaatggagagttaaacacagatgaccccaccgcaggacgttcaaatgcacccatcacagcccctactgaagtagaagtgatggatgaaaccaactgccagaaagtgttgaacatgtggtgctgctgttttttcaaacgaaggaaaaggaaaaccatacagcgccacaaatgactctggacacagacagatcctggggagttacttacatgttcatctgctgtcttgtgattaaaatcatctctgtagtgaccacgtatattttcaaggactcactcttagaaacaaaaatgtcatactttcatacttcattttgtggttgtcttacattctttttctttttttttttttctctaatttaacctttatggaagctttaaagttttgtcaaaacatgagtgctttgcccatcagtgaatggaatggaccaatgaggtggtatcaatgaatatagttccatagaacattttccagaagttcttctgttgtagaaagcagtacagtatcttaagtgtcaaccagttatatacctaatctggttttttataacttctgtaagagcataatcaaacaggaattttcttttctcagtggataatacaacagagaaaacagagttgcccaaatatttaaatgaatcttaaggagtgtggtaaatatgtgctccgcttttgttgcatcactatgtgaagtactgtgttgcagaagtggcaaaagcgcttatttttaaaaatgcaaaatatttgtacaatgtaactttatgcttccaaataataatgtatgttagacagcaagaaatgaatactttaaaaagtgatatatgttggagttataaagaaatacactaaggagaggtagtaaatgtgaaccttgttgcagtgtataaggtggaagcctaaagaaatctcaccgaaacttactgctgaatgattacattctcccttaagcagaaaactttggatgtgccatgcaatggtgtctgtgtaattattttgctctttgattaaaaaaaagacccccagcaataaaaagtgggtcactctatgccctctgtgcacattagtctcttgtattcaactttgctgattctctggaattttcctactctttagcataattttgatgattgaaaaatattttggaaaggatgggtcaggtgctttgcctccatagtcttttgaagtgcctgcatatgaacaacaacaacaacaacaaaaaattctgtaaaaaaggaagcccattccacttttcaagtatgctttgttttaagccataaagacacacatgtagttttgtcacattctactagccaaaattttcaagaagggttaaaacaaagactggctagaaagataattattttgaataaatctcatattcatctttcatttatataattgttacttattcctcccatgcagtctcttcgttgtctttaagtgtgtgcctccaggcatgcttatttatttttattgtctcaaggtaacatttaagatgtatattaaagtaaagctacatttttttacttcattattgcatttacagggatttaattgtactttgtaatttatttttcttattagccaaaagtttaatgcatttttttttgatgaattaggcacccacatgaacaccacaaatcaggacattgtttatcattgttgctatgaatcctatgaatgatcttttttttattttaaagacctacacttaacctacaaaacatttgctgtataatttggtcaacagtttctatctatctgtatactgtcatgatgtcttaaactgcaggagttacatactgagtttatatttttatttgctttgagcaaggtagataaacattttggccattataatgtgaaaccacttcttctttctttacagtatttgaccaaacttgtgtgtctatgatatttgtaaatacatgcgaatatctgtatttcttatcataagcctatttagttttattctcagtagggttttttggattgtacagtgtttatatgatctgaactccttatacataagaaggtgtgtatattaatccaattatggacttaaaatattttaaaagtataaatacccttatttgctgcaaagaccagtgtgtaggcatttgctttttagcaatatttttaagtgctccattttaatgccgaggaataagtcttttggcaacacaaactggtcaataataggtaatgcaggtatgttcaggttaagccaacaatgttttgcatttttatgcttattttctgtcaacactaatgaagtcaacattgcctgaatgtctgaataatgaaacacatccctgtttaaaagtatgtaactgaaaaagaaataaaaaaaaataaaagtagtttttt

SEQ ID NO: 359281 - DNA, 2878 bp, Homo sapiens
tttttttttctgttttaggctgacacattaaaggagaggtatcagaaaattggagatacaaaacgggctacaccaatagaagtgttatgtgaaaattttccagaaatggcaacatatcttcgttatgtaagaaggctagatttttttgaaaaaccagactatgactacttaagaaagctttttactgacttgtttgatcgaaaaggatatatgtttgattatgaatatgactggattggtaaacagttgcctactccagtgggtgcagttcagcaagatcctgctctgtcatcaaacagagaagcacatcaacacagagataagatgcaacaatccaaaaaccaggttgtaagttctacaaatggagagttaaacacagatgaccccaccgcaggacgttcaaatgcacccatcacagcccctactgaagtagaagtgatggatgaaaccaagtgctgctgttttttcaaacgaaggaaaaggaaaaccatacagcgccacaaatgactctggacacagacagatcctggggagttacttacatgttcatctgctgtcttgtgattaaaatcatctctgtagtgaccacgtatattttcaaggactcactcttagaaacaaaaatgtcatactttcatacttcattttgtggttgtcttacattctttttctttttttttttttctctaatttaacctttatggaagctttaaagttttgtcaaaacatgagtgctttgcccatcagtgaatggaatggaccaatgaggtggtatcaatgaatatagttccatagaacattttccagaagttcttctgttgtagaaagcagtacagtatcttaagtgtcaaccagttatatacctaatctggttttttataacttctgtaagagcataatcaaacaggaattttcttttctcagtggataatacaacagagaaaacagagttgcccaaatatttaaaagaagttattccttgagaagttcatattttgtgacatctgcattgatttcagtattactgatggtactgttattcataagtcatattaacattctctccgtgaaatcatggtacagtcactgcccagaggtactgaggaaaaagcaatatgggttcggcagatggtggtggtaaaatgaatcttaaggagtgtggtaaatatgtgctccgcttttgttgcatcactatgtgaagtactgtgttgcagaagtggcaaaagcgcttatttttaaaaatgcaaaatatttgtacaatgtaactttatgcttccaaataataatgtatgttagacagcaagaaatgaatactttaaaaagtgatatatgttggagttataaagaaatacactaaggagaggtagtaaatgtgaaccttgttgcagtgtataaggtggaagcctaaagaaatctcaccgaaacttactgctgaatgattacattctcccttaagcagaaaactttggatgtgccatgcaatggtgtctgtgtaattattttgctctttgattaaaaaaaagacccccagcaataaaaagtgggtcactctatgccctctgtgcacattagtctcttgtattcaactttgctgattctctggaattttcctactctttagcataattttgatgattgaaaaatattttggaaaggatgggtcaggtgctttgcctccatagtcttttgaagtgcctgcatatgaacaacaacaacaacaacaaaaaattctgtaaaaaaggaagcccattccacttttcaagtatgctttgttttaagccataaagacacacatgtagttttgtcacattctactagccaaaattttcaagaagggttaaaacaaagactggctagaaagataattattttgaataaatctcatattcatctttcatttatataattgttacttattcctcccatgcagtctcttcgttgtctttaagtgtgtgcctccaggcatgcttatttatttttattgtctcaaggtaacatttaagatgtatattaaagtaaagctacatttttttacttcattattgcatttacagggatttaattgtactttgtaatttatttttcttattagccaaaagtttaatgcatttttttttgatgaattaggcacccacatgaacaccacaaatcaggacattgtttatcattgttgctatgaatcctatgaatgatcttttttttattttaaagacctacacttaacctacaaaacatttgctgtataatttggtcaacagtttctatctatctgtatactgtcatgatgtcttaaactgcaggagttacatactgagtttatatttttatttgctttgagcaaggtagataaacattttggccattataatgtgaaaccacttcttctttctttacagtatttgaccaaacttgtgtgtctatgatatttgtaaatacatgcgaatatctgtatttcttatcataagcctatttagttttattctcagtagggttttttggattgtacagtgtttatatgatctgaactccttatacataagaaggtgtgtatattaatccaattatggacttaaaatattttaaaagtataaatacccttatttgctgcaaagaccagtgtgtaggcatttgctttttagcaatatttttaagtgctccattttaatgccgaggaataagtcttttggcaacacaaactggtcaataataggtaatgcaggtatgttcaggttaagccaacaatgttttgcatttttatgcttattttctgtcaacactaatgaagtcaacattgcctgaatgtctgaataatgaaacacatccctgtttaaaagtatgtaactgaaaaagaaataaaaaaaaataaaagtagtttttt

SEQ ID NO: 359282 - DNA, 3360 bp, Homo sapiens
ttttcttgatacagtaagtatattaagaatataaacgggtttgataaaatgaacatttaaaaaacatggcaccaggctgattcttcttcctgcacaccttaatgcctaacttttgaaaggacttgagacataagaatcacaattttaaaaaattatagtttccatgccttcatggtggatcaatttccatagaagtctaccaaaatgacttatctccatcccagggaagcaactgcaagagggaaaatgaaaggaatgcagtctttctatgtaggcagagtggacttaagtgtgagtcagaaacaccgatttcagtttgtgcgctgcaacttgataacttgggtgatgtttggcttctcagaactttgggaggtgaatttgaaaaacaggtaatgccacactatatagttcagaggattacctcagcttacaaacagcaaatgagacgcaaatgtgagccataattcacatttctaagcagttggagccctgatatggcactggggttacaaacaagcggggaaaaatgtcaacccagtgatgtcatactcctaggccgggccctaagatttttttggaacctggcgggctgagcacaacagggaaagcctcagcaccctgacttggcacaatggtacccttaaggctctttgctcactcagttcttagtagctctcctaaagcatggtggtgttctcttccagttctctgcgtagactttgctatgcttctccgcccactgcttcatccagagaaacactcgtatccacagcctctccccactttccctcacgcacggctctagaaagacggggatagggcgcggcttaggctttatacaccttgccagccaatgaccgcgccgtctcctttccggtcggcgatccgaccaatccaagaaggttggtgcaatcttcggctctactcggctgttttcgctgatgcgggcagcttgggggccgccgccgctaaacagacgctttcctttttaattttttttccatgtgttcacttccgggtccggcgtcgatccggatgcccgaggcagaaggatgtttgacctccggataagcgaggcgctgctgtgcattcattccgggctgcatcggtggcgacagcagaggctcgggcggcgactctccggccagcggcggcggtaggaggcaccagcggcagtgcagggaccgaatccgagcagcgctgcgttacctctctctctcgctccttcccccctacctcgctcgctcgctcgctcgctccctgcgtggctcgctttcctcctccggccgccggcgggtgtgatgtgccgccgccgctgcccccgccggcgctgacggactgggggcgccgcccgcgcccgggaccgacccctctgctcgcggccgcgcctttgagctctctatcaatatcagctcacatcattgaaaagataattttgaagacatgttttgctgaaaagacactaagaaaaattttacgaatgggatgaacatgctccagttaattgactacctactgcaatttgaatgttaacattacccatctggtacagttacctagtgatgtacctattttcacaataccctgtttcagtgtgcttgtcttgattaaagaattcaaagtggagtaccgcaaacttgatatggaaaataaaaagaaagacaaggacaaatcagatgatagaatggcacgacctagtggtcgatcgggacacaacactcgaggaactgggtcttcatcgtctggagttttaatggttggacctaactttagagttggaaaaaaaattggatgtggcaattttggagaattacgattagggaaaaatttatacacaaatgaatatgtggcaattaagttggagcccatgaaatcaagagcaccacagctacatttggaatacagattctataagcagttaggatctggagatggtatacctcaagtttactatttcggcccttgtggtaaatacaatgctatggtgctggaactgctgggacctagtttggaagacttgtttgacttgtgtgacagaacattttctcttaaaacagttctcatgatagctatacaactgatttctcgcatggaatatgtccattcaaagaacttgatatacagagatgtaaaacctgagaacttcttaataggacgaccaggaaacaaaacccagcaagttattcacattatagattttggtttggcaaaggaatatattgatccggagacaaagaaacacataccatacagagaacacaagagccttacaggaacagctagatatatgagcataaacacacatttaggaaaagaacaaagtagaagagacgatttagaagctttaggtcatatgttcatgtattttctgagaggcagtcttccttggcaaggcttaaaggctgacacattaaaggagaggtatcagaaaattggagatacaaaacgggctacaccaatagaagtgttatgtgaaaattttccagaaatggcaacatatcttcgttatgtaagaaggctagatttttttgaaaaaccagactatgactacttaagaaagctttttactgacttgtttgatcgaaaaggatatatgtttgattatgaatatgactggattggtaaacagttgcctactccagtgggtgcagttcagcaagatcctgctctgtcatcaaacagagaagcacatcaacacagagataagatgcaacaatccaaaaaccaggttgtaagttctacaaatggagagttaaacacagatgaccccaccgcaggacgttcaaatgcacccatcacagcccctactgaagtagaagtgatggatgaaaccaagtgctgctgttttttcaaacgaaggaaaaggaaaaccatacagcgccacaaatgactctggacacagacagatcctggggagttacttacatgttcatctgctgtcttgtgattaaaatcatctctgtagtgaccacgtatattttcaaggactcactcttagaaacaaaaatgtcatactttcatacttcattttgtggttgtcttacattctttttctttttttttttttctctaatttaacctttatggaagctttaaagttttgtcaaaacatgagtgctttgcccatcagtgaatggaatggaccaatgaggtggtatcaatgaatatagttccatagaacattttccagaagttcttctgttgtagaaagcagtacagtatcttaagtgtcaaccagttatatacctaatctggttttttataacttctgtaagagcataatcaaacagaagttataaaaaaccagattaggtatataactggttgacacttaagatactgtactgctttctgtcgagc

SEQ ID NO: 359283 - DNA, 3362 bp, Homo sapiens
  misc_feature (3198)..(3198): n is a, c, g, or t
  misc_feature (3229)..(3229): n is a, c, g, or t
  misc_feature (3270)..(3270): n is a, c, g, or t
ttttcttgatacagtaagtatattaagaatataaacgggtttgataaaatgaacatttaaaaaacatggcaccaggctgattcttcttcctgcacaccttaatgcctaacttttgaaaggacttgagacataagaatcacaattttaaaaaattatagtttccatgccttcatggtggatcaatttccatagaagtctaccaaaatgacttatctccatcccagggaagcaactgcaagagggaaaatgaaaggaatgcagtctttctatgtaggcagagtggacttaagtgtgagtcagaaacaccgatttcagtttgtgcgctgcaacttgataacttgggtgatgtttggcttctcagaactttgggaggtgaatttgaaaaacaggtaatgccacactatatagttcagaggattacctcagcttacaaacagcaaatgagacgcaaatgtgagccataattcacatttctaagcagttggagccctgatatggcactggggttacaaacaagcggggaaaaatgtcaacccagtgatgtcatactcctaggccgggccctaagatttttttggaacctggcgggctgagcacaacagggaaagcctcagcaccctgacttggcacaatggtacccttaaggctctttgctcactcagttcttagtagctctcctaaagcatggtggtgttctcttccagttctctgcgtagactttgctatgcttctccgcccactgcttcatccagagaaacactcgtatccacagcctctccccactttccctcacgcacggctctagaaagacggggatagggcgcggcttaggctttatacaccttgccagccaatgaccgcgccgtctcctttccggtcggcgatccgaccaatccaagaaggttggtgcaatcttcggctctactcggctgttttcgctgatgcgggcagcttgggggccgccgccgctaaacagacgctttcctttttaattttttttccatgtgttcacttccgggtccggcgtcgatccggatgcccgaggcagaaggatgtttgacctccggataagcgaggcgctgctgtgcattcattccgggctgcatcggtggcgacagcagaggctcgggcggcgactctccggccagcggcggcggtaggaggcaccagcggcagtgcagggaccgaatccgagcagcgctgcgttacctctctctctcgctccttcccccctacctcgctcgctcgctcgctcgctccctgcgtggctcgctttcctcctccggccgccggcgggtgtgatgtgccgccgccgctgcccccgccggcgctgacggactgggggcgccgcccgcgcccgggaccgacccctctgctcgcggccgcgcctttgagctctctatcaatatcagctcacatcattgaaaagataattttgaagacatgttttgctgaaaagacactaagaaaaattttacgaatgggatgaacatgctccagttaattgactacctactgcaatttgaatgttaacattacccatctggtacagttacctagtgatgtacctattttcacaataccctgtttcagtgtgcttgtcttgattaaagaattcaaagtggagtaccgcaaacttgatatggaaaataaaaagaaagacaaggacaaatcagatgatagaatggcacgacctagtggtcgatcgggacacaacactcgaggaactgggtcttcatcgtctggagttttaatggttggacctaactttagagttggaaaaaaaattggatgtggcaattttggagaattacgattagggaaaaatttatacacaaatgaatatgtggcaattaagttggagcccatgaaatcaagagcaccacagctacatttggaatacagattctataagcagttaggatctggagatggtatacctcaagtttactatttcggcccttgtggtaaatacaatgctatggtgctggaactgctgggacctagtttggaagacttgtttgacttgtgtgacagaacattttctcttaaaacagttctcatgatagctatacaactgatttctcgcatggaatatgtccattcaaagaacttgatatacagagatgtaaaacctgagaacttcttaataggacgaccaggaaacaaaacccagcaagttattcacattatagattttggtttggcaaaggaatatattgatccggagacaaagaaacacataccatacagagaacacaagagccttacaggaacagctagatatatgagcataaacacacatttaggaaaagaacaaagtagaagagacgatttagaagctttaggtcatatgttcatgtattttctgagaggcagtcttccttggcaaggcttaaaggctgacacattaaaggagaggtatcagaaaattggagatacaaaacgggctacaccaatagaagtgttatgtgaaaattttccagaaatggcaacatatcttcgttatgtaagaaggctagatttttttgaaaaaccagactatgactacttaagaaagctttttactgacttgtttgatcgaaaaggatatatgtttgattatgaatatgactggattggtaaacagttgcctactccagtgggtgcagttcagcaagatcctgctctgtcatcaaacagagaagcacatcaacacagagataagatgcaacaatccaaaaaccaggttgtaagttctacaaatggagagttaaacacagatgaccccaccgcaggacgttcaaatgcacccatcacagcccctactgaagtagaagtgatggatgaaaccaagtgctgctgttttttcaaacgaaggaaaaggaaaaccatacagcgccacaaatgactctggacacagacagatcctggggagttacttacatgttcatctgctgtcttgtgattaaaatcatctctgtagtgaccacgtatattttcaaggactcactcttagaaacaaaaatgtcatactttcatacttcattttgtggttgtcttacattctttttctttttttttttttctctaatttaacctttatggaagctttaaagttttgtcaaaacatgagtgctttgcccatcagtgaatggaatggaccaatgaggtggtatcaatgaatatagttccatagcagtatatccctatctggtnttataactctgtagagctatcaacaggattntcttctagtgatatcacagagaacgagtgccaatattaaangagtatctgagagtatatttggcactgatgatcagatactgtggactgatcatagcatatacatctctcggaatatgtcagcctgccaagct

SEQ ID NO: 359284 - DNA, 394 bp, Homo sapiens
  misc_feature (49)..(49): n is a, c, g, or t
  misc_feature (83)..(83): n is a, c, g, or t
  misc_feature (104)..(104): n is a, c, g, or t
  misc_feature (117)..(117): n is a, c, g, or t
aataagtaagctaaggtaatgtaagaagtttttcatagaagtgtataantggtcgtaacggaatcggggtagccgttcgaatnattaagacaaggaagttaaantaaggtctggtgncaaatatgtctgtaaagttcacctctattctaaagggagcaggccagtttgctccctgcaggaatgggctgaggttcgccagattttctcattcgtctaccaaatccaaaaatgcaagtatgtgtgagaattctttatcattatcatctaatttgacattaagttaaccatgtgggcaaattatcgcccttggtgaactgccacttgcaacctctggtctactcatttcttcctttatatgcatataaacctgtgtggctttaataggacattagta

SEQ ID NO: 359285 - DNA, 6345 bp, Homo sapiens
ctccccgtggatgtctatatttatttgttaagtctgacaactctaccatggaggatcatatcagagaaaggagatgctaggttgaaaagtaaaaacatcctaggatttaagagcatgagccgggagctaaggcttcttggcttcacaggatccaccacttataactgtgtgatcttcggacagttactaaacctctcttggtttccatggtaaaacgggcatagtaacttactgtgtgagattgtcacaagatttaataagttactgctgtttacaagtgctttcccacagcggcgtctgtttccccttagctagcaactcggctgtgttttctgcagctgctggtgagttctctgcccgctctttgcccacccgcgtcaggccggtccccctccggcctcttctgtggcgcgagggacagcggaaaccacggtagacagcacccccttgagtccaattcctcccctttcggaggaagccggtttctcctttctatgctactcccgggccatttctggacaacagctgctattttcacttgagccgaagttaatttctcggggagttctcgggcgcgcacaggcagctcggtttgccctgcgattgagctgcgggtcgcggccggcgccggcctctccaatggcaaatgtgtgtggctggaggcgagcgcgaggctttcggcaaaggcagtcgagtgtttgcagaccggggcgagtcctgtgaaagcagataaaagaaaacatttattaacgtgtcattacgaggggagcgcccggccggggctgtcgcactccccgcggaacatttggctccctccagctccgagagaggagaagaagaaagcggaaaagaggcagattcacgtcgtttccagccaagtggacctgatcgatggccctcctgaatttatcacgatatttgatttattagcgatgccccctggtttgtgtgttacgcacacacacgtgcacacaaggctctggctcgcttccctccctcgtttccagctcctgggcgaatcccacatctgtttcaactctccgccgagggcgagcaggagcgagagtgtgtcgagtgagtgtgcgtctgtgtgtcccggcgagggtgcgcgctcggcgccgggagcgcggccagccgagtccggaggcatcgggaggtcgagagccgccgggaccccagctctgcgttcactgccccgtccggagctggacttcggggccggggccggggccgtgcgccggggacaggcagggccgggtcgcgggccgcgcgtcccccaggccggagatctgcgagtgaagagggacgagggaaaagaaacaaagccacagacgcaacttgagactcccgcatcccaaaagaagcaccagatcagcaaaaaaagaagatgggccccccgagcctcgtgctgtgcttgctgtccgcaactgtgttctccctgctgggtggaagctcggccttcctgtcgcaccaccgcctgaaaggcaggtttcagagggaccgcaggaacatccgccccaacatcatcctggtgctgacggacgaccaggatgtggagctgggttccatgcaggtgatgaacaagacccggcgcatcatggagcagggcggggcgcacttcatcaacgccttcgtgaccacacccatgtgctgcccctcacgctcctccatcctcactggcaagtacgtccacaaccacaacacctacaccaacaatgagaactgctcctcgccctcctggcaggcacagcacgagagccgcacctttgccgtgtacctcaatagcactggctaccggacagctttcttcgggaagtatcttaatgaatacaacggctcctacgtgccacccggctggaaggagtgggtcggactccttaaaaactcccgcttttataactacacgctgtgtcggaacggggtgaaagagaagcacggctccgactactccaaggattacctcacagacctcatcaccaatgacagcgtgagcttcttccgcacgtccaagaagatgtacccgcacaggccagtcctcatggtcatcagccatgcagccccccacggccctgaggattcagccccacaatattcacgcctcttcccaaacgcatctcagcacatcacgccgagctacaactacgcgcccaacccggacaaacactggatcatgcgctacacggggcccatgaagcccatccacatggaattcaccaacatgctccagcggaagcgcttgcagaccctcatgtcggtggacgactccatggagacgatttacaacatgctggttgagacgggcgagctggacaacacgtacatcgtatacaccgccgaccacggttaccacatcggccagtttggcctggtgaaagggaaatccatgccatatgagtttgacatcagggtcccgttctacgtgaggggccccaacgtggaagccggctgtctgaatccccacatcgtcctcaacattgacctggcccccaccatcctggacattgcaggcctggacatacctgcggatatggacgggaaatccatcctcaagctgctggacacggagcggccggtgaatcggtttcacttgaaaaagaagatgagggtctggcgggactccttcttggtggagagaggcaagctgctacacaagagagacaatgacaaggtggacgcccaggaggagaactttctgcccaagtaccagcgtgtgaaggacctgtgtcagcgtgctgagtaccagacggcgtgtgagcagctgggacagaagtggcagtgtgtggaggacgccacggggaagctgaagctgcataagtgcaagggccccatgcggctgggcggcagcagagccctctccaacctcgtgcccaagtactacgggcagggcagcgaggcctgcacctgtgacagcggggactacaagctcagcctggccggacgccggaaaaaactcttcaagaagaagtacaaggccagctatgtccgcagtcgctccatccgctcagtggccatcgaggtggacggcagggtgtaccacgtaggcctgggtgatgccgcccagccccgaaacctcaccaagcggcactggccaggggcccctgaggaccaagatgacaaggatggtggggacttcagtggcactggaggccttcccgactactcagccgccaaccccattaaagtgacacatcggtgctacatcctagagaacgacacagtccagtgtgacctggacctgtacaagtccctgcaggcctggaaagaccacaagctgcacatcgaccacgagattgaaaccctgcagaacaaaattaagaacctgagggaagtccgaggtcacctgaagaaaaagcggccagaagaatgtgactgtcacaaaatcagctaccacacccagcacaaaggccgcctcaagcacagaggctccagtctgcatcctttcaggaagggcctgcaagagaaggacaaggtgtggctgttgcgggagcagaagcgcaagaagaaactccgcaagctgctcaagcgcctgcagaacaacgacacgtgcagcatgccaggcctcacgtgcttcacccacgacaaccagcactggcagacggcgcctttctggacactggggcctttctgtgcctgcaccagcgccaacaataacacgtactggtgcatgaggaccatcaatgagactcacaatttcctcttctgtgaatttgcaactggcttcctagagtactttgatctcaacacagacccctaccagctgatgaatgcagtgaacacactggacagggatgtcctcaaccagctacacgtacagctcatggagctgaggagctgcaagggttacaagcagtgtaacccccggactcgaaacatggacctgggacttaaagatggaggaagctatgagcaatacaggcagtttcagcgtcgaaagtggccagaaatgaagagaccttcttccaaatcactgggacaactgtgggaaggctgggaaggttaagaaacaacagaggtggacctccaaaaacatagaggcatcacctgactgcacaggcaatgaaaaaccatgtgggtgatttccagcagacctgtgctattggccaggaggcctgagaaagcaagcacgcactctcagtcaacatgacagattctggaggataaccagcaggagcagagataacttcaggaagtccatttttgcccctgcttttgctttggattatacctcaccagctgcacaaaatgcattttttcgtatcaaaaagtcaccactaaccctcccccagaagctcacaaaggaaaacggagagagcgagcgagagagatttccttggaaatttctcccaagggcgaaagtcattggaatttttaaatcataggggaaaagcagtcctgttctaaatcctcttattcttttggtttgtcacaaagaaggaactaagaagcaggacagaggcaacgtggagaggctgaaaacagtgcagagacgtttgacaatgagtcagtagcacaaaagagatgacatttacctagcactataaaccctggttgcctctgaagaaactgccttcattgtatatatgtgactatttacatgtaatcaacatgggaacttttaggggaacctaataagaaatcccaattttcaggagtggtggtgtcaataaacgctctgtggccagtgtaaaagaaaatccctcgcagttgtggacatttctgttcctgtccagataccatttctcctagtatttctttgttatgtcccagaactgatgttttttttttaaggtactgaaaagaaatgaagttgatgtatgtcccaagttttgatgaaactgtatttgtaaaaaaaattttgtagtttaagtattgtcatacagtgttcaaaaccccagccaatgaccagcagttggtatgaagaacctttgacattttgtaaaaggccatttcttgggagttttttggtgtgtctgtttttttaaagtattcaagatactaccagtcaacatctttttggaagaaaatgccttgggtttagaagattttcttaaaaggggagtagatggttgtagattgactaaaaagtctaccatacttcaagggactacaggtaagtctcatagtataccagctttggtacttcattttttaaaaaagtattaatcaattgcaaagaaattcgccttggccaacccttctttgtgtatcaggtagtctaacctgatacaagtagttgacagatttcaactatcaatcaccagtccaacccatttctcatttaacagatgacggagataatccctaaaagcacccacatttgtttcaatgccccaaacaggccaaggctccctagcaactccctagtggcgttttttaacttctcagaaactgttaccattatttgaaataggcttccttaacctcctttacccttaacccaacagggatttaaaaaaaaaaaaaaaaaaaaaaaactctttaggctccaattttaaatagaaacctttatttacaatgacatccaaaatggtcagcaaagcagtcacagctcaccatcccccataagtcatttcatgtggtttcaattctttgcaagataaagaataatttctatttttttaagcaacataatgtaaacttgattgaaactgaattcattctcaagagtataagtcaattcctgagaatttaaatattgctctcatattttattcttcgaaactccatatattagaaaggaagagagaaaacaccctgctcgtttattaacagtgtgccttggagttgaaaacaataaatcaatccttgaggttttgctcctaggaacctaattgtgaacaaaactcacagcttctgcaaataaaaagggaactgggcaggcatacatgtaactggcaatccattctgtttactttcagctgcacccacctctggatcaaagaacttctaggacatcaagccaattatcttctgtaataccctacccctaatatagatacccccaactcacctcagatattaaatactgataactaagtagcactgttattgatatttacacctttcaatccagatgcagtttagaaaagtggcatcataatatgaacattaacaatgtaacttccgtttattttttaaaggaagaaacatgtatctcctttatatcattctgatctttataaaatatatatattttatttatatatctttggattcagcaaaaaaaaaaaaaaaaagtaggtactggaaatatcccacattctaaaagcagatgaaaagattatactgttcacccaacagataccaaggtttgaaaaaatggggggtgctggggtgtgaggagag

SEQ ID NO: 359286 - DNA, 3837 bp, Homo sapiens
  misc_feature (7)..(7): n is a, c, g, or t
  misc_feature (65)..(65): n is a, c, g, or t
ccatggngtaaccgttcgtacgagaatcgctgtcctctccttgcggccgccagtgtggtggaatntgaatcggtttcacttgaaaaagaagatgagggtctggcgggactccttcttggtggagagaggcaagctgctacacaagagagacaatgacaaggtggacgcccaggaggagaactttctgcccaagtaccagcgtgtgaaggacctgtgtcagcgtgctgagtaccagacggcgtgtgagcagctgggacagaagtggcagtgtgtggaggacgccacggggaagctgaagctgcataagtgcaagggccccatgcggctgggcggcagcagagccctctccaacctcgtgcccaagtactacgggcagggcagcgaggcctgcacctgtgacagcggggactacaagctcagcctggccggacgccggaaaaaactcttcaagaagaagtacaaggccagctatgtccgcagtcgctccatccgctcagtggccatcgaggtggacggcagggtgtaccacgtaggcctgggtgatgccgcccagccccgaaacctcaccaagcggcactggccaggggcccctgaggaccaagatgacaaggatggtggggacttcagtggcactggaggccttcccgactactcagccgccaaccccattaaagtgacacatcggtgctacatcctagagaacgacacagtccagtgtgacctggacctgtacaagtccctgcaggcctggaaagaccacaagctgcacatcgaccacgagattgaaaccctgcagaacaaaattaagaacctgagggaagtccgaggtcacctgaagaaaaagcggccagaagaatgtgactgtcacaaaatcagctaccacacccagcacaaaggccgcctcaagcacagaggctccagtctgcatcctttcaggaagggcctgcaagagaaggacaaggtgtggctgttgcgggagcagaagcgcaagaagaaactccgcaagctgctcaagcgcctgcagaacaacgacacgtgcagcatgccaggcctcacgtgcttcacccacgacaaccagcactggcagacggcgcctttctggacactggggcctttctgtgcctgcaccagcgccaacaataacacgtactggtgcatgaggaccatcaatgagactcacaatttcctcttctgtgaatttgcaactggcttcctagagtactttgatctcaacacagacccctaccagctgatgaatgcagtgaacacactggacagggatgtcctcaaccagctacacgtacagctcatggagctgaggagctgcaagggttacaagcagtgtaacccccggactcgaaacatggacctgggacttaaagatggaggaagctatgagcaatacaggcagtttcagcgtcgaaagtggccagaaatgaagagaccttcttccaaatcactgggacaactgtgggaaggctgggaaggttaagaaacaacagaggtggacctccaaaaacatagaggcatcacctgactgcacaggcaatgaaaaaccatgtgggtgatttccagcagacctgtgctattggccaggaggcctgagaaagcaagcacgcactctcagtcaacatgacagattctggaggataaccagcaggagcagagataacttcaggaagtccatttttgcccctgcttttgctttggattatacctcaccagctgcacaaaatgcattttttcgtatcaaaaagtcaccactaaccctcccccagaagctcacaaaggaaaacggagagagcgagcgagagagatttccttggaaatttctcccaagggcgaaagtcattggaatttttaaatcataggggaaaagcagtcctgttctaaatcctcttattcttttggtttgtcacaaagaaggaactaagaagcaggacagaggcaacgtggagaggctgaaaacagtgcagagacgtttgacaatgagtcagtagcacaaaagagatgacatttacctagcactataaaccctggttgcctctgaagaaactgccttcattgtatatatgtgactatttacatgtaatcaacatgggaacttttaggggaacctaataagaaatcccaattttcaggagtggtggtgtcaataaacgctctgtggccagtgtaaaagaaaatccctcgcagttgtggacatttctgttcctgtccagataccatttctcctagtatttctttgttatgtcccagaactgatgttttttttttaaggtactgaaaagaaatgaagttgatgtatgtcccaagttttgatgaaactgtatttgtaaaaaaaattttgtagtttaagtattgtcatacagtgttcaaaaccccagccaatgaccagcagttggtatgaagaacctttgacattttgtaaaaggccatttcttgggagttttttggtgtgtctgtttttttaaagtattcaagatactaccagtcaacatctttttggaagaaaatgccttgggtttagaagattttcttaaaaggggagtagatggttgtagattgactaaaaagtctaccatacttcaagggactacaggtaagtctcatagtataccagctttggtacttcattttttaaaaaagtattaatcaattgcaaagaaattcgccttggccaacccttctttgtgtatcaggtagtctaacctgatacaagtagttgacagatttcaactatcaatcaccagtccaacccatttctcatttaacagatgacggagataatccctaaaagcacccacatttgtttcaatgccccaaacaggccaaggctccctagcaactccctagtggcgttttttaacttctcagaaactgttaccattatttgaaataggcttccttaacctcctttacccttaacccaacagggatttaaaaaaaaaaaaaaaaaaaaaaaactctttaggctccaattttaaatagaaacctttatttacaatgacatccaaaatggtcagcaaagcagtcacagctcaccatcccccataagtcatttcatgtggtttcaattctttgcaagataaagaataatttctatttttttaagcaacataatgtaaacttgattgaaactgaattcattctcaagagtataagtcaattcctgagaatttaaatattgctctcatattttattcttcgaaactccatatattagaaaggaagagagaaaacaccctgctcgtttattaacagtgtgccttggagttgaaaacaataaatcaatccttgaggttttgctcctaggaacctaattgtgaacaaaactcacagcttctgcaaataaaaagggaactgggcaggcatacatgtaactggcaatccattctgtttactttcagctgcacccacctctggatcaaagaacttctaggacatcaagccaattatcttctgtaataccctacccctaatatagatacccccaactcacctcagatattaaatactgataactaagtagcactgttattgatatttacacctttcaatccagatgcagtttagaaaagtggcatcataatatgaacattaacaatgtaacttccgtttattttttaaaggaagaaacatgtatctcctttatatcattctgatctttataaaatatatatattttatttatatatctttggattcagcaaaaaaaaaaaaaaaaagtaggtactggaaatatcccacattctaaaagcagatgaaaagattatactgttcacccaacagataccaaggtttgaaaaaatggggggtgctggggtgtgaggagag

SEQ ID NO: 359287 - DNA, 5537 bp, Homo sapiens
ctccccgtggatgtctatatttatttgttaagtctgacaactctaccatggaggatcatatcagagaaaggagatgctaggttgaaaagtaaaaacatcctaggatttaagagcatgagccgggagctaaggcttcttggcttcacaggatccaccacttataactgtgtgatcttcggacagttactaaacctctcttggtttccatggtaaaacgggcatagtaacttactgtgtgagattgtcacaagatttaataagttactgctgtttacaagtgctttcccacagcggcgtctgtttccccttagctagcaactcggctgtgttttctgcagctgctggtgagttctctgcccgctctttgcccacccgcgtcaggccggtccccctccggcctcttctgtggcgcgagggacagcggaaaccacggtagacagcacccccttgagtccaattcctcccctttcggaggaagccggtttctcctttctatgctactcccgggccatttctggacaacagctgctattttcacttgagccgaagttaatttctcggggagttctcgggcgcgcacaggcagctcggtttgccctgcgattgagctgcgggtcgcggccggcgccggcctctccaatggcaaatgtgtgtggctggaggcgagcgcgaggctttcggcaaaggcagtcgagtgtttgcagaccggggcgagtcctgtgaaagcagataaaagaaaacatttattaacgtgtcattacgaggggagcgcccggccggggctgtcgcactccccgcggaacatttggctccctccagctccgagagaggagaagaagaaagcggaaaagaggcagattcacgtcgtttccagccaagtggacctgatcgatggccctcctgaatttatcacgatatttgatttattagcgatgccccctggtttgtgtgttacgcacacacacgtgcacacaaggctctggctcgcttccctccctcgtttccagctcctgggcgaatcccacatctgtttcaactctccgccgagggcgagcaggagcgagagtgtgtcgagtgagtgtgcgtctgtgtgtcccggcgagggtgcgcgctcggcgccgggagcgcggccagccgagtccggaggcatcgggaggtcgagagccgccgggaccccagctctgcgttcactgccccgtccggagctggacttcggggccggggccggggccgtgcgccggggacaggcagggccgggtcgcgggccgcgcgtcccccaggccggagatctgcgagtgaagagggacgagggaaaagaaacaaagccacagacgcaacttgagactcccgcatcccaaaagaagcaccagatcagcaaaaaaagaagatgggccccccgagcctcgtgctgtgcttgctgtccgcaactgtgttctccctgctgggtggaagctcggccttcctgtcgcaccaccgcctgaaaggcaggtttcagagggaccgcaggaacatccgccccaacatcatcctggtgctgacggacgaccaggatgtggagctgggttccatgcaggtgatgaacaagacccggcgcatcatggagcagggcggggcgcacttcatcaacgccttcgtgaccacacccatgtgctgcccctcacgctcctccatcctcactggcaagtacgtccacaaccacaacacctacaccaacaatgagaactgctcctcgccctcctggcaggcacagcacgagagccgcacctttgccgtgtacctcaatagcactggctaccggacagctttcttcgggaagtatcttaatgaatacaacggctcctacgtgccacccggctggaaggagtgggtcggactccttaaaaactcccgcttttataactacacgctgtgtcggaacggggtgaaagagaagcacggctccgactactccaaggattacctcacagacctcatcaccaatgacagcgtgagcttcttccgcacgtccaagaagatgtacccgcacaggccagtcctcatggtcatcagccatgcagccccccacggccctgaggattcagccccacaatattcacgcctcttcccaaacgcatctcagcacatcacgccgagctacaactacgcgcccaacccggacaaacactggatcatgcgctacacggggcccatgaagcccatccacatggaattcaccaacatgctccagcggaagcgcttgcagaccctcatgtcggtggacgactccatggagacgatttacaacatgctggttgagacgggcgagctggacaacacgtacatcgtatacaccgccgaccacggttaccacatcggccagtttggcctggtgaaagggaaatccatgccatatgagtttgacatcagggtcccgttctacgtgaggggccccaacgtggaagccggctgtctgaatccccacatcgtcctcaacattgacctggcccccaccatcctggacattgcaggcctggacatacctgcggatatggacgggaaatccatcctcaagctgctggacacggagcggccggtgaatcggtttcacttgaaaaagaagatgagggtctggcgggactccttcttggtggagagaggcaagctgctacacaagagagacaatgacaaggtggacgcccaggaggagaactttctgcccaagtaccagcgtgtgaaggacctgtgtcagcgtgctgagtaccagacggcgtgtgagcagctgggacagaagtggcagtgtgtggaggacgccacggggaagctgaagctgcataagtgcaagggccccatgcggctgggcggcagcagagccctctccaacctcgtgcccaagtactacgggcagggcagcgaggcctgcacctgtgacagcggggactacaagctcagcctggccggacgccggaaaaaactcttcaagaagaagtacaaggccagctatgtccgcagtcgctccatccgctcagtggccatcgaggtggacggcagggtgtaccacgtaggcctgggtgatgccgcccagccccgaaacctcaccaagcggcactggccaggggcccctgaggaccaagatgacaaggatggtggggacttcagtggcactggaggccttcccgactactcagccgccaaccccattaaagtgacacatcggtgctacatcctagagaacgacacagtccagtgtgacctggacctgtacaagtccctgcaggcctggaaagaccacaagctgcacatcgaccacgagattgaaaccctgcagaacaaaattaagaacctgagggaagtccgaggtcacctgaagaaaaagcggccagaagaatgtgactgtcacaaaatcagctaccacacccagcacaaaggccgcctcaagcacagaggctccagtctgcatcctttcaggaagggcctgcaagagaaggacaaggtgtggctgttgcgggagcagaagcgcaagaagaaactccgcaagctgctcaagcgcctgcagaacaacgacacgtgcagcatgccaggcctcacgtgcttcacccacgacaaccagcactggcagacggcgcctttctggacactggggcctttctgtgcctgcaccagcgccaacaataacacgtactggtgcatgaggaccatcaatgagactcacaatttcctcttctgtgaatttgcaactggcttcctagagtactttgatctcaacacagacccctaccagctgatgaatgcagtgaacacactggacagggatgtcctcaaccagctacacgtacagctcatggagctgaggagctgcaagggttacaagcagtgtaacccccggactcgaaacatggacctgggacttaaagatggaggaagctatgagcaatacaggcagtttcagcgtcgaaagtggccagaaatgaagagaccttcttccaaatcactgggacaactgtgggaaggctgggaaggttaagaaacaacagaggtggacctccaaaaacatagaggcatcacctgactgcacaggcaatgaaaaaccatgtgggtgatttccagcagacctgtgctattggccaggaggcctgagaaagcaagcacgcactctcagtcaacatgacagattctggaggataaccagcaggagcagagataacttcaggaagtccatttttgcccctgcttttgctttggattatacctcaccagctgcacaaaatgcattttttcgtatcaaaaagtcaccactaaccctcccccagaagctcacaaaggaaaacggagagagcgagcgagagagatttccttggaaatttctcccaagggcgaaagtcattggaatttttaaatcataggggaaaagcagtcctgttctaaatcctcttattcttttggtttgtcacaaagaaggaactaagaagcaggacagaggcaacgtggagaggctgaaaacagtgcagagacgtttgacaatgagtcagtagcacaaaagagatgacatttacctagcactataaaccctggttgcctctgaagaaactgccttcattgtatatatgtgactatttacatgtaatcaacatgggaacttttaggggaacctaataagaaatcccaattttcaggagtggtggtgtcaataaacgctctgtggccagtgtaaaagaaaatccctcgcagttgtggacatttctgttcctgtccagataccatttctcctagtatttctttgttatgtcccagaactgatgttttttttttaaggtactgaaaagaaatgaagttgatgtatgtcccaagttttgatgaaactgtatttgtaaaaaaaattttgtagtttaagtattgtcatacagtgttcaaaaccccagccaatgaccagcagttggtatgaagaacctttgacattttgtaaaaggccatttcttgggagttttttggtgtgtctgtttttttaaagtattcaagatactaccagtcaacatctttttggaagaaaatgccttgggtttagaagattttcttaaaaggggagtagatggttgtagattgactaaaaagtctaccatacttcaagggactacagctgcacccacctctggatcaaagaacttctaggacatcaagccaattatcttctgtaataccctacccctaatatagatacccccaactcacctcagatattaaatactgataactaagtagcactgttattgatatttacacctttcaatccagatgcagtttagaaaagtggcatcataatatgaacattaacaatgtaacttccgtttattttttaaaggaagaaacatgtatctcctttatatcattctgatctttataaaatatatatattttatttatatatctttggattcagcaaaaaaaaaaaaaaaaagtaggtactggaaatatcccacattctaaaagcagatgaaaagattatactgttcacccaacagataccaaggtttgaaaaaatggggggtgctggggtgtgaggagag

SEQ ID NO: 359288 - DNA, 6589 bp, Homo sapiens
ctccccgtggatgtctatatttatttgttaagtctgacaactctaccatggaggatcatatcagagaaaggagatgctaggttgaaaagtaaaaacatcctaggatttaagagcatgagccgggagctaaggcttcttggcttcacaggatccaccacttataactgtgtgatcttcggacagttactaaacctctcttggtttccatggtaaaacgggcatagtaacttactgtgtgagattgtcacaagatttaataagttactgctgtttacaagtgctttcccacagcggcgtctgtttccccttagctagcaactcggctgtgttttctgcagctgctggtgagttctctgcccgctctttgcccacccgcgtcaggccggtccccctccggcctcttctgtggcgcgagggacagcggaaaccacggtagacagcacccccttgagtccaattcctcccctttcggaggaagccggtttctcctttctatgctactcccgggccatttctggacaacagctgctattttcacttgagccgaagttaatttctcggggagttctcgggcgcgcacaggcagctcggtttgccctgcgattgagctgcgggtcgcggccggcgccggcctctccaatggcaaatgtgtgtggctggaggcgagcgcgaggctttcggcaaaggcagtcgagtgtttgcagaccggggcgagtcctgtgaaagcagataaaagaaaacatttattaacgtgtcattacgaggggagcgcccggccggggctgtcgcactccccgcggaacatttggctccctccagctccgagagaggagaagaagaaagcggaaaagaggcagattcacgtcgtttccagccaagtggacctgatcgatggccctcctgaatttatcacgatatttgatttattagcgatgccccctggtttgtgtgttacgcacacacacgtgcacacaaggctctggctcgcttccctccctcgtttccagctcctgggcgaatcccacatctgtttcaactctccgccgagggcgagcaggagcgagagtgtgtcgagtgagtgtgcgtctgtgtgtcccggcgagggtgcgcgctcggcgccgggagcgcggccagccgagtccggaggcatcgggaggtcgagagccgccgggaccccagctctgcgttcactgccccgtccggagctggacttcggggccggggccggggccgtgcgccggggacaggcagggccgggtcgcgggccgcgcgtcccccaggccggagatctgcgagtgaagagggacgagggaaaagaaacaaagccacagacgcaacttgagactcccgcatcccaaaagaagcaccagatcagcaaaaaaagaagatgggccccccgagcctcgtgctgtgcttgctgtccgcaactgtgttctccctgctgggtggaagctcggccttcctgtcgcaccaccgcctgaaaggcaggtttcagagggaccgcaggaacatccgccccaacatcatcctggtgctgacggacgaccaggatgtggagctgggttccatgcaggtgatgaacaagacccggcgcatcatggagcagggcggggcgcacttcatcaacgccttcgtgaccacacccatgtgctgcccctcacgctcctccatcctcactggcaagtacgtccacaaccacaacacctacaccaacaatgagaactgctcctcgccctcctggcaggcacagcacgagagccgcacctttgccgtgtacctcaatagcactggctaccggacagctttcttcgggaagtatcttaatgaatacaacggctcctacgtgccacccggctggaaggagtgggtcggactccttaaaaactcccgcttttataactacacgctgtgtcggaacggggtgaaagagaagcacggctccgactactccaaggattacctcacagacctcatcaccaatgacagcgtgagcttcttccgcacgtccaagaagatgtacccgcacaggccagtcctcatggtcatcagccatgcagccccccacggccctgaggattcagccccacaatattcacgcctcttcccaaacgcatctcagcacatcacgccgagctacaactacgcgcccaacccggacaaacactggatcatgcgctacacggggcccatgaagcccatccacatggaattcaccaacatgctccagcggaagcgcttgcagaccctcatgtcggtggacgactccatggagacgatttacaacatgctggttgagacgggcgagctggacaacacgtacatcgtatacaccgccgaccacggttaccacatcggccagtttggcctggtgaaagggaaatccatgccatatgagtttgacatcagggtcccgttctacgtgaggggccccaacgtggaagccggctgtctgaatccccacatcgtcctcaacattgacctggcccccaccatcctggacattgcaggcctggacatacctgcggatatggacgggaaatccatcctcaagctgctggacacggagcggccggtgaatcggtttcacttgaaaaagaagatgagggtctggcgggactccttcttggtggagagaggcaagctgctacacaagagagacaatgacaaggtggacgcccaggaggagaactttctgcccaagtaccagcgtgtgaaggacctgtgtcagcgtgctgagtaccagacggcgtgtgagcagctgggacagaagtggcagtgtgtggaggacgccacggggaagctgaagctgcataagtgcaagggccccatgcggctgggcggcagcagagccctctccaacctcgtgcccaagtactacgggcagggcagcgaggcctgcacctgtgacagcggggactacaagctcagcctggccggacgccggaaaaaactcttcaagaagaagtacaaggccagctatgtccgcagtcgctccatccgctcagtggccatcgaggtggacggcagggtgtaccacgtaggcctgggtgatgccgcccagccccgaaacctcaccaagcggcactggccaggggcccctgaggaccaagatgacaaggatggtggggacttcagtggcactggaggccttcccgactactcagccgccaaccccattaaagtgacacatcggtgctacatcctagagaacgacacagtccagtgtgacctggacctgtacaagtccctgcaggcctggaaagaccacaagctgcacatcgaccacgagattgaaaccctgcagaacaaaattaagaacctgagggaagtccgaggtcacctgaagaaaaagcggccagaagaatgtgactgtcacaaaatcagctaccacacccagcacaaaggccgcctcaagcacagaggctccagtctgcatcctttcaggaagggcctgcaagagaaggacaaggtgtggctgttgcgggagcagaagcgcaagaagaaactccgcaagctgctcaagcgcctgcagaacaacgacacgtgcagcatgccaggcctcacgtgcttcacccacgacaaccagcactggcagacggcgcctttctggacactggggcctttctgtgcctgcaccagcgccaacaataacacgtactggtgcatgaggaccatcaatgagactcacaatttcctcttctgtgaatttgcaactggcttcctagagtactttgatctcaacacagacccctaccagctgatgaatgcagtgaacacactggacagggatgtcctcaaccagctacacgtacagctcatggagctgaggagctgcaagggttacaagcagtgtaacccccggactcgaaacatggacctgggacttaaagatggaggaagctatgagcaatacaggtatttcgttttattattaaagcctaaacaaagttgggctatcttggcccatccttcagtctcatctctgtgagtctgcacctgttatcttgagaaactgcccttccctctggtctgcccgagaccaggatcacccaccaaagataggtgtcacctaggagaccttctttgtatagttctttggggactttttctttcttggtgatggttaacattcattctcctttgacacttgaaaacttaggcagtttcagcgtcgaaagtggccagaaatgaagagaccttcttccaaatcactgggacaactgtgggaaggctgggaaggttaagaaacaacagaggtggacctccaaaaacatagaggcatcacctgactgcacaggcaatgaaaaaccatgtgggtgatttccagcagacctgtgctattggccaggaggcctgagaaagcaagcacgcactctcagtcaacatgacagattctggaggataaccagcaggagcagagataacttcaggaagtccatttttgcccctgcttttgctttggattatacctcaccagctgcacaaaatgcattttttcgtatcaaaaagtcaccactaaccctcccccagaagctcacaaaggaaaacggagagagcgagcgagagagatttccttggaaatttctcccaagggcgaaagtcattggaatttttaaatcataggggaaaagcagtcctgttctaaatcctcttattcttttggtttgtcacaaagaaggaactaagaagcaggacagaggcaacgtggagaggctgaaaacagtgcagagacgtttgacaatgagtcagtagcacaaaagagatgacatttacctagcactataaaccctggttgcctctgaagaaactgccttcattgtatatatgtgactatttacatgtaatcaacatgggaacttttaggggaacctaataagaaatcccaattttcaggagtggtggtgtcaataaacgctctgtggccagtgtaaaagaaaatccctcgcagttgtggacatttctgttcctgtccagataccatttctcctagtatttctttgttatgtcccagaactgatgttttttttttaaggtactgaaaagaaatgaagttgatgtatgtcccaagttttgatgaaactgtatttgtaaaaaaaattttgtagtttaagtattgtcatacagtgttcaaaaccccagccaatgaccagcagttggtatgaagaacctttgacattttgtaaaaggccatttcttgggagttttttggtgtgtctgtttttttaaagtattcaagatactaccagtcaacatctttttggaagaaaatgccttgggtttagaagattttcttaaaaggggagtagatggttgtagattgactaaaaagtctaccatacttcaagggactacaggtaagtctcatagtataccagctttggtacttcattttttaaaaaagtattaatcaattgcaaagaaattcgccttggccaacccttctttgtgtatcaggtagtctaacctgatacaagtagttgacagatttcaactatcaatcaccagtccaacccatttctcatttaacagatgacggagataatccctaaaagcacccacatttgtttcaatgccccaaacaggccaaggctccctagcaactccctagtggcgttttttaacttctcagaaactgttaccattatttgaaataggcttccttaacctcctttacccttaacccaacagggatttaaaaaaaaaaaaaaaaaaaaaaaactctttaggctccaattttaaatagaaacctttatttacaatgacatccaaaatggtcagcaaagcagtcacagctcaccatcccccataagtcatttcatgtggtttcaattctttgcaagataaagaataatttctatttttttaagcaacataatgtaaacttgattgaaactgaattcattctcaagagtataagtcaattcctgagaatttaaatattgctctcatattttattcttcgaaactccatatattagaaaggaagagagaaaacaccctgctcgtttattaacagtgtgccttggagttgaaaacaataaatcaatccttgaggttttgctcctaggaacctaattgtgaacaaaactcacagcttctgcaaataaaaagggaactgggcaggcatacatgtaactggcaatccattctgtttactttcagctgcacccacctctggatcaaagaacttctaggacatcaagccaattatcttctgtaataccctacccctaatatagatacccccaactcacctcagatattaaatactgataactaagtagcactgttattgatatttacacctttcaatccagatgcagtttagaaaagtggcatcataatatgaacattaacaatgtaacttccgtttattttttaaaggaagaaacatgtatctcctttatatcattctgatctttataaaatatatatattttatttatatatctttggattcagcaaaaaaaaaaaaaaaaagtaggtactggaaatatcccacattctaaaagcagatgaaaagattatactgttcacccaacagataccaaggtttgaaaaaatggggggtgctggggtgtgaggagag

SEQ ID NO: 359289 - DNA, 4686 bp, Homo sapiens
ctccccgtggatgtctatatttatttgttaagtctgacaactctaccatggaggatcatatcagagaaaggagatgctaggttgaaaagtaaaaacatcctaggatttaagagcatgagccgggagctaaggcttcttggcttcacaggatccaccacttataactgtgtgatcttcggacagttactaaacctctcttggtttccatggtaaaacgggcatagtaacttactgtgtgagattgtcacaagatttaataagttactgctgtttacaagtgctttcccacagcggcgtctgtttccccttagctagcaactcggctgtgttttctgcagctgctggtgagttctctgcccgctctttgcccacccgcgtcaggccggtccccctccggcctcttctgtggcgcgagggacagcggaaaccacggtagacagcacccccttgagtccaattcctcccctttcggaggaagccggtttctcctttctatgctactcccgggccatttctggacaacagctgctattttcacttgagccgaagttaatttctcggggagttctcgggcgcgcacaggcagctcggtttgccctgcgattgagctgcgggtcgcggccggcgccggcctctccaatggcaaatgtgtgtggctggaggcgagcgcgaggctttcggcaaaggcagtcgagtgtttgcagaccggggcgagtcctgtgaaagcagataaaagaaaacatttattaacgtgtcattacgaggggagcgcccggccggggctgtcgcactccccgcggaacatttggctccctccagctccgagagaggagaagaagaaagcggaaaagaggcagattcacgtcgtttccagccaagtggacctgatcgatggccctcctgaatttatcacgatatttgatttattagcgatgccccctggtttgtgtgttacgcacacacacgtgcacacaaggctctggctcgcttccctccctcgtttccagctcctgggcgaatcccacatctgtttcaactctccgccgagggcgagcaggagcgagagtgtgtcgagtgagtgtgcgtctgtgtgtcccggcgagggtgcgcgctcggcgccgggagcgcggccagccgagtccggaggcatcgggaggtcgagagccgccgggaccccagctctgcgttcactgccccgtccggagctggacttcggggccggggccggggccgtgcgccggggacaggcagggccgggtcgcgggccgcgcgtcccccaggccggagatctgcgagtgaagagggacgagggaaaagaaacaaagccacagacgcaacttgagactcccgcatcccaaaagaagcaccagatcagcaaaaaaagaagatgggccccccgagcctcgtgctgtgcttgctgtccgcaactgtgttctccctgctgggtggaagctcggccttcctgtcgcaccaccgcctgaaaggcaggtttcagagggaccgcaggaacatccgccccaacatcatcctggtgctgacggacgaccaggatgtggagctgggttccatgcaggtgatgaacaagacccggcgcatcatggagcagggcggggcgcacttcatcaacgccttcgtgaccacacccatgtgctgcccctcacgctcctccatcctcactggcaagtacgtccacaaccacaacacctacaccaacaatgagaactgctcctcgccctcctggcaggcacagcacgagagccgcacctttgccgtgtacctcaatagcactggctaccggacagctttcttcgggaagtatcttaatgaatacaacggctcctacgtgccacccggctggaaggagtgggtcggactccttaaaaactcccgcttttataactacacgctgtgtcggaacggggtgaaagagaagcacggctccgactactccaaggattacctcacagacctcatcaccaatgacagcgtgagcttcttccgcacgtccaagaagatgtacccgcacaggccagtcctcatggtcatcagccatgcagccccccacggccctgaggattcagccccacaatattcacgcctcttcccaaacgcatctcagcacatcacgccgagctacaactacgcgcccaacccggacaaacactggatcatgcgctacacggggcccatgaagcccatccacatggaattcaccaacatgctccagcggaagcgcttgcagaccctcatgtcggtggacgactccatggagacgatttacaacatgctggttgagacgggcgagctggacaacacgtacatcgtatacaccgccgaccacggttaccacatcggccagtttggcctggtgaaagggaaatccatgccatatgagtttgacatcagggtcccgttctacgtgaggggccccaacgtggaagccggctgtctgaatccccacatcgtcctcaacattgacctggcccccaccatcctggacattgcaggcctggacatacctgcggatatggacgggaaatccatcctcaagctgctggacacggagcggccggtgaatcggtttcacttgaaaaagaagatgagggtctggcgggactccttcttggtggagagaggcaagctgctacacaagagagacaatgacaaggtggacgcccaggaggagaactttctgcccaagtaccagcgtgtgaaggacctgtgtcagcgtgctgagtaccagacggcgtgtgagcagctgggacagaagtggcagtgtgtggaggacgccacggggaagctgaagctgcataagtgcaagggccccatgcggctgggcggcagcagagccctctccaacctcgtgcccaagtactacgggcagggcagcgaggcctgcacctgtgacagcggggactacaagctcagcctggccggacgccggaaaaaactcttcaagaagaagtacaaggccagctatgtccgcagtcgctccatccgctcagtggccatcgaggtggacggcagggtgtaccacgtaggcctgggtgatgccgcccagccccgaaacctcaccaagcggcactggccaggggcccctgaggaccaagatgacaaggatggtggggacttcagtggcactggaggccttcccgactactcagccgccaaccccattaaagtgacacatcggtgctacatcctagagaacgacacagtccagtgtgacctggacctgtacaagtccctgcaggcctggaaagaccacaagctgcacatcgaccacgagattgaaaccctgcagaacaaaattaagaacctgagggaagtccgaggtcacctgaagaaaaagcggccagaagaatgtgactgtcacaaaatcagctaccacacccagcacaaaggccgcctcaagcacagaggctccagtctgcatcctttcaggaagggcctgcaagagaaggacaaggtgtggctgttgcgggagcagaagcgcaagaagaaactccgcaagctgctcaagcgcctgcagaacaacgacacgtgcagcatgccaggcctcacgtgcttcacccacgacaaccagcactggcagacggcgcctttctggacactggggcctttctgtgcctgcaccagcgccaacaataacacgtactggtgcatgaggaccatcaatgagactcacaatttcctcttctgtgaatttgcaactggcttcctagagtactttgatctcaacacagacccctaccagctgatgaatgcagtgaacacactggacagggatgtcctcaaccagctacacgtacagctcatggagctgaggagctgcaagggttacaagcagtgtaacccccggactcgaaacatggacctgggacttaaagatggaggaagctatgagcaatacaggcagtttcagcgtcgaaagtggccagaaatgaagagaccttcttccaaatcactgggacaactgtgggaaggctgggaaggttaagaaacaacagaggtggacctccaaaaacatagaggcatcacctgactgcacaggcaatgaaaaaccatgtgggtgatttccagcagacctgtgctattggccaggaggcctgagaaagcaagcacgcactctcagtcaacatgacagattctggaggataaccagcaggagcagagataacttcaggaagtccatttttgcccctgcttttgctttggattatacctcaccagctgcacaaaatgcattttttcgtatcaaaaagtcaccactaaccctcccccagaagctcacaaaggaaaacggagagagcgagcgagagagatttccttggaaatttctcccaagggcgaaagtcattggaatttttaaatcataggggaaaagcagtcctgttctaaatcctcttattcttttggtttgtcacaaagaaggaactaagaagcaggacagaggcaacgtggagaggctgaaaacagtgcagagacgtttgacaatgagtcagtagcacaaaagagatgacatttacctagcactataaaccctggttgcctctgaagaaactgccttcattgtatatatgtgactatttacatgtaatcaacatgggaacttttaggggaacctaataagaaatcccaattttcaggagtggtggtgtcaataaacgctctgtggccagtgta

SEQ ID NO: 359290 - DNA, 2590 bp, Homo sapiens
ccagatccttaaatgccatccttgccaggcattgggtgtataagtaaacaaaaaattgaggtgactaggtggtggcaatcccgttctaagtaacctagaaatattcattctcagcagccttgaagcaaagcttcctcagctataggaccgattaggaagtcatgataaagaccatgatagctaagtgctaagatgagtttgttttgttctttaggggacaactgtgggaaggctgggaaggttaagaaacaacagaggtggacctccaaaaacatagaggcatcacctgactgcacaggcaatgaaaaaccatgtgggtgatttccagcagacctgtgctattggccaggaggcctgagaaagcaagcacgcactctcagtcaacatgacagattctggaggataaccagcaggagcagagataacttcaggaagtccatttttgcccctgcttttgctttggattatacctcaccagctgcacaaaatgcattttttcgtatcaaaaagtcaccactaaccctcccccagaagctcacaaaggaaaacggagagagcgagcgagagagatttccttggaaatttctcccaagggcgaaagtcattggaatttttaaatcataggggaaaagcagtcctgttctaaatcctcttattcttttggtttgtcacaaagaaggaactaagaagcaggacagaggcaacgtggagaggctgaaaacagtgcagagacgtttgacaatgagtcagtagcacaaaagagatgacatttacctagcactataaaccctggttgcctctgaagaaactgccttcattgtatatatgtgactatttacatgtaatcaacatgggaacttttaggggaacctaataagaaatcccaattttcaggagtggtggtgtcaataaacgctctgtggccagtgtaaaagaaaatccctcgcagttgtggacatttctgttcctgtccagataccatttctcctagtatttctttgttatgtcccagaactgatgttttttttttaaggtactgaaaagaaatgaagttgatgtatgtcccaagttttgatgaaactgtatttgtaaaaaaaattttgtagtttaagtattgtcatacagtgttcaaaaccccagccaatgaccagcagttggtatgaagaacctttgacattttgtaaaaggccatttcttgggagttttttggtgtgtctgtttttttaaagtattcaagatactaccagtcaacatctttttggaagaaaatgccttgggtttagaagattttcttaaaaggggagtagatggttgtagattgactaaaaagtctaccatacttcaagggactacaggtaagtctcatagtataccagctttggtacttcattttttaaaaaagtattaatcaattgcaaagaaattcgccttggccaacccttctttgtgtatcaggtagtctaacctgatacaagtagttgacagatttcaactatcaatcaccagtccaacccatttctcatttaacagatgacggagataatccctaaaagcacccacatttgtttcaatgccccaaacaggccaaggctccctagcaactccctagtggcgttttttaacttctcagaaactgttaccattatttgaaataggcttccttaacctcctttacccttaacccaacagggatttaaaaaaaaaaaaaaaaaaaaaaaactctttaggctccaattttaaatagaaacctttatttacaatgacatccaaaatggtcagcaaagcagtcacagctcaccatcccccataagtcatttcatgtggtttcaattctttgcaagataaagaataatttctatttttttaagcaacataatgtaaacttgattgaaactgaattcattctcaagagtataagtcaattcctgagaatttaaatattgctctcatattttattcttcgaaactccatatattagaaaggaagagagaaaacaccctgctcgtttattaacagtgtgccttggagttgaaaacaataaatcaatccttgaggttttgctcctaggaacctaattgtgaacaaaactcacagcttctgcaaataaaaagggaactgggcaggcatacatgtaactggcaatccattctgtttactttcagctgcacccacctctggatcaaagaacttctaggacatcaagccaattatcttctgtaataccctacccctaatatagatacccccaactcacctcagatattaaatactgataactaagtagcactgttattgatatttacacctttcaatccagatgcagtttagaaaagtggcatcataatatgaacattaacaatgtaacttccgtttattttttaaaggaagaaacatgtatctcctttatatcattctgatctttataaaatatatatattttatttatatatctttggattcagcaaaaaaaaaaaaaaaaagtaggtactggaaatatcccacattctaaaagcagatgaaaagattatactgttcacccaacagataccaaggtttgaaaaaatggggggtgctggggtgtgaggagag

SEQ ID NO: 359291 - DNA, 4064 bp, Homo sapiens
ctccccgtggatgtctatatttatttgttaagtctgacaactctaccatggaggatcatatcagagaaaggagatgctaggttgaaaagtaaaaacatcctaggatttaagagcatgagccgggagctaaggcttcttggcttcacaggatccaccacttataactgtgtgatcttcggacagttactaaacctctcttggtttccatggtaaaacgggcatagtaacttactgtgtgagattgtcacaagatttaataagttactgctgtttacaagtgctttcccacagcggcgtctgtttccccttagctagcaactcggctgtgttttctgcagctgctggtgagttctctgcccgctctttgcccacccgcgtcaggccggtccccctccggcctcttctgtggcgcgagggacagcggaaaccacggtagacagcacccccttgagtccaattcctcccctttcggaggaagccggtttctcctttctatgctactcccgggccatttctggacaacagctgctattttcacttgagccgaagttaatttctcggggagttctcgggcgcgcacaggcagctcggtttgccctgcgattgagctgcgggtcgcggccggcgccggcctctccaatggcaaatgtgtgtggctggaggcgagcgcgaggctttcggcaaaggcagtcgagtgtttgcagaccggggcgagtcctgtgaaagcagataaaagaaaacatttattaacgtgtcattacgaggggagcgcccggccggggctgtcgcactccccgcggaacatttggctccctccagctccgagagaggagaagaagaaagcggaaaagaggcagattcacgtcgtttccagccaagtggacctgatcgatggccctcctgaatttatcacgatatttgatttattagcgatgccccctggtttgtgtgttacgcacacacacgtgcacacaaggctctggctcgcttccctccctcgtttccagctcctgggcgaatcccacatctgtttcaactctccgccgagggcgagcaggagcgagagtgtgtcgagtgagtgtgcgtctgtgtgtcccggcgagggtgcgcgctcggcgccgggagcgcggccagccgagtccggaggcatcgggaggtcgagagccgccgggaccccagctctgcgttcactgccccgtccggagctggacttcggggccggggccggggccgtgcgccggggacaggcagggccgggtcgcgggccgcgcgtcccccaggccggagatctgcgagtgaagagggacgagggaaaagaaacaaagccacagacgcaacttgagactcccgcatcccaaaagaagcaccagatcagcaaaaaaagaagatgggccccccgagcctcgtgctgtgcttgctgtccgcaactgtgttctccctgctgggtggaagctcggccttcctgtcgcaccaccgcctgaaaggcaggtttcagagggaccgcaggaacatccgccccaacatcatcctggtgctgacggacgaccaggatgtggagctgggttccatgcaggtgatgaacaagacccggcgcatcatggagcagggcggggcgcacttcatcaacgccttcgtgaccacacccatgtgctgcccctcacgctcctccatcctcactggcaagtacgtccacaaccacaacacctacaccaacaatgagaactgctcctcgccctcctggcaggcacagcacgagagccgcacctttgccgtgtacctcaatagcactggctaccggacagctttcttcgggaagtatcttaatgaatacaacggctcctacgtgccacccggctggaaggagtgggtcggactccttaaaaactcccgcttttataactacacgctgtgtcggaacggggtgaaagagaagcacggctccgactactccaaggattacctcacagacctcatcaccaatgacagcgtgagcttcttccgcacgtccaagaagatgtacccgcacaggccagtcctcatggtcatcagccatgcagccccccacggccctgaggattcagccccacaatattcacgcctcttcccaaacgcatctcagcacatcacgccgagctacaactacgcgcccaacccggacaaacactggatcatgcgctacacggggcccatgaagcccatccacatggaattcaccaacatgctccagcggaagcgcttgcagaccctcatgtcggtggacgactccatggagacgatttacaacatgctggttgagacgggcgagctggacaacacgtacatcgtatacaccgccgaccacggttaccacatcggccagtttggcctggtgaaagggaaatccatgccatatgagtttgacatcagggtcccgttctacgtgaggggccccaacgtggaagccggctgtctgaatccccacatcgtcctcaacattgacctggcccccaccatcctggacattgcaggcctggacatacctgcggatatggacgggaaatccatcctcaagctgctggacacggagcggccggtgaatcggtttcacttgaaaaagaagatgagggtctggcgggactccttcttggtggagagaggcaagctgctacacaagagagacaatgacaaggtggacgcccaggaggagaactttctgcccaagtaccagcgtgtgaaggacctgtgtcagcgtgctgagtaccagacggcgtgtgagcagctgggacagaagtggcagtgtgtggaggacgccacggggaagctgaagctgcataagtgcaagggccccatgcggctgggcggcagcagagccctctccaacctcgtgcccaagtactacgggcagggcagcgaggcctgcacctgtgacagcggggactacaagctcagcctggccggacgccggaaaaaactcttcaagaagaagtacaaggccagctatgtccgcagtcgctccatccgctcagtggccatcgaggtggacggcagggtgtaccacgtaggcctgggtgatgccgcccagccccgaaacctcaccaagcggcactggccaggggcccctgaggaccaagatgacaaggatggtggggacttcagtggcactggaggccttcccgactactcagccgccaaccccattaaagtgacacatcggtgctacatcctagagaacgacacagtccagtgtgacctggacctgtacaagtccctgcaggcctggaaagaccacaagctgcacatcgaccacgagattgaaaccctgcagaacaaaattaagaacctgagggaagtccgaggtcacctgaagaaaaagcggccagaagaatgtgactgtcacaaaatcagctaccacacccagcacaaaggccgcctcaagcacagaggctccagtctgcatcctttcaggaagggcctgcaagagaaggacaaggtgtggctgttgcgggagcagaagcgcaagaagaaactccgcaagctgctcaagcgcctgcagaacaacgacacgtgcagcatgccaggcctcacgtgcttcacccacgacaaccagcactggcagacggcgcctttctggacactggggcctttctgtgcctgcaccagcgccaacaataacacgtactggtgcatgaggaccatcaatgagactcacaatttcctcttctgtgaatttgcaactggcttcctagagtactttgatctcaacacagacccctaccagctgatgaatgcagtgaacacactggacagggatgtcctcaaccagctacacgtacagctcatggagctgaggagctgcaagggttacaagcagtgtaacccccggactcgaaacatggacctgggcagatgacctttaacaagctgtgattcctgagagaggaacacctgcaccaactgcccaggaaacacacggaattccgtctcatttcattgtcctcccttttgtccactcatgcattcaacaaacacttcctgagaacttacacctgaaaccatgttgactaaagatgaccccatcctcgctg

SEQ ID NO: 359292 - DNA, 1333 bp, Homo sapiens
aggccacaggttgaaagtgggctcatggtgaaacttggtccacattggacctatctcgggcaatccttggaaagggattttcaaaattttggccaatgggtgaaaaattgggttgatttacagtgatttaccagaattttaaccaaatttaacgcatcaaatttcctttcgcctttcagggtgcacaagtgttgggaaagtcgtcgaaagggggccttgtcggaatttcgccagcttgagaaaaggggatgtaatgcaaatcggttaaattgggattaccaggggttttcccagtggttttccctgtaaaacgcggtgtcaatgaatggccaatgaattcaatatagggccaattgtggcaagtagcgtcaaaatttggcttgaatttatatgctttttttattttttttttttttttttttttttttttttttttttttttttttttttttttttttttttttttttttttttcaattttaaatagaaacctttatttacaatgacatccaaaatggtcagcaaagcagtcacagctcaccatcccccataagtcatttcatgtggtttcaattctttgcaagataaagaataatttctatttttttaagcaacataatgtaaacttgattgaaactgaattcattctcaagagtataagtcaattcctgagaatttaaatattgctctcatattttattcttcgaaactccatatattagaaaggaagagagaaaacaccctgctcgtttattaacagtgtgccttggagttgaaaacaataaatcaatccttgaggttttgctcctaggaacctaattgtgaacaaaactcacagcttctgcaaataaaaagggaactgggcaggcatacatgtaactggcaatccattctgtttactttcagctgcacccacctctggatcaaagaacttctaggacatcaagccaattatcttctgtaataccctacccctaatatagatacccccaactcacctcagatattaaatactgataactaagtagcactgttattgatatttacacctttcaatccagatgcagtttagaaaagtggcatcataatatgaacattaacaatgtaacttccgtttattttttaaaggaagaaacatgtatctcctttatatcattctgatctttataaaatatatatattttatttatatatctttggattcagcaaaaaaaaaaaaaaaaagtaggtactggaaatatcccacattctaaaagcagatgaaaagattatactgttcacccaacagataccaaggtttgaaaaaatggggggtgctggggtgtgaggagag

SEQ ID NO: 359293 - DNA, 3810 bp, Homo sapiens
ctccccgtggatgtctatatttatttgttaagtctgacaactctaccatggaggatcatatcagagaaaggagatgctaggttgaaaagtaaaaacatcctaggatttaagagcatgagccgggagctaaggcttcttggcttcacaggatccaccacttataactgtgtgatcttcggacagttactaaacctctcttggtttccatggtaaaacgggcatagtaacttactgtgtgagattgtcacaagatttaataagttactgctgtttacaagtgctttcccacagcggcgtctgtttccccttagctagcaactcggctgtgttttctgcagctgctggtgagttctctgcccgctctttgcccacccgcgtcaggccggtccccctccggcctcttctgtggcgcgagggacagcggaaaccacggtagacagcacccccttgagtccaattcctcccctttcggaggaagccggtttctcctttctatgctactcccgggccatttctggacaacagctgctattttcacttgagccgaagttaatttctcggggagttctcgggcgcgcacaggcagctcggtttgccctgcgattgagctgcgggtcgcggccggcgccggcctctccaatggcaaatgtgtgtggctggaggcgagcgcgaggctttcggcaaaggcagtcgagtgtttgcagaccggggcgagtcctgtgaaagcagataaaagaaaacatttattaacgtgtcattacgaggggagcgcccggccggggctgtcgcactccccgcggaacatttggctccctccagctccgagagaggagaagaagaaagcggaaaagaggcagattcacgtcgtttccagccaagtggacctgatcgatggccctcctgaatttatcacgatatttgatttattagcgatgccccctggtttgtgtgttacgcacacacacgtgcacacaaggctctggctcgcttccctccctcgtttccagctcctgggcgaatcccacatctgtttcaactctccgccgagggcgagcaggagcgagagtgtgtcgagtgagtgtgcgtctgtgtgtcccggcgagggtgcgcgctcggcgccgggagcgcggccagccgagtccggaggcatcgggaggtcgagagccgccgggaccccagctctgcgttcactgccccgtccggagctggacttcggggccggggccggggccgtgcgccggggacaggcagggccgggtcgcgggccgcgcgtcccccaggccggagatctgcgagtgaagagggacgagggaaaagaaacaaagccacagacgcaacttgagactcccgcatcccaaaagaagcaccagatcagcaaaaaaagaagatgggccccccgagcctcgtgctgtgcttgctgtccgcaactgtgttctccctgctgggtggaagctcggccttcctgtcgcaccaccgcctgaaaggcaggtttcagagggaccgcaggaacatccgccccaacatcatcctggtgctgacggacgaccaggatgtggagctgggttccatgcaggtgatgaacaagacccggcgcatcatggagcagggcggggcgcacttcatcaacgccttcgtgaccacacccatgtgctgcccctcacgctcctccatcctcactggcaagtacgtccacaaccacaacacctacaccaacaatgagaactgctcctcgccctcctggcaggcacagcacgagagccgcacctttgccgtgtacctcaatagcactggctaccggacagctttcttcgggaagtatcttaatgaatacaacggctcctacgtgccacccggctggaaggagtgggtcggactccttaaaaactcccgcttttataactacacgctgtgtcggaacggggtgaaagagaagcacggctccgactactccaaggattacctcacagacctcatcaccaatgacagcgtgagcttcttccgcacgtccaagaagatgtacccgcacaggccagtcctcatggtcatcagccatgcagccccccacggccctgaggattcagccccacaatattcacgcctcttcccaaacgcatctcagcacatcacgccgagctacaactacgcgcccaacccggacaaacactggatcatgcgctacacggggcccatgaagcccatccacatggaattcaccaacatgctccagcggaagcgcttgcagaccctcatgtcggtggacgactccatggagacgatttacaacatgctggttgagacgggcgagctggacaacacgtacatcgtatacaccgccgaccacggttaccacatcggccagtttggcctggtgaaagggaaatccatgccatatgagtttgacatcagggtcccgttctacgtgaggggccccaacgtggaagccggctgtctgaatccccacatcgtcctcaacattgacctggcccccaccatcctggacattgcaggcctggacatacctgcggatatggacgggaaatccatcctcaagctgctggacacggagcggccggtgaatcggtttcacttgaaaaagaagatgagggtctggcgggactccttcttggtggagagaggcaagctgctacacaagagagacaatgacaaggtggacgcccaggaggagaactttctgcccaagtaccagcgtgtgaaggacctgtgtcagcgtgctgagtaccagacggcgtgtgagcagctgggacagaagtggcagtgtgtggaggacgccacggggaagctgaagctgcataagtgcaagggccccatgcggctgggcggcagcagagccctctccaacctcgtgcccaagtactacgggcagggcagcgaggcctgcacctgtgacagcggggactacaagctcagcctggccggacgccggaaaaaactcttcaagaagaagtacaaggccagctatgtccgcagtcgctccatccgctcagtggccatcgaggtggacggcagggtgtaccacgtaggcctgggtgatgccgcccagccccgaaacctcaccaagcggcactggccaggggcccctgaggaccaagatgacaaggatggtggggacttcagtggcactggaggccttcccgactactcagccgccaaccccattaaagtgacacatcggtgctacatcctagagaacgacacagtccagtgtgacctggacctgtacaagtccctgcaggcctggaaagaccacaagctgcacatcgaccacgagattgaaaccctgcagaacaaaattaagaacctgagggaagtccgaggtcacctgaagaaaaagcggccagaagaatgtgactgtcacaaaatcagctaccacacccagcacaaaggccgcctcaagcacagaggctccagtctgcatcctttcaggaagggcctgcaagagaaggacaaggtgtggctgttgcgggagcagaagcgcaagaagaaactccgcaagctgctcaagcgcctgcagaacaacgacacgtgcagcatgccaggcctcacgtgcttcacccacgacaaccagcactggcagacggcgcctttctggacactggggcctttctgtgcctgcaccagcgccaacaataacacgtactggtgcatgaggaccatcaatgagactcatgcaccagcgccaacaataacacgtactggtgcatgaggaccagtacgtgttattgcctgcaccagcgccaacaataacacgtactggtcctcgaattcgaccacactggcggccgcaaggag

SEQ ID NO: 359294 - DNA, 2691 bp, Homo sapiens
ctccccgtggatgtctatatttatttgttaagtctgacaactctaccatggaggatcatatcagagaaaggagatgctaggttgaaaagtaaaaacatcctaggatttaagagcatgagccgggagctaaggcttcttggcttcacaggatccaccacttataactgtgtgatcttcggacagttactaaacctctcttggtttccatggtaaaacgggcatagtaacttactgtgtgagattgtcacaagatttaataagttactgctgtttacaagtgctttcccacagcggcgtctgtttccccttagctagcaactcggctgtgttttctgcagctgctggtgagttctctgcccgctctttgcccacccgcgtcaggccggtccccctccggcctcttctgtggcgcgagggacagcggaaaccacggtagacagcacccccttgagtccaattcctcccctttcggaggaagccggtttctcctttctatgctactcccgggccatttctggacaacagctgctattttcacttgagccgaagttaatttctcggggagttctcgggcgcgcacaggcagctcggtttgccctgcgattgagctgcgggtcgcggccggcgccggcctctccaatggcaaatgtgtgtggctggaggcgagcgcgaggctttcggcaaaggcagtcgagtgtttgcagaccggggcgagtcctgtgaaagcagataaaagaaaacatttattaacgtgtcattacgaggggagcgcccggccggggctgtcgcactccccgcggaacatttggctccctccagctccgagagaggagaagaagaaagcggaaaagaggcagattcacgtcgtttccagccaagtggacctgatcgatggccctcctgaatttatcacgatatttgatttattagcgatgccccctggtttgtgtgttacgcacacacacgtgcacacaaggctctggctcgcttccctccctcgtttccagctcctgggcgaatcccacatctgtttcaactctccgccgagggcgagcaggagcgagagtgtgtcgagtgagtgtgcgtctgtgtgtcccggcgagggtgcgcgctcggcgccgggagcgcggccagccgagtccggaggcatcgggaggtcgagagccgccgggaccccagctctgcgttcactgccccgtccggagctggacttcggggccggggccggggccgtgcgccggggacaggcagggccgggtcgcgggccgcgcgtcccccaggccggagatctgcgagtgaagagggacgagggaaaagaaacaaagccacagacgcaacttgagactcccgcatcccaaaagaagcaccagatcagcaaaaaaagaagatgggccccccgagcctcgtgctgtgcttgctgtccgcaactgtgttctccctgctgggtggaagctcggccttcctgtcgcaccaccgcctgaaaggcaggtttcagagggaccgcaggaacatccgccccaacatcatcctggtgctgacggacgaccaggatgtggagctgggttccatgcaggtgatgaacaagacccggcgcatcatggagcagggcggggcgcacttcatcaacgccttcgtgaccacacccatgtgctgcccctcacgctcctccatcctcactggcaagtacgtccacaaccacaacacctacaccaacaatgagaactgctcctcgccctcctggcaggcacagcacgagagccgcacctttgccgtgtacctcaatagcactggctaccggacagctttcttcgggaagtatcttaatgaatacaacggctcctacgtgccacccggctggaaggagtgggtcggactccttaaaaactcccgcttttataactacacgctgtgtcggaacggggtgaaagagaagcacggctccgactactccaaggattacctcacagacctcatcaccaatgacagcgtgagcttcttccgcacgtccaagaagatgtacccgcacaggccagtcctcatggtcatcagccatgcagccccccacggccctgaggattcagccccacaatattcacgcctcttcccaaacgcatctcagcacatcacgccgagctacaactacgcgcccaacccggacaaacactggatcatgcgctacacggggcccatgaagcccatccacatggaattcaccaacatgctccagcggaagcgcttgcagaccctcatgtcggtggacgactccatggagacgatttacaacatgctggttgagacgggcgagctggacaacacgtacatcgtatacaccgccgaccacggttaccacatcggccagtttggcctggtgaaagggaaatccatgccatatgagtttgacatcagggtcccgttctacgtgaggggccccaacgtggaagccggctgtctgaatccccacatcgtcctcaacattgacctggcccccaccatcctggacattgcaggcctggacatacctgcggatatggacgggaaatccatcctcaagctgctggacacggagcggccggtgaatcggtttcacttgaaaaagaagatgagggtctggcgggactccttcttggtggagagaggactgctaacacaagagagacatgacagttcgcccccagcgaggggatccttaga

SEQ ID NO: 359295 - DNA, 2607 bp, Homo sapiens
  misc_feature (2534)..(2534): n is a, c, g, or t
  misc_feature (2545)..(2545): n is a, c, g, or t
  misc_feature (2568)..(2568): n is a, c, g, or t
  misc_feature (2598)..(2599): n is a, c, g, or t
ctccccgtggatgtctatatttatttgttaagtctgacaactctaccatggaggatcatatcagagaaaggagatgctaggttgaaaagtaaaaacatcctaggatttaagagcatgagccgggagctaaggcttcttggcttcacaggatccaccacttataactgtgtgatcttcggacagttactaaacctctcttggtttccatggtaaaacgggcatagtaacttactgtgtgagattgtcacaagatttaataagttactgctgtttacaagtgctttcccacagcggcgtctgtttccccttagctagcaactcggctgtgttttctgcagctgctggtgagttctctgcccgctctttgcccacccgcgtcaggccggtccccctccggcctcttctgtggcgcgagggacagcggaaaccacggtagacagcacccccttgagtccaattcctcccctttcggaggaagccggtttctcctttctatgctactcccgggccatttctggacaacagctgctattttcacttgagccgaagttaatttctcggggagttctcgggcgcgcacaggcagctcggtttgccctgcgattgagctgcgggtcgcggccggcgccggcctctccaatggcaaatgtgtgtggctggaggcgagcgcgaggctttcggcaaaggcagtcgagtgtttgcagaccggggcgagtcctgtgaaagcagataaaagaaaacatttattaacgtgtcattacgaggggagcgcccggccggggctgtcgcactccccgcggaacatttggctccctccagctccgagagaggagaagaagaaagcggaaaagaggcagattcacgtcgtttccagccaagtggacctgatcgatggccctcctgaatttatcacgatatttgatttattagcgatgccccctggtttgtgtgttacgcacacacacgtgcacacaaggctctggctcgcttccctccctcgtttccagctcctgggcgaatcccacatctgtttcaactctccgccgagggcgagcaggagcgagagtgtgtcgagtgagtgtgcgtctgtgtgtcccggcgagggtgcgcgctcggcgccgggagcgcggccagccgagtccggaggcatcgggaggtcgagagccgccgggaccccagctctgcgttcactgccccgtccggagctggacttcggggccggggccggggccgtgcgccggggacaggcagggccgggtcgcgggccgcgcgtcccccaggccggagatctgcgagtgaagagggacgagggaaaagaaacaaagccacagacgcaacttgagactcccgcatcccaaaagaagcaccagatcagcaaaaaaagaagatgggccccccgagcctcgtgctgtgcttgctgtccgcaactgtgttctccctgctgggtggaagctcggccttcctgtcgcaccaccgcctgaaaggcaggtttcagagggaccgcaggaacatccgccccaacatcatcctggtgctgacggacgaccaggatgtggagctgggttccatgcaggtgatgaacaagacccggcgcatcatggagcagggcggggcgcacttcatcaacgccttcgtgaccacacccatgtgctgcccctcacgctcctccatcctcactggcaagtacgtccacaaccacaacacctacaccaacaatgagaactgctcctcgccctcctggcaggcacagcacgagagccgcacctttgccgtgtacctcaatagcactggctaccggacagctttcttcgggaagtatcttaatgaatacaacggctcctacgtgccacccggctggaaggagtgggtcggactccttaaaaactcccgcttttataactacacgctgtgtcggaacggggtgaaagagaagcacggctccgactactccaaggattacctcacagacctcatcaccaatgacagcgtgagcttcttccgcacgtccaagaagatgtacccgcacaggccagtcctcatggtcatcagccatgcagccccccacggccctgaggattcagccccacaatattcacgcctcttcccaaacgcatctcagcacatcacgccgagctacaactacgcgcccaacccggacaaacactggatcatgcgctacacggggcccatgaagcccatccacatggaattcaccaacatgctccagcggaagcgcttgcagaccctcatgtcggtggacgactccatggagacgatttacaacatgctggttgagacgggcgagctggacaacacgtacatcgtatacaccgccgaccacggttaccacatcggccagtttggcctggtgaaagggaaatccatgccatatgagtttgacatcagggtcccgttctacgtgaggggccccaacgtggaagccggctgtctgaatccccacatcgtccgagcggaccggtccgctcgagacagaccggatttgcagcgtcaacggaccgctacggcacctccanccagagtttcnctctgcgcttcgcccgtgcccanggcatagttcaccgatctttcgaggtcctnnaacacgtg

SEQ ID NO: 359296 - DNA, 2273 bp, Homo sapiens
ctccccgtggatgtctatatttatttgttaagtctgacaactctaccatggaggatcatatcagagaaaggagatgctaggttgaaaagtaaaaacatcctaggatttaagagcatgagccgggagctaaggcttcttggcttcacaggatccaccacttataactgtgtgatcttcggacagttactaaacctctcttggtttccatggtaaaacgggcatagtaacttactgtgtgagattgtcacaagatttaataagttactgctgtttacaagtgctttcccacagcggcgtctgtttccccttagctagcaactcggctgtgttttctgcagctgctggtgagttctctgcccgctctttgcccacccgcgtcaggccggtccccctccggcctcttctgtggcgcgagggacagcggaaaccacggtagacagcacccccttgagtccaattcctcccctttcggaggaagccggtttctcctttctatgctactcccgggccatttctggacaacagctgctattttcacttgagccgaagttaatttctcggggagttctcgggcgcgcacaggcagctcggtttgccctgcgattgagctgcgggtcgcggccggcgccggcctctccaatggcaaatgtgtgtggctggaggcgagcgcgaggctttcggcaaaggcagtcgagtgtttgcagaccggggcgagtcctgtgaaagcagataaaagaaaacatttattaacgtgtcattacgaggggagcgcccggccggggctgtcgcactccccgcggaacatttggctccctccagctccgagagaggagaagaagaaagcggaaaagaggcagattcacgtcgtttccagccaagtggacctgatcgatggccctcctgaatttatcacgatatttgatttattagcgatgccccctggtttgtgtgttacgcacacacacgtgcacacaaggctctggctcgcttccctccctcgtttccagctcctgggcgaatcccacatctgtttcaactctccgccgagggcgagcaggagcgagagtgtgtcgagtgagtgtgcgtctgtgtgtcccggcgagggtgcgcgctcggcgccgggagcgcggccagccgagtccggaggcatcgggaggtcgagagccgccgggaccccagctctgcgttcactgccccgtccggagctggacttcggggccggggccggggccgtgcgccggggacaggcagggccgggtcgcgggccgcgcgtcccccaggccggagatctgcgagtgaagagggacgagggaaaagaaacaaagccacagacgcaacttgagactcccgcatcccaaaagaagcaccagatcagcaaaaaaagaagatgggccccccgagcctcgtgctgtgcttgctgtccgcaactgtgttctccctgctgggtggaagctcggccttcctgtcgcaccaccgcctgaaaggcaggtttcagagggaccgcaggaacatccgccccaacatcatcctggtgctgacggacgaccaggatgtggagctgggttccatgcaggtgatgaacaagacccggcgcatcatggagcagggcggggcgcacttcatcaacgccttcgtgaccacacccatgtgctgcccctcacgctcctccatcctcactggcaagtacgtccacaaccacaacacctacaccaacaatgagaactgctcctcgccctcctggcaggcacagcacgagagccgcacctttgccgtgtacctcaatagcactggctaccggacagctttcttcgggaagtatcttaatgaatacaacggctcctacgtgccacccggctggaaggagtgggtcggactccttaaaaactcccgcttttataactacacgctgtgtcggaacggggtgaaagagaagcacggctccgactactccaaggtaagctgcaacctttccagcctgggagtggctgtgtggcccagcagttagaggcccaactcaggagccagactacttgggttcagattgtgactcaggcacttaaaagtgtgaccttgagcattttacatacacctcctcctcagtttttcatctctcagccagggacagtggctcacgcctgtaatcccagcactttgggaggctaaggcaggtgaatcacttgagtccaggagttcaagaccagcctgggcaacatgacgagaccctgtctgtacgaaaaaaatacaaaacttagccgggtgtggtggcacatgcc

SEQ ID NO: 359297 - DNA, 416 bp, Homo sapiens
cattggaggctgacagggactaagagactggcaacctgtaaagttcacctctattctaaagggagcaggccagtttgctccctgcaggaatgggctgaggttcgccagattttctcattcgtctaccaaatccaaaaatgcaagtatgtgtgagaattctttatcattatcatctaatttgacattaagttaaccatgtgggcaaattatcgcccttggtgaactgccacttgcaacctctggtctactcatttcttcctttatatgcatataaacctgtgtggctttaataggacattagtaacaggtcacctaagcctttcttcggtgcttctagaattaaggtacagaatctttacatatcacaatctccttagccactattctgtccagatccttaaatgccatccttgcca

SEQ ID NO: 359298 - DNA, 1107 bp, Homo sapiens
ggcggcggcggcagcggcagcggcggcgcggagtcccctgcgcccagcggcccggccgggctgcggcagaggcggcggcggcgccccgctccgggtgaggttgccggggccgtgcgcgctgatctgcgagtgaagagggacgagggaaaagaaacaaagccacagacgcaacttgagactcccgcatcccaaaagaagcaccagatcagcaaaaaaagaagatgggccccccgagcctcgtgctgtgcttgctgtccgcaactgtgttctccctgctgggtggaagctcggccttcctgtcgcaccaccgcctgaaaggcaggtttcagagggaccgcaggaacatccgccccaacatcatcctggtgctgacggacgaccaggatgtggagctgggttccatgcaggtgatgaacaagacccggcgcatcatggagcagggcggggcgcacttcatcaacgccttcgtgaccacacccatgtgctgcccctcacgctcctccatcctcactggcaagtacgtccacaaccacaacacctacaccaacaatgagaactgctcctcgccctcctggcaggcacagcacgagagccgcacctttgccgtgtacctcaatagcactggctaccggacagctttcttcgggaagtatcttaatgaatacaacggctcctacgtgccacccggctggaaggagtgggtcggactccttaaaaactcccgcttttataactacacgctgtgtcggaacggggtgaaagagaagcacggctccgactactccaaggtaagctgcaacctttccagcctgggagtggctgtgtggcccagcagttagaggcccaactcaggagccagactacttgggttcagattgtgactcaggcacttaaaagtgtgaccttgagcattttacatacacctcctcctcagtttttcatctctcagccagggacagtggctcacgcctgtaatcccagcactttgggaggctaaggcaggtgaatcacttgagtccaggagttcaagaccagcctgggcaacatgacgagaccctgtctgtacgaaaaaaatacaaaacttagccgggtgtggtggcacatgcc

SEQ ID NO: 359299 - DNA, 5935 bp, Homo sapiens
ctccccgtggatgtctatatttatttgttaagtctgacaactctaccatggaggatcatatcagagaaaggagatgctaggttgaaaagtaaaaacatcctaggatttaagagcatgagccgggagctaaggcttcttggcttcacaggatccaccacttataactgtgtgatcttcggacagttactaaacctctcttggtttccatggtaaaacgggcatagtaacttactgtgtgagattgtcacaagatttaataagttactgctgtttacaagtgctttcccacagcggcgtctgtttccccttagctagcaactcggctgtgttttctgcagctgctggtgagttctctgcccgctctttgcccacccgcgtcaggccggtccccctccggcctcttctgtggcgcgagggacagcggaaaccacggtagacagcacccccttgagtccaattcctcccctttcggaggaagccggtttctcctttctatgctactcccgggccatttctggacaacagctgctattttcacttgagccgaagttaatttctcggggagttctcgggcgcgcacaggcagctcggtttgccctgcgattgagctgcgggtcgcggccggcgccggcctctccaatggcaaatgtgtgtggctggaggcgagcgcgaggctttcggcaaaggcagtcgagtgtttgcagaccggggcgagtcctgtgaaagcagataaaagaaaacatttattaacgtgtcattacgaggggagcgcccggccggggctgtcgcactccccgcggaacatttggctccctccagctccgagagaggagaagaagaaagcggaaaagaggcagattcacgtcgtttccagccaagtggacctgatcgatggccctcctgaatttatcacgatatttgatttattagcgatgccccctggtttgtgtgttacgcacacacacgtgcacacaaggctctggctcgcttccctccctcgtttccagctcctgggcgaatcccacatctgtttcaactctccgccgagggcgagcaggagcgagagtgtgtcgagtgagtgtgcgtctgtgtgtcccggcgagggtgcgcgctcggcgccgggagcgcggccagccgagtccggaggcatcgggaggtcgagagccgccgggaccccagctctgcgttcactgccccgtccggagctggacttcggggccggggccggggccgtgcgccggggacaggcagggccgggtcgcgggccgcgcgtcccccaggccggagatctgcgagtgaagagggacgagggaaaagaaacaaagccacagacgcaacttgagactcccgcatcccaaaagaagcaccagatcagcaaaaaaagaagatgggccccccgagcctcgtgctgtgcttgctgtccgcaactgtgttctccctgctgggtggaagctcggccttcctgtcgcaccaccgcctgaaaggcaggtttcagagggaccgcaggaacatccgccccaacatcatcctggtgctgacggacgaccaggatgtggagctggctttcttcgggaagtatcttaatgaatacaacggctcctacgtgccacccggctggaaggagtgggtcggactccttaaaaactcccgcttttataactacacgctgtgtcggaacggggtgaaagagaagcacggctccgactactccaagcacgccgagctacaactacgcgcccaacccggacaaacactggatcatgcgctacacggggcccatgaagcccatccacatggaattcaccaacatgctccagcggaagcgcttgcagaccctcatgtcggtggacgactccatggagacgatttacaacatgctggttgagacgggcgagctggacaacacgtacatcgtatacaccgccgaccacggttaccacatcggccagtttggcctggtgaaagggaaatccatgccatatgagtttgacatcagggtcccgttctacgtgaggggccccaacgtggaagccggctgtctgaatccccacatcgtcctcaacattgacctggcccccaccatcctggacattgcaggcctggacatacctgcggatatggacgggaaatccatcctcaagctgctggacacggagcggccggtgaatcggtttcacttgaaaaagaagatgagggtctggcgggactccttcttggtggagagaggcaagctgctacacaagagagacaatgacaaggtggacgcccaggaggagaactttctgcccaagtaccagcgtgtgaaggacctgtgtcagcgtgctgagtaccagacggcgtgtgagcagctgggacagaagtggcagtgtgtggaggacgccacggggaagctgaagctgcataagtgcaagggccccatgcggctgggcggcagcagagccctctccaacctcgtgcccaagtactacgggcagggcagcgaggcctgcacctgtgacagcggggactacaagctcagcctggccggacgccggaaaaaactcttcaagaagaagtacaaggccagctatgtccgcagtcgctccatccgctcagtggccatcgaggtggacggcagggtgtaccacgtaggcctgggtgatgccgcccagccccgaaacctcaccaagcggcactggccaggggcccctgaggaccaagatgacaaggatggtggggacttcagtggcactggaggccttcccgactactcagccgccaaccccattaaagtgacacatcggtgctacatcctagagaacgacacagtccagtgtgacctggacctgtacaagtccctgcaggcctggaaagaccacaagctgcacatcgaccacgagattgaaaccctgcagaacaaaattaagaacctgagggaagtccgaggtcacctgaagaaaaagcggccagaagaatgtgactgtcacaaaatcagctaccacacccagcacaaaggccgcctcaagcacagaggctccagtctgcatcctttcaggaagggcctgcaagagaaggacaaggtgtggctgttgcgggagcagaagcgcaagaagaaactccgcaagctgctcaagcgcctgcagaacaacgacacgtgcagcatgccaggcctcacgtgcttcacccacgacaaccagcactggcagacggcgcctttctggacactggggcctttctgtgcctgcaccagcgccaacaataacacgtactggtgcatgaggaccatcaatgagactcacaatttcctcttctgtgaatttgcaactggcttcctagagtactttgatctcaacacagacccctaccagctgatgaatgcagtgaacacactggacagggatgtcctcaaccagctacacgtacagctcatggagctgaggagctgcaagggttacaagcagtgtaacccccggactcgaaacatggacctgggacttaaagatggaggaagctatgagcaatacaggcagtttcagcgtcgaaagtggccagaaatgaagagaccttcttccaaatcactgggacaactgtgggaaggctgggaaggttaagaaacaacagaggtggacctccaaaaacatagaggcatcacctgactgcacaggcaatgaaaaaccatgtgggtgatttccagcagacctgtgctattggccaggaggcctgagaaagcaagcacgcactctcagtcaacatgacagattctggaggataaccagcaggagcagagataacttcaggaagtccatttttgcccctgcttttgctttggattatacctcaccagctgcacaaaatgcattttttcgtatcaaaaagtcaccactaaccctcccccagaagctcacaaaggaaaacggagagagcgagcgagagagatttccttggaaatttctcccaagggcgaaagtcattggaatttttaaatcataggggaaaagcagtcctgttctaaatcctcttattcttttggtttgtcacaaagaaggaactaagaagcaggacagaggcaacgtggagaggctgaaaacagtgcagagacgtttgacaatgagtcagtagcacaaaagagatgacatttacctagcactataaaccctggttgcctctgaagaaactgccttcattgtatatatgtgactatttacatgtaatcaacatgggaacttttaggggaacctaataagaaatcccaattttcaggagtggtggtgtcaataaacgctctgtggccagtgtaaaagaaaatccctcgcagttgtggacatttctgttcctgtccagataccatttctcctagtatttctttgttatgtcccagaactgatgttttttttttaaggtactgaaaagaaatgaagttgatgtatgtcccaagttttgatgaaactgtatttgtaaaaaaaattttgtagtttaagtattgtcatacagtgttcaaaaccccagccaatgaccagcagttggtatgaagaacctttgacattttgtaaaaggccatttcttgggagttttttggtgtgtctgtttttttaaagtattcaagatactaccagtcaacatctttttggaagaaaatgccttgggtttagaagattttcttaaaaggggagtagatggttgtagattgactaaaaagtctaccatacttcaagggactacaggtaagtctcatagtataccagctttggtacttcattttttaaaaaagtattaatcaattgcaaagaaattcgccttggccaacccttctttgtgtatcaggtagtctaacctgatacaagtagttgacagatttcaactatcaatcaccagtccaacccatttctcatttaacagatgacggagataatccctaaaagcacccacatttgtttcaatgccccaaacaggccaaggctccctagcaactccctagtggcgttttttaacttctcagaaactgttaccattatttgaaataggcttccttaacctcctttacccttaacccaacagggatttaaaaaaaaaaaaaaaaaaaaaaaactctttaggctccaattttaaatagaaacctttatttacaatgacatccaaaatggtcagcaaagcagtcacagctcaccatcccccataagtcatttcatgtggtttcaattctttgcaagataaagaataatttctatttttttaagcaacataatgtaaacttgattgaaactgaattcattctcaagagtataagtcaattcctgagaatttaaatattgctctcatattttattcttcgaaactccatatattagaaaggaagagagaaaacaccctgctcgtttattaacagtgtgccttggagttgaaaacaataaatcaatccttgaggttttgctcctaggaacctaattgtgaacaaaactcacagcttctgcaaataaaaagggaactgggcaggcatacatgtaactggcaatccattctgtttactttcagctgcacccacctctggatcaaagaacttctaggacatcaagccaattatcttctgtaataccctacccctaatatagatacccccaactcacctcagatattaaatactgataactaagtagcactgttattgatatttacacctttcaatccagatgcagtttagaaaagtggcatcataatatgaacattaacaatgtaacttccgtttattttttaaaggaagaaacatgtatctcctttatatcattctgatctttataaaatatatatattttatttatatatctttggattcagcaaaaaaaaaaaaaaaaagtaggtactggaaatatcccacattctaaaagcagatgaaaagattatactgttcacccaacagataccaaggtttgaaaaaatggggggtgctggggtgtgaggagag

SEQ ID NO: 359300 - DNA, 3550 bp, Homo sapiens
  misc_feature (7)..(7): n is a, c, g, or t
  misc_feature (65)..(65): n is a, c, g, or t
ccatggngtaaccgttcgtacgagaatcgctgtcctctccttgcggccgccagtgtggtggaatntgaatcgccaagtactacgggcagggcagcgaggcctgcacctgtgacagcggggactacaagctcagcctggccggacgccggaaaaaactcttcaagaagaagtacaaggccagctatgtccgcagtcgctccatccgctcagtggccatcgaggtggacggcagggtgtaccacgtaggcctgggtgatgccgcccagccccgaaacctcaccaagcggcactggccaggggcccctgaggaccaagatgacaaggatggtggggacttcagtggcactggaggccttcccgactactcagccgccaaccccattaaagtgacacatcggtgctacatcctagagaacgacacagtccagtgtgacctggacctgtacaagtccctgcaggcctggaaagaccacaagctgcacatcgaccacgagattgaaaccctgcagaacaaaattaagaacctgagggaagtccgaggtcacctgaagaaaaagcggccagaagaatgtgactgtcacaaaatcagctaccacacccagcacaaaggccgcctcaagcacagaggctccagtctgcatcctttcaggaagggcctgcaagagaaggacaaggtgtggctgttgcgggagcagaagcgcaagaagaaactccgcaagctgctcaagcgcctgcagaacaacgacacgtgcagcatgccaggcctcacgtgcttcacccacgacaaccagcactggcagacggcgcctttctggacactggggcctttctgtgcctgcaccagcgccaacaataacacgtactggtgcatgaggaccatcaatgagactcacaatttcctcttctgtgaatttgcaactggcttcctagagtactttgatctcaacacagacccctaccagctgatgaatgcagtgaacacactggacagggatgtcctcaaccagctacacgtacagctcatggagctgaggagctgcaagggttacaagcagtgtaacccccggactcgaaacatggacctgggacttaaagatggaggaagctatgagcaatacaggcagtttcagcgtcgaaagtggccagaaatgaagagaccttcttccaaatcactgggacaactgtgggaaggctgggaaggttaagaaacaacagaggtggacctccaaaaacatagaggcatcacctgactgcacaggcaatgaaaaaccatgtgggtgatttccagcagacctgtgctattggccaggaggcctgagaaagcaagcacgcactctcagtcaacatgacagattctggaggataaccagcaggagcagagataacttcaggaagtccatttttgcccctgcttttgctttggattatacctcaccagctgcacaaaatgcattttttcgtatcaaaaagtcaccactaaccctcccccagaagctcacaaaggaaaacggagagagcgagcgagagagatttccttggaaatttctcccaagggcgaaagtcattggaatttttaaatcataggggaaaagcagtcctgttctaaatcctcttattcttttggtttgtcacaaagaaggaactaagaagcaggacagaggcaacgtggagaggctgaaaacagtgcagagacgtttgacaatgagtcagtagcacaaaagagatgacatttacctagcactataaaccctggttgcctctgaagaaactgccttcattgtatatatgtgactatttacatgtaatcaacatgggaacttttaggggaacctaataagaaatcccaattttcaggagtggtggtgtcaataaacgctctgtggccagtgtaaaagaaaatccctcgcagttgtggacatttctgttcctgtccagataccatttctcctagtatttctttgttatgtcccagaactgatgttttttttttaaggtactgaaaagaaatgaagttgatgtatgtcccaagttttgatgaaactgtatttgtaaaaaaaattttgtagtttaagtattgtcatacagtgttcaaaaccccagccaatgaccagcagttggtatgaagaacctttgacattttgtaaaaggccatttcttgggagttttttggtgtgtctgtttttttaaagtattcaagatactaccagtcaacatctttttggaagaaaatgccttgggtttagaagattttcttaaaaggggagtagatggttgtagattgactaaaaagtctaccatacttcaagggactacaggtaagtctcatagtataccagctttggtacttcattttttaaaaaagtattaatcaattgcaaagaaattcgccttggccaacccttctttgtgtatcaggtagtctaacctgatacaagtagttgacagatttcaactatcaatcaccagtccaacccatttctcatttaacagatgacggagataatccctaaaagcacccacatttgtttcaatgccccaaacaggccaaggctccctagcaactccctagtggcgttttttaacttctcagaaactgttaccattatttgaaataggcttccttaacctcctttacccttaacccaacagggatttaaaaaaaaaaaaaaaaaaaaaaaactctttaggctccaattttaaatagaaacctttatttacaatgacatccaaaatggtcagcaaagcagtcacagctcaccatcccccataagtcatttcatgtggtttcaattctttgcaagataaagaataatttctatttttttaagcaacataatgtaaacttgattgaaactgaattcattctcaagagtataagtcaattcctgagaatttaaatattgctctcatattttattcttcgaaactccatatattagaaaggaagagagaaaacaccctgctcgtttattaacagtgtgccttggagttgaaaacaataaatcaatccttgaggttttgctcctaggaacctaattgtgaacaaaactcacagcttctgcaaataaaaagggaactgggcaggcatacatgtaactggcaatccattctgtttactttcagctgcacccacctctggatcaaagaacttctaggacatcaagccaattatcttctgtaataccctacccctaatatagatacccccaactcacctcagatattaaatactgataactaagtagcactgttattgatatttacacctttcaatccagatgcagtttagaaaagtggcatcataatatgaacattaacaatgtaacttccgtttattttttaaaggaagaaacatgtatctcctttatatcattctgatctttataaaatatatatattttatttatatatctttggattcagcaaaaaaaaaaaaaaaaagtaggtactggaaatatcccacattctaaaagcagatgaaaagattatactgttcacccaacagataccaaggtttgaaaaaatggggggtgctggggtgtgaggagag

SEQ ID NO: 359301 - DNA, 6291 bp, Homo sapiens
ctccccgtggatgtctatatttatttgttaagtctgacaactctaccatggaggatcatatcagagaaaggagatgctaggttgaaaagtaaaaacatcctaggatttaagagcatgagccgggagctaaggcttcttggcttcacaggatccaccacttataactgtgtgatcttcggacagttactaaacctctcttggtttccatggtaaaacgggcatagtaacttactgtgtgagattgtcacaagatttaataagttactgctgtttacaagtgctttcccacagcggcgtctgtttccccttagctagcaactcggctgtgttttctgcagctgctggtgagttctctgcccgctctttgcccacccgcgtcaggccggtccccctccggcctcttctgtggcgcgagggacagcggaaaccacggtagacagcacccccttgagtccaattcctcccctttcggaggaagccggtttctcctttctatgctactcccgggccatttctggacaacagctgctattttcacttgagccgaagttaatttctcggggagttctcgggcgcgcacaggcagctcggtttgccctgcgattgagctgcgggtcgcggccggcgccggcctctccaatggcaaatgtgtgtggctggaggcgagcgcgaggctttcggcaaaggcagtcgagtgtttgcagaccggggcgagtcctgtgaaagcagataaaagaaaacatttattaacgtgtcattacgaggggagcgcccggccggggctgtcgcactccccgcggaacatttggctccctccagctccgagagaggagaagaagaaagcggaaaagaggcagattcacgtcgtttccagccaagtggacctgatcgatggccctcctgaatttatcacgatatttgatttattagcgatgccccctggtttgtgtgttacgcacacacacgtgcacacaaggctctggctcgcttccctccctcgtttccagctcctgggcgaatcccacatctgtttcaactctccgccgagggcgagcaggagcgagagtgtgtcgagtgagtgtgcgtctgtgtgtcccggcgagggtgcgcgctcggcgccgggagcgcggccagccgagtccggaggcatcgggaggtcgagagccgccgggaccccagctctgcgttcactgccccgtccggagctggacttcggggccggggccggggccgtgcgccggggacaggcagggccgggtcgcgggccgcgcgtcccccaggccggagatctgcgagtgaagagggacgagggaaaagaaacaaagccacagacgcaacttgagactcccgcatcccaaaagaagcaccagatcagcaaaaaaagaagatgggccccccgagcctcgtgctgtgcttgctgtccgcaactgtgttctccctgctgggtggaagctcggccttcctgtcgcaccaccgcctgaaaggcaggtttcagagggaccgcaggaacatccgccccaacatcatcctggtgctgacggacgaccaggatgtggagctgggttccatgcaggtgatgaacaagacccggcgcatcatggagcagggcggggcgcacttcatcaacgccttcgtgaccacacccatgtgctgcccctcacgctcctccatcctcactggcaagtacgtccacaaccacaacacctacaccaacaatgagaactgctcctcgccctcctggcaggcacagcacgagagccgcacctttgccgtgtacctcaatagcactggctaccggacagctttcttcgggaagtatcttaatgaatacaacggctcctacgtgccacccggctggaaggagtgggtcggactccttaaaaactcccgcttttataactacacgctgtgtcggaacggggtgaaagagaagcacggctccgactactccaaggattacctcacagacctcatcaccaatgacagcgtgagcttcttccgcacgtccaagaagatgtacccgcacaggccagtcctcatggtcatcagccatgcagccccccacggccctgaggattcagccccacaatattcacgcctcttcccaaacgcatctcagcacatcacgccgagctacaactacgcgcccaacccggacaaacactggatcatgcgctacacggggcccatgaagcccatccacatggaattcaccaacatgctccagcggaagcgcttgcagaccctcatgtcggtggacgactccatggagacgatttacaacatgctggttgagacgggcgagctggacaacacgtacatcgtatacaccgccgaccacggttaccacatcggccagtttggcctggtgaaagggaaatccatgccatatgagtttgacatcagggtcccgttctacgtgaggggccccaacgtggaagccggctgtctgaatccccacatcgtcctcaacattgacctggcccccaccatcctggacattgcaggcctggacatacctgcggatatggacgggaaatccatcctcaagctgctggacacggagcggccggtgaatcggtttcacttgaaaaagaagatgagggtctggcgggactccttcttggtggagagaggcaagctgctacacaagagagacaatgacaaggtggacgcccaggaggagaactttctgcccaagtaccagcgtgtgaaggacctgtgtcagcgtgctgagtaccagacggcgtgtgagcagctgggacagaagtggcagtgtgtggaggacgccacggggaagctgaagctgcataagtgcaagggccccatgcggctgggcggcagcagagccctctccaacctcgtgcccaagtactacgggcagggcagcgaggcctgcacctgtgacagcggggactacaagctcagcctggccggacgccggaaaaaactcttcaagaagaagtacaaggccagctatgtccgcagtcgctccatccgctcagtggccatcgaggtggacggcagggtgtaccacgtaggcctgggtgatgccgcccagccccgaaacctcaccaagcggcactggccaggggcccctgaggaccaagatgacaaggatggtggggacttcagtggcactggaggccttcccgactactcagccgccaaccccattaaagtgacacatcggtgctacatcctagagaacgacacagtccagtgtgacctggacctgtacaagtccctgcaggcctggaaagaccacaagctgcacatcgaccacgagattgaaaccctgcagaacaaaattaagaacctgagggaagtccgaggtcacctgaagaaaaagcggccagaagaatgtgactgtcacaaaatcagctaccacacccagcacaaaggccgcctcaagcacagaggctccagtctgcatcctttcaggaagggcctgcaagagaaggacaaggtgtggctgttgcgggagcagaagcgcaagaagaaactccgcaagctgctcaagcgcctgcagaacaacgacacgtgcagcatgccaggcctcacgtgcttcacccacgacaaccagcactggcagacggcgcctttctggacactggggcctttctgtgcctgcaccagcgccaacaataacacgtactggtgcatgaggaccatcaatgagactcacaatttcctcttctgtgaatttgcaactggcttcctagagtactttgatctcaacacagacccctaccagctgatgaatgcagtgaacacactggacagggatgtcctcaaccagctacacgtacagctcatggagctgaggagctgcaagggttacaagcagtgtaacccccggactcgaaacatggacctgggacttaaagatggaggaagctatgagcaatacaggggacaactgtgggaaggctgggaaggttaagaaacaacagaggtggacctccaaaaacatagaggcatcacctgactgcacaggcaatgaaaaaccatgtgggtgatttccagcagacctgtgctattggccaggaggcctgagaaagcaagcacgcactctcagtcaacatgacagattctggaggataaccagcaggagcagagataacttcaggaagtccatttttgcccctgcttttgctttggattatacctcaccagctgcacaaaatgcattttttcgtatcaaaaagtcaccactaaccctcccccagaagctcacaaaggaaaacggagagagcgagcgagagagatttccttggaaatttctcccaagggcgaaagtcattggaatttttaaatcataggggaaaagcagtcctgttctaaatcctcttattcttttggtttgtcacaaagaaggaactaagaagcaggacagaggcaacgtggagaggctgaaaacagtgcagagacgtttgacaatgagtcagtagcacaaaagagatgacatttacctagcactataaaccctggttgcctctgaagaaactgccttcattgtatatatgtgactatttacatgtaatcaacatgggaacttttaggggaacctaataagaaatcccaattttcaggagtggtggtgtcaataaacgctctgtggccagtgtaaaagaaaatccctcgcagttgtggacatttctgttcctgtccagataccatttctcctagtatttctttgttatgtcccagaactgatgttttttttttaaggtactgaaaagaaatgaagttgatgtatgtcccaagttttgatgaaactgtatttgtaaaaaaaattttgtagtttaagtattgtcatacagtgttcaaaaccccagccaatgaccagcagttggtatgaagaacctttgacattttgtaaaaggccatttcttgggagttttttggtgtgtctgtttttttaaagtattcaagatactaccagtcaacatctttttggaagaaaatgccttgggtttagaagattttcttaaaaggggagtagatggttgtagattgactaaaaagtctaccatacttcaagggactacaggtaagtctcatagtataccagctttggtacttcattttttaaaaaagtattaatcaattgcaaagaaattcgccttggccaacccttctttgtgtatcaggtagtctaacctgatacaagtagttgacagatttcaactatcaatcaccagtccaacccatttctcatttaacagatgacggagataatccctaaaagcacccacatttgtttcaatgccccaaacaggccaaggctccctagcaactccctagtggcgttttttaacttctcagaaactgttaccattatttgaaataggcttccttaacctcctttacccttaacccaacagggatttaaaaaaaaaaaaaaaaaaaaaaaactctttaggctccaattttaaatagaaacctttatttacaatgacatccaaaatggtcagcaaagcagtcacagctcaccatcccccataagtcatttcatgtggtttcaattctttgcaagataaagaataatttctatttttttaagcaacataatgtaaacttgattgaaactgaattcattctcaagagtataagtcaattcctgagaatttaaatattgctctcatattttattcttcgaaactccatatattagaaaggaagagagaaaacaccctgctcgtttattaacagtgtgccttggagttgaaaacaataaatcaatccttgaggttttgctcctaggaacctaattgtgaacaaaactcacagcttctgcaaataaaaagggaactgggcaggcatacatgtaactggcaatccattctgtttactttcagctgcacccacctctggatcaaagaacttctaggacatcaagccaattatcttctgtaataccctacccctaatatagatacccccaactcacctcagatattaaatactgataactaagtagcactgttattgatatttacacctttcaatccagatgcagtttagaaaagtggcatcataatatgaacattaacaatgtaacttccgtttattttttaaaggaagaaacatgtatctcctttatatcattctgatctttataaaatatatatattttatttatatatctttggattcagcaaaaaaaaaaaaaaaaagtaggtactggaaatatcccacattctaaaagcagatgaaaagattatactgttcacccaacagataccaaggtttgaaaaaatggggggtgctggggtgtgaggagag

SEQ ID NO: 359302 - DNA, 4704 bp, Homo sapiens
ctccccgtggatgtctatatttatttgttaagtctgacaactctaccatggaggatcatatcagagaaaggagatgctaggttgaaaagtaaaaacatcctaggatttaagagcatgagccgggagctaaggcttcttggcttcacaggatccaccacttataactgtgtgatcttcggacagttactaaacctctcttggtttccatggtaaaacgggcatagtaacttactgtgtgagattgtcacaagatttaataagttactgctgtttacaagtgctttcccacagcggcgtctgtttccccttagctagcaactcggctgtgttttctgcagctgctggtgagttctctgcccgctctttgcccacccgcgtcaggccggtccccctccggcctcttctgtggcgcgagggacagcggaaaccacggtagacagcacccccttgagtccaattcctcccctttcggaggaagccggtttctcctttctatgctactcccgggccatttctggacaacagctgctattttcacttgagccgaagttaatttctcggggagttctcgggcgcgcacaggcagctcggtttgccctgcgattgagctgcgggtcgcggccggcgccggcctctccaatggcaaatgtgtgtggctggaggcgagcgcgaggctttcggcaaaggcagtcgagtgtttgcagaccggggcgagtcctgtgaaagcagataaaagaaaacatttattaacgtgtcattacgaggggagcgcccggccggggctgtcgcactccccgcggaacatttggctccctccagctccgagagaggagaagaagaaagcggaaaagaggcagattcacgtcgtttccagccaagtggacctgatcgatggccctcctgaatttatcacgatatttgatttattagcgatgccccctggtttgtgtgttacgcacacacacgtgcacacaaggctctggctcgcttccctccctcgtttccagctcctgggcgaatcccacatctgtttcaactctccgccgagggcgagcaggagcgagagtgtgtcgagtgagtgtgcgtctgtgtgtcccggcgagggtgcgcgctcggcgccgggagcgcggccagccgagtccggaggcatcgggaggtcgagagccgccgggaccccagctctgcgttcactgccccgtccggagctggacttcggggccggggccggggccgtgcgccggggacaggcagggccgggtcgcgggccgcgcgtcccccaggccggagatctgcgagtgaagagggacgagggaaaagaaacaaagccacagacgcaacttgagactcccgcatcccaaaagaagcaccagatcagcaaaaaaagaagatgggccccccgagcctcgtgctgtgcttgctgtccgcaactgtgttctccctgctgggtggaagctcggccttcctgtcgcaccaccgcctgaaaggcaggtttcagagggaccgcaggaacatccgccccaacatcatcctggtgctgacggacgaccaggatgtggagctgggttccatgcaggtgatgaacaagacccggcgcatcatggagcagggcggggcgcacttcatcaacgccttcgtgaccacacccatgtgctgcccctcacgctcctccatcctcactggcaagtacgtccacaaccacaacacctacaccaacaatgagaactgctcctcgccctcctggcaggcacagcacgagagccgcacctttgccgtgtacctcaatagcactggctaccggacagctttcttcgggaagtatcttaatgaatacaacggctcctacgtgccacccggctggaaggagtgggtcggactccttaaaaactcccgcttttataactacacgctgtgtcggaacggggtgaaagagaagcacggctccgactactccaaggattacctcacagacctcatcaccaatgacagcgtgagcttcttccgcacgtccaagaagatgtacccgcacaggccagtcctcatggtcatcagccatgcagccccccacggccctgaggattcagccccacaatattcacgcctcttcccaaacgcatctcagcacatcacgccgagctacaactacgcgcccaacccggacaaacactggatcatgcgctacacggggcccatgaagcccatccacatggaattcaccaacatgctccagcggaagcgcttgcagaccctcatgtcggtggacgactccatggagacgatttacaacatgctggttgagacgggcgagctggacaacacgtacatcgtatacaccgccgaccacggttaccacatcggccagtttggcctggtgaaagggaaatccatgccatatgagtttgacatcagggtcccgttctacgtgaggggccccaacgtggaagccggctgtctgaatccccacatcgtcctcaacattgacctggcccccaccatcctggacattgcaggcctggacatacctgcggatatggacgggaaatccatcctcaagctgctggacacggagcggccggtgaatcggtttcacttgaaaaagaagatgagggtctggcgggactccttcttggtggagagaggcaagctgctacacaagagagacaatgacaaggtggacgcccaggaggagaactttctgcccaagtaccagcgtgtgaaggacctgtgtcagcgtgctgagtaccagacggcgtgtgagcagctgggacagaagtggcagtgtgtggaggacgccacggggaagctgaagctgcataagtgcaagggccccatgcggctgggcggcagcagagccctctccaacctcgtgcccaagtactacgggcagggcagcgaggcctgcacctgtgacagcggggactacaagctcagcctggccggacgccggaaaaaactcttcaagaagaagtacaaggccagctatgtccgcagtcgctccatccgctcagtggccatcgaggtggacggcagggtgtaccacgtaggcctgggtgatgccgcccagccccgaaacctcaccaagcggcactggccaggggcccctgaggaccaagatgacaaggatggtggggacttcagtggcactggaggccttcccgactactcagccgccaaccccattaaagtgacacatcggtgctacatcctagagaacgacacagtccagtgtgacctggacctgtacaagtccctgcaggcctggaaagaccacaagctgcacatcgaccacgagattgaaaccctgcagaacaaaattaagaacctgagggaagtccgaggtcacctgaagaaaaagcggccagaagaatgtgactgtcacaaaatcagctaccacacccagcacaaaggccgcctcaagcacagaggctccagtctgcatcctttcaggaagggcctgcaagagaaggacaaggtgtggctgttgcgggagcagaagcgcaagaagaaactccgcaagctgctcaagcgcctgcagaacaacgacacgtgcagcatgccaggcctcacgtgcttcacccacgacaaccagcactggcagacggcgcctttctggacactggggcctttctgtgcctgcaccagcgccaacaataacacgtactggtgcatgaggaccatcaatgagactcacaatttcctcttctgtgaatttgcaactggcttcctagagtactttgatctcaacacagacccctaccagctgatgaatgcagtgaacacactggacagggatgtcctcaaccagctacacgtacagctcatggagctgaggagctgcaagggttacaagcagtgtaacccccggactcgaaacatggacctgggacttaaagatggaggaagctatgagcaatacaggcagtttcagcgtcgaaagtggccagaaatgaagagaccttcttccaaatcactgggacaactgtgggaaggctgggaaggttaagaaacaacagaggtggacctccaaaaacatagaggcatcacctgactgcacaggcaatgaaaaaccatgtgggtgatttccagcagacctgtgctattggccaggaggcctgagaaagcaagcacgcactctcagtcaacatgacagattctggaggataaccagcaggagcagagataacttcaggaagtccatttttgcccctgcttttgctttggattatacctcaccagctgcacaaaatgcattttttcgtatcaaaaagtcaccactaaccctcccccagaagctcacaaaggaaaacggagagagcgagcgagagagatttccttggaaatttctcccaagggcgaaagtcattggaatttttaaatcataggggaaaagcagtcctgttctaaatcctcttattcttttggtttgtcacaaagaaggaactaagaagcaggacagaggcaacgtggagaggctgaaaacagtgcagagacgtttgacaatgagtcagtagcacaaaagagatgacatttacctagcactataaaccctggttgcctctgaagaaactgccttcattgtatatatgtgactatttacatgtaatcaacatgggaacttttaggggaacctaataagaaatcccaattttcaggagtggtggtatagggtggtatagggtggtatagagtggtatcagggtggtatag

SEQ ID NO: 359303 - DNA, 1857 bp, Homo sapiens
tcttttgttggttctgtggctcttcttctttgctggttttgctgtgtgtctgtttttgtgctgttggttttgtttgtttggttgctgtctgtcgcgtctcttcctttcgcgtctgctcttcggtctcagggcttgcgggtgggctgtgctttctgctcttttgtcttttgtcttgctctcgctgtgccgctctgtgtctgtggcgcgttgcctgttcgggtcgctttctctgctgtgttgttgtggttgttgtgttgtgtgtgttttcctgtcttgttctctggttcctcttgtttttgtgtctgcttgtgttttgctgtcttttttgtttttgtgttgtttctctgttggttgttgtgtcgtttctgcgctctcttttgctgtgttgtcgctttgttctttgtttgcgttgtttcttttgttgttgtcttcctccttgggtgtttctggtttttgtttgtttttgtttgtttttgctttgtgtgtgttggtgtgtgtggtgttgtgtgtttttctgttgtttctccccgtctggcgggggggctgtttgatttttttagtttctcgtggcgttctccttctgtgggtgcctccccctcttggtttatgatatagtccccccctatttttggcccccccgcgagtatctctcccctctctcgtgggaggtttttctctctctagacacactctctcggtgtgtgttctcccccgcgcgcgcggtctttttttttatatggtgtgggagagacccccgcgccgcgtttgtgtctctcttcgcgcccgcggtctctccttatggggacccgctggtgtttgtgccccgctgtttctccttctcctttttggggcgcccggcgcgcgcccaccgcgcgatgtggttgtgttagaagggccttttgtcgggggggcgcgcgggcggcgcgcgcgcgcacacgtggttgtgttttgttgttgtttgttgttttgttttttttgttttgttttgtttgtgtgttcaattttaaatagaaacctttatttacaatgacatccaaaatggtcagcaaagcagtcacagctcaccatcccccataagtcatttcatgtggtttcaattctttgcaagataaagaataatttctatttttttaagcaacataatgtaaacttgattgaaactgaattcattctcaagagtataagtcaattcctgagaatttaaatattgctctcatattttattcttcgaaactccatatattagaaaggaagagagaaaacaccctgctcgtttattaacagtgtgccttggagttgaaaacaataaatcaatccttgaggttttgctcctaggaacctaattgtgaacaaaactcacagcttctgcaaataaaaagggaactgggcaggcatacatgtaactggcaatccattctgtttactttcagctgcacccacctctggatcaaagaacttctaggacatcaagccaattatcttctgtaataccctacccctaatatagatacccccaactcacctcagatattaaatactgataactaagtagcactgttattgatatttacacctttcaatccagatgcagtttagaaaagtggcatcataatatgaacattaacaatgtaacttccgtttattttttaaaggaagaaacatgtatctcctttatatcattctgatctttataaaatatatatattttatttatatatctttggattcagcaaaaaaaaaaaaaaaaagtaggtactggaaatatcccacattctaaaagcagatgaaaagattatactgttcacccaacagataccaaggtttgaaaaaatggggggtgctggggtgtgaggagag

SEQ ID NO: 359304 - DNA, 3524 bp, Homo sapiens
ctccccgtggatgtctatatttatttgttaagtctgacaactctaccatggaggatcatatcagagaaaggagatgctaggttgaaaagtaaaaacatcctaggatttaagagcatgagccgggagctaaggcttcttggcttcacaggatccaccacttataactgtgtgatcttcggacagttactaaacctctcttggtttccatggtaaaacgggcatagtaacttactgtgtgagattgtcacaagatttaataagttactgctgtttacaagtgctttcccacagcggcgtctgtttccccttagctagcaactcggctgtgttttctgcagctgctggtgagttctctgcccgctctttgcccacccgcgtcaggccggtccccctccggcctcttctgtggcgcgagggacagcggaaaccacggtagacagcacccccttgagtccaattcctcccctttcggaggaagccggtttctcctttctatgctactcccgggccatttctggacaacagctgctattttcacttgagccgaagttaatttctcggggagttctcgggcgcgcacaggcagctcggtttgccctgcgattgagctgcgggtcgcggccggcgccggcctctccaatggcaaatgtgtgtggctggaggcgagcgcgaggctttcggcaaaggcagtcgagtgtttgcagaccggggcgagtcctgtgaaagcagataaaagaaaacatttattaacgtgtcattacgaggggagcgcccggccggggctgtcgcactccccgcggaacatttggctccctccagctccgagagaggagaagaagaaagcggaaaagaggcagattcacgtcgtttccagccaagtggacctgatcgatggccctcctgaatttatcacgatatttgatttattagcgatgccccctggtttgtgtgttacgcacacacacgtgcacacaaggctctggctcgcttccctccctcgtttccagctcctgggcgaatcccacatctgtttcaactctccgccgagggcgagcaggagcgagagtgtgtcgagtgagtgtgcgtctgtgtgtcccggcgagggtgcgcgctcggcgccgggagcgcggccagccgagtccggaggcatcgggaggtcgagagccgccgggaccccagctctgcgttcactgccccgtccggagctggacttcggggccggggccggggccgtgcgccggggacaggcagggccgggtcgcgggccgcgcgtcccccaggccggagatctgcgagtgaagagggacgagggaaaagaaacaaagccacagacgcaacttgagactcccgcatcccaaaagaagcaccagatcagcaaaaaaagaagatgggccccccgagcctcgtgctgtgcttgctgtccgcaactgtgttctccctgctgggtggaagctcggccttcctgtcgcaccaccgcctgaaaggcaggtttcagagggaccgcaggaacatccgccccaacatcatcctggtgctgacggacgaccaggatgtggagctgggttccatgcaggtgatgaacaagacccggcgcatcatggagcagggcggggcgcacttcatcaacgccttcgtgaccacacccatgtgctgcccctcacgctcctccatcctcactggcaagtacgtccacaaccacaacacctacaccaacaatgagaactgctcctcgccctcctggcaggcacagcacgagagccgcacctttgccgtgtacctcaatagcactggctaccggacagctttcttcgggaagtatcttaatgaatacaacggctcctacgtgccacccggctggaaggagtgggtcggactccttaaaaactcccgcttttataactacacgctgtgtcggaacggggtgaaagagaagcacggctccgactactccaaggattacctcacagacctcatcaccaatgacagcgtgagcttcttccgcacgtccaagaagatgtacccgcacaggccagtcctcatggtcatcagccatgcagccccccacggccctgaggattcagccccacaatattcacgcctcttcccaaacgcatctcagcacatcacgccgagctacaactacgcgcccaacccggacaaacactggatcatgcgctacacggggcccatgaagcccatccacatggaattcaccaacatgctccagcggaagcgcttgcagaccctcatgtcggtggacgactccatggagacgatttacaacatgctggttgagacgggcgagctggacaacacgtacatcgtatacaccgccgaccacggttaccacatcggccagtttggcctggtgaaagggaaatccatgccatatgagtttgacatcagggtcccgttctacgtgaggggccccaacgtggaagccggctgtctgaatccccacatcgtcctcaacattgacctggcccccaccatcctggacattgcaggcctggacatacctgcggatatggacgggaaatccatcctcaagctgctggacacggagcggccggtgaatcggtttcacttgaaaaagaagatgagggtctggcgggactccttcttggtggagagaggcaagctgctacacaagagagacaatgacaaggtggacgcccaggaggagaactttctgcccaagtaccagcgtgtgaaggacctgtgtcagcgtgctgagtaccagacggcgtgtgagcagctgggacagaagtggcagtgtgtggaggacgccacggggaagctgaagctgcataagtgcaagggccccatgcggctgggcggcagcagagccctctccaacctcgtgcccaagtactacgggcagggcagcgaggcctgcacctgtgacagcggggactacaagctcagcctggccggacgccggaaaaaactcttcaagaagaagtacaaggccagctatgtccgcagtcgctccatccgctcagtggccatcgaggtggacggcagggtgtaccacgtaggcctgggtgatgccgcccagccccgaaacctcaccaagcggcactggccaggggcccctgaggaccaagatgacaaggatggtggggacttcagtggcactggaggccttcccgactactcagccgccaaccccattaaagtgacacatcggtgctacatcctagagaacgacacagtccagtgtgacctggacctgtacaagtccctgcaggcctggaaagaccacaagctgcacatcgaccacgagattgaaaccctgcagaacaaaattaagaacctgagggaagtccgaggtcacctgaagaaaaagcggccagaagaatgtgactgtcacaaaatcagctaccacacccagcacaaaggccgcctcaagcacagaggctccagtctgcatcctttcaggtaagagcagcttgaggtcctggggaagagatgcagaggcctgcatgaggaggtggccctcccttaagctaaaactcaga

SEQ ID NO: 359305 - DNA, 2194 bp, Homo sapiens
ctccccgtggatgtctatatttatttgttaagtctgacaactctaccatggaggatcatatcagagaaaggagatgctaggttgaaaagtaaaaacatcctaggatttaagagcatgagccgggagctaaggcttcttggcttcacaggatccaccacttataactgtgtgatcttcggacagttactaaacctctcttggtttccatggtaaaacgggcatagtaacttactgtgtgagattgtcacaagatttaataagttactgctgtttacaagtgctttcccacagcggcgtctgtttccccttagctagcaactcggctgtgttttctgcagctgctggtgagttctctgcccgctctttgcccacccgcgtcaggccggtccccctccggcctcttctgtggcgcgagggacagcggaaaccacggtagacagcacccccttgagtccaattcctcccctttcggaggaagccggtttctcctttctatgctactcccgggccatttctggacaacagctgctattttcacttgagccgaagttaatttctcggggagttctcgggcgcgcacaggcagctcggtttgccctgcgattgagctgcgggtcgcggccggcgccggcctctccaatggcaaatgtgtgtggctggaggcgagcgcgaggctttcggcaaaggcagtcgagtgtttgcagaccggggcgagtcctgtgaaagcagataaaagaaaacatttattaacgtgtcattacgaggggagcgcccggccggggctgtcgcactccccgcggaacatttggctccctccagctccgagagaggagaagaagaaagcggaaaagaggcagattcacgtcgtttccagccaagtggacctgatcgatggccctcctgaatttatcacgatatttgatttattagcgatgccccctggtttgtgtgttacgcacacacacgtgcacacaaggctctggctcgcttccctccctcgtttccagctcctgggcgaatcccacatctgtttcaactctccgccgagggcgagcaggagcgagagtgtgtcgagtgagtgtgcgtctgtgtgtcccggcgagggtgcgcgctcggcgccgggagcgcggccagccgagtccggaggcatcgggaggtcgagagccgccgggaccccagctctgcgttcactgccccgtccggagctggacttcggggccggggccggggccgtgcgccggggacaggcagggccgggtcgcgggccgcgcgtcccccaggccggagatctgcgagtgaagagggacgagggaaaagaaacaaagccacagacgcaacttgagactcccgcatcccaaaagaagcaccagatcagcaaaaaaagaagatgggccccccgagcctcgtgctgtgcttgctgtccgcaactgtgttctccctgctgggtggaagctcggccttcctgtcgcaccaccgcctgaaaggcaggtttcagagggaccgcaggaacatccgccccaacatcatcctggtgctgacggacgaccaggatgtggagctgggttccatgcaggtgatgaacaagacccggcgcatcatggagcagggcggggcgcacttcatcaacgccttcgtgaccacacccatgtgctgcccctcacgctcctccatcctcactggcaagtacgtccacaaccacaacacctacaccaacaatgagaactgctcctcgccctcctggcaggcacagcacgagagccgcacctttgccgtgtacctcaatagcactggctaccggacaggtcctgagccgattaagaaatcagacccaagagtcagctgatgaaagtcaacactgcactctgatgaatctggtgaaggctgggtttgagggcatggcttccttctgagagcatttgggcttcctgactaaactccagagtgtgacagacttcccactgatgcaggtccacacctctcctccccgcgcagacaggacaagcctcctgaaaactagccctccccgggggcagctcagtccccagaggaaaagcaagggaagggattgggctatgcatgcccacttcggcccttcaaatccactaggcacatgctaggggtcagcaaaccacagccaatggacctaaccaggccctccatttgttttagtaaataaagttttattggaacatac

SEQ ID NO: 359306 - DNA, 372 bp, Homo sapiens
  misc_feature (29)..(30): n is a, c, g, or t
cttctactactaaattcgcggccgcgtcnncctccctatggattgttaagggccctgtgcatatttgcatgtagccaaagattcagtctcttgcaggaactctggttgtcaactggtgatcttgcctttgtcttttctcatagttctgcctgtggcgcctgtcactagcagtcaaataaggacaattttaccattctctcctgctgctctaatttttttttagtgccggtacatgaatttgttattctttataattccctttgaagttggaaatccaaggggaatctaaaaccgaccagatgtttctgctgctggaaaggaaagagagtaaggattaagtttaacaaaaacttggtctccagaaaaaaaaaa

SEQ ID NO: 359307 - DNA, 2823 bp, Homo sapiens
acatttcaaaaaaaatacatagactgatgtttcagacttgtgcagcataagcctacagggtacgaagaatgaactctgagaatgtttggagaatgtttcatcattactaacaggatattcctcatgacattgctgtctgatctttgaccatcagtctgtgacctgccccttctctttacatgcagccgctctctgctccctgccccaatgaacatctgcactaggcccaagccttggagtaatttacctgaagagtgacaccattgattttgaaactactgaagaaacccaagacagctgaaaaccagaaggcatctgaggagaatgagattactcagccgggtggatccagcgccaagccgggccttccctgcctgaactttgaagctgttttgtctccagacccagccctcatccactcaacacattcactgacaaactctcacgctcacaccgggtcatctgattgtgacatcagttgcaaggggatgaccgagcgcattcacagcatcaaccttcacaacttcagcaattccgtgctcgagaccctcaacgagcagcgcaaccgtggccacttctgtgacgtaacggtgcgcatccacgggagcatgctgcgcgcacaccgctgcgtgctggcagccggcagccccttcttccaggacaaactgctgcttggctacagcgacatcgagatcccgtcggtggtgtcagtgcagtcagtgcaaaagctcattgacttcatgtacagcggcgtgctacgggtctcgcagtcggaagctctgcagatcctcacggccgccagcatcctgcagatcaaaacagtcatcgacgagtgcacgcgcatcgtgtcacagaacgtgggcgatgtgttcccggggatccaggactcgggccaggacacgccgcggggcactcccgagtcaggcacgtcaggccagagcagcgacacggagtcgggctacctgcagagccacccacagcacagcgtggacaggatctactcggcactctacgcgtgctccatgcagaatggcagcggcgagcgctctttttacagcggcgcagtggtcagccaccacgagactgcgctcggcctgccccgcgaccaccacatggaagaccccagctggatcacacgcatccatgagcgctcgcagcagatggagcgctacctgtccaccacccccgagaccacgcactgccgcaagcagccccggcctgtgcgcatccagaccctagtgggcaacatccacatcaagcaggagatggaggacgattacgactactacgggcagcaaagggtgcagatcctggaacgcaacgaatccgaggagtgcacggaagacacagaccaggccgagggcaccgagagtgagcccaaaggtgaaagcttcgactcgggcgtcagctcctccataggcaccgagcctgactcggtggagcagcagtttgggcctggggcggcgcgggacagccaggctgaacccacccaacccgagcaggctgcagaagcccccgctgagggtggtccgcagacaaaccagctagaaacaggtgcttcctctccggagagaagcaatgaagtggagatggacagcactgttatcactgtcagcaacagctccgacaagagcgtcctacaacagccttcggtcaacacgtccatcgggcagccattgccaagtacccagctctacttacgccagacagaaaccctcaccagcaacctgaggatgcctctgaccttgaccagcaacacgcaggtcattggcacagctggcaacacctacctgccagccctcttcactacccagcccgcgggcagtggccccaagcctttcctcttcagcctgccacagcccctggcaggccagcagacccagtttgtgacagtgtcccagcccggtctgtcgacctttactgcacagctgccagcgccacagcccctggcctcatccgcaggccacagcacagccagtgggcaaggcgaaaaaaagccttatgagtgcactctctgcaacaagactttcaccgccaaacagaactacgtcaagcacatgttcgtacacacaggtgagaagccccaccaatgcagcatctgttggcgctccttctccttaaaggattaccttatcaagcacatggtgacacacacaggagtgagggcataccagtgtagtatctgcaacaagcgcttcacccagaagagctccctcaacgtgcacatgcgcctccaccggggagagaagtcctacgagtgctacatctgcaaaaagaagttctctcacaagaccctcctggagcgacacgtggccctgcacagtgccagcaatgggaccccccctgcaggcacacccccaggtgcccgcgctggccccccaggcgtggtggcctgcacggaggggaccacttacgtctgctccgtctgcccagcaaagtttgaccaaatcgagcagttcaacgaccacatgaggatgcatgtgtctgacggataagtagtatctttctctctttcttatgaacaaaacaaaacaacaacaaaaaacaaacaaacaaaaaagctatggcactagaatttaagaaatgttttggtttcatttttactttctgtttttgtttttgtttcgtttcattttgtactacatgaagaactgttttttgcctgctggtacattacatttccggaggcttgggtgaataatagttttcccagtctccctcggatggtggccttaaggcctggtagtgcttcaagaggtccactggttggatctctagctactggcctctaaatacaacccttctttacaaaaaaatctttta

SEQ ID NO: 359308 - DNA, 1506 bp, Homo sapiens
gggggaagtttaggagttgaggaaagaagattaaagagcgcgaggagacaaataaaaagaagtgttaagaattgcctttgggactctgaaggctgaagaattgatgaattgcaagtttgtgccccatagctgcacagactgcctgaagttacatttagagactgaaatcactgcaccttaaaaacaaaagattgagctgcactgtattcctggaaagcacctaccaaggcttcctattacctatttcacagcataagcctacagggtacgaagaatgaactctgagaatgtttggagaatgtttcatcattactaacaggatattcctcatgacattgctgtctgattcagaggatacatgtgcaggcttgttacctgggtatattgtgtgatgctgaggtttggggtatgtatgatcccatcacccaagtactgagcatgtactgaacagttagtttggttttttgttgttgttgttttgttgttgttttgagatggagtctcattttgtcacccaggctggattgcagtggtgcaatcttggctcactgcaacctccgtccccccggttcaagtgattcttgtgccttagcctcccaagtagctgggattacagatgcgcgccatcatacccagctaatttttgtatttttagtagagacagggtttcaccatgttgtccaggcttgtctcaaactcctggcctcaagtgatccacctgccttggcctcccaaagtactgggattacagatgtgagacaccgcgcccggccactaagaagactttgatttctcgtcacatcttttgataataaggatctggagccaaaggagaaacagaaactacttttaagaactttggagatccaagtttagtggactcttaagagcctgtattatttcttggatgacttatccagccctttgtagaatcagaactctcacaattttctttaaatcaaataaaacccaaggggttaagtggatctttaaaattatttccaggtcattctttcaataaacatttattggtttatttgttattatttcaacaaactatgtgacaggcaaacatgaactcatttctttctttctttttttttttttttttacctttcaactccttttatttatttacctatttattttccttaagcaagtaaatctccctatggattgttaagggccctgtgcatatttgcatgtagccaaagattcagtctcttgcaggaactctggttgtcaactggtgatcttgcctttgtcttttctcatagttctgcctgtggcgcctgtcactagcagtcaaataaggacaattttaccattctctcctgctgctctaatttttttttagtgccggtacatgaatttgttattctttataattccctttgaagttggaaatccaaggggaatctaaaaccgaccagatgtttctgctgctggaaaggaaagagagtaaggattaagtttaacaaaaacttggtctccagaaaaaaaaaa

SEQ ID NO: 359309 - DNA, 646 bp, Homo sapiens
ctgcatatgtattttctttacagcataagcctacagggtacgaagaatgaactctgagaatgtttggagaatgtttcatcattactaacaggatattcctcatgacattgctgtctggataattggtctggtggaagggtagatggttccagattaaacatgggaagagatgaatgtctagaagaaatgaatttgaaactgagatctaaaggacaagaatgatggacagaagtgaacaggctgtctcaggttcattgattgagagatgcttcttggctattcactgcttcaattgttattctccattttatggctgctccatgaaaatgaacaagaaaggcacggagatgatagagagcaagtttacatgatagaggaagaaagttgttaacatgggagatgggaaagaacattaataggtgatgtatattcttagaaaaaatgatgactgctgtggatgagttttatctcaattctgagcaggtagttagagggaatggttggaatttaactctggagtctgatggcctgggatactttgtagttttgtgatctacaaaataatgttacaatactatttttaaaaattgttatgaaaattatataagttcatatatataaactacttagcaaatgactcttagaa

SEQ ID NO: 359310 - DNA, 1462 bp, Homo sapiens
caagaacagtcatcatagagagacaggctctcagggtccgtcccttcatgtcatggtgctgtgttagatcactttcctctgctggattaatggtcagagaaaaagggaaacaaactgtacccaaaggaatccaattaaagcacttgaacttcactgacgtctatcctattgttttcttaacttcctaacctatggttaattattctgaccagtggaaagaaacagcataaacatgggaattatcttaaattccctactttgtttagtttgtaaaggcatcaaaattttactgtgcaggatggaatactaatttggtatagttgaaattttttttggctaatctttctatttcttctttactctcctcaccaaaggcactgccaggacttaccgtacaacactccttggcttctggaattttatctctgctcacagtctacattacaacattagttcattctgggcactttagcttccttgaatctccagttgatctcacacccatgcctatgatattcttctcctggttaatcaagaattctctatttctgctccgtcatccatgccactacaaataaaaagaagtgttaagaattgcctttgggactctgaaggctgaagagaattgatgaattgcaagtttgtgccccatagctgcacaggctccaccatgcggtgccgctctctttggagtctcctgaaggggaggagggccctcttggctgctcttctgactccaacagctggatgaagcctattcttgtcctacaggagccccactggaagtgaataagctcagttgccatatttggaccaaaattctcacatttgatactggaaggggtgaaaagagacctgttcaggggcagtgcccagtgaggagaccctcaaacgagaggcagagtccctcaagcctttgtacaatgccaccaagggtgctgccccttcttcaacagaacgtcctccttgcagggaggctgcagtgatgtcagagatgaatcacaggccagaggtgagagctggagaacagggaaactctcccagtccctgggagtggtcattacagactgggaaatcgctctccagctgatggtaaaggactgcaaatcctattcatgtgactcagggcctggtgtgccttctgggaagaaagcagaagagggttcctaactgtagaagggaaaaagtttccctttattcttccagccacgtggttcaataagcatgtacaagctctcaccaggccaggcactgtgcgggcaccagaaacattagatggatgacacaggtctgcccttggaagaaacattacgatggacctgacccaggtctgactgggaggctcctttcccggctccggactctgtgactcctttggggagccaatcttgcccaagtgcctttctacagagattgtcccaggctcccagccggcctgttcccgtccctgtcctggaactcc

SEQ ID NO: 359311 - DNA, 702 bp, Homo sapiens
caagaacagtcatcatagagagacaggctctcagggtccgtcccttcatgtcatggtgctgtgttagatcactttcctctgctggattaatggtcagagaaaaagggaaacaaactgtacccaaaggaatccaattaaagcacttgaacttcactgacgtctatcctattgttttcttaacttcctaacctatggttaattattctgaccagtggaaagaaacagcataaacatgggaattatcttaaattccctactttgtttagtttgtaaaggcatcaaaattttactgtgcaggatggaatactaatttggtatagttgaaattttttttggctaatctttctatttcttctttactctcctcaccaaaggcactgccaggacttaccgtacaacactccttggcttctggaattttatctctgctcacagtctacattacaacattagttcattctgggcactttagcttccttgaatctccagttgatctcacacccatgcctatgatattcttctcctggttaatcaagaattctctatttctgctccgtcatccatgccactacaaataaaaagaagtgttaagaattgcctttgggactctgaaggctgaagagaattgatgaattgcaagtttgtgccccatagctgcacagcctatgtctaagcacagctcatcttcacaaactgaagtgg

SEQ ID NO: 359312 - DNA, 4670 bp, Homo sapiens
tgaggagtataataacatcataattttggaactagaatatagaaaaaatctggttagaagtatcagacaaagaaaaactgttttttttctcttttaaggcaagtttatttagaagcattgattatttttatttttccctcctaataaaagattaagggtaactgctgtagtttcagtcccatattctatgaaatatcatcctgattgtgatggtagcttcttatgggatttatttctgttgttgtaccactatgtactatacgcattgcacctgttcacacagagtacattgcattgtgatgtttgtacagctagatgctttaaatgagaagccaatctcccttcttctaggttcctagcctattagttacttaattaagcttaattctgttttggtctgtaattttgtaagtctgcaattttgtatatggtctcgatttattaactgagcaatgatttcttctttgcagttatcagttttgtctgagatcagttttcctattgtatggagtctgtttcttacagagcctcctttaagactgctctgactttaaaatcattactaggcttttgtcagagctgatttgttcacattcttctcacattaaaaataaatttaaaagattgcacaaataagctatgcatttcactatttcctgcttatatgcaaaaaatgtatttatgataattacatgtactgccagaactgaaacaatacattcctcataatggagcataaataaagaaggtggagccagctgctcttaaactgtttatttgcaagcaataatgatatagagaatatacctttttcactctgttagtctggcaatactgaacctgttgctgcattagacgagttgccttttgcctggataggggaaggagagctgtctgctgtctggtaggagggctttgtctgtgcctttctctctgtttctttctgtttttctttctctctctctctctctcctcttctctctctcttactcgcttgctctgtctctgtctctctctccctctcttcccccctccctcctctctcttgctctctctctctcttcccgtctctgtggtttgtaaggtaggttgcagtgtgtgtatatacacaacatcaagagcaggaaaatggactcattagggaggcaggcagtcattaccactcacactgtacttccagggagacaccgattataagaagagaaactcagcgctggggaagaagacaaataaaaagaagtgttaagaattgcctttgggactctgaaggctgaagactctcactctattggccaggctggagtgcagtggtgcaatctcggctcatggcaacttcttccgcttcctagtttcaagtgattctcctgcctcagcctcctgagtaactaggattacagaattgatgaattgcaagtttgtgccccatagctgcacagactgcctgaagttacatttagagactgaaatcactgcaccttaaaaacaaaagattgagctgcactgtattcctcataagcctacagggtacgaagaatgaactctgagaatgtttggagaatgtttcatcattactaacaggatattcctcatgacattgctgtctggttacatacagtgaattagacaaattaagtgtataccttgatgagtatacatgtgacaacacccaacccaaggtgcagaatatttataatacctaagaagaatcctttgtatgtgccccttgaaggtgaaattttccaaagttttaacaaaaggtaaagaacaagcaagttcaaaaaaggagagggaaagaaagaaagagaaatagagagagaggaatatctttgaccatcagtctgtgacctgccccttctctttacatgcagccgctctctgctccctgccccaatgaacatctgcactaggcccaagccttggagtaatttacctgaagagtgacaccattgattttgaaactactatgaggaaactgaagcccagagaggtgaagtgaggtgcccaaggccacacagcaagttagaggcacagctagtacggtagctcaagtctcctgactcccagtccagtgctcctcccattactccacgagtcctgtctctaagcttcctgacaaatgctagaacggaagaaacccaagacagctgaaaaccagaaggcatctgaggagaatgagattactcagccgggtggatccagcgccaagccgggccttccctgcctgaactttgaagctgttttgtctccagacccagccctcatccactcaacacattcactgacaaactctcacgctcacaccgggtcatctgattgtgacatcagttgcaaggggatgaccgagcgcattcacagcatcaaccttcacaacttcagcaattccgtgctcgagaccctcaacgagcagcgcaaccgtggccacttctgtgacgtaacggtgcgcatccacgggagcatgctgcgcgcacaccgctgcgtgctggcagccggcagccccttcttccaggacaaactgctgcttggctacagcgacatcgagatcccgtcggtggtgtcagtgcagtcagtgcaaaagctcattgacttcatgtacagcggcgtgctacgggtctcgcagtcggaagctctgcagatcctcacggccgccagcatcctgcagatcaaaacagtcatcgacgagtgcacgcgcatcgtgtcacagaacgtgggcgatgtgttcccggggatccaggactcgggccaggacacgccgcggggcactcccgagtcaggcacgtcaggccagagcagcgacacggagtcgggctacctgcagagccacccacagcacagcgtggacaggatctactcggcactctacgcgtgctccatgcagaatggcagcggcgagcgctctttttacagcggcgcagtggtcagccaccacgagactgcgctcggcctgccccgcgaccaccacatggaagaccccagctggatcacacgcatccatgagcgctcgcagcagatggagcgctacctgtccaccacccccgagaccacgcactgccgcaagcagccccggcctgtgcgcatccagaccctagtgggcaacatccacatcaagcaggagatggaggacgattacgactactacgggcagcaaagggtgcagatcctggaacgcaacgaatccgaggagtgcacggaagacacagaccaggccgagggcaccgagagtgagcccaaaggtgaaagcttcgactcgggcgtcagctcctccataggcaccgagcctgactcggtggagcagcagtttgggcctggggcggcgcgggacagccaggctgaacccacccaacccgagcaggctgcagaagcccccgctgagggtggtccgcagacaaaccagctagaaacaggtgcttcctctccggagagaagcaatgaagtggagatggacagcactgttatcactgtcagcaacagctccgacaagagcgtcctacaacagccttcggtcaacacgtccatcgggcagccattgccaagtacccagctctacttacgccagacagaaaccctcaccagcaacctgaggatgcctctgaccttgaccagcaacacgcaggtcattggcacagctggcaacacctacctgccagccctcttcactacccagcccgcgggcagtggccccaagcctttcctcttcagcctgccacagcccctggcaggccagcagacccagtttgtgacagtgtcccagcccggtctgtcgacctttactgcacagctgccagcgccacagcccctggcctcatccgcaggccacagcacagccagtgggcaaggcgaaaaaaagccttatgagtgcactctctgcaacaagactttcaccgccaaacagaactacgtcaagcacatgttcgtacacacaggtgagaagccccaccaatgcagcatctgttggcgctccttctccttaaaggattaccttatcaagcacatggtgacacacacaggagtgagggcataccagtgtagtatctgcaacaagcgcttcacccagaagagctccctcaacgtgcacatgcgcctccaccggggagagaagtcctacgagtgctacatctgcaaaaagaagttctctcacaagaccctcctggagcgacacgtggccctgcacagtgccagcaatgggaccccccctgcaggcacacccccaggtgcccgcgctggccccccaggcgtggtggcctgcacggaggggaccacttacgtctgctccgtctgcccagcaaagtttgaccaaatcgagcagttcaacgaccacatgaggatgcatgtgtctgacggataagtagtatctttctctctttcttatgaacaaaacaaaacaacaacaaaaaacaaacaaacaaaaaagctatggcactagaatttaagaaatgttttggtttcatttttactttctgtttttgtttttgtttcgtttcattttgtactacatgaagaactgttttttgcctgctggtacattacatttccggaggcttgggtgaataatagttttcccagtctccctcggatggtggccttaaggcctggtagtgcttcaagaggtccactggttggatctctagctactggcctctaaatacaacccttctttacaaaaaaatctttta

SEQ ID NO: 359313 - DNA, 2927 bp, Homo sapiens
agagggtgacaaagaaggtttttcaaagaggcagtggaggaggttctaataaatttggaaggaaacagttccctgtcttgggaaaaggagaactcctgactgattagcattcacaccagatgcagccgctctctgctccctgccccaatgaacatctgcactaggcccaagccttggagtaatttacctgaagagtgacaccattgattttgaaactactatgaggaaactgaagcccagagaggtgaagtgaggtgcccaaggccacacagcaagttagaggcacagctagtacggtagctcaagtctcctgactcccagtccagtgctcctcccattactccacgagtcctgtctctaagcttcctgacaaatgctagaacggaagaaacccaagacagctgaaaaccagaaggcatctgaggagaatgagattactcagccgggtggatccagcgccaagccgggccttccctgcctgaactttgaagctgttttgtctccagacccagccctcatccactcaacacattcactgacaaactctcacgctcacaccgggtcatctgattgtgacatcagttgcaaggggatgaccgagcgcattcacagcatcaaccttcacaacttcagcaattccgtgctcgagaccctcaacgagcagcgcaaccgtggccacttctgtgacgtaacggtgcgcatccacgggagcatgctgcgcgcacaccgctgcgtgctggcagccggcagccccttcttccaggacaaactgctgcttggctacagcgacatcgagatcccgtcggtggtgtcagtgcagtcagtgcaaaagctcattgacttcatgtacagcggcgtgctacgggtctcgcagtcggaagctctgcagatcctcacggccgccagcatcctgcagatcaaaacagtcatcgacgagtgcacgcgcatcgtgtcacagaacgtgggcgatgtgttcccggggatccaggactcgggccaggacacgccgcggggcactcccgagtcaggcacgtcaggccagagcagcgacacggagtcgggctacctgcagagccacccacagcacagcgtggacaggatctactcggcactctacgcgtgctccatgcagaatggcagcggcgagcgctctttttacagcggcgcagtggtcagccaccacgagactgcgctcggcctgccccgcgaccaccacatggaagaccccagctggatcacacgcatccatgagcgctcgcagcagatggagcgctacctgtccaccacccccgagaccacgcactgccgcaagcagccccggcctgtgcgcatccagaccctagtgggcaacatccacatcaagcaggagatggaggacgattacgactactacgggcagcaaagggtgcagatcctggaacgcaacgaatccgaggagtgcacggaagacacagaccaggccgagggcaccgagagtgagcccaaaggtgaaagcttcgactcgggcgtcagctcctccataggcaccgagcctgactcggtggagcagcagtttgggcctggggcggcgcgggacagccaggctgaacccacccaacccgagcaggctgcagaagcccccgctgagggtggtccgcagacaaaccagctagaaacaggtgcttcctctccggagagaagcaatgaagtggagatggacagcactgttatcactgtcagcaacagctccgacaagagcgtcctacaacagccttcggtcaacacgtccatcgggcagccattgccaagtacccagctctacttacgccagacagaaaccctcaccagcaacctgaggatgcctctgaccttgaccagcaacacgcaggtcattggcacagctggcaacacctacctgccagccctcttcactacccagcccgcgggcagtggccccaagcctttcctcttcagcctgccacagcccctggcaggccagcagacccagtttgtgacagtgtcccagcccggtctgtcgacctttactgcacagctgccagcgccacagcccctggcctcatccgcaggccacagcacagccagtgggcaaggcgaaaaaaagccttatgagtgcactctctgcaacaagactttcaccgccaaacagaactacgtcaagcacatgttcgtacacacaggtgagaagccccaccaatgcagcatctgttggcgctccttctccttaaaggattaccttatcaagcacatggtgacacacacaggagtgagggcataccagtgtagtatctgcaacaagcgcttcacccagaagagctccctcaacgtgcacatgcgcctccaccggggagagaagtcctacgagtgctacatctgcaaaaagaagttctctcacaagaccctcctggagcgacacgtggccctgcacagtgccagcaatgggaccccccctgcaggcacacccccaggtgcccgcgctggccccccaggcgtggtggcctgcacggaggggaccacttacgtctgctccgtctgcccagcaaagtttgaccaaatcgagcagttcaacgaccacatgaggatgcatgtgtctgacggataagtagtatctttctctctttcttatgaacaaaacaaaacaacaacaaaaaacaaacaaacaaaaaagctatggcactagaatttaagaaatgttttggtttcatttttactttctgtttttgtttttgtttcgtttcattttgtactacatgaagaactgttttttgcctgctggtacattacatttccggaggcttgggtgaataatagttttcccagtctccctcggatggtggccttaaggcctggtagtgcttcaagaggtccactggttggatctctagctactggcctctaaatacaacccttctttacaaaaaaatctttta

SEQ ID NO: 359314 - DNA, 3538 bp, Homo sapiens
gcagggagcttaacagccaggcctggacaccctcaagagactgtgtgctgattctcagtcgtcactccttggatcaggaaccatagtcctgatctttgaccatcagtctgtgacctgccccttctctttacatgcagccgctctctgctccctgccccaatgaacatctgcactaggcccaagccttggagtaatttacctgaagagtgacaccattgattttgaaactactgaagaaacccaagacagctgaaaaccagaaggcatctgaggagaatgagattactcagccgggtggatccagcgccaagccgggccttccctgcctgaactttgaagctgttttgtctccagacccagccctcatccactcaacacattcactgacaaactctcacgctcacaccgggtcatctgattgtgacatcagttgcaaggggatgaccgagcgcattcacagcatcaaccttcacaacttcagcaattccgtgctcgagaccctcaacgagcagcgcaaccgtggccacttctgtgacgtaacggtgcgcatccacgggagcatgctgcgcgcacaccgctgcgtgctggcagccggcagccccttcttccaggacaaactgctgcttggctacagcgacatcgagatcccgtcggtggtgtcagtgcagtcagtgcaaaagctcattgacttcatgtacagcggcgtgctacgggtctcgcagtcggaagctctgcagatcctcacggccgccagcatcctgcagatcaaaacagtcatcgacgagtgcacgcgcatcgtgtcacagaacgtgggcgatgtgttcccggggatccaggactcgggccaggacacgccgcggggcactcccgagtcaggcacgtcaggccagagcagcgacacggagtcgggctacctgcagagccacccacagcacagcgtggacaggatctactcggcactctacgcgtgctccatgcagaatggcagcggcgagcgctctttttacagcggcgcagtggtcagccaccacgagactgcgctcggcctgccccgcgaccaccacatggaagaccccagctggatcacacgcatccatgagcgctcgcagcagatggagcgctacctgtccaccacccccgagaccacgcactgccgcaagcagccccggcctgtgcgcatccagaccctagtgggcaacatccacatcaagcaggagatggaggacgattacgactactacgggcagcaaagggtgcagatcctggaacgcaacgaatccgaggagtgcacggaagacacagaccaggccgagggcaccgagagtgagcccaaaggtgaaagcttcgactcgggcgtcagctcctccataggcaccgagcctgactcggtggagcagcagtttgggcctggggcggcgcgggacagccaggctgaacccacccaacccgagcaggctgcagaagcccccgctgagggtggtccgcagacaaaccagctagaaacaggtgcttcctctccggagagaagcaatgaagtggagatggacagcactgttatcactgtcagcaacagctccgacaagagcgtcctacaacagccttcggtcaacacgtccatcgggcagccattgccaagtacccagctctacttacgccagacagaaaccctcaccagcaacctgaggatgcctctgaccttgaccagcaacacgcaggtcattggcacagctggcaacacctacctgccagccctcttcactacccagcccgcgggcagtggccccaagcctttcctcttcagcctgccacagcccctggcaggccagcagacccagtttgtgacagtgtcccagcccggtctgtcgacctttactgcacagctgccagcgccacagcccctggcctcatccgcaggccacagcacagccagtgggcaaggcgaaaaaaagccttatgagtgcactctctgcaacaagactttcaccgccaaacagaactacgtcaagcacatgttcgtacacacaggtgagaagccccaccaatgcagcatctgttggcgctccttctccttaaaggattaccttatcaagcacatggtgacacacacaggagtgagggcataccagtgtagtatctgcaacaagcgcttcacccagaagagctccctcaacgtgcacatgcgcctccaccggggagagaagtcctacgagtgctacatctgcaaaaagaagttctctcacaagaccctcctggagcgacacgtggccctgcacagtgccagcaatgggaccccccctgcaggcacacccccaggtgcccgcgctggccccccaggcgtggtggcctgcacggaggggaccacttacgtctgctccgtctgcccagcaaagtttgaccaaatcgagcagttcaacgaccacatgaggatgcatgtgtctgacggataagtagtatctttctctctttcttatgaacaaaacaaaacaacaacaaaaaacaaacaaacaaaaaagctatggcactagaatttaagaaatgttttggtttcatttttactttctgtttttgtttttgtttcgtttcattttgtactacatgaagaactgttttttgcctgctggtacattacatttccggaggcttgggtgaataatagttttcccagtctccctcggatggtggccttaaggcctggtagtgcttcaagaggtccactggttggatctctagctactggcctctaaatacaacccttctttacaaaaaaatcttttaaaaaaaagtaaaaaaaaaaaaaaaatttccacttgtgaagagcactacaaaaaatatataacaaaatctaaaaggcctactgtctttaagtacaccgcttgcagtgtttcagtggacattttcacaattctggccgcttggacttcacagtaaccagttaaaactgtggaatatcacttctggttgaaaacccagaggaaaggccctgctgttttccacctaccacgttgtctgatttcataaaagggctgtgggggtgggaagggcagtgggttcggtggtgtgggaaagaaagacgaatggcaggcttcttccccagattctgcccgggtccacacaccctggcccaccttctccatatccccctcttgcagcagaagccaggaagacttggacaagcaacaagcaacagtggctatcgtatttattcagtgtcttcgctgagccacagcctcagcacaatcaagagggactttcatgaaaggcaggaatgcagataaaacaaagatatcagaaatttgcacctatgtttctaggtacaagagaaggattatttccaacaatctttgcaaaaaaaaaaaaaagtgtcaggatatattcttgtggaagagaaaaagaaaaagaaatggagggtggggggaacaataaaaagttcttgaggcttttttaattcaaaattttatagaggggcaaaagtgacgtttaccagatagaatgctgatttttttaatatatttacaacagtatttgtgtaaaaaaaaaa

SEQ ID NO: 359315 - DNA, 4168 bp, Homo sapiens
tgaggagtataataacatcataattttggaactagaatatagaaaaaatctggttagaagtatcagacaaagaaaaactgttttttttctcttttaaggcaagtttatttagaagcattgattatttttatttttccctcctaataaaagattaagggtaactgctgtagtttcagtcccatattctatgaaatatcatcctgattgtgatggtagcttcttatgggatttatttctgttgttgtaccactatgtactatacgcattgcacctgttcacacagagtacattgcattgtgatgtttgtacagctagatgctttaaatgagaagccaatctcccttcttctaggttcctagcctattagttacttaattaagcttaattctgttttggtctgtaattttgtaagtctgcaattttgtatatggtctcgatttattaactgagcaatgatttcttctttgcagttatcagttttgtctgagatcagttttcctattgtatggagtctgtttcttacagagcctcctttaagactgctctgactttaaaatcattactaggcttttgtcagagctgatttgttcacattcttctcacattaaaaataaatttaaaagattgcacaaataagctatgcatttcactatttcctgcttatatgcaaaaaatgtatttatgataattacatgtactgccagaactgaaacaatacattcctcataatggagcataaataaagaaggtggagccagctgctcttaaactgtttatttgcaagcaataatgatatagagaatatacctttttcactctgttagtctggcaatactgaacctgttgctgcattagacgagttgccttttgcctggataggggaaggagagctgtctgctgtctggtaggagggctttgtctgtgcctttctctctgtttctttctgtttttctttctctctctctctctctcctcttctctctctcttactcgcttgctctgtctctgtctctctctccctctcttcccccctccctcctctctcttgctctctctctctcttcccgtctctgtggtttgtaaggtaggttgcagtgtgtgtatatacacaacatcaagagcaggaaaatggactcattagggaggcaggcagtcattaccactcacactgtacttccagggagacaccgattataagaagagaaactcagcgctggggaagaagacaaataaaaagaagtgttaagaattgcctttgggactctgaaggctgaagactctcactctattggccaggctggagtgcagtggtgcaatctcggctcatggcaacttcttccgcttcctagtttcaagtgattctcctgcctcagcctcctgagtaactaggattacagaattgatgaattgcaagtttgtgccccatagctgcacagactgcctgaagttacatttagagactgaaatcactgcaccttaaaaacaaaagattgagctgcactgtattcctaatgtttcatcattactaacaggatattcctcatgacattgctgtctgatctttgaccatcagtctgtgacctgccccttctctttacatgcagccgctctctgctccctgccccaatgaacatctgcactaggcccaagccttggagtaatttacctgaagagtgacaccattgattttgaaactactatgaggaaactgaagcccagagaggtgaagtgaggtgcccaaggccacacagcaagttagaggcacagctagtacggtagctcaagtctcctgactcccagtccagtgctcctcccattactccacgagtcctgtctctaagcttcctgacaaatgctagaacggaagaaacccaagacagctgaaaaccagaaggcatctgaggagaatgagattactcagccgggtggatccagcgccaagccgggccttccctgcctgaactttgaagctgttttgtctccagacccagccctcatccactcaacacattcactgacaaactctcacgctcacaccgggtcatctgattgtgacatcagttgcaaggggatgaccgagcgcattcacagcatcaaccttcacaacttcagcaattccgtgctcgagaccctcaacgagcagcgcaaccgtggccacttctgtgacgtaacggtgcgcatccacgggagcatgctgcgcgcacaccgctgcgtgctggcagccggcagccccttcttccaggacaaactgctgcttggctacagcgacatcgagatcccgtcggtggtgtcagtgcagtcagtgcaaaagctcattgacttcatgtacagcggcgtgctacgggtctcgcagtcggaagctctgcagatcctcacggccgccagcatcctgcagatcaaaacagtcatcgacgagtgcacgcgcatcgtgtcacagaacgtgggcgatgtgttcccggggatccaggactcgggccaggacacgccgcggggcactcccgagtcaggcacgtcaggccagagcagcgacacggagtcgggctacctgcagagccacccacagcacagcgtggacaggatctactcggcactctacgcgtgctccatgcagaatggcagcggcgagcgctctttttacagcggcgcagtggtcagccaccacgagactgcgctcggcctgccccgcgaccaccacatggaagaccccagctggatcacacgcatccatgagcgctcgcagcagatggagcgctacctgtccaccacccccgagaccacgcactgccgcaagcagccccggcctgtgcgcatccagaccctagtgggcaacatccacatcaagcaggagatggaggacgattacgactactacgggcagcaaagggtgcagatcctggaacgcaacgaatccgaggagtgcacggaagacacagaccaggccgagggcaccgagagtgagcccaaaggtgaaagcttcgactcgggcgtcagctcctccataggcaccgagcctgactcggtggagcagcagtttgggcctggggcggcgcgggacagccaggctgaacccacccaacccgagcaggctgcagaagcccccgctgagggtggtccgcagacaaaccagctagaaacaggtgcttcctctccggagagaagcaatgaagtggagatggacagcactgttatcactgtcagcaacagctccgacaagagcgtcctacaacagccttcggtcaacacgtccatcgggcagccattgccaagtacccagctctacttacgccagacagaaaccctcaccagcaacctgaggatgcctctgaccttgaccagcaacacgcaggtcattggcacagctggcaacacctacctgccagccctcttcactacccagcccgcgggcagtggccccaagcctttcctcttcagcctgccacagcccctggcaggccagcagacccagtttgtgacagtgtcccagcccggtctgtcgacctttactgcacagctgccagcgccacagcccctggcctcatccgcaggccacagcacagccagtgggcaaggcgaaaaaaagccttatgagtgcactctctgcaacaagactttcaccgccaaacagaactacgtcaagcacatgttcgtacacacaggtgagaagccccaccaatgcagcatctgttggcgctccttctccttaaaggattaccttatcaagcacatggtgacacacacaggagtgagggcataccagtgtagtatctgcaacaagcgcttcacccagaagagctccctcaacgtgcacatgcgcctccaccggggagagaagtcctacgagtgctacatctgcaaaaagaagttctctcacaagaccctcctggagcgacacgtggccctgcacagtgccagcaatgggaccccccctgcaggcacacccccaggtgcccgcgctggccccccaggcgtggtggcctgcacggaggggaccacttacgtctgctccgtctgcccactgcgcgtaagtcgtacccttctctactcttttggacctatccaaccttcatcctatgttagctcttctatagccattggccttgcaattaacaacacgttcggtgtcattttacattgtggcatctgttcgtattcgctgatctcggcttcg

SEQ ID NO: 359316 - DNA, 2782 bp, Homo sapiens
tgaggagtataataacatcataattttggaactagaatatagaaaaaatctggttagaagtatcagacaaagaaaaactgttttttttctcttttaaggcaagtttatttagaagcattgattatttttatttttccctcctaataaaagattaagggtaactgctgtagtttcagtcccatattctatgaaatatcatcctgattgtgatggtagcttcttatgggatttatttctgttgttgtaccactatgtactatacgcattgcacctgttcacacagagtacattgcattgtgatgtttgtacagctagatgctttaaatgagaagccaatctcccttcttctaggttcctagcctattagttacttaattaagcttaattctgttttggtctgtaattttgtaagtctgcaattttgtatatggtctcgatttattaactgagcaatgatttcttctttgcagttatcagttttgtctgagatcagttttcctattgtatggagtctgtttcttacagagcctcctttaagactgctctgactttaaaatcattactaggcttttgtcagagctgatttgttcacattcttctcacattaaaaataaatttaaaagattgcacaaataagctatgcatttcactatttcctgcttatatgcaaaaaatgtatttatgataattacatgtactgccagaactgaaacaatacattcctcataatggagcataaataaagaaggtggagccagctgctcttaaactgtttatttgcaagcaataatgatatagagaatatacctttttcactctgttagtctggcaatactgaacctgttgctgcattagacgagttgccttttgcctggataggggaaggagagctgtctgctgtctggtaggagggctttgtctgtgcctttctctctgtttctttctgtttttctttctctctctctctctctcctcttctctctctcttactcgcttgctctgtctctgtctctctctccctctcttcccccctccctcctctctcttgctctctctctctcttcccgtctctgtggtttgtaaggtaggttgcagtgtgtgtatatacacaacatcaagagcaggaaaatggactcattagggaggcaggcagtcattaccactcacactgtacttccagggagacaccgattataagaagagaaactcagcgctggggaagaagacaaataaaaagaagtgttaagaattgcctttgggactctgaaggctgaagactctcactctattggccaggctggagtgcagtggtgcaatctcggctcatggcaacttcttccgcttcctagtttcaagtgattctcctgcctcagcctcctgagtaactaggattacagaattgatgaattgcaagtttgtgccccatagctgcacagactgcctgaagttacatttagagactgaaatcactgcaccttaaaaacaaaagattgagctgcactgtattcctggaaagcacctaccaaggcttcctattacctatttcacagcataagcctacagggtacgaagaatgaactctgagaatgtttggagaatgtttcatcattactaacaggatattcctcatgacattgctgtctgattcagaggatacatgtgcaggcttgttacctgggtatattgtgtgatgctgaggtttggggtatgtatgatcccatcacccaagtactgagcatgtactgaacagttagtttggttttttgttgttgttgttttgttgttgttttgagatggagtctcattttgtcacccaggctggattgcagtggtgcaatcttggctcactgcaacctccgtccccccggttcaagtgattcttgtgccttagcctcccaagtagctgggattacagatgcgcgccatcatacccagctaatttttgtatttttagtagagacagggtttcaccatgttgtccaggcttgtctcaaactcctggcctcaagtgatccacctgccttggcctcccaaagtactgggattacagatgtgagacaccgcgcccggccactaagaagactttgatttctcgtcacatcttttgataataaggatctggagccaaaggagaaacagaaactacttttaagaactttggagatccaagtttagtggactcttaagagcctgtattatttcttggatgacttatccagccctttgtagaatcagaactctcacaattttctttaaatcaaataaaacccaaggggttaagtggatctttaaaattatttccaggtcattctttcaataaacatttattggtttatttgttattatttcaacaaactatgtgacaggcaaacatgaactcatttctttctttctttttttttttttttttacctttcaactccttttatttatttacctatttattttccttaagcaagtaaatctccctatggattgttaagggccctgtgcatatttgcatgtagccaaagattcagtctcttgcaggaactctggttgtcaactggtgatcttgcctttgtcttttctcatagttctgcctgtggcgcctgtcactagcagtcaaataaggacaattttaccattctctcctgctgctctaatttttttttagtgccggtacatgaatttgttattctttataattccctttgaagttggaaatccaaggggaatctaaaaccgaccagatgtttctgcttcatccttgtagcaatgcaggagctgctcaggcagggtt

SEQ ID NO: 359317 - DNA, 2048 bp, Homo sapiens
tgaggagtataataacatcataattttggaactagaatatagaaaaaatctggttagaagtatcagacaaagaaaaactgttttttttctcttttaaggcaagtttatttagaagcattgattatttttatttttccctcctaataaaagattaagggtaactgctgtagtttcagtcccatattctatgaaatatcatcctgattgtgatggtagcttcttatgggatttatttctgttgttgtaccactatgtactatacgcattgcacctgttcacacagagtacattgcattgtgatgtttgtacagctagatgctttaaatgagaagccaatctcccttcttctaggttcctagcctattagttacttaattaagcttaattctgttttggtctgtaattttgtaagtctgcaattttgtatatggtctcgatttattaactgagcaatgatttcttctttgcagttatcagttttgtctgagatcagttttcctattgtatggagtctgtttcttacagagcctcctttaagactgctctgactttaaaatcattactaggcttttgtcagagctgatttgttcacattcttctcacattaaaaataaatttaaaagattgcacaaataagctatgcatttcactatttcctgcttatatgcaaaaaatgtatttatgataattacatgtactgccagaactgaaacaatacattcctcataatggagcataaataaagaaggtggagccagctgctcttaaactgtttatttgcaagcaataatgatatagagaatatacctttttcactctgttagtctggcaatactgaacctgttgctgcattagacgagttgccttttgcctggataggggaaggagagctgtctgctgtctggtaggagggctttgtctgtgcctttctctctgtttctttctgtttttctttctctctctctctctctcctcttctctctctcttactcgcttgctctgtctctgtctctctctccctctcttcccccctccctcctctctcttgctctctctctctcttcccgtctctgtggtttgtaaggtaggttgcagtgtgtgtatatacacaacatcaagagcaggaaaatggactcattagggaggcaggcagtcattaccactcacactgtacttccagggagacaccgattataagaagagaaactcagcgctggggaagaagacaaataaaaagaagtgttaagaattgcctttgggactctgaaggctgaagactctcactctattggccaggctggagtgcagtggtgcaatctcggctcatggcaacttcttccgcttcctagtttcaagtgattctcctgcctcagcctcctgagtaactaggattacagaattgatgaattgcaagtttgtgccccatagctgcacagactgcctgaagttacatttagagactgaaatcactgcaccttaaaaacaaaagattgagctgcactgtattcctaatgtttcatcattactaacaggatattcctcatgacattgctgtctgatctttgaccatcagtctgtgacctgccccttctctttacatgcagccgctctctgctccctgccccaatgaacatctgcactaggcccaagccttggagtaatttacctgaagagtgacaccattgattttgaaactactacttctatgttactggaaaacgctaaacctgggagactaacatccctcttaggcttcagagaacccagatccagacctagaaatcaggagctgatgttgcctacagattacagagaagtccacaagtgagcatgtattcctgtcgtaggaagtatttcatctgtgcagaatgccagtgcctgcttttacttctcatgggccctagagaatggacagactgggttataatctttgcagtctttgctattcagaaacttggctttccaatgcataaaagagaaataataataataaaacagaaacttgctaggtgcaaaaatcaataaagaggataaaaaattaaaatgtg

SEQ ID NO: 359318 - DNA, 2173 bp, Homo sapiens
tgaggagtataataacatcataattttggaactagaatatagaaaaaatctggttagaagtatcagacaaagaaaaactgttttttttctcttttaaggcaagtttatttagaagcattgattatttttatttttccctcctaataaaagattaagggtaactgctgtagtttcagtcccatattctatgaaatatcatcctgattgtgatggtagcttcttatgggatttatttctgttgttgtaccactatgtactatacgcattgcacctgttcacacagagtacattgcattgtgatgtttgtacagctagatgctttaaatgagaagccaatctcccttcttctaggttcctagcctattagttacttaattaagcttaattctgttttggtctgtaattttgtaagtctgcaattttgtatatggtctcgatttattaactgagcaatgatttcttctttgcagttatcagttttgtctgagatcagttttcctattgtatggagtctgtttcttacagagcctcctttaagactgctctgactttaaaatcattactaggcttttgtcagagctgatttgttcacattcttctcacattaaaaataaatttaaaagattgcacaaataagctatgcatttcactatttcctgcttatatgcaaaaaatgtatttatgataattacatgtactgccagaactgaaacaatacattcctcataatggagcataaataaagaaggtggagccagctgctcttaaactgtttatttgcaagcaataatgatatagagaatatacctttttcactctgttagtctggcaatactgaacctgttgctgcattagacgagttgccttttgcctggataggggaaggagagctgtctgctgtctggtaggagggctttgtctgtgcctttctctctgtttctttctgtttttctttctctctctctctctctcctcttctctctctcttactcgcttgctctgtctctgtctctctctccctctcttcccccctccctcctctctcttgctctctctctctcttcccgtctctgtggtttgtaaggtaggttgcagtgtgtgtatatacacaacatcaagagcaggaaaatggactcattagggaggcaggcagtcattaccactcacactgtacttccagggagacaccgattataagaagagaaactcagcgctggggaagaagacaaataaaaagaagtgttaagaattgcctttgggactctgaaggctgaagactctcactctattggccaggctggagtgcagtggtgcaatctcggctcatggcaacttcttccgcttcctagtttcaagtgattctcctgcctcagcctcctgagtaactaggattacagaattgatgaattgcaagtttgtgccccatagctgcacagactgcctgaagttacatttagagactgaaatcactgcaccttaaaaacaaaagattgagctgcactgtattcctggaaagcacctaccaaggcttcctattacctatttcacagcataagcctacagggtacgaagaatgaactctgagaatgtttggagaatgtttcatcattactaacaggatattcctcatgacattgctgtctggataattggtctggtggaagggtagatggttccagattaaacatgggaagagatgaatgtctagaagaaatgaatttgaaactgagatctaaaggacaagaatgatggacagaagtgaacaggctgtctcaggttcattgattgagagatgcttcttggctattcactgcttcaattgttattctccattttatggctgctccatgaaaatgaacaagaaaggcacggagatgatagagagcaagtttacatgatagaggaagaaagttgttaacatgggagatgggaaagaacattaataggtgatgtatattcttagaaaaaatgatgactgctgtggatgagttttatctcaattctgagcaggtagttagagggaatggttggaatttaactctggagtctgatggcctgggatactttgtagttttgtgatctacaaaataatgttacaatactatttttaaaaattgttatgaaaattatataagttcatatatataaactacttagcaaatgactcttagaa

SEQ ID NO: 359319 - DNA, 1979 bp, Homo sapiens
tgaggagtataataacatcataattttggaactagaatatagaaaaaatctggttagaagtatcagacaaagaaaaactgttttttttctcttttaaggcaagtttatttagaagcattgattatttttatttttccctcctaataaaagattaagggtaactgctgtagtttcagtcccatattctatgaaatatcatcctgattgtgatggtagcttcttatgggatttatttctgttgttgtaccactatgtactatacgcattgcacctgttcacacagagtacattgcattgtgatgtttgtacagctagatgctttaaatgagaagccaatctcccttcttctaggttcctagcctattagttacttaattaagcttaattctgttttggtctgtaattttgtaagtctgcaattttgtatatggtctcgatttattaactgagcaatgatttcttctttgcagttatcagttttgtctgagatcagttttcctattgtatggagtctgtttcttacagagcctcctttaagactgctctgactttaaaatcattactaggcttttgtcagagctgatttgttcacattcttctcacattaaaaataaatttaaaagattgcacaaataagctatgcatttcactatttcctgcttatatgcaaaaaatgtatttatgataattacatgtactgccagaactgaaacaatacattcctcataatggagcataaataaagaaggtggagccagctgctcttaaactgtttatttgcaagcaataatgatatagagaatatacctttttcactctgttagtctggcaatactgaacctgttgctgcattagacgagttgccttttgcctggataggggaaggagagctgtctgctgtctggtaggagggctttgtctgtgcctttctctctgtttctttctgtttttctttctctctctctctctctcctcttctctctctcttactcgcttgctctgtctctgtctctctctccctctcttcccccctccctcctctctcttgctctctctctctcttcccgtctctgtggtttgtaaggtaggttgcagtgtgtgtatatacacaacatcaagagcaggaaaatggactcattagggaggcaggcagtcattaccactcacactgtacttccagggagacaccgattataagaagagaaactcagcgctggggaagaagacaaataaaaagaagtgttaagaattgcctttgggactctgaaggctgaagactctcactctattggccaggctggagtgcagtggtgcaatctcggctcatggcaacttcttccgcttcctagtttcaagtgattctcctgcctcagcctcctgagtaactaggattacagaattgatgaattgcaagtttgtgccccatagctgcacagactgcctgaagttacatttagagactgaaatcactgcaccttaaaaacaaaagattgagctgcactgtattcctcataagcctacagggtacgaagaatgaactctgagaatgtttggagaatgtttcatcattactaacaggatattcctcatgacattgctgtctggttacatacagtgaattagacaaattaagtgtataccttgatgagtatacatgtgacaacacccaacccaaggtgcagaatatttataatacctaagaagaatcctttgtatgtgccccttgaaggtgaaattttccaaagttttaacaaaaggtaaagaacaagcaagttcaaaaaaggagagggaaagaaagaaagagaaatagagagagaggaatatctttgaccatcagtctgtgacctgccccttctctttacggaactggtgtttttaatgtcatgtgaggacaacattacacaatggatctttggcagggatacacagaaatgaataccgtgtgcgaacaaacattaaatggcagtcttaattacaga

SEQ ID NO: 359320 - DNA, 161 bp, Homo sapiens
ttaaacgaagtttaataatttggaacatttgtttctgaacctattttttattattttattataggttacatacagtgaattagacaaattaagtgtataccttgatgagtatacatgtgacaacacccaacccaaggtgcagaatatttataatacctaag

SEQ ID NO: 359321 - DNA, 2739 bp, Homo sapiens
  misc_feature (3)..(3): n is a, c, g, or t
ggncagttgggaaacagcccagtggtataaggatgaggaaactgaagcccagagaggtgaagtgaggtgcccaaggccacacagcaagttagaggcacagctagtacggtagctcaagtctcctgactcccagtccagtgctcctcccattactccacgagtcctgtctctaagcttcctgacaaatgctagaacggaagaaacccaagacagctgaaaaccagaaggcatctgaggagaatgagattactcagccgggtggatccagcgccaagccgggccttccctgcctgaactttgaagctgttttgtctccagacccagccctcatccactcaacacattcactgacaaactctcacgctcacaccgggtcatctgattgtgacatcagttgcaaggggatgaccgagcgcattcacagcatcaaccttcacaacttcagcaattccgtgctcgagaccctcaacgagcagcgcaaccgtggccacttctgtgacgtaacggtgcgcatccacgggagcatgctgcgcgcacaccgctgcgtgctggcagccggcagccccttcttccaggacaaactgctgcttggctacagcgacatcgagatcccgtcggtggtgtcagtgcagtcagtgcaaaagctcattgacttcatgtacagcggcgtgctacgggtctcgcagtcggaagctctgcagatcctcacggccgccagcatcctgcagatcaaaacagtcatcgacgagtgcacgcgcatcgtgtcacagaacgtgggcgatgtgttcccggggatccaggactcgggccaggacacgccgcggggcactcccgagtcaggcacgtcaggccagagcagcgacacggagtcgggctacctgcagagccacccacagcacagcgtggacaggatctactcggcactctacgcgtgctccatgcagaatggcagcggcgagcgctctttttacagcggcgcagtggtcagccaccacgagactgcgctcggcctgccccgcgaccaccacatggaagaccccagctggatcacacgcatccatgagcgctcgcagcagatggagcgctacctgtccaccacccccgagaccacgcactgccgcaagcagccccggcctgtgcgcatccagaccctagtgggcaacatccacatcaagcaggagatggaggacgattacgactactacgggcagcaaagggtgcagatcctggaacgcaacgaatccgaggagtgcacggaagacacagaccaggccgagggcaccgagagtgagcccaaaggtgaaagcttcgactcgggcgtcagctcctccataggcaccgagcctgactcggtggagcagcagtttgggcctggggcggcgcgggacagccaggctgaacccacccaacccgagcaggctgcagaagcccccgctgagggtggtccgcagacaaaccagctagaaacaggtgcttcctctccggagagaagcaatgaagtggagatggacagcactgttatcactgtcagcaacagctccgacaagagcgtcctacaacagccttcggtcaacacgtccatcgggcagccattgccaagtacccagctctacttacgccagacagaaaccctcaccagcaacctgaggatgcctctgaccttgaccagcaacacgcaggtcattggcacagctggcaacacctacctgccagccctcttcactacccagcccgcgggcagtggccccaagcctttcctcttcagcctgccacagcccctggcaggccagcagacccagtttgtgacagtgtcccagcccggtctgtcgacctttactgcacagctgccagcgccacagcccctggcctcatccgcaggccacagcacagccagtgggcaaggcgaaaaaaagccttatgagtgcactctctgcaacaagactttcaccgccaaacagaactacgtcaagcacatgttcgtacacacaggtgagaagccccaccaatgcagcatctgttggcgctccttctccttaaaggattaccttatcaagcacatggtgacacacacaggagtgagggcataccagtgtagtatctgcaacaagcgcttcacccagaagagctccctcaacgtgcacatgcgcctccaccggggagagaagtcctacgagtgctacatctgcaaaaagaagttctctcacaagaccctcctggagcgacacgtggccctgcacagtgccagcaatgggaccccccctgcaggcacacccccaggtgcccgcgctggccccccaggcgtggtggcctgcacggaggggaccacttacgtctgctccgtctgcccagcaaagtttgaccaaatcgagcagttcaacgaccacatgaggatgcatgtgtctgacggataagtagtatctttctctctttcttatgaacaaaacaaaacaacaacaaaaaacaaacaaacaaaaaagctatggcactagaatttaagaaatgttttggtttcatttttactttctgtttttgtttttgtttcgtttcattttgtactacatgaagaactgttttttgcctgctggtacattacatttccggaggcttgggtgaataatagttttcccagtctccctcggatggtggccttaaggcctggtagtgcttcaagaggtccactggttggatctctagctactggcctctaaatacaacccttctttacaaaaaaatctttta

SEQ ID NO: 359322 - DNA, 4406 bp, Homo sapiens
tgaggagtataataacatcataattttggaactagaatatagaaaaaatctggttagaagtatcagacaaagaaaaactgttttttttctcttttaaggcaagtttatttagaagcattgattatttttatttttccctcctaataaaagattaagggtaactgctgtagtttcagtcccatattctatgaaatatcatcctgattgtgatggtagcttcttatgggatttatttctgttgttgtaccactatgtactatacgcattgcacctgttcacacagagtacattgcattgtgatgtttgtacagctagatgctttaaatgagaagccaatctcccttcttctaggttcctagcctattagttacttaattaagcttaattctgttttggtctgtaattttgtaagtctgcaattttgtatatggtctcgatttattaactgagcaatgatttcttctttgcagttatcagttttgtctgagatcagttttcctattgtatggagtctgtttcttacagagcctcctttaagactgctctgactttaaaatcattactaggcttttgtcagagctgatttgttcacattcttctcacattaaaaataaatttaaaagattgcacaaataagctatgcatttcactatttcctgcttatatgcaaaaaatgtatttatgataattacatgtactgccagaactgaaacaatacattcctcataatggagcataaataaagaaggtggagccagctgctcttaaactgtttatttgcaagcaataatgatatagagaatatacctttttcactctgttagtctggcaatactgaacctgttgctgcattagacgagttgccttttgcctggataggggaaggagagctgtctgctgtctggtaggagggctttgtctgtgcctttctctctgtttctttctgtttttctttctctctctctctctctcctcttctctctctcttactcgcttgctctgtctctgtctctctctccctctcttcccccctccctcctctctcttgctctctctctctcttcccgtctctgtggtttgtaaggtaggttgcagtgtgtgtatatacacaacatcaagagcaggaaaatggactcattagggaggcaggcagtcattaccactcacactgtacttccagggagacaccgattataagaagagaaactcagcgctggggaagaagacaaataaaaagaagtgttaagaattgcctttgggactctgaaggctgaagactctcactctattggccaggctggagtgcagtggtgcaatctcggctcatggcaacttcttccgcttcctagtttcaagtgattctcctgcctcagcctcctgagtaactaggattacagaattgatgaattgcaagtttgtgccccatagctgcacagactgcctgaagttacatttagagactgaaatcactgcaccttaaaaacaaaagattgagctgcactgtattcctaatgtttcatcattactaacaggatattcctcatgacattgctgtctgatctttgaccatcagtctgtgacctgccccttctctttacatgcagccgctctctgctccctgccccaatgaacatctgcactaggcccaagccttggagtaatttacctgaagagtgacaccattgattttgaaactactatgaggaaactgaagcccagagaggtgaagtgaggtgcccaaggccacacagcaagttagaggcacagctagtacggtagctcaagtctcctgactcccagtccagtgctcctcccattactccacgagtcctgtctctaagcttcctgacaaatgctagaacggaagaaacccaagacagctgaaaaccagaaggcatctgaggagaatgagattactcagccgggtggatccagcgccaagccgggccttccctgcctgaactttgaagctgttttgtctccagacccagccctcatccactcaacacattcactgacaaactctcacgctcacaccgggtcatctgattgtgacatcagttgcaaggggatgaccgagcgcattcacagcatcaaccttcacaacttcagcaattccgtgctcgagaccctcaacgagcagcgcaaccgtggccacttctgtgacgtaacggtgcgcatccacgggagcatgctgcgcgcacaccgctgcgtgctggcagccggcagccccttcttccaggacaaactgctgcttggctacagcgacatcgagatcccgtcggtggtgtcagtgcagtcagtgcaaaagctcattgacttcatgtacagcggcgtgctacgggtctcgcagtcggaagctctgcagatcctcacggccgccagcatcctgcagatcaaaacagtcatcgacgagtgcacgcgcatcgtgtcacagaacgtgggcgatgtgttcccggggatccaggactcgggccaggacacgccgcggggcactcccgagtcaggcacgtcaggccagagcagcgacacggagtcgggctacctgcagagccacccacagcacagcgtggacaggatctactcggcactctacgcgtgctccatgcagaatggcagcggcgagcgctctttttacagcggcgcagtggtcagccaccacgagactgcgctcggcctgccccgcgaccaccacatggaagaccccagctggatcacacgcatccatgagcgctcgcagcagatggagcgctacctgtccaccacccccgagaccacgcactgccgcaagcagccccggcctgtgcgcatccagaccctagtgggcaacatccacatcaagcaggagatggaggacgattacgactactacgggcagcaaagggtgcagatcctggaacgcaacgaatccgaggagtgcacggaagacacagaccaggccgagggcaccgagagtgagcccaaaggtgaaagcttcgactcgggcgtcagctcctccataggcaccgagcctgactcggtggagcagcagtttgggcctggggcggcgcgggacagccaggctgaacccacccaacccgagcaggctgcagaagcccccgctgagggtggtccgcagacaaaccagctagaaacaggtgcttcctctccggagagaagcaatgaagtggagatggacagcactgttatcactgtcagcaacagctccgacaagagcgtcctacaacagccttcggtcaacacgtccatcgggcagccattgccaagtacccagctctacttacgccagacagaaaccctcaccagcaacctgaggatgcctctgaccttgaccagcaacacgcaggtcattggcacagctggcaacacctacctgccagccctcttcactacccagcccgcgggcagtggccccaagcctttcctcttcagcctgccacagcccctggcaggccagcagacccagtttgtgacagtgtcccagcccggtctgtcgacctttactgcacagctgccagcgccacagcccctggcctcatccgcaggccacagcacagccagtgggcaaggcgaaaaaaagccttatgagtgcactctctgcaacaagactttcaccgccaaacagaactacgtcaagcacatgttcgtacacacaggtgagaagccccaccaatgcagcatctgttggcgctccttctccttaaaggattaccttatcaagcacatggtgacacacacaggagtgagggcataccagtgtagtatctgcaacaagcgcttcacccagaagagctccctcaacgtgcacatgcgcctccaccggggagagaagtcctacgagtgctacatctgcaaaaagaagttctctcacaagaccctcctggagcgacacgtggccctgcacagtgccagcaatgggaccccccctgcaggcacacccccaggtgcccgcgctggccccccaggcgtggtggcctgcacggaggggaccacttacgtctgctccgtctgcccagcaaagtttgaccaaatcgagcagttcaacgaccacatgaggatgcatgtgtctgacggataagtagtatctttctctctttcttatgaacaaaacaaaacaacaacaaaaaacaaacaaacaaaaaagctatggcactagaatttaagaaatgttttggtttcatttttactttctgtttttgtttttgtttcgtttcattttgtactacatgaagaactgttttttgcctgctggtacattacatttccggaggcttgggtgaataatagttttcccagtctccctcggatggtggccttaaggcctggtagtgcttcaagaggtccactggttggatctctagctactggcctctaaatacaacccttctttacaaaaaaatctttta

SEQ ID NO: 359323 - DNA, 4015 bp, Homo sapiens
caagaacagtcatcatagagagacaggctctcagggtccgtcccttcatgtcatggtgctgtgttagatcactttcctctgctggattaatggtcagagaaaaagggaaacaaactgtacccaaaggaatccaattaaagcacttgaacttcactgacgtctatcctattgttttcttaacttcctaacctatggttaattattctgaccagtggaaagaaacagcataaacatgggaattatcttaaattccctactttgtttagtttgtaaaggcatcaaaattttactgtgcaggatggaatactaatttggtatagttgaaattttttttggctaatctttctatttcttctttactctcctcaccaaaggcactgccaggacttaccgtacaacactccttggcttctggaattttatctctgctcacagtctacattacaacattagttcattctgggcactttagcttccttgaatctccagttgatctcacacccatgcctatgatattcttctcctggttaatcaagaattctctatttctgctccgtcatccatgccactacaaataaaaagaagtgttaagaattgcctttgggactctgaaggctgaagactctcactctattggccaggctggagtgcagtggtgcaatctcggctcatggcaacttcttccgcttcctagtttcaagtgattctcctgcctcagcctcctgagtaactaggattacagaattgatgaattgcaagtttgtgccccatagctgcacagactgcctgaagttacatttagagactgaaatcactgcaccttaaaaacaaaagattgagctgcactgtattcctcataagcctacagggtacgaagaatgaactctgagaatgtttggagaatgtttcatcattactaacaggatattcctcatgacattgctgtctggttacatacagtgaattagacaaattaagtgtataccttgatgagtatacatgtgacaacacccaacccaaggtgcagaatatttataatacctaagaagaatcctttgtatgtgccccttgaaggtgaaattttccaaagttttaacaaaaggtaaagaacaagcaagttcaaaaaaggagagggaaagaaagaaagagaaatagagagagaggaatatctttgaccatcagtctgtgacctgccccttctctttacatgcagccgctctctgctccctgccccaatgaacatctgcactaggcccaagccttggagtaatttacctgaagagtgacaccattgattttgaaactactatgaggaaactgaagcccagagaggtgaagtgaggtgcccaaggccacacagcaagttagaggcacagctagtacggtagctcaagtctcctgactcccagtccagtgctcctcccattactccacgagtcctgtctctaagcttcctgacaaatgctagaacggaagaaacccaagacagctgaaaaccagaaggcatctgaggagaatgagattactcagccgggtggatccagcgccaagccgggccttccctgcctgaactttgaagctgttttgtctccagacccagccctcatccactcaacacattcactgacaaactctcacgctcacaccgggtcatctgattgtgacatcagttgcaaggggatgaccgagcgcattcacagcatcaaccttcacaacttcagcaattccgtgctcgagaccctcaacgagcagcgcaaccgtggccacttctgtgacgtaacggtgcgcatccacgggagcatgctgcgcgcacaccgctgcgtgctggcagccggcagccccttcttccaggacaaactgctgcttggctacagcgacatcgagatcccgtcggtggtgtcagtgcagtcagtgcaaaagctcattgacttcatgtacagcggcgtgctacgggtctcgcagtcggaagctctgcagatcctcacggccgccagcatcctgcagatcaaaacagtcatcgacgagtgcacgcgcatcgtgtcacagaacgtgggcgatgtgttcccggggatccaggactcgggccaggacacgccgcggggcactcccgagtcaggcacgtcaggccagagcagcgacacggagtcgggctacctgcagagccacccacagcacagcgtggacaggatctactcggcactctacgcgtgctccatgcagaatggcagcggcgagcgctctttttacagcggcgcagtggtcagccaccacgagactgcgctcggcctgccccgcgaccaccacatggaagaccccagctggatcacacgcatccatgagcgctcgcagcagatggagcgctacctgtccaccacccccgagaccacgcactgccgcaagcagccccggcctgtgcgcatccagaccctagtgggcaacatccacatcaagcaggagatggaggacgattacgactactacgggcagcaaagggtgcagatcctggaacgcaacgaatccgaggagtgcacggaagacacagaccaggccgagggcaccgagagtgagcccaaaggtgaaagcttcgactcgggcgtcagctcctccataggcaccgagcctgactcggtggagcagcagtttgggcctggggcggcgcgggacagccaggctgaacccacccaacccgagcaggctgcagaagcccccgctgagggtggtccgcagacaaaccagctagaaacaggtgcttcctctccggagagaagcaatgaagtggagatggacagcactgttatcactgtcagcaacagctccgacaagagcgtcctacaacagccttcggtcaacacgtccatcgggcagccattgccaagtacccagctctacttacgccagacagaaaccctcaccagcaacctgaggatgcctctgaccttgaccagcaacacgcaggtcattggcacagctggcaacacctacctgccagccctcttcactacccagcccgcgggcagtggccccaagcctttcctcttcagcctgccacagcccctggcaggccagcagacccagtttgtgacagtgtcccagcccggtctgtcgacctttactgcacagctgccagcgccacagcccctggcctcatccgcaggccacagcacagccagtgggcaaggcgaaaaaaagccttatgagtgcactctctgcaacaagactttcaccgccaaacagaactacgtcaagcacatgttcgtacacacaggtgagaagccccaccaatgcagcatctgttggcgctccttctccttaaaggattaccttatcaagcacatggtgacacacacaggagtgagggcataccagtgtagtatctgcaacaagcgcttcacccagaagagctccctcaacgtgcacatgcgcctccaccggggagagaagtcctacgagtgctacatctgcaaaaagaagttctctcacaagaccctcctggagcgacacgtggccctgcacagtgccagcaatgggaccccccctgcaggcacacccccaggtgcccgcgctggccccccaggcgtggtggcctgcacggaggggaccacttacgtctgctccgtctgcccagcaaagtttgaccaaatcgagcagttcaacgaccacatgaggatgcatgtgtctgacggataagtagtatctttctctctttcttatgaacaaaacaaaacaacaacaaaaaacaaacaaacaaaaaagctatggcactagaatttaagaaatgttttggtttcatttttactttctgtttttgtttttgtttcgtttcattttgtactacatgaagaactgttttttgcctgctggtacattacatttccggaggcttgggtgaataatagttttcccagtctccctcggatggtggccttaaggcctggtagtgcttcaagaggtccactggttggatctctagctactggcctctaaatacaacccttctttacaaaaaaatctttta

SEQ ID NO: 359324 - DNA, 5169 bp, Homo sapiens
tgaggagtataataacatcataattttggaactagaatatagaaaaaatctggttagaagtatcagacaaagaaaaactgttttttttctcttttaaggcaagtttatttagaagcattgattatttttatttttccctcctaataaaagattaagggtaactgctgtagtttcagtcccatattctatgaaatatcatcctgattgtgatggtagcttcttatgggatttatttctgttgttgtaccactatgtactatacgcattgcacctgttcacacagagtacattgcattgtgatgtttgtacagctagatgctttaaatgagaagccaatctcccttcttctaggttcctagcctattagttacttaattaagcttaattctgttttggtctgtaattttgtaagtctgcaattttgtatatggtctcgatttattaactgagcaatgatttcttctttgcagttatcagttttgtctgagatcagttttcctattgtatggagtctgtttcttacagagcctcctttaagactgctctgactttaaaatcattactaggcttttgtcagagctgatttgttcacattcttctcacattaaaaataaatttaaaagattgcacaaataagctatgcatttcactatttcctgcttatatgcaaaaaatgtatttatgataattacatgtactgccagaactgaaacaatacattcctcataatggagcataaataaagaaggtggagccagctgctcttaaactgtttatttgcaagcaataatgatatagagaatatacctttttcactctgttagtctggcaatactgaacctgttgctgcattagacgagttgccttttgcctggataggggaaggagagctgtctgctgtctggtaggagggctttgtctgtgcctttctctctgtttctttctgtttttctttctctctctctctctctcctcttctctctctcttactcgcttgctctgtctctgtctctctctccctctcttcccccctccctcctctctcttgctctctctctctcttcccgtctctgtggtttgtaaggtaggttgcagtgtgtgtatatacacaacatcaagagcaggaaaatggactcattagggaggcaggcagtcattaccactcacactgtacttccagggagacaccgattataagaagagaaactcagcgctggggaagaagacaaataaaaagaagtgttaagaattgcctttgggactctgaaggctgaagactctcactctattggccaggctggagtgcagtggtgcaatctcggctcatggcaacttcttccgcttcctagtttcaagtgattctcctgcctcagcctcctgagtaactaggattacagaattgatgaattgcaagtttgtgccccatagctgcacagactgcctgaagttacatttagagactgaaatcactgcaccttaaaaacaaaagattgagctgcactgtattcctaatgtttcatcattactaacaggatattcctcatgacattgctgtctgatctttgaccatcagtctgtgacctgccccttctctttacatgcagccgctctctgctccctgccccaatgaacatctgcactaggcccaagccttggagtaatttacctgaagagtgacaccattgattttgaaactactatgaggaaactgaagcccagagaggtgaagtgaggtgcccaaggccacacagcaagttagaggcacagctagtacggtagctcaagtctcctgactcccagtccagtgctcctcccattactccacgagtcctgtctctaagcttcctgacaaatgctagaacggaagaaacccaagacagctgaaaaccagaaggcatctgaggagaatgagattactcagccgggtggatccagcgccaagccgggccttccctgcctgaactttgaagctgttttgtctccagacccagccctcatccactcaacacattcactgacaaactctcacgctcacaccgggtcatctgattgtgacatcagttgcaaggggatgaccgagcgcattcacagcatcaaccttcacaacttcagcaattccgtgctcgagaccctcaacgagcagcgcaaccgtggccacttctgtgacgtaacggtgcgcatccacgggagcatgctgcgcgcacaccgctgcgtgctggcagccggcagccccttcttccaggacaaactgctgcttggctacagcgacatcgagatcccgtcggtggtgtcagtgcagtcagtgcaaaagctcattgacttcatgtacagcggcgtgctacgggtctcgcagtcggaagctctgcagatcctcacggccgccagcatcctgcagatcaaaacagtcatcgacgagtgcacgcgcatcgtgtcacagaacgtgggcgatgtgttcccggggatccaggactcgggccaggacacgccgcggggcactcccgagtcaggcacgtcaggccagagcagcgacacggagtcgggctacctgcagagccacccacagcacagcgtggacaggatctactcggcactctacgcgtgctccatgcagaatggcagcggcgagcgctctttttacagcggcgcagtggtcagccaccacgagactgcgctcggcctgccccgcgaccaccacatggaagaccccagctggatcacacgcatccatgagcgctcgcagcagatggagcgctacctgtccaccacccccgagaccacgcactgccgcaagcagccccggcctgtgcgcatccagaccctagtgggcaacatccacatcaagcaggagatggaggacgattacgactactacgggcagcaaagggtgcagatcctggaacgcaacgaatccgaggagtgcacggaagacacagaccaggccgagggcaccgagagtgagcccaaaggtgaaagcttcgactcgggcgtcagctcctccataggcaccgagcctgactcggtggagcagcagtttgggcctggggcggcgcgggacagccaggctgaacccacccaacccgagcaggctgcagaagcccccgctgagggtggtccgcagacaaaccagctagaaacaggtgcttcctctccggagagaagcaatgaagtggagatggacagcactgttatcactgtcagcaacagctccgacaagagcgtcctacaacagccttcggtcaacacgtccatcgggcagccattgccaagtacccagctctacttacgccagacagaaaccctcaccagcaacctgaggatgcctctgaccttgaccagcaacacgcaggtcattggcacagctggcaacacctacctgccagccctcttcactacccagcccgcgggcagtggccccaagcctttcctcttcagcctgccacagcccctggcaggccagcagacccagtttgtgacagtgtcccagcccggtctgtcgacctttactgcacagctgccagcgccacagcccctggcctcatccgcaggccacagcacagccagtgggcaaggcgaaaaaaagccttatgagtgcactctctgcaacaagactttcaccgccaaacagaactacgtcaagcacatgttcgtacacacaggtgagaagccccaccaatgcagcatctgttggcgctccttctccttaaaggattaccttatcaagcacatggtgacacacacaggagtgagggcataccagtgtagtatctgcaacaagcgcttcacccagaagagctccctcaacgtgcacatgcgcctccaccggggagagaagtcctacgagtgctacatctgcaaaaagaagttctctcacaagaccctcctggagcgacacgtggccctgcacagtgccagcaatgggaccccccctgcaggcacacccccaggtgcccgcgctggccccccaggcgtggtggcctgcacggaggggaccacttacgtctgctccgtctgcccagcaaagtttgaccaaatcgagcagttcaacgaccacatgaggatgcatgtgtctgacggataagtagtatctttctctctttcttatgaacaaaacaaaacaacaacaaaaaacaaacaaacaaaaaagctatggcactagaatttaagaaatgttttggtttcatttttactttctgtttttgtttttgtttcgtttcattttgtactacatgaagaactgttttttgcctgctggtacattacatttccggaggcttgggtgaataatagttttcccagtctccctcggatggtggccttaaggcctggtagtgcttcaagaggtccactggttggatctctagctactggcctctaaatacaacccttctttacaaaaaaatcttttaaaaaaaagtaaaaaaaaaaaaaaaatttccacttgtgaagagcactacaaaaaatatataacaaaatctaaaaggcctactgtctttaagtacaccgcttgcagtgtttcagtggacattttcacaattctggccgcttggacttcacagtaaccagttaaaactgtggaatatcacttctggttgaaaacccagaggaaaggccctgctgttttccacctaccacgttgtctgatttcataaaagggctgtgggggtgggaagggcagtgggttcggtggtgtgggaaagaaagacgaatggcaggcttcttccccagattctgcccgggtccacacaccctggcccaccttctccatatccccctcttgcagcagaagccaggaagacttggacaagcaacaagcaacagtggctatcgtatttattcagtgtcttcgctgagccacagcctcagcacaatcaagagggactttcatgaaaggcaggaatgcagataaaacaaagatatcagaaatttgcacctatgtttctaggtacaagagaaggattatttccaacaatctttgcaaaaaaaaaaaaaagtgtcaggatatattcttgtggaagagaaaaagaaaaagaaatggagggtggggggaacaataaaaagttcttgaggcttttttaattcaaaattttatagaggggcaaaagtgacgtttaccagatagaatgctgatttttttaatatatttacaacagtatttgtgtaaaaaaaaaa

SEQ ID NO: 359325 - DNA, 4097 bp, Homo sapiens
tgaggagtataataacatcataattttggaactagaatatagaaaaaatctggttagaagtatcagacaaagaaaaactgttttttttctcttttaaggcaagtttatttagaagcattgattatttttatttttccctcctaataaaagattaagggtaactgctgtagtttcagtcccatattctatgaaatatcatcctgattgtgatggtagcttcttatgggatttatttctgttgttgtaccactatgtactatacgcattgcacctgttcacacagagtacattgcattgtgatgtttgtacagctagatgctttaaatgagaagccaatctcccttcttctaggttcctagcctattagttacttaattaagcttaattctgttttggtctgtaattttgtaagtctgcaattttgtatatggtctcgatttattaactgagcaatgatttcttctttgcagttatcagttttgtctgagatcagttttcctattgtatggagtctgtttcttacagagcctcctttaagactgctctgactttaaaatcattactaggcttttgtcagagctgatttgttcacattcttctcacattaaaaataaatttaaaagattgcacaaataagctatgcatttcactatttcctgcttatatgcaaaaaatgtatttatgataattacatgtactgccagaactgaaacaatacattcctcataatggagcataaataaagaaggtggagccagctgctcttaaactgtttatttgcaagcaataatgatatagagaatatacctttttcactctgttagtctggcaatactgaacctgttgctgcattagacgagttgccttttgcctggataggggaaggagagctgtctgctgtctggtaggagggctttgtctgtgcctttctctctgtttctttctgtttttctttctctctctctctctctcctcttctctctctcttactcgcttgctctgtctctgtctctctctccctctcttcccccctccctcctctctcttgctctctctctctcttcccgtctctgtggtttgtaaggtaggttgcagtgtgtgtatatacacaacatcaagagcaggaaaatggactcattagggaggcaggcagtcattaccactcacactgtacttccagggagacaccgattataagaagagaaactcagcgctggggaagaagacaaataaaaagaagtgttaagaattgcctttgggactctgaaggctgaagactctcactctattggccaggctggagtgcagtggtgcaatctcggctcatggcaacttcttccgcttcctagtttcaagtgattctcctgcctcagcctcctgagtaactaggattacagaattgatgaattgcaagtttgtgccccatagctgcacagactgcctgaagttacatttagagactgaaatcactgcaccttaaaaacaaaagattgagctgcactgtattcctaatgtttcatcattactaacaggatattcctcatgacattgctgtctgatctttgaccatcagtctgtgacctgccccttctctttacatgcagccgctctctgctccctgccccaatgaacatctgcactaggcccaagccttggagtaatttacctgaagagtgacaccattgattttgaaactactatgaggaaactgaagcccagagaggtgaagtgaggtgcccaaggccacacagcaagttagaggcacagctagtacggtagctcaagtctcctgactcccagtccagtgctcctcccattactccacgagtcctgtctctaagcttcctgacaaatgctagaacggaagaaacccaagacagctgaaaaccagaaggcatctgaggagaatgagattactcagccgggtggatccagcgccaagccgggccttccctgcctgaactttgaagctgttttgtctccagacccagccctcatccactcaacacattcactgacaaactctcacgctcacaccgggtcatctgattgtgacatcagttgcaaggggatgaccgagcgcattcacagcatcaaccttcacaacttcagcaattccgtgctcgagaccctcaacgagcagcgcaaccgtggccacttctgtgacgtaacggtgcgcatccacgggagcatgctgcgcgcacaccgctgcgtgctggcagccggcagccccttcttccaggacaaactgctgcttggctacagcgacatcgagatcccgtcggtggtgtcagtgcagtcagtgcaaaagctcattgacttcatgtacagcggcgtgctacgggtctcgcagtcggaagctctgcagatcctcacggccgccagcatcctgcagatcaaaacagtcatcgacgagtgcacgcgcatcgtgtcacagaacgtgggcgatgtgttcccggggatccaggactcgggccaggacacgccgcggggcactcccgagtcaggcacgtcaggccagagcagcgacacggagtcgggctacctgcagagccacccacagcacagcgtggacaggatctactcggcactctacgcgtgctccatgcagaatggcagcggcgagcgctctttttacagcggcgcagtggtcagccaccacgagactgcgctcggcctgccccgcgaccaccacatggaagaccccagctggatcacacgcatccatgagcgctcgcagcagatggagcgctacctgtccaccacccccgagaccacgcactgccgcaagcagccccggcctgtgcgcatccagaccctagtgggcaacatccacatcaagcaggagatggaggacgattacgactactacgggcagcaaagggtgcagatcctggaacgcaacgaatccgaggagtgcacggaagacacagaccaggccgagggcaccgagagtgagcccaaaggtgaaagcttcgactcgggcgtcagctcctccataggcaccgagcctgactcggtggagcagcagtttgggcctggggcggcgcgggacagccaggctgaacccacccaacccgagcaggctgcagaagcccccgctgagggtggtccgcagacaaaccagctagaaacaggtgcttcctctccggagagaagcaatgaagtggagatggacagcactgttatcactgtcagcaacagctccgacaagagcgtcctacaacagccttcggtcaacacgtccatcgggcagccattgccaagtacccagctctacttacgccagacagaaaccctcaccagcaacctgaggatgcctctgaccttgaccagcaacacgcaggtcattggcacagctggcaacacctacctgccagccctcttcactacccagcccgcgggcagtggccccaagcctttcctcttcagcctgccacagcccctggcaggccagcagacccagtttgtgacagtgtcccagcccggtctgtcgacctttactgcacagctgccagcgccacagcccctggcctcatccgcaggccacagcacagccagtgggcaaggcgaaaaaaagccttatgagtgcactctctgcaacaagactttcaccgccaaacagaactacgtcaagcacatgttcgtacacacaggtgagaagccccaccaatgcagcatctgttggcgctccttctccttaaaggattaccttatcaagcacatggtgacacacacaggagtgagggcataccagtgtagtatctgcaacaagcgcttcacccagaagagctccctcaacgtgcacatgcgcctccaccggggagagaagtcctacgagtgctacatctgcaaaaagaagttctctcacaagaccctcctggagcgacacgtggccctgcacagtgccagcaatgggaccccccctgcaggcacacccccaggtgcccgcgctggccccccaggcgtggtggcctgcacggaggggaccacttacgtctgctccgtctgcccagcaaagtttgaccaaatcgagcagttcaacgaccacatgaggatgcattaatcgcccggggggggaaaaggttaaccgtatt

SEQ ID NO: 359326 - DNA, 2106 bp, Homo sapiens
  misc_feature (358)..(358): n is a, c, g, or t
  misc_feature (1317)..(1317): n is a, c, g, or t
agagagaagccatagtcggcgagcaacgctggagcatcccgctctggtgccgctgcagccggcagagatggttgagctcatgttcccgctgttgctcctccttctgcccttccttctgtatatggctgcgccccaaatcaggtctgtgcaaatgtattgccttctcttgagaattcttgttgcggggcgggagggaaacatagaatccccaccaaagctttcttggaaaactcccctgggggggctccaagatggcggagcccagagttcggtgggttggaggcgaggtccagctgtcctgggtgccaggaggacacccgagaccccaggcggtgagaaagggcggcagtccggggcncactgcttttccctggcctgtttttcttttgtctaagcaccccctgattctggctccagggaatcccgagggtaaggctacctcaaacgcttgagtttcggactcttcaatgggatatggcccgacgctgttttccccttattccccacgccttaaaccagccttcgaggtacaaaggagcgattccacatttcgccctctgaaactgatagcaatcgtaacatctgcggccccatccttgctctctcgttgctgttacaatcgcttgttctgtgggcggatgttgtaaaggagaaaagtgaaaaggaagagtgtttggttatgagctctatcctgccttgcgagcaggagcacgggggatctgagttaggagctagggtactggggcggtgagggctgggagaatggtgggaaggtattgaccaggtgatagatcaatcagcccaaggctggccaagtgccccagtgaatcagcagcgggctgtaaaaccggcagcctgcttattggttctaagtaaatcaccagtggtgacggaccagtgactgaatagacagacacactccttccccaggtgggcggtcttagtcccaatagaacttgaagccaggccagatcacagtcatttcttaccacagtcacctactttccttcttttatttttattttctcttccttctctggtgcccctcttccagttatattttttctgccttctgaacactcagttctcccacctctaggcacacatggtttctcacactcagatgaaaacactgctttttatctttttttcactacaagatcctcttatccacatagaatctcaatgaaaagttgaaccagaactgaaaatagtgctcataccccagagggatttttctggaaaaaaaaaaatatatgtgtgtatatatatatatatatgtgtgtgtgtgtatatatatatatgtgtgtgtgtatntatatatatatatatattccaggagctgtattcccaactcagcagggttatgggagtcgggccagagctggacttttatagttgtctctttcattcctgctggttaaggagaagaaagaactaagtacaggtcctactaagttgtcactcctggagctacatacagtaaggggatgtgggaaacagcctagaggcttgttttctgaggagggaggtgatggtttgtggggaccatgagttaatctgcctccctgtcagcattttcgcactatgcaggtagcttcaatggctaagagtatgtaccttgcaattccaagttcaatgaaaaaggctgaaatgctctttaagaatgcatctcctggtcaacagattgttttaaccagagtcccaacattgccaagaagagaataggccagtctgagaaccaccaatctgtgtttgtgcattcattcatttggaaaaggcaatatagtatagtacttagaaacaagcactctaggctgggcttggtgactcacacctgtaatcccagcactttgggaggctgaggtgggcggatcacctgaggtcaggagttcgagaccatcctggccagcgtggtgaaaccctgtctctactaaaaatacaaaaattagctgggcgtggtggcgcatgggtgagggggtgagggatgagaatcgcttgaacctgggagatgggggttgcagtggaggtggaggttgcagtgagccgagatcacaccattgcactccagcctgggcaacaagagcaaaactctgtctcaaaaaa

SEQ ID NO: 359327 - DNA, 2486 bp, Homo sapiens
agagagaagccatagtcggcgagcaacgctggagcatcccgctctggtgccgctgcagccggcagagatggttgagctcatgttcccgctgttgctcctccttctgcccttccttctgtatatggctgcgccccaaatcaggaaaatgctgtccagtggggtgtgtacatcaactgttcagcttcctgggaaagtagttgtggtcacaggagctaatacaggtatcgggaaggagacagccaaagagctggctcagagaggagctcgagtatatttagcttgccgggatgtggaaaagggggaattggtggccaaagagatccagaccacgacagggaaccagcaggtgttggtgcggaaactggacctgtctgatactaagtctattcgagcttttgctaagggcttcttagctgaggaaaagcacctccacgttttgatcaacaatgcaggagtgatgatgtgtccgtactcgaagacagcagatggctttgagatgcacataggagtcaaccacttgggtcacttcctcctaacccatctgctgctagagaaactaaaggaatcagccccatcaaggatagtaaatgtgtcttccctcgcacatcacctgggaaggatccacttccataacctgcagggcgagaaattctacaatgcaggcctggcctactgtcacagcaagctagccaacatcctcttcacccaggaactggcccggagactaaaaggctctggcgttacgacgtattctgtacaccctggcacagtccaatctgaactggttcggcactcatctttcatgagatggatgtggtggcttttctcctttttcatcaagactcctcagcagggagcccagaccagcctgcactgtgccttaacagaaggtcttgagattctaagtgggaatcatttcagtgactgtcatgtggcatgggtctctgcccaagctcgtaatgagactatagcaaggcggctgtgggacgtcagttgtgacctgctgggcctcccaatagactaacaggcagtgccagttggacccaagagaagactgcagcagactacacagtacttcttgtcaaaatgattctccttcaaggttttcaaaacctttagcacaaagagagcaaaaccttccagccttgcctgcttggtgtccagttaaaactcagtgtactgccagattcgtctaaatgtctgtcatgtccagatttactttgcttctgttactgccagagttactagagatatcataataggataagaagaccctcatatgacctgcacagctcattttccttctgaaagaaactactacctaggagaatctaagctatagcagggatgatttatgcaaatttgaactagcttctttgttcacaattcagttcctcccaaccaaccagtcttcacttcaagagggccacactgcaacctcagcttaacatgaataacaaagactggctcaggagcagggcttgcccaggcatggtggatcaccggaggtcagtagttcaagaccagcctggccaacatggtgaaaccccacctctactaaaaattgtgtatatctttgtgtgtcttcctgtttatgtgtgccaagggagtattttcacaaagttcaaaacagccacaataatcagagatggagcaaaccagtgccatccagtctttatgcaaatgaaatgctgcaaagggaagcagattctgtatatgttggtaactacccaccaagagcacatgggtagcagggaagaagtaaaaaaagagaaggagaatactggaagataatgcacaaaatgaagggactagttaaggattaactagccctttaaggattaactagttaaggattaatagcaaaagatattaaatatgctaacatagctatggaggaattgagggcaagcacccaggactgatgaggtcttaacaaaaaccagtgtggcaaaaaaaaaaaaaaaaaaaaaaaaaaaaaatcctaaaaacaaacaaacaaaaaaaacaattcttcattcagaaaaattatcttagggactgatattggtaattatggtcaatttaataatattttggggcatttccttacattgtcttgacaagattaaaatgtctgtgccaaaattttgtattttatttggagacttcttatcaaaagtaatgctgccaaaggaagtctaaggaattagtagtgttcccatcacttgtttggagtgtgctattctaaaagattttgatttcctggaatgacaattatattttaactttggtgggggaaagagttataggaccacagtcttcacttctgatacttgtaaattaatcttttattgcacttgttttgaccattaagctatatgtttagaaatggtcattttacggaaaaattagaaaaattctgataatagtgcagaataaatgaattaatgttttacttaatttatattgaactgtcaatgacaaataaaaattctttttgatta

SEQ ID NO: 359328 - DNA, 2498 bp, Homo sapiens
  misc_feature (2475)..(2476): n is a, c, g, or t
  misc_feature (2483)..(2483): n is a, c, g, or t
agagagaagccatagtcggcgagcaacgctggagcatcccgctctggtgccgctgcagccggcagagatggttgagctcatgttcccgctgttgctcctccttctgcccttccttctgtatatggctgcgccccaaatcaggaaaatgctgtccagtggggtgtgtacatcaactgttcagcttcctgggaaagtagttgtggtcacaggagctaatacaggtatcgggaaggagacagccaaagagctggctcagagaggagctcgagtatatttagcttgccgggatgtggaaaagggggaattggtggccaaagagatccagaccacgacagggaaccagcaggtgttggtgcggaaactggacctgtctgatactaagtctattcgagcttttgctaagggcttcttagctgaggaaaagcacctccacgttttgatcaacaatgcaggagtgatgatgtgtccgtactcgaagacagcagatggctttgagatgcacataggagtcaaccacttgggtcacttcctcctaacccatctgctgctagagaaactaaaggaatcagccccatcaaggatagtaaatgtgtcttccctcgcacatcacctgggaaggatccacttccataacctgcagggcgagaaattctacaatgcaggcctggcctactgtcacagcaagctagccaacatcctcttcacccaggaactggcccggagactaaaaggctctggcgttacgacgtattctgtacaccctggcacagtccaatctgaactggttcggcactcatctttcatgagatggatgtggtggcttttctcctttttcatcaagactcctcagcagggagcccagaccagcctgcactgtgccttaacagaaggtcttgagattctaagtgggaatcatttcagtgactgtcatgtggcatgggtctctgcccaagctcgtaatgagactatagcaaggcggctgtgggacgtcagttgtgacctgctgggcctcccaatagactaacaggcagtgccagttggacccaagagaagactgcagcagactacacagtacttcttgtcaaaatgattctccttcaaggttttcaaaacctttagcacaaagagagcaaaaccttccagccttgcctgcttggtgtccagttaaaactcagtgtactgccagattcgtctaaatgtctgtcatgtccagatttactttgcttctgttactgccagagttactagagatatcataataggataagaagaccctcatatgacctgcacagctcattttccttctgaaagaaactactacctaggagaatctaagctatagcagggatgatttatgcaaatttgaactagcttctttgttcacaattcagttcctcccaaccaaccagtcttcacttcaagagggccacactgcaacctcagcttaacatgaataacaaagactggctcaggagcagggcttgcccaggcatggtggatcaccggaggtcagtagttcaagaccagcctggccaacatggtgaaaccccacctctactaaaaattgtgtatatctttgtgtgtcttcctgtttatgtgtgccaagggagtattttcacaaagttcaaaacagccacaataatcagagatggagcaaaccagtgccatccagtctttatgcaaatgaaatgctgcaaagggaagcagattctgtatatgttggtaactacccaccaagagcacatgggtagcagggaagaagtaaaaaaagagaaggagaatactggaagataatgcacaaaatgaagggactagttaaggattaactagccctttaaggattaactagttaaggattaatagcaaaagatattaaatatgctaacatagctatggaggaattgagggcaagcacccaggactgatgaggtcttaacaaaaaccagtgtggcaaaaaaaaaaaaaaaaaaaaaaaaaaaaaatcctaaaaacaaacaaacaaaaaaaacaattcttcattcagaaaaattatcttagggactgatattggtaattatggtcaatttaataatattttggggcatttccttacattgtcttgacaagattaaaatgtctgtgccaaaattttgtattttatttggagacttcttatcaaaagtaatgctgccaaaggaagtctaaggaattagtagtgttcccatcacttgtttggagtgtgctattctaaaagattttgatttcctggaatgacaattatattttaactttggtgggggaaagagttataggaccacagtcttcacttctgatacttgtaaattaatcttttattgcacttgttttgaccattaagctatatgtttagaaatggtcattttacggaaaaattagaaaaattctgataatagtgcagaataaatgaattaatgttttacttaatttatattgaactgtcatcagacaatgtatgtnnatcctcnagagtcaaccgcaac

SEQ ID NO: 359329 - DNA, 2460 bp, Homo sapiens
ggaagtcggctaggtacgaggctgggtggttaccggcagagatggttgagctcatgttcccgctgttgctcctccttctgcccttccttctgtatatggctgcgccccaaatcaggaaaatgctgtccagtggggtgtgtacatcaactgttcagcttcctgggaaagtagttgtggtcacaggagctaatacaggtatcgggaaggagacagccaaagagctggctcagagaggagctcgagtatatttagcttgccgggatgtggaaaagggggaattggtggccaaagagatccagaccacgacagggaaccagcaggtgttggtgcggaaactggacctgtctgatactaagtctattcgagcttttgctaagggcttcttagctgaggaaaagcacctccacgttttgatcaacaatgcaggagtgatgatgtgtccgtactcgaagacagcagatggctttgagatgcacataggagtcaaccacttgggtcacttcctcctaacccatctgctgctagagaaactaaaggaatcagccccatcaaggatagtaaatgtgtcttccctcgcacatcacctgggaaggatccacttccataacctgcagggcgagaaattctacaatgcaggcctggcctactgtcacagcaagctagccaacatcctcttcacccaggaactggcccggagactaaaaggctctggcgttacgacgtattctgtacaccctggcacagtccaatctgaactggttcggcactcatctttcatgagatggatgtggtggcttttctcctttttcatcaagactcctcagcagggagcccagaccagcctgcactgtgccttaacagaaggtcttgagattctaagtgggaatcatttcagtgactgtcatgtggcatgggtctctgcccaagctcgtaatgagactatagcaaggcggctgtgggacgtcagttgtgacctgctgggcctcccaatagactaacaggcagtgccagttggacccaagagaagactgcagcagactacacagtacttcttgtcaaaatgattctccttcaaggttttcaaaacctttagcacaaagagagcaaaaccttccagccttgcctgcttggtgtccagttaaaactcagtgtactgccagattcgtctaaatgtctgtcatgtccagatttactttgcttctgttactgccagagttactagagatatcataataggataagaagaccctcatatgacctgcacagctcattttccttctgaaagaaactactacctaggagaatctaagctatagcagggatgatttatgcaaatttgaactagcttctttgttcacaattcagttcctcccaaccaaccagtcttcacttcaagagggccacactgcaacctcagcttaacatgaataacaaagactggctcaggagcagggcttgcccaggcatggtggatcaccggaggtcagtagttcaagaccagcctggccaacatggtgaaaccccacctctactaaaaattgtgtatatctttgtgtgtcttcctgtttatgtgtgccaagggagtattttcacaaagttcaaaacagccacaataatcagagatggagcaaaccagtgccatccagtctttatgcaaatgaaatgctgcaaagggaagcagattctgtatatgttggtaactacccaccaagagcacatgggtagcagggaagaagtaaaaaaagagaaggagaatactggaagataatgcacaaaatgaagggactagttaaggattaactagccctttaaggattaactagttaaggattaatagcaaaagatattaaatatgctaacatagctatggaggaattgagggcaagcacccaggactgatgaggtcttaacaaaaaccagtgtggcaaaaaaaaaaaaaaaaaaaaaaaaaaaaaatcctaaaaacaaacaaacaaaaaaaacaattcttcattcagaaaaattatcttagggactgatattggtaattatggtcaatttaataatattttggggcatttccttacattgtcttgacaagattaaaatgtctgtgccaaaattttgtattttatttggagacttcttatcaaaagtaatgctgccaaaggaagtctaaggaattagtagtgttcccatcacttgtttggagtgtgctattctaaaagattttgatttcctggaatgacaattatattttaactttggtgggggaaagagttataggaccacagtcttcacttctgatacttgtaaattaatcttttattgcacttgttttgaccattaagctatatgtttagaaatggtcattttacggaaaaattagaaaaattctgataatagtgcagaataaatgaattaatgttttacttaatttatattgaactgtcaatgacaaataaaaattctttttgatta

SEQ ID NO: 359330 - DNA, 2447 bp, Homo sapiens
agagagaagccatagtcggcgagcaacgctggagcatcccgctctggtgccgctgcagccggcagagatggttgagctcatgttcccgctgttgctcctccttctgcccttccttctgtatatggctgcgccccaaatcaggaaaatgctgtccagtggggtgtgtacatcaactgttcagcttcctgggaaagtagttgtggtcacaggagctaatacaggtatcgggaaggagacagccaaagagctggctcagagaggagctcgagtatatttagcttgccgggatgtggaaaagggggaattggtggccaaagagatccagaccacgacagggaaccagcaggtgttggtgcggaaactggacctgtctgatactaagtctattcgagcttttgctaagggcttcttagctgaggaaaagcacctccacgttttgatcaacaatgcaggagtgatgatgtgtccgtactcgaagacagcagatggctttgagatgcacataggagtcaaccacttgggtcacttcctcctaacccatctgctgctagagaaactaaaggaatcagccccatcaaggatagtaaatgtgtcttccctcgcacatcacctgggaaggatccacttccataacctgcagggcgagaaattctacaatgcaggcctggcctactgtcacagcaagctagccaacatcctcttcacccaggaactggcccggagactaaaagtccaatctgaactggttcggcactcatctttcatgagatggatgtggtggcttttctcctttttcatcaagactcctcagcagggagcccagaccagcctgcactgtgccttaacagaaggtcttgagattctaagtgggaatcatttcagtgactgtcatgtggcatgggtctctgcccaagctcgtaatgagactatagcaaggcggctgtgggacgtcagttgtgacctgctgggcctcccaatagactaacaggcagtgccagttggacccaagagaagactgcagcagactacacagtacttcttgtcaaaatgattctccttcaaggttttcaaaacctttagcacaaagagagcaaaaccttccagccttgcctgcttggtgtccagttaaaactcagtgtactgccagattcgtctaaatgtctgtcatgtccagatttactttgcttctgttactgccagagttactagagatatcataataggataagaagaccctcatatgacctgcacagctcattttccttctgaaagaaactactacctaggagaatctaagctatagcagggatgatttatgcaaatttgaactagcttctttgttcacaattcagttcctcccaaccaaccagtcttcacttcaagagggccacactgcaacctcagcttaacatgaataacaaagactggctcaggagcagggcttgcccaggcatggtggatcaccggaggtcagtagttcaagaccagcctggccaacatggtgaaaccccacctctactaaaaattgtgtatatctttgtgtgtcttcctgtttatgtgtgccaagggagtattttcacaaagttcaaaacagccacaataatcagagatggagcaaaccagtgccatccagtctttatgcaaatgaaatgctgcaaagggaagcagattctgtatatgttggtaactacccaccaagagcacatgggtagcagggaagaagtaaaaaaagagaaggagaatactggaagataatgcacaaaatgaagggactagttaaggattaactagccctttaaggattaactagttaaggattaatagcaaaagatattaaatatgctaacatagctatggaggaattgagggcaagcacccaggactgatgaggtcttaacaaaaaccagtgtggcaaaaaaaaaaaaaaaaaaaaaaaaaaaaaatcctaaaaacaaacaaacaaaaaaaacaattcttcattcagaaaaattatcttagggactgatattggtaattatggtcaatttaataatattttggggcatttccttacattgtcttgacaagattaaaatgtctgtgccaaaattttgtattttatttggagacttcttatcaaaagtaatgctgccaaaggaagtctaaggaattagtagtgttcccatcacttgtttggagtgtgctattctaaaagattttgatttcctggaatgacaattatattttaactttggtgggggaaagagttataggaccacagtcttcacttctgatacttgtaaattaatcttttattgcacttgttttgaccattaagctatatgtttagaaatggtcattttacggaaaaattagaaaaattctgataatagtgcagaataaatgaattaatgttttacttaatttatattgaactgtcaatgacaaataaaaattctttttgatta

SEQ ID NO: 359331 - DNA, 2491 bp, Homo sapiens
ctctagctaccggtgggccgggcggagcccaggtagagctcatgtcctggttgtagctccttccttacgtgacctctccggtgcttgtaaaaataggtggcggcctaaactcacgggaaaatgctgtcccgtgtggggatgtgtacctcactgtgttcagttctccagggagatatgtagatggtcggttcactggatctatctaaccaggtatcggagaacggaagcatcaggaccatacagaagttagggctccacgagcagtgagctcgagtatatttagcttgccgggatgtggaaaagggggaattggtggccaaagagatccagaccacgacagggaaccagcaggtgttggtgcggaaactggacctgtctgatactaagtctattcgagcttttgctaagggcttcttagctgaggaaaagcacctccacgttttgatcaacaatgcaggagtgatgatgtgtccgtactcgaagacagcagatggctttgagatgcacataggagtcaaccacttgggtcacttcctcctaacccatctgctgctagagaaactaaaggaatcagccccatcaaggatagtaaatgtgtcttccctcgcacatcacctgggaaggatccacttccataacctgcagggcgagaaattctacaatgcaggcctggcctactgtcacagcaagctagccaacatcctcttcacccaggaactggcccggagactaaaaggctctggcgttacgacgtattctgtacaccctggcacagtccaatctgaactggttcggcactcatctttcatgagatggatgtggtggcttttctcctttttcatcaagactcctcagcagggagcccagaccagcctgcactgtgccttaacagaaggtcttgagattctaagtgggaatcatttcagtgactgtcatgtggcatgggtctctgcccaagctcgtaatgagactatagcaaggcggctgtgggacgtcagttgtgacctgctgggcctcccaatagactaacaggcagtgccagttggacccaagagaagactgcagcagactacacagtacttcttgtcaaaatgattctccttcaaggttttcaaaacctttagcacaaagagagcaaaaccttccagccttgcctgcttggtgtccagttaaaactcagtgtactgccagattcgtctaaatgtctgtcatgtccagatttactttgcttctgttactgccagagttactagagatatcataataggataagaagaccctcatatgacctgcacagctcattttccttctgaaagaaactactacctaggagaatctaagctatagcagggatgatttatgcaaatttgaactagcttctttgttcacaattcagttcctcccaaccaaccagtcttcacttcaagagggccacactgcaacctcagcttaacatgaataacaaagactggctcaggagcagggcttgcccaggcatggtggatcaccggaggtcagtagttcaagaccagcctggccaacatggtgaaaccccacctctactaaaaattgtgtatatctttgtgtgtcttcctgtttatgtgtgccaagggagtattttcacaaagttcaaaacagccacaataatcagagatggagcaaaccagtgccatccagtctttatgcaaatgaaatgctgcaaagggaagcagattctgtatatgttggtaactacccaccaagagcacatgggtagcagggaagaagtaaaaaaagagaaggagaatactggaagataatgcacaaaatgaagggactagttaaggattaactagccctttaaggattaactagttaaggattaatagcaaaagatattaaatatgctaacatagctatggaggaattgagggcaagcacccaggactgatgaggtcttaacaaaaaccagtgtggcaaaaaaaaaaaaaaaaaaaaaaaaaaaaaatcctaaaaacaaacaaacaaaaaaaacaattcttcattcagaaaaattatcttagggactgatattggtaattatggtcaatttaataatattttggggcatttccttacattgtcttgacaagattaaaatgtctgtgccaaaattttgtattttatttggagacttcttatcaaaagtaatgctgccaaaggaagtctaaggaattagtagtgttcccatcacttgtttggagtgtgctattctaaaagattttgatttcctggaatgacaattatattttaactttggtgggggaaagagttataggaccacagtcttcacttctgatacttgtaaattaatcttttattgcacttgttttgaccattaagctatatgtttagaaatggtcattttacggaaaaattagaaaaattctgataatagtgcagaataaatgaattaatgttttacttaatttatattgaactgtcaatgacaaataaaaattctttttgatta

SEQ ID NO: 359332 - DNA, 1998 bp, Homo sapiens
ggaagtcggctaggtacgaggctgggtggttacgtcacttcctcctaacccatctgctgctagagaaactaaaggaatcagccccatcaaggatagtaaatgtgtcttccctcgcacatcacctgggaaggatccacttccataacctgcagggcgagaaattctacaatgcaggcctggcctactgtcacagcaagctagccaacatcctcttcacccaggaactggcccggagactaaaaggctctggcgttacgacgtattctgtacaccctggcacagtccaatctgaactggttcggcactcatctttcatgagatggatgtggtggcttttctcctttttcatcaagactcctcagcagggagcccagaccagcctgcactgtgccttaacagaaggtcttgagattctaagtgggaatcatttcagtgactgtcatgtggcatgggtctctgcccaagctcgtaatgagactatagcaaggcggctgtgggacgtcagttgtgacctgctgggcctcccaatagactaacaggcagtgccagttggacccaagagaagactgcagcagactacacagtacttcttgtcaaaatgattctccttcaaggttttcaaaacctttagcacaaagagagcaaaaccttccagccttgcctgcttggtgtccagttaaaactcagtgtactgccagattcgtctaaatgtctgtcatgtccagatttactttgcttctgttactgccagagttactagagatatcataataggataagaagaccctcatatgacctgcacagctcattttccttctgaaagaaactactacctaggagaatctaagctatagcagggatgatttatgcaaatttgaactagcttctttgttcacaattcagttcctcccaaccaaccagtcttcacttcaagagggccacactgcaacctcagcttaacatgaataacaaagactggctcaggagcagggcttgcccaggcatggtggatcaccggaggtcagtagttcaagaccagcctggccaacatggtgaaaccccacctctactaaaaattgtgtatatctttgtgtgtcttcctgtttatgtgtgccaagggagtattttcacaaagttcaaaacagccacaataatcagagatggagcaaaccagtgccatccagtctttatgcaaatgaaatgctgcaaagggaagcagattctgtatatgttggtaactacccaccaagagcacatgggtagcagggaagaagtaaaaaaagagaaggagaatactggaagataatgcacaaaatgaagggactagttaaggattaactagccctttaaggattaactagttaaggattaatagcaaaagatattaaatatgctaacatagctatggaggaattgagggcaagcacccaggactgatgaggtcttaacaaaaaccagtgtggcaaaaaaaaaaaaaaaaaaaaaaaaaaaaaatcctaaaaacaaacaaacaaaaaaaacaattcttcattcagaaaaattatcttagggactgatattggtaattatggtcaatttaataatattttggggcatttccttacattgtcttgacaagattaaaatgtctgtgccaaaattttgtattttatttggagacttcttatcaaaagtaatgctgccaaaggaagtctaaggaattagtagtgttcccatcacttgtttggagtgtgctattctaaaagattttgatttcctggaatgacaattatattttaactttggtgggggaaagagttataggaccacagtcttcacttctgatacttgtaaattaatcttttattgcacttgttttgaccattaagctatatgtttagaaatggtcattttacggaaaaattagaaaaattctgataatagtgcagaataaatgaattaatgttttacttaatttatattgaactgtcaatgacaaataaaaattctttttgatta

SEQ ID NO: 359333 - DNA, 2436 bp, Homo sapiens
agagagaagccatagtcggcgagcaacgctggagcatcccgctctggtgccgctgcagccggcagagatggttgagctcatgttcccgctgttgctcctccttctgcccttccttctgtatatggctgcgccccaaatcaggaaaatgctgtccagtggggtgtgtacatcaactgttcagcttcctgggaaagtagttgtggtcacaggagctaatacaggtatcgggaaggagacagccaaagagctggctcagagaggagctcgagtatatttagcttgccgggatgtggaaaagggggaattggtggccaaagagatccagaccacgacagggaaccagcaggtgttggtgcggaaactggacctgtctgatactaagtctattcgagcttttgctaagggcttcttagctgaggaaaagcacctccacgttttgatcaacaatgcaggagtgatgatgtgtccgtactcgaagacagcagatggctttgagatgcacataggagtcaaccacttgggtcacttcctcctaacccatctgctgctagagaaactaaaggaatcagccccatcaaggatagtaaatgtgtcttccctcgcacatcacctgggaaggatccacttccataacctgcagggcgagaaattctacaatgcaggcctggcctactgtcacagcaagctagccaacatcctcttcacccaggaactggcccggagactaaaaggctctggcgttacgacgtattctgtacaccctggcacagtccaatctgaactggttcggcactcatctttcatgagatggatgtggtggcttttctcctttttcatcaagactcctcagcagggagcccagaccagcctgcactgtgccttaacagaaggtcttgagattctaagtgggaatcatttcagtgactgtcatgtggcatgggtctctgcccaagctcgtaatgagactatagcaaggcggctgtgggacgtcagttgtgacctgctgggcctcccaatagactaacaggcagtgccagttggacccaagagaagactgcagcagactacacagtacttcttgtcaaaatgattctccttcaaggttttcaaaacctttagcacaaagagagcaaaaccttccagccttgcctgcttggtgtccagttaaaactcagtgtactgccagattcgtctaaatgtctgtcatgtccagatttactttgcttctgttactgccagagttactagagatatcataataggataagaagaccctcatatgacctgcacagctcattttccttctgaaagaaactactacctaggagaatctaagctatagcagggatgatttatgcaaatttgaactagcttctttgttcacaattcagttcctcccaaccaaccagtcttcacttcaagagggccacactgcaacctcagcttaacatgaataacaaagactggctcaggagcagggcttgcccaggcatggtggatcaccggaggtcagtagttcaagaccagcctggccaacatggtgaaaccccacctctactaaaaattgtgtatatctttgtgtgtcttcctgtttatgtgtgccaagggagtattttcacaaagttcaaaacagccacaataatcagagatggagcaaaccagtgccatccagtctttatgcaaatgaaatgctgcaaagggaagcagattctgtatatgttggtaactacccaccaagagcacatgggtagcagggaagaagtaaaaaaagagaaggagaatactggaagataatgcacaaaatgaagggactagttaaggattaactagcctaacatagctatggaggaattgagggcaagcacccaggactgatgaggtcttaacaaaaaccagtgtggcaaaaaaaaaaaaaaaaaaaaaaaaaaaaaatcctaaaaacaaacaaacaaaaaaaacaattcttcattcagaaaaattatcttagggactgatattggtaattatggtcaatttaataatattttggggcatttccttacattgtcttgacaagattaaaatgtctgtgccaaaattttgtattttatttggagacttcttatcaaaagtaatgctgccaaaggaagtctaaggaattagtagtgttcccatcacttgtttggagtgtgctattctaaaagattttgatttcctggaatgacaattatattttaactttggtgggggaaagagttataggaccacagtcttcacttctgatacttgtaaattaatcttttattgcacttgttttgaccattaagctatatgtttagaaatggtcattttacggaaaaattagaaaaattctgataatagtgcagaataaatgaattaatgttttacttaatttatattgaactgtcaatgacaaataaaaattctttttgatta

SEQ ID NO: 359334 - DNA, 2178 bp, Homo sapiens
agagagaagccatagtcggcgagcaacgctggagcatcccgctctggtgccgctgcagccggcagagatggttgagctcatgttcccgctgttgctcctccttctgcccttccttctgtatatggctgcgccccaaatcaggaaaatgctgtccagtggggtgtgtacatcaactgttcagcttcctgggaaagtagttgtggtcacaggagctaatacaggtatcgggaaggagacagccaaagagctggctcagagaggagctcgagtatatttagcttgccgggatgtggaaaagggggaattggtggccaaagagatccagaccacgacagggaaccagcaggtgttggtgcggaaactggacctgtctgatactaagtctattcgagcttttgctaagggcttcttagctgaggaaaagcacctccacgttttgatcaacaatgcaggagtgatgatgtgtccgtactcgaagacagcagatggctttcatgagatggatgtggtggcttttctcctttttcatcaagactcctcagcagggagcccagaccagcctgcactgtgccttaacagaaggtcttgagattctaagtgggaatcatttcagtgactgtcatgtggcatgggtctctgcccaagctcgtaatgagactatagcaaggcggctgtgggacgtcagttgtgacctgctgggcctcccaatagactaacaggcagtgccagttggacccaagagaagactgcagcagactacacagtacttcttgtcaaaatgattctccttcaaggttttcaaaacctttagcacaaagagagcaaaaccttccagccttgcctgcttggtgtccagttaaaactcagtgtactgccagattcgtctaaatgtctgtcatgtccagatttactttgcttctgttactgccagagttactagagatatcataataggataagaagaccctcatatgacctgcacagctcattttccttctgaaagaaactactacctaggagaatctaagctatagcagggatgatttatgcaaatttgaactagcttctttgttcacaattcagttcctcccaaccaaccagtcttcacttcaagagggccacactgcaacctcagcttaacatgaataacaaagactggctcaggagcagggcttgcccaggcatggtggatcaccggaggtcagtagttcaagaccagcctggccaacatggtgaaaccccacctctactaaaaattgtgtatatctttgtgtgtcttcctgtttatgtgtgccaagggagtattttcacaaagttcaaaacagccacaataatcagagatggagcaaaccagtgccatccagtctttatgcaaatgaaatgctgcaaagggaagcagattctgtatatgttggtaactacccaccaagagcacatgggtagcagggaagaagtaaaaaaagagaaggagaatactggaagataatgcacaaaatgaagggactagttaaggattaactagccctttaaggattaactagttaaggattaatagcaaaagatattaaatatgctaacatagctatggaggaattgagggcaagcacccaggactgatgaggtcttaacaaaaaccagtgtggcaaaaaaaaaaaaaaaaaaaaaaaaaaaaaatcctaaaaacaaacaaacaaaaaaaacaattcttcattcagaaaaattatcttagggactgatattggtaattatggtcaatttaataatattttggggcatttccttacattgtcttgacaagattaaaatgtctgtgccaaaattttgtattttatttggagacttcttatcaaaagtaatgctgccaaaggaagtctaaggaattagtagtgttcccatcacttgtttggagtgtgctattctaaaagattttgatttcctggaatgacaattatattttaactttggtgggggaaagagttataggaccacagtcttcacttctgatacttgtaaattaatcttttattgcacttgttttgaccattaagctatatgtttagaaatggtcattttacggaaaaattagaaaaattctgataatagtgcagaataaatgaattaatgttttacttaatttatattgaactgtcaatgacaaataaaaattctttttgatta

SEQ ID NO: 359335 - DNA, 1969 bp, Homo sapiens
agagagaagccatagtcggcgagcaacgctggagcatcccgctctggtgccgctgcagccggcagagatggttgagctcatgttcccgctgttgctcctccttctgcccttccttctgtatatggctgcgccccaaatcaggaaaatgctgtccagtggggtgtgtacatcaactgttcagcttcctgggaaagtagttgtggtcacaggagctaatacaggtatcgggaaggagacagccaaagagctggctcagagaggagctcgagtatatttagcttgccgggatgtggaaaagggggaattggtggccaaagagatccagaccacgacagggaaccagcaggtgttggtgcggaaactggacctgtctgatactaagtctattcgagcttttgctaagggcttcttagctgaggaaaagcacctccacgttttgatcaacaatgcaggagtgatgatgtgtccgtactcgaagacagcagatggctttgagatgcacataggagtcaaccacttgggtcacttcctcctaacccatctgctgctagagaaactaaaggaatcagccccatcaaggatagtaaatgtgtcttccctcgcacatcacctgggaaggatccacttccataacctgcagggcgagaaattctacaatgcaggcctggcctactgtcacagcaagctagccaacatcctcttcacccaggaactggcccggagactaaaaggctctggcgttacgacgtattctgtacaccctggcacagtccaatctgaactggttcggcactcatctttcatgagatggatgtggtggcttttctcctttttcatcaagactcctcagcagggagcccagaccagcctgcactgtgccttaacagaaggtcttgagattctaagtgggaatcatttcagtgactgtcatgtggcatgggtctctgcccaagctcgtaatgagactatagcaaggcggctgtgggacgtcagttgtgacctgctgggcctcccaatagactaacaggcagtgccagttggacccaagagaagactgcagcagactacacagtacttcttgtcaaaatgattctccttcaaggttttcaaaacctttagcacaaagagagcaaaaccttccagccttgcctgcttggtgtccagttaaaactcagtgtactgccagattcgtctaaatgtctgtcatgtccagatttactttgcttctgttactgccagagttactagagatatcataataggataagaagaccctcatatgacctgcacagctcattttccttctgaaagaaactactacctaggagaatctaagctatagcagggatgatttatgcaaatttgaactagcttctttgttcacaattcagttcctcccaaccaaccagtcttcacttcaagagggccacactgcaacctcagcttaacatgaataacaaagactggctcaggagcagggcttgcccaggcatggtggatcaccggaggtcagtagttcaagaccagcctggccaacatggtgaaaccccacctctactaaaaattgtgtatatctttgtgtgtcttcctgtttatgtgtgccaagggagtattttcacaaagttcaaaacagccacaataatcagagatggagcaaaccagtgccatccagtctttatgcaaatgaaatgctgcaaagggaagcagattctgtatatgttggtaactacccaccaagagcacatgggtagcagggaagaagtaaaaaaagagaaggagaatactggaagataatgcacaaaatgaagggactagttaaggattaactagccctttaaggattaactagttaaggattaatagcaaaagatattaaatatgctaacatagctatggaggaattgagggcaagcacccacactggtttttgttaagacctcatcagtcctgggtcgacgcggccagcaat

SEQ ID NO: 359336 - DNA, 1808 bp, Homo sapiens
agagagaagccatagtcggcgagcaacgctggagcatcccgctctggtgccgctgcagccggcagagatggttgagctcatgttcccgctgttgctcctccttctgcccttccttctgtatatggctgcgccccaaatcaggaaaatgctgtccagtggggtgtgtacatcaactgttcagcttcctgggaaagtagttgtggtcacaggagctaatacaggtatcgggaaggagacagccaaagagctggctcagagaggagctcgagtatatttagcttgccgggatgtggaaaagggggaattggtggccaaagagatccagaccacgacagggaaccagcaggtgttggtgccagttggacccaagagaagactgcagcagactacacagtacttcttgtcaaaatgattctccttcaaggttttcaaaacctttagcacaaagagagcaaaaccttccagccttgcctgcttggtgtccagttaaaactcagtgtactgccagattcgtctaaatgtctgtcatgtccagatttactttgcttctgttactgccagagttactagagatatcataataggataagaagaccctcatatgacctgcacagctcattttccttctgaaagaaactactacctaggagaatctaagctatagcagggatgatttatgcaaatttgaactagcttctttgttcacaattcagttcctcccaaccaaccagtcttcacttcaagagggccacactgcaacctcagcttaacatgaataacaaagactggctcaggagcagggcttgcccaggcatggtggatcaccggaggtcagtagttcaagaccagcctggccaacatggtgaaaccccacctctactaaaaattgtgtatatctttgtgtgtcttcctgtttatgtgtgccaagggagtattttcacaaagttcaaaacagccacaataatcagagatggagcaaaccagtgccatccagtctttatgcaaatgaaatgctgcaaagggaagcagattctgtatatgttggtaactacccaccaagagcacatgggtagcagggaagaagtaaaaaaagagaaggagaatactggaagataatgcacaaaatgaagggactagttaaggattaactagccctttaaggattaactagttaaggattaatagcaaaagatattaaatatgctaacatagctatggaggaattgagggcaagcacccaggactgatgaggtcttaacaaaaaccagtgtggcaaaaaaaaaaaaaaaaaaaaaaaaaaaaaatcctaaaaacaaacaaacaaaaaaaacaattcttcattcagaaaaattatcttagggactgatattggtaattatggtcaatttaataatattttggggcatttccttacattgtcttgacaagattaaaatgtctgtgccaaaattttgtattttatttggagacttcttatcaaaagtaatgctgccaaaggaagtctaaggaattagtagtgttcccatcacttgtttggagtgtgctattctaaaagattttgatttcctggaatgacaattatattttaactttggtgggggaaagagttataggaccacagtcttcacttctgatacttgtaaattaatcttttattgcacttgttttgaccattaagctatatgtttagaaatggtcattttacggaaaaattagaaaaattctgataatagtgcagaataaatgaattaatgttttacttaatttatattgaactgtcaatgacaaataaaaattctttttgatta

SEQ ID NO: 359337 - DNA, 1680 bp, Homo sapiens
ggaagtcggctaggtacgaggctgggtggttaccggcagagatggttgagctcatgttcccgctgttgctcctccttctgcccttccttctgtatatggctgcgccccaaatcagtgactgtcatgtggcatgggtctctgcccaagctcgtaatgagactatagcaaggcggctgtgggacgtcagttgtgacctgctgggcctcccaatagactaacaggcagtgccagttggacccaagagaagactgcagcagactacacagtacttcttgtcaaaatgattctccttcaaggttttcaaaacctttagcacaaagagagcaaaaccttccagccttgcctgcttggtgtccagttaaaactcagtgtactgccagattcgtctaaatgtctgtcatgtccagatttactttgcttctgttactgccagagttactagagatatcataataggataagaagaccctcatatgacctgcacagctcattttccttctgaaagaaactactacctaggagaatctaagctatagcagggatgatttatgcaaatttgaactagcttctttgttcacaattcagttcctcccaaccaaccagtcttcacttcaagagggccacactgcaacctcagcttaacatgaataacaaagactggctcaggagcagggcttgcccaggcatggtggatcaccggaggtcagtagttcaagaccagcctggccaacatggtgaaaccccacctctactaaaaattgtgtatatctttgtgtgtcttcctgtttatgtgtgccaagggagtattttcacaaagttcaaaacagccacaataatcagagatggagcaaaccagtgccatccagtctttatgcaaatgaaatgctgcaaagggaagcagattctgtatatgttggtaactacccaccaagagcacatgggtagcagggaagaagtaaaaaaagagaaggagaatactggaagataatgcacaaaatgaagggactagttaaggattaactagccctttaaggattaactagttaaggattaatagcaaaagatattaaatatgctaacatagctatggaggaattgagggcaagcacccaggactgatgaggtcttaacaaaaaccagtgtggcaaaaaaaaaaaaaaaaaaaaaaaaaaaaaatcctaaaaacaaacaaacaaaaaaaacaattcttcattcagaaaaattatcttagggactgatattggtaattatggtcaatttaataatattttggggcatttccttacattgtcttgacaagattaaaatgtctgtgccaaaattttgtattttatttggagacttcttatcaaaagtaatgctgccaaaggaagtctaaggaattagtagtgttcccatcacttgtttggagtgtgctattctaaaagattttgatttcctggaatgacaattatattttaactttggtgggggaaagagttataggaccacagtcttcacttctgatacttgtaaattaatcttttattgcacttgttttgaccattaagctatatgtttagaaatggtcattttacggaaaaattagaaaaattctgataatagtgcagaataaatgaattaatgttttacttaatttatattgaactgtcaatgacaaataaaaattctttttgatta

SEQ ID NO: 359338 - DNA, 1619 bp, Homo sapiens
ggatggtgtgttttacccgcgcgtttgtttcagttacaaaaaaactttatcgaatgactgtcatgtggcatgggtctctgcccaagctcgtaatgagactatagcaaggcggctgtgggacgtcagttgtgacctgctgggcctcccaatagactaacaggcagtgccagttggacccaagagaagactgcagcagactacacagtacttcttgtcaaaatgattctccttcaaggttttcaaaacctttagcacaaagagagcaaaaccttccagccttgcctgcttggtgtccagttaaaactcagtgtactgccagattcgtctaaatgtctgtcatgtccagatttactttgcttctgttactgccagagttactagagatatcataataggataagaagaccctcatatgacctgcacagctcattttccttctgaaagaaactactacctaggagaatctaagctatagcagggatgatttatgcaaatttgaactagcttctttgttcacaattcagttcctcccaaccaaccagtcttcacttcaagagggccacactgcaacctcagcttaacatgaataacaaagactggctcaggagcagggcttgcccaggcatggtggatcaccggaggtcagtagttcaagaccagcctggccaacatggtgaaaccccacctctactaaaaattgtgtatatctttgtgtgtcttcctgtttatgtgtgccaagggagtattttcacaaagttcaaaacagccacaataatcagagatggagcaaaccagtgccatccagtctttatgcaaatgaaatgctgcaaagggaagcagattctgtatatgttggtaactacccaccaagagcacatgggtagcagggaagaagtaaaaaaagagaaggagaatactggaagataatgcacaaaatgaagggactagttaaggattaactagccctttaaggattaactagttaaggattaatagcaaaagatattaaatatgctaacatagctatggaggaattgagggcaagcacccaggactgatgaggtcttaacaaaaaccagtgtggcaaaaaaaaaaaaaaaaaaaaaaaaaaaaaatcctaaaaacaaacaaacaaaaaaaacaattcttcattcagaaaaattatcttagggactgatattggtaattatggtcaatttaataatattttggggcatttccttacattgtcttgacaagattaaaatgtctgtgccaaaattttgtattttatttggagacttcttatcaaaagtaatgctgccaaaggaagtctaaggaattagtagtgttcccatcacttgtttggagtgtgctattctaaaagattttgatttcctggaatgacaattatattttaactttggtgggggaaagagttataggaccacagtcttcacttctgatacttgtaaattaatcttttattgcacttgttttgaccattaagctatatgtttagaaatggtcattttacggaaaaattagaaaaattctgataatagtgcagaataaatgaattaatgttttacttaatttatattgaactgtcaatgacaaataaaaattctttttgatta

SEQ ID NO: 359339 - DNA, 1795 bp, Homo sapiens
tcaaacaaagcattctgatgagaggtggtctagcgaggagatctaaaatggtaattacattttctctggctaaggactggagaatgaagagataaggacaaacactggccctgtgaagtacatggagaacatgtgatccctagttgtttttatgtcatattccttatccctggcagatggcagacttcattcttaacactgtgcttcatacctttctctttaccttccagtgactgtcatgtggcatgggtctctgcccaagctcgtaatgagactatagcaaggcggctgtgggacgtcagttgtgacctgctgggcctcccaatagactaacaggcagtgccagttggacccaagagaagactgcagcagactacacagtacttcttgtcaaaatgattctccttcaaggttttcaaaacctttagcacaaagagagcaaaaccttccagccttgcctgcttggtgtccagttaaaactcagtgtactgccagattcgtctaaatgtctgtcatgtccagatttactttgcttctgttactgccagagttactagagatatcataataggataagaagaccctcatatgacctgcacagctcattttccttctgaaagaaactactacctaggagaatctaagctatagcagggatgatttatgcaaatttgaactagcttctttgttcacaattcagttcctcccaaccaaccagtcttcacttcaagagggccacactgcaacctcagcttaacatgaataacaaagactggctcaggagcagggcttgcccaggcatggtggatcaccggaggtcagtagttcaagaccagcctggccaacatggtgaaaccccacctctactaaaaattgtgtatatctttgtgtgtcttcctgtttatgtgtgccaagggagtattttcacaaagttcaaaacagccacaataatcagagatggagcaaaccagtgccatccagtctttatgcaaatgaaatgctgcaaagggaagcagattctgtatatgttggtaactacccaccaagagcacatgggtagcagggaagaagtaaaaaaagagaaggagaatactggaagataatgcacaaaatgaagggactagttaaggattaactagccctttaaggattaactagttaaggattaatagcaaaagatattaaatatgctaacatagctatggaggaattgagggcaagcacccaggactgatgaggtcttaacaaaaaccagtgtggcaaaaaaaaaaaaaaaaaaaaaaaaaaaaaatcctaaaaacaaacaaacaaaaaaaacaattcttcattcagaaaaattatcttagggactgatattggtaattatggtcaatttaataatattttggggcatttccttacattgtcttgacaagattaaaatgtctgtgccaaaattttgtattttatttggagacttcttatcaaaagtaatgctgccaaaggaagtctaaggaattagtagtgttcccatcacttgtttggagtgtgctattctaaaagattttgatttcctggaatgacaattatattttaactttggtgggggaaagagttataggaccacagtcttcacttctgatacttgtaaattaatcttttattgcacttgttttgaccattaagctatatgtttagaaatggtcattttacggaaaaattagaaaaattctgataatagtgcagaataaatgaattaatgttttacttaatttatattgaactgtcaatgacaaataaaaattctttttgatta

SEQ ID NO: 359340 - DNA, 1301 bp, Homo sapiens
actgcttcagccggccgccatgggaagggttttttgcgaaatccccccttttggccagaaaaccttatattaaccggaccaagaagaccctcatatgacctgcacagctcattttccttctgaaagaaactactacctaggagaatctaagctatagcagggatgatttatgcaaatttgaactagcttctttgttcacaattcagttcctcccaaccaaccagtcttcacttcaagagggccacactgcaacctcagcttaacatgaataacaaagactggctcaggagcagggcttgcccaggcatggtggatcaccggaggtcagtagttcaagaccagcctggccaacatggtgaaaccccacctctactaaaaattgtgtatatctttgtgtgtcttcctgtttatgtgtgccaagggagtattttcacaaagttcaaaacagccacaataatcagagatggagcaaaccagtgccatccagtctttatgcaaatgaaatgctgcaaagggaagcagattctgtatatgttggtaactacccaccaagagcacatgggtagcagggaagaagtaaaaaaagagaaggagaatactggaagataatgcacaaaatgaagggactagttaaggattaactagccctttaaggattaactagttaaggattaatagcaaaagatattaaatatgctaacatagctatggaggaattgagggcaagcacccaggactgatgaggtcttaacaaaaaccagtgtggcaaaaaaaaaaaaaaaaaaaaaaaaaaaaaatcctaaaaacaaacaaacaaaaaaaacaattcttcattcagaaaaattatcttagggactgatattggtaattatggtcaatttaataatattttggggcatttccttacattgtcttgacaagattaaaatgtctgtgccaaaattttgtattttatttggagacttcttatcaaaagtaatgctgccaaaggaagtctaaggaattagtagtgttcccatcacttgtttggagtgtgctattctaaaagattttgatttcctggaatgacaattatattttaactttggtgggggaaagagttataggaccacagtcttcacttctgatacttgtaaattaatcttttattgcacttgttttgaccattaagctatatgtttagaaatggtcattttacggaaaaattagaaaaattctgataatagtgcagaataaatgaattaatgttttacttaatttatattgaactgtcaatgacaaataaaaattctttttgatta

SEQ ID NO: 359341 - DNA, 1298 bp, Homo sapiens
agagagaagccatagtcggcgagcaacgctggagcatcccgctctggtgccgctgcagccggcagagatggttgagctcatgttcccgctgttgctcctccttctgcccttccttctgtatatggctgcgccccaaatcaggaaaatgctgtccagtggggtgtgtacatcaactgttcagcttcctgggaaagtagttgtggtcacaggagctaatacaggtatcgggaaggagacagccaaagagctggctcagagaggagctcgagtatatttagcttgccgggatgtggaaaagggggaattggtggccaaagagatccagaccacgacagggaaccagcaggtgttggtgcggaaactggacctgtctgatactaagtctattcgagcttttgctaagggcttcttagctgaggaaaagcacctccacgttttgatcaacaatgcaggagtgatgatgtgtccgtactcgaagacagcagatggctttgagatgcacataggagtcaaccacttgggtcacttcctcctaacccatctgctgctagagaaactaaaggaatcagccccatcaaggatagtaaatgtgtcttccctcgcacatcacctgggaaggatccacttccataacctgcagggcgagaaattctacaatgcaggcctggcctactgtcacagcaagctagccaacatcctcttcacccaggaactggcccggagactaaaaggctctggcgttacgacgtattctgtacaccctggcacagtccaatctgaactggttcggcactcatctttcatgagatggatgtggtggcttttctcctttttcatcaagactcctcagcagggagcccagaccagcctgcactgtgccttaacagaaggtcttgagattctaagtgggaatcatttcagtgactgtcatgtggcatgggtctctgcccaagctcgtaatgagactatagcaaggcggctgtgggacgtcagttgtgacctgctgggcctcccaatagactaacaggcagtgccagttggacccaagagaagactgcagcagactacacagtacttcttgtcaaaatgattctccttcaaggttttcaaaacctttagcacaaagagagcaaaaccttccagccttgcctgcttggtgtccagttaaaactcagtgtactgccagattcgtctaaatgtctgtcatgtccagatttactttgcttctgttactgccagagttactagagatatcataataggattgagggtcttcttatcctattatgtcgacgcgg

SEQ ID NO: 359342 - DNA, 1024 bp, Homo sapiens
agagagaagccatagtcggcgagcaacgctggagcatcccgctctggtgccgctgcagccggcagagatggttgagctcatgttcccgctgttgctcctccttctgcccttccttctgtatatggctgcgccccaaatcaggaaaatgctgtccagtggggtgtgtacatcaactgttcagcttcctgggaaagtagttgtggtcacaggagctaatacaggtatcgggaaggagacagccaaagagctggctcagagaggagctcgagtatatttagcttgccgggatgtggaaaagggggaattggtggccaaagagatccagaccacgacagggaaccagcaggtgttggtgcggaaactggacctgtctgatactaagtctattcgagcttttgctaagggcttcttagctgaggaaaagcacctccacgttttgatcaacaatgcaggagtgatgatgtgtccgtactcgaagacagcagatggctttgagatgcacataggagtcaaccacttgggtcacttcctcctaacccatctgctgctagagaaactaaaggaatcagccccatcaaggatagtaaatgtgtcttccctcgcacatcacctgggaaggatccacttccataacctgcagggcgagaaattctacaatgcaggcctggcctactgtcacagcaagctagccaacatcctcttcacccaggaactggcccggagactaaaaggctctggcgttacgacgtattctgtacaccctggcacagtccaatctgaactggttcggcactcatctttcatgagatggatgtggtggcttttctcctttttcatcaagactcctcagcagggagcccagaccagcctgcactgtgccttaacagaaggtcttgagattctaagtgggaatcatttcagctggcagagatggaggaggagctacgttatgcacccctgtctttccgaaaccccatgatgtctaagcttcgaaactaccggaaggaccttgctaaactccatc

SEQ ID NO: 359343 - DNA, 983 bp, Homo sapiens
agagagaagccatagtcggcgagcaacgctggagcatcccgctctggtgccgctgcagccggcagagatggttgagctcatgttcccgctgttgctcctccttctgcccttccttctgtatatggctgcgccccaaatcaggaaaatgctgtccagtggggtgtgtacatcaactgttcagcttcctgggaaagtagttgtggtcacaggagctaatacaggtatcgggaaggagacagccaaagagctggctcagagaggagctcgagtatatttagcttgccgggatgtggaaaagggggaattggtggccaaagagatccagaccacgacagggaaccagcaggtgttggtgcggaaactggacctgtctgatactaagtctattcgagcttttgctaagggcttcttagctgaggaaaagcacctccacgttttgatcaacaatgcaggagtgatgatgtgtccgtactcgaagacagcagatggctttgagatgcacataggagtcaaccacttgggtcacttcctcctaacccatctgctgctagagaaactaaaggaatcagccccatcaaggatagtaaatgtgtcttccctcgcacatcacctgggaaggatccacttccataacctgcagggcgagaaattctacaatgcaggcctggcctactgtcacagcaagctagccaacatcctcttcacccaggaactggcccggagactaaaaggctctggcgttacgacgtattctgtacaccctggcacagtccaatctgaactggttcggcactcatctttcatgagatggatgtggtggcttttctcctttttcatcaagactcctcagcagggagcccagaccagcctgcactgtgccttaacagaaggtcttgagattctaagtgggaatcatttcagtccagttttctttattcttttttggattcctaattctattgttttacattaaaaagaattta

SEQ ID NO: 359344 - DNA, 968 bp, Homo sapiens
  misc_feature (22)..(23): n is a, c, g, or t
tactactactaaattcgcggcnngtcgaccccacctctactaaaaattgtgtatatctttgtgtgtcttcctgtttatgtgtgccaagggagtattttcacaaagttcaaaacagccacaataatcagagatggagcaaaccagtgccatccagtctttatgcaaatgaaatgctgcaaagggaagcagattctgtatatgttggtaactacccaccaagagcacatgggtagcagggaagaagtaaaaaaagagaaggagaatactggaagataatgcacaaaatgaagggactagttaaggattaactagccctttaaggattaactagttaaggattaatagcaaaagatattaaatatgctaacatagctatggaggaattgagggcaagcacccaggactgatgaggtcttaacaaaaaccagtgtggcaaaaaaaaaaaaaaaaaaaaaaaaaaaaaatcctaaaaacaaacaaacaaaaaaaacaattcttcattcagaaaaattatcttagggactgatattggtaattatggtcaatttaataatattttggggcatttccttacattgtcttgacaagattaaaatgtctgtgccaaaattttgtattttatttggagacttcttatcaaaagtaatgctgccaaaggaagtctaaggaattagtagtgttcccatcacttgtttggagtgtgctattctaaaagattttgatttcctggaatgacaattatattttaactttggtgggggaaagagttataggaccacagtcttcacttctgatacttgtaaattaatcttttattgcacttgttttgaccattaagctatatgtttagaaatggtcattttacggaaaaattagaaaaattctgataatagtgcagaataaatgaattaatgttttacttaatttatattgaactgtcaatgacaaataaaaattctttttgatta

SEQ ID NO: 359345 - DNA, 2547 bp, Homo sapiens
agagagaagccatagtcggcgagcaacgctggagcatcccgctctggtgccgctgcagccggcagagatggttgagctcatgttcccgctgttgctcctccttctgcccttccttctgtatatggctgcgccccaaatcaggaaaatgctgtccagtggggtgtgtacatcaactgttcagcttcctgggaaagtagttgtggtcacaggagctaatacaggtatcgggaaggagacagccaaagagctggctcagagaggagctcgagtatatttagcttgccgggatgtggaaaagggggaattggtggccaaagagatccagaccacgacagggaaccagcaggtgttggtgcggaaactggacctgtctgatactaagtctattcgagcttttgctaagggcttcttagctgaggaaaagcacctccacgttttgatcaacaatgcaggagtgatgatgtgtccgtactcgaagacagcagatggctttgagatgcacataggagtcaaccacttgggtcacttcctcctaacccatctgctgctagagaaactaaaggaatcagccccatcaaggatagtaaatgtgtcttccctcgcacatcacctgggaaggatccacttccataacctgcagggcgagaaattctacaatgcaggcctggcctactgtcacagcaagctagccaacatcctcttcacccaggaactggcccggagactaaaaggctctggcgttacgacgtattctgtacaccctggcacagtccaatctgaactggttcggcactcatctttcatgagatggatgtggtggcttttctcctttttcatcaagactcctcagcagggagcccagaccagcctgcactgtgccttaacagaaggtcttgagattctaagtgggaatcatttcagtgactgtcatgtggcatgggtctctgcccaagctcgtaatgagactatagcaaggcggctgtgggacgtcagttgtgacctgctgggcctcccaatagactaacaggcagtgccagttggacccaagagaagactgcagcagactacacagtacttcttgtcaaaatgattctccttcaaggttttcaaaacctttagcacaaagagagcaaaaccttccagccttgcctgcttggtgtccagttaaaactcagtgtactgccagattcgtctaaatgtctgtcatgtccagatttactttgcttctgttactgccagagttactagagatatcataataggataagaagaccctcatatgacctgcacagctcattttccttctgaaagaaactactacctaggagaatctaagctatagcagggatgatttatgcaaatttgaactagcttctttgttcacaattcagttcctcccaaccaaccagtcttcacttcaagagggccacactgcaacctcagcttaacatgaataacaaagactggctcaggagcagggcttgcccaggcatggtggatcaccggaggtcagtagttcaagaccagcctggccaacatggtgaaaccccacctctactaaaaattgtgtatatctttgtgtgtcttcctgtttatgtgtgccaagggagtattttcacaaagttcaaaacagccacaataatcagagatggagcaaaccagtgccatccagtctttatgcaaatgaaatgctgcaaagggaagcagattctgtatatgttggtaactacccaccaagagcacatgggtagcagggaagaagtaaaaaaagagaaggagaatactggaagataatgcacaaaatgaagggactagttaaggattaactagccctttaaggattaactagttaaggattaatagcaaaagatattaaatatgctaacatagctatggaggaattgagggcaagcacccaggactgatgaggtcttaacaaaaaccagtgtggcaaaaaaaaaaaaaaaaaaaaaaaaaaaaaatcctaaaaacaaacaaacaaaaaaaacaattcttcattcagaaaaattatcttagggactgatattggtaattatggtcaatttaataatattttggggcatttccttacattgtcttgacaagattaaaatgtctgtgccaaaattttgtattttatttggagacttcttatcaaaagtaatgctgccaaaggaagtctaaggaattagtagtgttcccatcacttgtttggagtgtgctattctaaaagattttgatttcctggaatgacaattatattttaactttggtgggggaaagagttataggaccacagtcttcacttctgatacttgtaaattaatcttttattgcacttgttttgaccattaagctatatgtttagaaatggtcattttacggaaaaattagaaaaattctgataatagtgcagaataaatgaattaatgttttacttaatttatattgaactgtcaatgacaaataaaaattctttttgattattttttgttttcatttaccagaataaaaactaagaattaaaagtttgattacagtcaaaag

SEQ ID NO: 359346 - DNA, 1143 bp, Homo sapiens
  misc_feature (298)..(298): n is a, c, g, or t
gcttaatataaaactcagatgaaacaatcgtgaggctgggaagaatgggacagttgaaacaataaatgcttgtcatctcagaagataagcattaaagatggagataaagaaaaattcatgagacagaagatctaggcaatgatttagaggaaacctcctcccaaaaaccccagaggaagaatatgacctgtgtttcaaattttgcctttctgaactatttaaaattatgtgtatgtttttgctttgtattttaaaagtaaagctgctgtcctcaagaaaaaaaaaaaaaaaaaaaaanaaaaaacaaaaaaaaaaaaaaaaaaaaaacaaaaaaaaaaaaaaaaacacagagaaagaaaaaaaaacaagacacaaagacgaggaaagaagagcgacgagaacgagaggacaagaagacgctgaaccacagaccggggcggggcgtgcccgtgctgccgcccggcgcgcgggggaaaaggaataacgagaagaacataaagatccagacacgaggaggagaagaaagtggggtgaagagacgaggagaccgaaagaccagagcgtatagcagtcgcgagcaggaaagacagaaaaaatgaaaacgaaacgatcttgatcagaacgagcataactaggagagatgtcggacaaaaaaagaaagagagggggtaaagttaaagaatatacaatgaaatagagagaaagaagagaagaagaaaagaaagaagtaagacagagcacaggagtcgcccgcccccccccccccgccccgcgcgactataaccagagaggaggcgaccaccaataagggaagaaaggagagacaacgcaaaacatgcaggggacgaagcggagcgaagaagaaaggagaaggagaagccgaagacagagaactagcggtcgaaggcaaggggcacacgcaacggccccacagggaggcacacagcagcgcaaagaaacggaaagagcgcgcagaggaagagaacaggagaaggagaggagacgcagaagacgagaggagaagaaacaacgacccaaagaagccaacaaacagaagcaaggcaaagaaaggacaaacaaagcgcaagagacacaaacagcgggggagggaaaaagccacgagggaacacacgcaaacaccga

SEQ ID NO: 359347 - DNA, 2874 bp, Homo sapiens
  misc_feature (2001)..(2001): n is a, c, g, or t
agagagaagccatagtcggcgagcaacgctggagcatcccgctctggtgccgctgcagccggcagagatggttgagctcatgttcccgctgttgctcctccttctgcccttccttctgtatatggctgcgccccaaatcaggaaaatgctgtccagtggggtgtgtacatcaactgttcagcttcctgggaaagtagttgtggtcacaggagctaatacaggtatcgggaaggagacagccaaagagctggctcagagaggagctcgagtatatttagcttgccgggatgtggaaaagggggaattggtggccaaagagatccagaccacgacagggaaccagcaggtgttggtgcggaaactggacctgtctgatactaagtctattcgagcttttgctaagggcttcttagctgaggaaaagcacctccacgttttgatcaacaatgcaggagtgatgatgtgtccgtactcgaagacagcagatggctttgagatgcacataggagtcaaccacttgggtcacttcctcctaacccatctgctgctagagaaactaaaggaatcagccccatcaaggatagtaaatgtgtcttccctcgcacatcacctgggaaggatccacttccataacctgcagggcgagaaattctacaatgcaggcctggcctactgtcacagcaagctagccaacatcctcttcacccaggaactggcccggagactaaaaggctctggcgttacgacgtattctgtacaccctggcacagtccaatctgaactggttcggcactcatctttcatgagatggatgtggtggcttttctcctttttcatcaagactcctcagcagggagcccagaccagcctgcactgtgccttaacagaaggtcttgagattctaagtgggaatcatttcagtgactgtcatgtggcatgggtctctgcccaagctcgtaatgagactatagcaaggcggctgtgggacgtcagttgtgacctgctgggcctcccaatagactaacaggcagtgccagttggacccaagagaagactgcagcagactacacagtacttcttgtcaaaatgattctccttcaaggttttcaaaacctttagcacaaagagagcaaaaccttccagccttgcctgcttggtgtccagttaaaactcagtgtactgccagattcgtctaaatgtctgtcatgtccagatttactttgcttctgttactgccagagttactagagatatcataataggataagaagaccctcatatgacctgcacagctcattttccttctgaaagaaactactacctaggagaatctaagctatagcagggatgatttatgcaaatttgaactagcttctttgttcacaattcagttcctcccaaccaaccagtcttcacttcaagagggccacactgcaacctcagcttaacatgaataacaaagactggctcaggagcagggcttgcccaggcatggtggatcaccggaggtcagtagttcaagaccagcctggccaacatggtgaaaccccacctctactaaaaattgtgtatatctttgtgtgtcttcctgtttatgtgtgccaagggagtattttcacaaagttcaaaacagccacaataatcagagatggagcaaaccagtgccatccagtctttatgcaaatgaaatgctgcaaagggaagcagattctgtatatgttggtaactacccaccaagagcacatgggtagcagggaagaagtaaaaaaagagaaggagaatactggaagataatgcacaaaatgaagggactagttaaggattaactagccctttaaggattaactagttaaggattaatagcaaaagatattaaatatgctaacatagctatggaggaattgagggcaagcacccaggactgatgaggtcttaacaaaaaccagtgtggcaaaaaaaaaaaaaaaaaaaaaaaaaaaaaaaaaaaaaaaaaaaaaaaanaaaaaatttttttttaaaaaaatttaatcttaggggaagtggattagtgggtaaatttggtggtcaagctaataatataattatggggcgggcatttcccttataatgtggttttgggacaagaattaaaatggttgcgtgcgcccaaaattgtggttattatcattggggaagcactacttttatcaaagagttaggggtggcccaagggaaggttcatgaggaaattaagagggtgtcccatacacttgttgggggaagtggtggccatttcctaaaaacaaaattggaattccgcgtgggaagtggaaccaatttattttataccactgtgcggcgggggggaaagagaaagtttagtgaggaacccagcgaatttaacattcgggaaatacggtgaaacaattaactccttaaagtcgcaccgtgttggggacccattaagcgcctatttgtttttacaaaagtgggctccttttagggcaacatttcaaaaaactgggatagttgcgcaccaacaaagggcaataaagtgtaaacctacctttaatttggaacggttgtcagggacacatataccatcccctttgggctcacacccacaaaacccacaccacacaacagaggggggggcacagaaaattgccgcagggcgcagatctcgtgcccgttttttggcaccgggcccaaaggagccatcaaccaagcgccgcgcggtaaaccacccggacggcaaccgcgcgggttcgcggaagcacctcgcggtgacatcggcccacacgagacagccgagaaaatcacgtgaggtcccctctcgggatcgcgttataaccgaacacgccagggggagcagacacaccatcacagcagcac

SEQ ID NO: 359348 - DNA, 2826 bp, Homo sapiens
agagagaagccatagtcggcgagcaacgctggagcatcccgctctggtgccgctgcagccggcagagatggttgagctcatgttcccgctgttgctcctccttctgcccttccttctgtatatggctgcgccccaaatcaggaaaatgctgtccagtggggtgtgtacatcaactgttcagcttcctgggaaagtagttgtggtcacaggagctaatacaggtatcgggaaggagacagccaaagagctggctcagagaggcaagttcacctcctttcaattccctcctattactgctgttttacccctcacagtaatgatgattcattctcattgtttcttcccagttttggaattcaagaacacctaaggattccactgatttgctgatctgaaactagtactatgctctacatataatggacccttaatgaatattattaatttatttttctttacctatttgctaatcagatacctctgttgtgaagaaagggtaaaaatgtgtgttttttaaaaaaatgttggaaataacattagatttataatgccagctcaaaaacagagctgaccatttctctttcatatgttggctgacaggagctcgagtatatttagcttgccgggatgtggaaaagggggaattggtggccaaagagatccagaccacgacagggaaccagcaggtgttggtgcggaaactggacctgtctgatactaagtctattcgagcttttgctaagggcttcttagctgaggaaaagcacctccacgttttgatcaacaatgcaggagtgatgatgtgtccgtactcgaagacagcagatggctttgagatgcacataggagtcaaccacttgggtcacttcctcctaacccatctgctgctagagaaactaaaggaatcagccccatcaaggatagtaaatgtgtcttccctcgcacatcacctgggaaggatccacttccataacctgcagggcgagaaattctacaatgcaggcctggcctactgtcacagcaagctagccaacatcctcttcacccaggaactggcccggagactaaaaggctctggcgttacgacgtattctgtacaccctggcacagtccaatctgaactggttcggcactcatctttcatgagatggatgtggtggcttttctcctttttcatcaagactcctcagcagggagcccagaccagcctgcactgtgccttaacagaaggtcttgagattctaagtgggaatcatttcagtgactgtcatgtggcatgggtctctgcccaagctcgtaatgagactatagcaaggcggctgtgggacgtcagttgtgacctgctgggcctcccaatagactaacaggcagtgccagttggacccaagagaagactgcagcagactacacagtacttcttgtcaaaatgattctccttcaaggttttcaaaacctttagcacaaagagagcaaaaccttccagccttgcctgcttggtgtccagttaaaactcagtgtactgccagattcgtctaaatgtctgtcatgtccagatttactttgcttctgttactgccagagttactagagatatcataataggataagaagaccctcatatgacctgcacagctcattttccttctgaaagaaactactacctaggagaatctaagctatagcagggatgatttatgcaaatttgaactagcttctttgttcacaattcagttcctcccaaccaaccagtcttcacttcaagagggccacactgcaacctcagcttaacatgaataacaaagactggctcaggagcagggcttgcccaggcatggtggatcaccggaggtcagtagttcaagaccagcctggccaacatggtgaaaccccacctctactaaaaattgtgtatatctttgtgtgtcttcctgtttatgtgtgccaagggagtattttcacaaagttcaaaacagccacaataatcagagatggagcaaaccagtgccatccagtctttatgcaaatgaaatgctgcaaagggaagcagattctgtatatgttggtaactacccaccaagagcacatgggtagcagggaagaagtaaaaaaagagaaggagaatactggaagataatgcacaaaatgaagggactagttaaggattaactagccctttaaggattaactagttaaggattaatagcaaaagatattaaatatgctaacatagctatggaggaattgagggcaagcacccaggactgatgaggtcttaacaaaaaccagtgtggcaaaaaaaaaaaaaaaaaaaaaaaaaaaaaatcctaaaaacaaacaaacaaaaaaaacaattcttcattcagaaaaattatcttagggactgatattggtaattatggtcaatttaataatattttggggcatttccttacattgtcttgacaagattaaaatgtctgtgccaaaattttgtattttatttggagacttcttatcaaaagtaatgctgccaaaggaagtctaaggaattagtagtgttcccatcacttgtttggagtgtgctattctaaaagattttgatttcctggaatgacaattatattttaactttggtgggggaaagagttataggaccacagtcttcacttctgatacttgtaaattaatcttttattgcacttgttttgaccattaagctatatgtttagaaatggtcattttacggaaaaattagaaaaattctgataatagtgcagaataaatgaattaatgttttacttaatttatattgaactgtcaatgacaaataaaaattctttttgatta

SEQ ID NO: 359349 - DNA, 2959 bp, Homo sapiens
gtgcctggctaagcaggtattcatccagttcttgtgctgcagagaacagctgtaagctttgcccttgtaatagaatcacttttgtctttgagcaaaagcagaaaacttttgtcatctttcctccaactttccttaaatggacactgtttccttaaaaggacaacagtggaaagaactaaagcaaacctcagccagaagacacagggagttgcaggaacctactggctgagacagtagaatgaagaattgatgagctctccttctctgtctgcaggaaaatgctgtccagtggggtgtgtacatcaactgttcagcttcctgggaaagtagttgtggtcacaggagctaatacaggtatcgggaaggagacagccaaagagctggctcagagaggcaagttcacctcctttcaattccctcctattactgctgttttacccctcacagtaatgatgattcattctcattgtttcttcccagttttggaattcaagaacacctaaggattccactgatttgctgatctgaaactagtactatgctctacatataatggacccttaatgaatattattaatttatttttctttacctatttgctaatcagatacctctgttgtgaagaaagggtaaaaatgtgtgttttttaaaaaaatgttggaaataacattagatttataatgccagctcaaaaacagagctgaccatttctctttcatatgttggctgacaggagctcgagtatatttagcttgccgggatgtggaaaagggggaattggtggccaaagagatccagaccacgacagggaaccagcaggtgttggtgcggaaactggacctgtctgatactaagtctattcgagcttttgctaagggcttcttagctgaggaaaagcacctccacgttttgatcaacaatgcaggagtgatgatgtgtccgtactcgaagacagcagatggctttgagatgcacataggagtcaaccacttgggtcacttcctcctaacccatctgctgctagagaaactaaaggaatcagccccatcaaggatagtaaatgtgtcttccctcgcacatcacctgggaaggatccacttccataacctgcagggcgagaaattctacaatgcaggcctggcctactgtcacagcaagctagccaacatcctcttcacccaggaactggcccggagactaaaaggctctggcgttacgacgtattctgtacaccctggcacagtccaatctgaactggttcggcactcatctttcatgagatggatgtggtggcttttctcctttttcatcaagactcctcagcagggagcccagaccagcctgcactgtgccttaacagaaggtcttgagattctaagtgggaatcatttcagtgactgtcatgtggcatgggtctctgcccaagctcgtaatgagactatagcaaggcggctgtgggacgtcagttgtgacctgctgggcctcccaatagactaacaggcagtgccagttggacccaagagaagactgcagcagactacacagtacttcttgtcaaaatgattctccttcaaggttttcaaaacctttagcacaaagagagcaaaaccttccagccttgcctgcttggtgtccagttaaaactcagtgtactgccagattcgtctaaatgtctgtcatgtccagatttactttgcttctgttactgccagagttactagagatatcataataggataagaagaccctcatatgacctgcacagctcattttccttctgaaagaaactactacctaggagaatctaagctatagcagggatgatttatgcaaatttgaactagcttctttgttcacaattcagttcctcccaaccaaccagtcttcacttcaagagggccacactgcaacctcagcttaacatgaataacaaagactggctcaggagcagggcttgcccaggcatggtggatcaccggaggtcagtagttcaagaccagcctggccaacatggtgaaaccccacctctactaaaaattgtgtatatctttgtgtgtcttcctgtttatgtgtgccaagggagtattttcacaaagttcaaaacagccacaataatcagagatggagcaaaccagtgccatccagtctttatgcaaatgaaatgctgcaaagggaagcagattctgtatatgttggtaactacccaccaagagcacatgggtagcagggaagaagtaaaaaaagagaaggagaatactggaagataatgcacaaaatgaagggactagttaaggattaactagccctttaaggattaactagttaaggattaatagcaaaagatattaaatatgctaacatagctatggaggaattgagggcaagcacccaggactgatgaggtcttaacaaaaaccagtgtggcaaaaaaaaaaaaaaaaaaaaaaaaaaaaaatcctaaaaacaaacaaacaaaaaaaacaattcttcattcagaaaaattatcttagggactgatattggtaattatggtcaatttaataatattttggggcatttccttacattgtcttgacaagattaaaatgtctgtgccaaaattttgtattttatttggagacttcttatcaaaagtaatgctgccaaaggaagtctaaggaattagtagtgttcccatcacttgtttggagtgtgctattctaaaagattttgatttcctggaatgacaattatattttaactttggtgggggaaagagttataggaccacagtcttcacttctgatacttgtaaattaatcttttattgcacttgttttgaccattaagctatatgtttagaaatggtcattttacggaaaaattagaaaaattctgataatagtgcagaataaatgaattaatgttttacttaatttatattgaactgtcaatgacaaataaaaattctttttgatta

SEQ ID NO: 359350 - DNA, 2106 bp, Homo sapiens
agagagaagccatagtcggcgagcaacgctggagcatcccgctctggtgccgctgcagccggcagagatggttgagctcatgttcccgctgttgctcctccttctgcccttccttctgtatatggctgcgccccaaatcaggtcacttcctcctaacccatctgctgctagagaaactaaaggaatcagccccatcaaggatagtaaatgtgtcttccctcgcacatcacctgggaaggatccacttccataacctgcagggcgagaaattctacaatgcaggcctggcctactgtcacagcaagctagccaacatcctcttcacccaggaactggcccggagactaaaaggctctggcgttacgacgtattctgtacaccctggcacagtccaatctgaactggttcggcactcatctttcatgagatggatgtggtggcttttctcctttttcatcaagactcctcagcagggagcccagaccagcctgcactgtgccttaacagaaggtcttgagattctaagtgggaatcatttcagtgactgtcatgtggcatgggtctctgcccaagctcgtaatgagactatagcaaggcggctgtgggacgtcagttgtgacctgctgggcctcccaatagactaacaggcagtgccagttggacccaagagaagactgcagcagactacacagtacttcttgtcaaaatgattctccttcaaggttttcaaaacctttagcacaaagagagcaaaaccttccagccttgcctgcttggtgtccagttaaaactcagtgtactgccagattcgtctaaatgtctgtcatgtccagatttactttgcttctgttactgccagagttactagagatatcataataggataagaagaccctcatatgacctgcacagctcattttccttctgaaagaaactactacctaggagaatctaagctatagcagggatgatttatgcaaatttgaactagcttctttgttcacaattcagttcctcccaaccaaccagtcttcacttcaagagggccacactgcaacctcagcttaacatgaataacaaagactggctcaggagcagggcttgcccaggcatggtggatcaccggaggtcagtagttcaagaccagcctggccaacatggtgaaaccccacctctactaaaaattgtgtatatctttgtgtgtcttcctgtttatgtgtgccaagggagtattttcacaaagttcaaaacagccacaataatcagagatggagcaaaccagtgccatccagtctttatgcaaatgaaatgctgcaaagggaagcagattctgtatatgttggtaactacccaccaagagcacatgggtagcagggaagaagtaaaaaaagagaaggagaatactggaagataatgcacaaaatgaagggactagttaaggattaactagccctttaaggattaactagttaaggattaatagcaaaagatattaaatatgctaacatagctatggaggaattgagggcaagcacccaggactgatgaggtcttaacaaaaaccagtgtggcaaaaaaaaaaaaaaaaaaaaaaaaaaaaaatcctaaaaacaaacaaacaaaaaaaacaattcttcattcagaaaaattatcttagggactgatattggtaattatggtcaatttaataatattttggggcatttccttacattgtcttgacaagattaaaatgtctgtgccaaaattttgtattttatttggagacttcttatcaaaagtaatgctgccaaaggaagtctaaggaattagtagtgttcccatcacttgtttggagtgtgctattctaaaagattttgatttcctggaatgacaattatattttaactttggtgggggaaagagttataggaccacagtcttcacttctgatacttgtaaattaatcttttattgcacttgttttgaccattaagctatatgtttagaaatggtcattttacggaaaaattagaaaaattctgataatagtgcagaataaatgaattaatgttttacttaatttatattgaactgtcaatgacaaataaaaattctttttgatta

SEQ ID NO: 359351 - DNA, 1864 bp, Homo sapiens
ggaagtcggctaggtacgaggctgggtggttacaatgcaggcctggcctactgtcacagcaagctagccaacatcctcttcacccaggaactggcccggagactaaaaggctctggcgttacgacgtattctgtacaccctggcacagtccaatctgaactggttcggcactcatctttcatgagatggatgtggtggcttttctcctttttcatcaagactcctcagcagggagcccagaccagcctgcactgtgccttaacagaaggtcttgagattctaagtgggaatcatttcagtgactgtcatgtggcatgggtctctgcccaagctcgtaatgagactatagcaaggcggctgtgggacgtcagttgtgacctgctgggcctcccaatagactaacaggcagtgccagttggacccaagagaagactgcagcagactacacagtacttcttgtcaaaatgattctccttcaaggttttcaaaacctttagcacaaagagagcaaaaccttccagccttgcctgcttggtgtccagttaaaactcagtgtactgccagattcgtctaaatgtctgtcatgtccagatttactttgcttctgttactgccagagttactagagatatcataataggataagaagaccctcatatgacctgcacagctcattttccttctgaaagaaactactacctaggagaatctaagctatagcagggatgatttatgcaaatttgaactagcttctttgttcacaattcagttcctcccaaccaaccagtcttcacttcaagagggccacactgcaacctcagcttaacatgaataacaaagactggctcaggagcagggcttgcccaggcatggtggatcaccggaggtcagtagttcaagaccagcctggccaacatggtgaaaccccacctctactaaaaattgtgtatatctttgtgtgtcttcctgtttatgtgtgccaagggagtattttcacaaagttcaaaacagccacaataatcagagatggagcaaaccagtgccatccagtctttatgcaaatgaaatgctgcaaagggaagcagattctgtatatgttggtaactacccaccaagagcacatgggtagcagggaagaagtaaaaaaagagaaggagaatactggaagataatgcacaaaatgaagggactagttaaggattaactagccctttaaggattaactagttaaggattaatagcaaaagatattaaatatgctaacatagctatggaggaattgagggcaagcacccaggactgatgaggtcttaacaaaaaccagtgtggcaaaaaaaaaaaaaaaaaaaaaaaaaaaaaatcctaaaaacaaacaaacaaaaaaaacaattcttcattcagaaaaattatcttagggactgatattggtaattatggtcaatttaataatattttggggcatttccttacattgtcttgacaagattaaaatgtctgtgccaaaattttgtattttatttggagacttcttatcaaaagtaatgctgccaaaggaagtctaaggaattagtagtgttcccatcacttgtttggagtgtgctattctaaaagattttgatttcctggaatgacaattatattttaactttggtgggggaaagagttataggaccacagtcttcacttctgatacttgtaaattaatcttttattgcacttgttttgaccattaagctatatgtttagaaatggtcattttacggaaaaattagaaaaattctgataatagtgcagaataaatgaattaatgttttacttaatttatattgaactgtcaatgacaaataaaaattctttttgatta

SEQ ID NO: 359352 - DNA, 2102 bp, Homo sapiens
agagagaagccatagtcggcgagcaacgctggagcatcccgctctggtgccgctgcagccggcagagatggttgagctcatgttcccgctgttgctcctccttctgcccttccttctgtatatggctgcgccccaaatcaggaaaatgctgtccagtggggtgtgtacatcaactgttcagcttcctgggaaagtagttgtggtcacaggagctaatacaggtatcgggaaggagacagccaaagagctggctcagagaggagctcgagtatatttagcttgccgggatgtggaaaagggggaattggtggccaaagagatccagaccacgacagggaaccagcaggtgttggtgcggaaactggacctgtctgatactaagtctattcgagcttttgctaagggcttcttagctgaggaaaagcacctccacgttttgatcaacaatgcaggagtgatgatgtgtccgtactcgaagacagcagatggctttgagatgcacataggagtcaaccacttgggtcacttcctcctaacccatctgctgctagagaaactaaaggaatcagccccatcaaggatagtaaatgtgtcttccctcgcacatcacctgggaaggatccacttccataacctgcagggcgagaaattctacaatgcaggcctggcctactgtcacagcaagctagccaacatcctcttcacccaggaactggcccggagactaaaaggctctggcgttacgacgtattctgtacaccctggcacagtccaatctgaactggttcggcactcatctttcatgagatggatgtggtggcttttctcctttttcatcaagactcctcagcagggagcccagaccagcctgcactgtgccttaacagaaggtcttgagattctaagtgggaatcatttcagtgactgtcatgtggcatgggtctctgcccaagctcgtaatgagactatagcaaggcggctgtgggacgtcagttgtgacctgctgggcctcccaatagactaacaggcagtgccagttggacccaagagaagactgcagcagactacacagtacttcttgtcaaaatgattctccttcaaggttttcaaaacctttagcacaaagagagcaaaaccttccagcctggccaacatggtgaaaccccacctctactaaaaattgtgtatatctttgtgtgtcttcctgtttatgtgtgccaagggagtattttcacaaagttcaaaacagccacaataatcagagatggagcaaaccagtgccatccagtctttatgcaaatgaaatgctgcaaagggaagcagattctgtatatgttggtaactacccaccaagagcacatgggtagcagggaagaagtaaaaaaagagaaggagaatactggaagataatgcacaaaatgaagggactagttaaggattaactagccctttaaggattaactagttaaggattaatagcaaaagatattaaatatgctaacatagctatggaggaattgagggcaagcacccaggactgatgaggtcttaacaaaaaccagtgtggcaaaaaaaaaaaaaaaaaaaaaaaaaaaaaatcctaaaaacaaacaaacaaaaaaaacaattcttcattcagaaaaattatcttagggactgatattggtaattatggtcaatttaataatattttggggcatttccttacattgtcttgacaagattaaaatgtctgtgccaaaattttgtattttatttggagacttcttatcaaaagtaatgctgccaaaggaagtctaaggaattagtagtgttcccatcacttgtttggagtgtgctattctaaaagattttgatttcctggaatgacaattatattttaactttggtgggggaaagagttataggaccacagtcttcacttctgatacttgtaaattaatcttttattgcacttgttttgaccattaagctatatgtttagaaatggtcattttacggaaaaattagaaaaattctgataatagtgcagaataaatgaattaatgttttacttaatttatattgaactgtcaatgacaaataaaaattctttttgatta

SEQ ID NO: 359353 - DNA, 1791 bp, Homo sapiens
agagagaagccatagtcggcgagcaacgctggagcatcccgctctggtgccgctgcagccggcagagatggttgagctcatgttcccgctgttgctcctccttctgcccttccttctgtatatggctgcgccccaaatcaggaaaatgctgtccagtggggtgtgtacatcaactgttcagcttcctgggaaagtagttgtggtcacaggagctaatacaggtatcgggaaggagacagccaaagagctggctcagagaggagctcgagtatatttagcttgccgggatgtggaaaagggggaattggtggccaaagagatccagaccacgacagggaaccagcaggtgttggtgcggaaactggacctgtctgatactaagtctattcgagcttttgctaagggcttcttagctgaggaaaagcacctccacgttttgatcaacaatgcaggagtgatgatgtgtccgtactcgaagacagcagatggctttgagatgcacataggagtcaaccacttgggtcacttcctcctaacccatctgctgctagagaaactaaaggaatcagccccatcaaggatagtaaatgtgtcttccctcgcacatcacctgggaaggatccacttccataacctgcagggcgagaaattctacaatgcaggcctggcctactgtcacagcaagctagccaacatcctcttcacccaggaactggcccggagactaaaaggctctggcgttacgacgtattctgtacaccctggcacagtccaatctgaactggttcggcactcatctttcatgagatggatgtggtggcttttctcctttttcatcaagactcctcagcagggagcccagaccagcctgcactgtgccttaacagaaggtcttgagattctaagtgggaatcatttcagtgactgtcatgtggcatgggtctctgcccaagctcgtaatgagactatagcaaggcggctgtgggacgtcagttgtgacctgctgggcctcccaatagactaacaggcagtgccagttggacccaagagaagactgcagcagactacacagtacttcttgtcaaaatgattctccttcaaggttttcaaaacctttagcacaaagagagcaaaaccttccagccttgcctgcttggtgtccagttaaaactcagtgtactgccagattcgtctaaatgtctgtcatgtccagatttactttgcttctgttactgccagagttactagagatatcataataggataagaagaccctcatatgacctgcacagctcattttccttctgaaagaaactactacctaggagaatctaagctatagcagggatgatttatgcaaatttgaactagcttctttgttcacaattcagttcctcccaaccaaccagtcttcacttcaagagggccacactgcaacctcagcttaacatgaataacaaagactggctcaggagcagggcttgcccaggcatggtggatcaccggaggtcagtagttcaagaccagcctggccaacatggtgaaaccccacctctactaaaaattgtgtatatctttgtgtgtcttcctgtttatgtgtgccaagggagtattttcacaaagttcaaaacagccacaataatcagagatggagcaaaccagtgccatccagtctttatgcaaatgaaatgctgcaaagggaagcagattctgacacatgctgcagtatggatggggcttgaggacattatgctaagtgaaataagccagttacaaaaagacaaacactgg

SEQ ID NO: 359354 - DNA, 1480 bp, Homo sapiens
ggaagtcggctaggtacgaggctgggtggttacaatgcaggcctggcctactgtcacagcaagctagccaacatcctcttcacccaggaactggcccggagactaaaaggctctggcgttacgacgtattctgtacaccctggcacagtccaatctgaactggttcggcactcatctttcatgagatggatgtggtggcttttctcctttttcatcaagactcctcagcagggagcccagaccagcctgcactgtgccttaacagaaggtcttgagattctaagtgggaatcatttcagtgactgtcatgtggcatgggtctctgcccaagctcgtaatgagactatagcaaggcggctgtgggacgtcagttgtgacctgctgggcctcccaatagactaacaggcagtgccagttggacccaagagaagactgcagcagactacacagtacttcttgtcaaaatgattctccttcaaggttttcaaaacctttagcacaaagagagcaaaaccttccagcctggccaacatggtgaaaccccacctctactaaaaattgtgtatatctttgtgtgtcttcctgtttatgtgtgccaagggagtattttcacaaagttcaaaacagccacaataatcagagatggagcaaaccagtgccatccagtctttatgcaaatgaaatgctgcaaagggaagcagattctgtatatgttggtaactacccaccaagagcacatgggtagcagggaagaagtaaaaaaagagaaggagaatactggaagataatgcacaaaatgaagggactagttaaggattaactagccctttaaggattaactagttaaggattaatagcaaaagatattaaatatgctaacatagctatggaggaattgagggcaagcacccaggactgatgaggtcttaacaaaaaccagtgtggcaaaaaaaaaaaaaaaaaaaaaaaaaaaaaatcctaaaaacaaacaaacaaaaaaaacaattcttcattcagaaaaattatcttagggactgatattggtaattatggtcaatttaataatattttggggcatttccttacattgtcttgacaagattaaaatgtctgtgccaaaattttgtattttatttggagacttcttatcaaaagtaatgctgccaaaggaagtctaaggaattagtagtgttcccatcacttgtttggagtgtgctattctaaaagattttgatttcctggaatgacaattatattttaactttggtgggggaaagagttataggaccacagtcttcacttctgatacttgtaaattaatcttttattgcacttgttttgaccattaagctatatgtttagaaatggtcattttacggaaaaattagaaaaattctgataatagtgcagaataaatgaattaatgttttacttaatttatattgaactgtcaatgacaaataaaaattctttttgatta

SEQ ID NO: 359355 - DNA, 608 bp, Homo sapiens
agagagaagccatagtcggcgagcaacgctggagcatcccgctctggtgccgctgcagccggcagagatggttgagctcatgttcccgctgttgctcctccttctgcccttccttctgtatatggctgcgccccaaatcaggaaaatgctgtccagtggggtgtgtacatcaactgttcagcttcctgggaaagtagttgtggtcacaggagctaatacaggtatcgggaaggagacagccaaagagctggctcagagaggagctcgagtatatttagcttgccgggatgtggaaaagggggaattggtggccaaagagatccagaccacgacagggaaccagcaggtgttggtgcggaaactggacctgtctgatactaagtctattcgagcttttgctaagggcttcttagctgcacagtcttcacttctgatacttgtaaattaatcttttattgcacttgttttgaccattaagctatatgtttagaaatggtcattttacggaaaaattagaaaaattctgataatagtgcagaataaatgaattaatgttttacttaatttatattgaactgtcaatgacaaataaaaattctttttgatta

SEQ ID NO: 359356 - DNA, 4935 bp, Homo sapiens
tgcatacaccagttctcaggatatcggaatccggtgcacagcagcttcttcaggtttgaggttccggatgcctgggggcggagaaacgggaggggaaaaacagatggcaaggtgaggcgtccatggaacgacttctggcccagctgtgcggcagcagcgcagcgtggccgctcccgctgtgggagggggacaccacaggccactgcttcacccagctggtgctcagcgccctgccccacgcgctcctcgccgtgctcagtgcctgttacttgggcaccccgaggagtccagattacatcctaccctgcagtcctggatggcgcctccgacttgcagcttccttcctgctttccgtcttcccgctgctagaccttcttccagttgctttgccaccaggggcaggcccaggacccatagggctagaggtgttggcagggtgcgtggcagctgtggcctggatcagccacagcctggccctgtgggtgttggcacattcccctcatggccactcccggggtcccttggccttggccctggtagccttgctgccagctccagccctagtgctgaccgtgttgtggcattgccagcgaggcacacttctgcccccacttctcccagggcccatggcccgcctatgcttgctcatcctgcagctggctgcactcttggcctatgcactgggatgggcagctcctgggggaccacgagaaccctgggctcaggagcccctcctgcccgaggatcaagaacctgaggtggctgaagatggggagagttggctgtcacgcttttcctatgcctggctggcacccttgctggcccgtggggcctgtggagagctccggcagcctcaggacatttgccgcctcccccacagactgcagccaacctacctggctcgtgtcttccaggcacactggcaggagggggcacggctgtggagggccttgtatggggcctttggacggtgctatctggcacttggactgctgaagctggtggggaccatgttgggattctcagggcccctgttgctctccctactggtgggcttcctggaagaggggcaggagccactaagccacggcctgctctatgctctggggctagccggtggggctgtgctgggtgctgtgctgcagaatcagtatgggtatgaggtatataaggtaacacttcaggcacggggggctgtgctgaacatcctgtactgcaaggctttacagctggggcccagccgccctcctactggggaggccctgaacctactaggcactgactctgaacggctgcttaactttgctgggagcttccatgaagcctggggcctgcccctgcaactggccatcaccctctacctgctgtaccagcaggtaggcgtggccttcgtgggtggtctcatcttggcactgctgctggtacccgtcaacaaagtgattgccacccgcatcatggccagcaaccaggaaatgctacagcacaaggatgcgcgggttaagcttgtgacagagctgctgagtggcattcgggtcatcaagttctgcgggtgggagcaggcactgggagcccgagtagaggcctgccgggctcgagagctggggcgactccgggtcatcaaatacctggatgcggcctgtgtatacctgtgggctgccctaccggttgtcatctccatcgttatcttcatcacctatgtcctcatggggcaccagctcactgccaccaaggtgttcacggccctggcactggtgcgaatgctcattcttcctctcaacaacttcccttgggtgatcaatggtctcctggaggccaaagtgtccttggaccggatccagcttttcctcgaccttccaaaccacaacccccaggcctactacagcccagatccccctgcagagccatctacagtattggagctgcatggagccttgttctcctgggacccagttggaaccagcctggagaccttcatcagtcatctcgaagtgaaaaagggtatgctggtgggcatcgtggggaaggtcggctgtgggaagagctccctgctggctgccatcgctggagagctccacaggctgcgtgggcatgtggcagtgcgggggctgtccaagggctttggcctggccacccaggaaccctggatccagtttgccaccatccgagacaacatcctctttgggaagacatttgatgcacagctgtacaaggaggtgctagaagcctgcgccctcaatgatgacctcagtatcctgcctgctggagaccagacagaggtgggggagaagggtgtcacccttagcggaggacagcgtgcccggattgcccttgctcgtgctgtctaccaggaaaaggagctctatctcctcgatgaccctctggccgctgtggatgcagatgtggccaaccacctgctgcacaggtgcatcctgggcatgctgagctacaccacacggctgctctgcacccaccgcactgagtacctggagagggctgacgcggtgctgctgatggaggccgggcgcctcatccgggctggacctccctctgagattctgccactggtacaagctgtccccaaagcctgggctgagaatggacaagagtctgactcagccacagcccagtcagtacagaacccagagaaaacaaaggaggggctggaggaggagcagagcacatctggtcgcctgctgcaggaagaaagcaagaaggagggcgccgtggccttgcacgtgtaccaagcttactggaaggccgtgggccagggcttggccttagccatcctcttctctctgcttctcatgcaagccacgcggaacgctgctgactggtggctctcccactggatctctcagctgaaggctgagaatagctcccaggaggcgcaaccctccaccagcccagcttctatggggctcttctctccgcagctgctcctcttttcccctggaaacctctacatcccagtgttcccactgcccaaagctgcccccaatggctcctcagacatccgtttctacctcaccgtgtatgcgaccattgctggtgtaaattccctctgcacccttctccgggcagtgctctttgcagcaggcacccttcaagcagctgccactctgcatcgccgcctgctgcatcgagtccttatggcaccagtgactttcttcaatgccacacccacgggccggatcctaaaccgcttctcctctgatgtggcctgtgcggatgacagcctgcccttcatcctcaacatcctcctggccaacgcggcaggcctgctggggctcctggccgtgctgggctctggcctgccctggctgctgctcctgctgccgcctttgagcatcatgtactatcacgtgcagcgccactacagggcctcctcacgggagctgcggcgcctgggcagcctcaccctgtctccactgtatagccatctggccgataccttggctggcctctctgtgctccgggccacaggggccacctacaggtttgaggaggagaacctgcgactccttgagctaaaccagaggtgccagtttgccaccagtgccacaatgcagtggctggacattcggctacagctcatgggggcggcagtggtcagcgctatcgcaggcatcgctctggtgcagcaccagcagggcctcgctaacccagggctggtgggcttgtcgctgtcttatgccctgtccctgacgggcctgctctcgggcctggtgagcagcttcacacagacagaggccatgctggtgagcgtcgagcggctggaagagtacacctgtgacctgccccaggaaccccagggccagccactgcagctgggcaccggctggctgacccagggggcgtggagttccaggacgtggtgttggcgtaccggccagggctgccgaatgccctggatggagtgaccttctgcgtgcagcctggagagaagttgggcatcgtgggccgcacaggctccggcaagtcttccctgttgttggtgctcttccggctgctagagcccagttcagggcgagtgctgctggacggcgtggacaccagccagctggagctggcccagctcagatcccagttggctatcatcccccaggagccctttttgttcagtgggactgttcgggaaaacctggacccccagggcctacataaggacagggccttgtggcaggccctgaagcagtgccacctgagtgaggtgattacatccatgggtggtctggatggtgagctgggtgaggggggccggagcttatctcttgggcagaggcagctgttgtgtttggccagggctctcctcacagatgccaagatcctgtgtatcgatgaggccacagcaagtgtggaccagaagacagaccagctgctccagcagaccatctgcaaacgctttgccaacaagacagtgctgaccattgcccataggctcaacacgatcctgaactcagaccgggtgctggtgctacaagcggggagagtggtagagctggactccccggccaccctgcgcaaccagccccactccctgttccagcagctgctgcagagcagccagcagggagtccctgcctcactcggaggtccctgagcccaatcccacaccctgcagagttctcccctctctctgatccaggccgggcctatacagaggtgctggctgcttgtttacattctcctctggggctctacctctccacacttccccagaagggaaaagggcaccctggattactctttggaaatcactccttggtgggcagcatcctgaggcttccccagaaccaggcctctgctctggccctcttgcatctggaacgccaggtgggtttttctggcataggagcccacttgcattttcatagttttatttgataaaattccatcttacattctgtgtattaaaaaaataatatttctggtgtg

SEQ ID NO: 359357 - DNA, 547 bp, Homo sapiens
cgacagccccctcctcaccacccagcatcccagtgttcccactgcccaaagctgcccccaatggctcctcagacatccgtttctacctcaccgtgtatgcgaccattgctggtgtaaattccctctgcacccttctccgggcagtgctctttgcagcaggcacccttcaagcagctgccactctgcatcgccgcctgctgcatcgagtccttatgggctggtgggcttgtcgctgtcttatgccctgtccctgacgggcctgctctcgggcctggtgagcagcttcacacagacagaggccatgctggtgagcgtcgagcggctggaagagtacacctgtgacctgccccaggaaccccagggccagccactgcaggtgggcctgtacccccaccccaggccaaagctctggaaccctgaaggccccagtctccctcacaattcctttctttttgcccacccatctttctcagctcccataacctctcttcatgatgaccacaattcttcaccatgtcccttcttccccatctctcattctctcatt

SEQ ID NO: 359358 - DNA, 2751 bp, Homo sapiens
  misc_feature (19)..(19): n is a, c, g, or t
ggtggtagtctagagatcncgaagtcaccgcgtagtaatgagaagtaaccctggacagagtggcaggcatagctctggcggtcctcttggggatggacattcgtccctctctgctggtcggaatcaaggtttacaaggatggacttgagtcctgctcgaggtctaggggtatccagagcagggtgggttagagagggaggcctaagagtcctgctcgaggtctaggggtatcctgctagggtgggttagacggggaggcctgagaggatgagaggtgggatctgcacacgcactgagaaaggcatagtatagactcagaacagtcctctcccaatctccccttctaccctccaggacctccctctgagattctgccactggtacaagctgtccccaaagcctgggctgagaatggacaagagtctgactcagccacagcccagtcagtacagaacccagagaaaacaaaggaggggctggaggaggagcagagcacatctggtcgcctgctgcaggaagaaagcaagaaggagggcgccgtggccttgcacgtgtaccaagcttactggaaggccgtgggccagggcttggccttagccatcctcttctctctgcttctcatgcaagccacgcggaacgctgctgactggtggctctcccactggatctctcagctgaaggctgagaatagctcccaggaggcgcaaccctccaccagcccagcttctatggggctcttctctccgcagctgctcctcttttcccctggaaacctctacatcccagtgttcccactgcccaaagctgcccccaatggctcctcagacatccgtttctacctcaccgtgtatgcgaccattgctggtgtaaattccctctgcacccttctccgggcagtgctctttgcagcaggcacccttcaagcagctgccactctgcatcgccgcctgctgcatcgagtccttatggcaccagtgactttcttcaatgccacacccacgggccggatcctaaaccgcttctcctctgatgtggcctgtgcggatgacagcctgcccttcatcctcaacatcctcctggccaacgcggcaggcctgctggggctcctggccgtgctgggctctggcctgccctggctgctgctcctgctgccgcctttgagcatcatgtactatcacgtgcagcgccactacagggcctcctcacgggagctgcggcgcctgggcagcctcaccctgtctccactgtatagccatctggccgataccttggctggcctctctgtgctccgggccacaggggccacctacaggtttgaggaggagaacctgcgactccttgagctaaaccagaggtgccagtttgccaccagtgccacaatgcagtggctggacattcggctacagctcatgggggcggcagtggtcagcgctatcgcaggcatcgctctggtgcagcaccagcagggcctcgctaacccagggctggtgggcttgtcgctgtcttatgccctgtccctgacgggcctgctctcgggcctggtgagcagcttcacacagacagaggccatgctggtgagcgtcgagcggctggaagagtacacctgtgacctgccccaggaaccccagggccagccactgcagctgggcaccggctggctgacccagggggcgtggagttccaggacgtggtgttggcgtaccggccagggctgccgaatgccctggatggagtgaccttctgcgtgcagcctggagagaagttgggcatcgtgggccgcacaggctccggcaagtcttccctgttgttggtgctcttccggctgctagagcccagttcagggcgagtgctgctggacggcgtggacaccagccagctggagctggcccagctcagatcccagttggctatcatcccccaggagccctttttgttcagtgggactgttcgggaaaacctggacccccagggcctacataaggacagggccttgtggcaggccctgaagcagtgccacctgagtgaggtgattacatccatgggtggtctggatggtgagctgggtgaggggggccggagcttatctcttgggcagaggcagctgttgtgtttggccagggctctcctcacagatgccaagatcctgtgtatcgatgaggccacagcaagtgtggaccagaagacagaccagctgctccagcagaccatctgcaaacgctttgccaacaagacagtgctgaccattgcccataggctcaacacgatcctgaactcagaccgggtgctggtgctacaagcggggagagtggtagagctggactccccggccaccctgcgcaaccagccccactccctgttccagcagctgctgcagagcagccagcagggagtccctgcctcactcggaggtccctgagcccaatcccacaccctgcagagttctcccctctctctgatccaggccgggcctatacagaggtgctggctgcttgtttacattctcctctggggctctacctctccacacttccccagaagggaaaagggcaccctggattactctttggaaatcactccttggtgggcagcatcctgaggcttccccagaaccaggcctctgctctggccctcttgcatctggaacgccaggtgggtttttctggcataggagcccacttgcattttcatagttttatttgataaaattccatcttacattctgtgtattaaaaaaataatatttctggtgtg

SEQ ID NO: 359359 - DNA, 5376 bp, Homo sapiens
tgcatacaccagttctcaggatatcggaatccggtgcacagcagcttcttcaggtttgaggttccggatgcctgggggcggagaaacgggaggggaaaaacagatggcaaggtgaggcgtccatggaacgacttctggcccagctgtgcggcagcagcgcagcgtggccgctcccgctgtgggagggggacaccacaggccactgcttcacccagctggtgctcagcgccctgccccacgcgctcctcgccgtgctcagtgcctgttacttgggcaccccgaggagtccagattacatcctaccctgcagtcctggatggcgcctccgacttgcagcttccttcctgctttccgtcttcccgctgctagaccttcttccagttgctttgccaccaggggcaggcccaggacccatagggctagaggtgttggcagggtgcgtggcagctgtggcctggatcagccacagcctggccctgtgggtgttggcacattcccctcatggccactcccggggtcccttggccttggccctggtagccttgctgccagctccagccctagtgctgaccgtgttgtggcattgccagcgaggcacacttctgcccccacttctcccagggcccatggcccgcctatgcttgctcatcctgcagctggctgcactcttggcctatgcactgggatgggcagctcctgggggaccacgagaaccctgggctcaggagcccctcctgcccgaggatcaagaacctgaggtggctgaagatggggagagttggctgtcacgcttttcctatgcctggctggcacccttgctggcccgtggggcctgtggagagctccggcagcctcaggacatttgccgcctcccccacagactgcagccaacctacctggctcgtgtcttccaggcacactggcaggagggggcacggctgtggagggccttgtatggggcctttggacggtgctatctggcacttggactgctgaagctggtggggaccatgttgggattctcagggcccctgttgctctccctactggtgggcttcctggaagaggggcaggagccactaagccacggcctgctctatgctctggggctagccggtggggctgtgctgggtgctgtgctgcagaatcagtatgggtatgaggtatataaggtaacacttcaggcacggggggctgtgctgaacatcctgtactgcaaggctttacagctggggcccagccgccctcctactggggaggccctgaacctactaggcactgactctgaacggctgcttaactttgctgggagcttccatgaagcctggggcctgcccctgcaactggccatcaccctctacctgctgtaccagcaggtaggcgtggccttcgtgggtggtctcatcttggcactgctgctggtacccgtcaacaaagtgattgccacccgcatcatggccagcaaccaggaaatgctacagcacaaggatgcgcgggttaagcttgtgacagagctgctgagtggcattcgggtcatcaagttctgcgggtgggagcaggcactgggagcccgagtagaggcctgccgggctcgagagctggggcgactccgggtcatcaaatacctggatgcggcctgtgtatacctgtgggctgccctaccggttgtcatctccatcgttatcttcatcacctatgtcctcatggggcaccagctcactgccaccaaggtgttcacggccctggcactggtgcgaatgctcattcttcctctcaacaacttcccttgggtgatcaatggtctcctggaggccaaagtgtccttggaccggatccagcttttcctcgaccttccaaaccacaacccccaggcctactacagcccagatccccctgcagagccatctacagtattggagctgcatggagccttgttctcctgggacccagttggaaccagcctggagaccttcatcagtcatctcgaagtgaaaaagggtatgctggtgggcatcgtggggaaggtcggctgtgggaagagctccctgctggctgccatcgctggagagctccacaggtaaccaacctcctatgcacccctgtccttactttgtcctttagcaaacactgagcccctcttatgtgttggacaccttttgggggtcaggggtactaagaagagcaacgcatggtccctttattgggagagttttcaatctggaaagaaggaggtggccaagaaagcgaatcattgtaatcattacaccagagtgttttaaatgctataatagtcagcaaaggaatggaaacatccagtgtcagctattctttcagaaatgtggctgtgcagagaagggatccagagaggagcataggtttgagggaggaccttgttttcagatgggaacaagtacaatgtggtggccatactctccactgagctcctgaacagatgtaagtacaacagctgcttggctgtagccaaagagctatttcttcccttcttcgcccagaatgggcttcattaggaccccttgacctcaggagctgccatctcagtcatgtgacatgaagggggaccctgtgtagaagacagcagcctggggaggcttctaggagtcaagggctgggcatggagggacccagaggagagctggtcctcatattgctcgcctggctctctgcaggctgcgtgggcatgtggcagtgcgggggctgtccaagggctttggcctggccacccaggaaccctggatccagtttgccaccatccgagacaacatcctctttgggaagacatttgatgcacagctgtacaaggaggtgctagaagcctgcgccctcaatgatgacctcagtatcctgcctgctggagaccagacagaggtgggggagaagggtgtcacccttagcggaggacagcgtgcccggattgcccttgctcgtgctgtctaccaggaaaaggagctctatctcctcgatgaccctctggccgctgtggatgcagatgtggccaaccacctgctgcacaggtgcatcctgggcatgctgagctacaccacacggctgctctgcacccaccgcactgagtacctggagagggctgacgcggtgctgctgatggaggccgggcgcctcatccgggctggacctccctctgagattctgccactggtacaagctgtccccaaagcctgggctgagaatggacaagagtctgactcagccacagcccagtcagtacagaacccagagaaaacaaaggaggggctggaggaggagcagagcacatctggtcgcctgctgcaggaagaaagcaagaaggagggcgccgtggccttgcacgtgtaccaagcttactggaaggccgtgggccagggcttggccttagccatcctcttctctctgcttctcatgcaagccacgcggaacgctgctgactggtggctctcccactggatctctcagctgaaggctgagaatagctcccaggaggcgcaaccctccaccagcccagcttctatggggctcttctctccgcagctgctcctcttttcccctggaaacctctacatcccagtgttcccactgcccaaagctgcccccaatggctcctcagacatccgtttctacctcaccgtgtatgcgaccattgctggtgtaaattccctctgcacccttctccgggcagtgctctttgcagcaggcacccttcaagcagctgccactctgcatcgccgcctgctgcatcgagtccttatggcaccagtgactttcttcaatgccacacccacgggccggatcctaaaccgcttctcctctgatgtggcctgtgcggatgacagcctgcccttcatcctcaacatcctcctggccaacgcggcaggcctgctggggctcctggccgtgctgggctctggcctgccctggctgctgctcctgctgccgcctttgagcatcatgtactatcacgtgcagcgccactacagggcctcctcacgggagctgcggcgcctgggcagcctcaccctgtctccactgtatagccatctggccgataccttggctggcctctctgtgctccgggccacaggggccacctacaggtttgaggaggagaacctgcgactccttgagctaaaccagaggtgccagtttgccaccagtgccacaatgcagtggctggacattcggctacagctcatgggggcggcagtggtcagcgctatcgcaggcatcgctctggtgcagcaccagcagggcctcgctaacccagggctggtgggcttgtcgctgtcttatgccctgtccctgacgggcctgctctcgggcctggtgagcagcttcacacagacagaggccatgctggtgagcgtcgagcggctggaagagtacacctgtgacctgccccaggaaccccagggccagccactgcagctgggcaccggctggctgacccagggggcgtggagttccaggacgtggtgttggcgtaccggccagggctgccgaatgccctggatggagtgaccttctgcgtgcagcctggagagaagttgggcatcgtgggccgcacaggctccggcaagtcttccctgttgttggtgctcttccggctgctagagcccagttcagggcgagtgctgctggacggcgtggacaccagccagctggagctggcccagctcagatcccagttggctatcatcccccaggagccctttttgttcagtgggactgttcgggaaaacctggacccccagggcctacataaggacagggccttgtggcaggccctgaagcagtgccacctgagtgaggtgattacatccatgggtggtctggatggtgagctgggtgaggggggccggagcttatctcttgggcagaggcagctgttgtgtttggccagggctctcctcacagatgccaagatcctgtgtatcgatgaggccacagcaagtgtggaccagaagacagaccagctgctccagcagaccatctgcaaacgctttgccaacaagacagtgctgaccattgcccataggctcaacacgatcctgaactcagaccgggtgctggtgctacaagcggggagagtggtagagctggactccccggccaccctgcgcaaccagccccactccctgttccagcagctgctgcagagcagccagcagggagtccctgcctcactcggaggtccctgagcccaatcccacaccctgcagagttctcccctctgctctggccctcttgcatctggaacgccaggtgggtttttctggcataggagcccacttgcattttcatagttttatttgataaaattccatcttacattctgtgtattaaaaaaataatatttctggtgtg

SEQ ID NO: 359360 - DNA, 4556 bp, Homo sapiens
tgcatacaccagttctcaggatatcggaatccggtgcacagcagcttcttcaggtttgaggttccggatgcctgggggcggagaaacgggaggggaaaaacagatggcaaggtgaggcgtccatggaacgacttctggcccagctgtgcggcagcagcgcagcgtggccgctcccgctgtgggagggggacaccacaggccactgcttcacccagctggtgctcagcgccctgccccacgcgctcctcgccgtgctcagtgcctgttacttgggcaccccgaggagtccagattacatcctaccctgcagtcctggatggcgcctccgacttgcagcttccttcctgctttccgtcttcccgctgctagaccttcttccagttgctttgccaccaggggcaggcccaggacccatagggctagaggtgttggcagggtgcgtggcagctgtggcctggatcagccacagcctggccctgtgggtgttggcacattcccctcatggccactcccggggtcccttggccttggccctggtagccttgctgccagctccagccctagtgctgaccgtgttgtggcattgccagcgaggcacacttctgcccccacttctcccagggcccatggcccgcctatgcttgctcatcctgcagctggctgcactcttggcctatgcactgggatgggcagctcctgggggaccacgagaaccctgggctcaggagcccctcctgcccgaggatcaagaacctgaggtggctgaagatggggagagttggctgtcacgcttttcctatgcctggctggcacccttgctggcccgtggggcctgtggagagctccggcagcctcaggacatttgccgcctcccccacagactgcagccaacctacctggctcgtgtcttccaggcacactggcaggagggggcacggctgtggagggccttgtatggggcctttggacggtgctatctggcacttggactgctgaagctggtggggaccatgttgggattctcagggcccctgttgctctccctactggtgggcttcctggaagaggggcaggagccactaagccacggcctgctctatgctctggggctagccggtggggctgtgctgggtgctgtgctgcagaatcagtatgggtatgaggtatataaggtaacacttcaggcacggggggctgtgctgaacatcctgtactgcaaggctttacagctggggcccagccgccctcctactggggaggccctgaacctactaggcactgactctgaacggctgcttaactttgctgggagcttccatgaagcctggggcctgcccctgcaactggccatcaccctctacctgctgtaccagcaggtaggcgtggccttcgtgggtggtctcatcttggcactgctgctggtacccgtcaacaaagtgattgccacccgcatcatggccagcaaccaggaaatgctacagcacaaggatgcgcgggttaagcttgtgacagagctgctgagtggcattcgggtcatcaagttctgcgggtgggagcaggcactgggagcccgagtagaggcctgccgggctcgagagctggggcgactccgggtcatcaaatacctggatgcggcctgtgtatacctgtgggctgccctaccggttgtcatctccatcgttatcttcatcacctatgtcctcatggggcaccagctcactgccaccaaggtgttcacggccctggcactggtgcgaatgctcattcttcctctcaacaacttcccttgggtgatcaatggtctcctggaggccaaagtgtccttggaccggatccagcttttcctcgaccttccaaaccacaacccccaggcctactacagcccagatccccctgcagagccatctacagtattggagctgcatggagccttgttctcctgggacccagttggaaccagcctggagaccttcatcagtcatctcgaagtgaaaaagggtatgctggtgggcatcgtggggaaggtcggctgtgggaagagctccctgctggctgccatcgctggagagctccacaggtaaccaacctcctatgcacccctgtccttactttgtcctttagcaaacactgagcccctcttatgtgttggacaccttttgggggtcaggggtactaagaagagcaacgcatggtccctttattgggagagttttcaatctggaaagaaggaggtggccaagaaagcgaatcattgtaatcattacaccagagtgttttaaatgctataatagtcagcaaaggaatggaaacatccagtgtcagctattctttcagaaatgtggctgtgcagagaagggatccagagaggagcataggtttgagggaggaccttgttttcagatgggaacaagtacaatgtggtggccatactctccactgagctcctgaacagatgtaagtacaacagctgcttggctgtagccaaagagctatttcttcccttcttcgcccagaatgggcttcattaggaccccttgacctcaggagctgccatctcagtcatgtgacatgaagggggaccctgtgtagaagacagcagcctggggaggcttctaggagtcaagggctgggcatggagggacccagaggagagctggtcctcatattgctcgcctggctctctgcaggctgcgtgggcatgtggcagtgcgggggctgtccaagggctttggcctggccacccaggaaccctggatccagtttgccaccatccgagacaacatcctctttgggaagacatttgatgcacagctgtacaaggaggtgctagaagcctgcgccctcaatgatgacctcagtatcctgcctgctggagaccagacagaggtgggggagaagggtgtcacccttagcggaggacagcgtgcccggattgcccttgctcgtgctgtctaccaggaaaaggagctctatctcctcgatgaccctctggccgctgtggatgcagatgtggccaaccacctgctgcacaggtgcatcctgggcatgctgagctacaccacacggctgctctgcacccaccgcactgagtacctggagagggctgacgcggtgctgctgatggaggccgggcgcctcatccgggctggacctccctctgagattctgccactggtacaagctgtccccaaagcctgggctgagaatggacaagagtctgactcagccacagcccagtcagtacagaacccagagaaaacaaaggaggggctggaggaggagcagagcacatctggtcgcctgctgcaggaagaaagcaagaaggagggcgccgtggccttgcacgtgtaccaagcttactggaaggccgtgggccagggcttggccttagccatcctcttctctctgcttctcatgcaagccacgcggaacgctgctgactggtggctctcccactggatctctcagctgaaggctgagaatagctcccaggaggcgcaaccctccaccagcccagcttctatggggctcttctctccgcagctgctcctcttttcccctggaaacctctacatcccagtgttcccactgcccaaagctgcccccaatggctcctcagacatccgtttctacctcaccgtgtatgcgaccattgctggtgtaaattccctctgcacccttctccgggcagtgctctttgcagcaggcacccttcaagcagctgccactctgcatcgccgcctgctgcatcgagtccttatggcaccagtgactttcttcaatgccacacccacgggccggatcctaaaccgcttctcctctgatgtggcctgtgcggatgacagcctgcccttcatcctcaacatcctcctggccaacgcggcaggcctgctggggctcctggccgtgctgggctctggcctgccctggctgctgctcctgctgccgcctttgagcatcatgtactatcacgtgcagcgccactacagggcctcctcacgggagctgcggcgcctgggcagcctcaccctgtctccactgtatagccatctggccgataccttggctggcctctctgtgctccgggccacaggggccacctacaggtttgaggaggagaacctgcgactccttgagctaaaccagaggtgccagtttgccaccagtgccacaatgcagtggctggacattcggctacagctcatgggggcggcagtggtcagcgctatcgcaggcatcgctctggtgcagcaccagcagggcctcgctaacccaggtgccacccaggacccctcacccctacctcacccacaagttagtccaccgctctcccagatctctccctgcaccatccccccaacattttcacctcccacccagggttccctgtgaggatgtatcatgattatcatcatcacccccgtttggagttgaggagacaatccccaggagggacttgcccaggtggtggtggcttggggactagaatgagtcttctgagctgctggtctcagtcccttccctgcttccaccccgtccccaccacactgccccag

SEQ ID NO: 359361 - DNA, 468 bp, Homo sapiens
agggatggggaaggaggaaagcaacagaagaaggagatagggaggcagagtggacccccactttgaaagagcacactggcatctgcagccctgagggaggcctgtgggtatacagaccagctcccaagaaggagctgctcaataagggccttccctgttgaggccctgaggctgggtggctcagggcaacagtggagtggcttcacatccctctggccttccctaggtttgaggaggagaacctgcgactccttgagctaaaccagaggtgccagtttgccaccagtgccacaatgcagtggctggacattcggctacagctcatgggggcggcagtggtcagcgctatcgcaggcatcgctctggtgcagcaccagcagggcctcgctaacccaggtgccacccaggacccctcacccctacctcacccacaagttagtccaccgctctcccagatctctccctgca

SEQ ID NO: 359362 - DNA, 507 bp, Homo sapiens
cctgacctcgtgatccacctgccttggcctcccaaagtgctggaattacaggcgtgagccaccgcgcccagcctctgttgcttcctttaaatgccagcagtccacagcctggggagtctcccacaaacgtcccggtgtccaagctctcccagcagctggtacttctctcccccagggctggtgggcttgtcgctgtcttatgccctgtccctgacgggcctgctctcgggcctggtgagcagcttcacacagacagaggccatgctggtgagcgtcgagcggctggaagagtacacctgtgacctgccccaggaaccccagggccagccactgcaggtgggcctgtacccccaccccaggccaaagctctggaaccctgaaggccccagtctccctcacaattcctttctttttgcccacccatctttctcagctcccataacctctcttcatgatgaccacaattcttcaccatgtcccttcttccccatctctcattctctcatt

SEQ ID NO: 359363 - DNA, 6318 bp, Homo sapiens
tgcatacaccagttctcaggatatcggaatccggtgcacagcagcttcttcaggtttgaggttccggatgcctgggggcggagaaacgggaggggaaaaacagatggcaaggtgaggcgtccatggaacgacttctggcccagctgtgcggcagcagcgcagcgtggccgctcccgctgtgggagggggacaccacaggccactgcttcacccagctggtgctcagcgccctgccccacgcgctcctcgccgtgctcagtgcctgttacttgggcaccccgaggagtccagattacatcctaccctgcagtcctggatggcgcctccgacttgcagcttccttcctgctttccgtcttcccgctgctagaccttcttccagttgctttgccaccaggggcaggcccaggacccatagggctagaggtgttggcagggtgcgtggcagctgtggcctggatcagccacagcctggccctgtgggtgttggcacattcccctcatggccactcccggggtcccttggccttggccctggtagccttgctgccagctccagccctagtgctgaccgtgttgtggcattgccagcgaggcacacttctgcccccacttctcccagggcccatggcccgcctatgcttgctcatcctgcagctggctgcactcttggcctatgcactgggatgggcagctcctgggggaccacgagaaccctgggctcaggagcccctcctgcccgaggatcaagaacctgaggtggctgaagatggggagagttggctgtcacgcttttcctatgcctggctggcacccttgctggcccgtggggcctgtggagagctccggcagcctcaggacatttgccgcctcccccacagactgcagccaacctacctggctcgtgtcttccaggcacactggcaggagggggcacggctgtggagggccttgtatggggcctttggacggtgctatctggcacttggactgctgaagctggtggggaccatgttgggattctcagggcccctgttgctctccctactggtgggcttcctggaagaggggcaggagccactaagccacggcctgctctatgctctggggctagccggtggggctgtgctgggtgctgtgctgcagaatcagtatgggtatgaggtatataaggtaacacttcaggcacggggggctgtgctgaacatcctgtactgcaaggctttacagctggggcccagccgccctcctactggggaggccctgaacctactaggcactgactctgaacggctgcttaactttgctgggagcttccatgaagcctggggcctgcccctgcaactggccatcaccctctacctgctgtaccagcaggtaggcgtggccttcgtgggtggtctcatcttggcactgctgctggtacccgtcaacaaagtgattgccacccgcatcatggccagcaaccaggaaatgctacagcacaaggatgcgcgggttaagcttgtgacagagctgctgagtggcattcgggtcatcaagttctgcgggtgggagcaggcactgggagcccgagtagaggcctgccgggctcgagagctggggcgactccgggtcatcaaatacctggatgcggcctgtgtatacctgtgggctgccctaccggttgtcatctccatcgttatcttcatcacctatgtcctcatggggcaccagctcactgccaccaaggtgttcacggccctggcactggtgcgaatgctcattcttcctctcaacaacttcccttgggtgatcaatggtctcctggaggccaaagtgtccttggaccggatccagcttttcctcgaccttccaaaccacaacccccaggcctactacagcccagatccccctgcagagccatctacagtattggagctgcatggagccttgttctcctgggacccagttggaaccagcctggagaccttcatcagtcatctcgaagtgaaaaagggtatgctggtgggcatcgtggggaaggtcggctgtgggaagagctccctgctggctgccatcgctggagagctccacaggtaaccaacctcctatgcacccctgtccttactttgtcctttagcaaacactgagcccctcttatgtgttggacaccttttgggggtcaggggtactaagaagagcaacgcatggtccctttattgggagagttttcaatctggaaagaaggaggtggccaagaaagcgaatcattgtaatcattacaccagagtgttttaaatgctataatagtcagcaaaggaatggaaacatccagtgtcagctattctttcagaaatgtggctgtgcagagaagggatccagagaggagcataggtttgagggaggaccttgttttcagatgggaacaagtacaatgtggtggccatactctccactgagctcctgaacagatgtaagtacaacagctgcttggctgtagccaaagagctatttcttcccttcttcgcccagaatgggcttcattaggaccccttgacctcaggagctgccatctcagtcatgtgacatgaagggggaccctgtgtagaagacagcagcctggggaggcttctaggagtcaagggctgggcatggagggacccagaggagagctggtcctcatattgctcgcctggctctctgcaggctgcgtgggcatgtggcagtgcgggggctgtccaagggctttggcctggccacccaggaaccctggatccagtttgccaccatccgagacaacatcctctttgggaagacatttgatgcacagctgtacaaggaggtgctagaagcctgcgccctcaatgatgacctcagtatcctgcctgctggagaccagacagaggtgggggagaagggtgtcacccttagcggaggacagcgtgcccggattgcccttgctcgtgctgtctaccaggaaaaggagctctatctcctcgatgaccctctggccgctgtggatgcagatgtggccaaccacctgctgcacaggtgcatcctgggcatgctgagctacaccacacggctgctctgcacccaccgcactgagtacctggagagggctgacgcggtgctgctgatggaggccgggcgcctcatccgggctggtaatgggggcaggagccccgtgtgagggaggtgtctgcccaggtctggcaggggattgtgaagtacagactctgccccctgctgcatgtgtgccctgagccagtcattgctgcctcccgccttcacagaactggtgtgaggaactgggagaacaggagggaaaaggagtacgttggtaaaatgccagtgtatttgggactcatgggctttgtgactgggtgctcttgggaacttaaaggcccagggtctctgagaacattctcatatcttcagagaagagaaaggagtcaggtttagaatggtctttttgtaaaaacaaaaatttttaaactctgaaagatttttatgcagagggatgtgaccacctgcaagtttactgggagagaaataggaggaaatgaagctccagccagatattaggaattgagcgaagcatgagaaaaagctctgcagtaatgagaagtaaccctggacagagtggcaggcatagctctggcggtcctcttggggatggacattcgtccctctctgctggtcggaatcaaggtttacaaggatggacttgagtcctgctcgaggtctaggggtatccagagcagggtgggttagagagggaggcctaagagtcctgctcgaggtctaggggtatcctgctagggtgggttagacggggaggcctgagaggatgagaggtgggatctgcacacgcactgagaaaggcatagtatagactcagaacagtcctctcccaatctccccttctaccctccaggacctccctctgagattctgccactggtacaagctgtccccaaagcctgggctgagaatggacaagagtctgactcagccacagcccagtcagtacagaacccagagaaaacaaaggaggggctggaggaggagcagagcacatctggtcgcctgctgcaggaagaaagcaagaaggagggcgccgtggccttgcacgtgtaccaagcttactggaaggccgtgggccagggcttggccttagccatcctcttctctctgcttctcatgcaagccacgcggaacgctgctgactggtggctctcccactggatctctcagctgaaggctgagaatagctcccaggaggcgcaaccctccaccagcccagcttctatggggctcttctctccgcagctgctcctcttttcccctggaaacctctacatcccagtgttcccactgcccaaagctgcccccaatggctcctcagacatccgtttctacctcaccgtgtatgcgaccattgctggtgtaaattccctctgcacccttctccgggcagtgctctttgcagcaggcacccttcaagcagctgccactctgcatcgccgcctgctgcatcgagtccttatggcaccagtgactttcttcaatgccacacccacgggccggatcctaaaccgcttctcctctgatgtggcctgtgcggatgacagcctgcccttcatcctcaacatcctcctggccaacgcggcaggcctgctggggctcctggccgtgctgggctctggcctgccctggctgctgctcctgctgccgcctttgagcatcatgtactatcacgtgcagcgccactacagggcctcctcacgggagctgcggcgcctgggcagcctcaccctgtctccactgtatagccatctggccgataccttggctggcctctctgtgctccgggccacaggggccacctacaggtttgaggaggagaacctgcgactccttgagctaaaccagaggtgccagtttgccaccagtgccacaatgcagtggctggacattcggctacagctcatgggggcggcagtggtcagcgctatcgcaggcatcgctctggtgcagcaccagcagggcctcgctaacccagggctggtgggcttgtcgctgtcttatgccctgtccctgacgggcctgctctcgggcctggtgagcagcttcacacagacagaggccatgctggtgagcgtcgagcggctggaagagtacacctgtgacctgccccaggaaccccagggccagccactgcagctgggcaccggctggctgacccagggggcgtggagttccaggacgtggtgttggcgtaccggccagggctgccgaatgccctggatggagtgaccttctgcgtgcagcctggagagaagttgggcatcgtgggccgcacaggctccggcaagtcttccctgttgttggtgctcttccggctgctagagcccagttcagggcgagtgctgctggacggcgtggacaccagccagctggagctggcccagctcagatcccagttggctatcatcccccaggagccctttttgttcagtgggactgttcgggaaaacctggacccccagggcctacataaggacagggccttgtggcaggccctgaagcagtgccacctgagtgaggtgattacatccatgggtggtctggatggtgagctgggtgaggggggccggagcttatctcttgggcagaggcagctgttgtgtttggccagggctctcctcacagatgccaagatcctgtgtatcgatgaggccacagcaagtgtggaccagaagacagaccagctgctccagcagaccatctgcaaacgctttgccaacaagacagtgctgaccattgcccataggctcaacacgatcctgaactcagaccgggtgctggtgctacaagcggggagagtggtagagctggactccccggccaccctgcgcaaccagccccactccctgttccagcagctgctgcagagcagccagcagggagtccctgcctcactcggaggtccctgagcccaatcccacaccctgcagagttctcccctctctctgatccaggccgggcctatacagaggtgctggctgcttgtttacattctcctctggggctctacctctccacacttccccagaagggaaaagggcaccctggattactctttggaaatcactccttggtgggcagcatcctgaggcttccccagaaccaggcctctgctctggccctcttgcatctggaacgccaggtgggtttttctggcataggagcccacttgcattttcatagttttatttgataaaattccatcttacattctgtgtattaaaaaaataatatttctggtgtg

SEQ ID NO: 359364 - DNA, 5645 bp, Homo sapiens
  misc_feature (5410)..(5411): n is a, c, g, or t
tgcatacaccagttctcaggatatcggaatccggtgcacagcagcttcttcaggtttgaggttccggatgcctgggggcggagaaacgggaggggaaaaacagatggcaaggtgaggcgtccatggaacgacttctggcccagctgtgcggcagcagcgcagcgtggccgctcccgctgtgggagggggacaccacaggccactgcttcacccagctggtgctcagcgccctgccccacgcgctcctcgccgtgctcagtgcctgttacttgggcaccccgaggagtccagattacatcctaccctgcagtcctggatggcgcctccgacttgcagcttccttcctgctttccgtcttcccgctgctagaccttcttccagttgctttgccaccaggggcaggcccaggacccatagggctagaggtgttggcagggtgcgtggcagctgtggcctggatcagccacagcctggccctgtgggtgttggcacattcccctcatggccactcccggggtcccttggccttggccctggtagccttgctgccagctccagccctagtgctgaccgtgttgtggcattgccagcgaggcacacttctgcccccacttctcccagggcccatggcccgcctatgcttgctcatcctgcagctggctgcactcttggcctatgcactgggatgggcagctcctgggggaccacgagaaccctgggctcaggagcccctcctgcccgaggatcaagaacctgaggtggctgaagatggggagagttggctgtcacgcttttcctatgcctggctggcacccttgctggcccgtggggcctgtggagagctccggcagcctcaggacatttgccgcctcccccacagactgcagccaacctacctggctcgtgtcttccaggcacactggcaggagggggcacggctgtggagggccttgtatggggcctttggacggtgctatctggcacttggactgctgaagctggtggggaccatgttgggattctcagggcccctgttgctctccctactggtgggcttcctggaagaggggcaggagccactaagccacggcctgctctatgctctggggctagccggtggggctgtgctgggtgctgtgctgcagaatcagtatgggtatgaggtatataaggtaacacttcaggcacggggggctgtgctgaacatcctgtactgcaaggctttacagctggggcccagccgccctcctactggggaggccctgaacctactaggcactgactctgaacggctgcttaactttgctgggagcttccatgaagcctggggcctgcccctgcaactggccatcaccctctacctgctgtaccagcaggtaggcgtggccttcgtgggtggtctcatcttggcactgctgctggtacccgtcaacaaagtgattgccacccgcatcatggccagcaaccaggaaatgctacagcacaaggatgcgcgggttaagcttgtgacagagctgctgagtggcattcgggtcatcaagttctgcgggtgggagcaggcactgggagcccgagtagaggcctgccgggctcgagagctggggcgactccgggtcatcaaatacctggatgcggcctgtgtatacctgtgggctgccctaccggttgtcatctccatcgttatcttcatcacctatgtcctcatggggcaccagctcactgccaccaaggtgttcacggccctggcactggtgcgaatgctcattcttcctctcaacaacttcccttgggtgatcaatggtctcctggaggccaaagtgtccttggaccggatccagcttttcctcgaccttccaaaccacaacccccaggcctactacagcccagatccccctgcagagccatctacagtattggagctgcatggagccttgttctcctgggacccagttggaaccagcctggagaccttcatcagtcatctcgaagtgaaaaagggtatgctggtgggcatcgtggggaaggtcggctgtgggaagagctccctgctggctgccatcgctggagagctccacaggtaaccaacctcctatgcacccctgtccttactttgtcctttagcaaacactgagcccctcttatgtgttggacaccttttgggggtcaggggtactaagaagagcaacgcatggtccctttattgggagagttttcaatctggaaagaaggaggtggccaagaaagcgaatcattgtaatcattacaccagagtgttttaaatgctataatagtcagcaaaggaatggaaacatccagtgtcagctattctttcagaaatgtggctgtgcagagaagggatccagagaggagcataggtttgagggaggaccttgttttcagatgggaacaagtacaatgtggtggccatactctccactgagctcctgaacagatgtaagtacaacagctgcttggctgtagccaaagagctatttcttcccttcttcgcccagaatgggcttcattaggaccccttgacctcaggagctgccatctcagtcatgtgacatgaagggggaccctgtgtagaagacagcagcctggggaggcttctaggagtcaagggctgggcatggagggacccagaggagagctggtcctcatattgctcgcctggctctctgcaggctgcgtgggcatgtggcagtgcgggggctgtccaagggctttggcctggccacccaggaaccctggatccagtttgccaccatccgagacaacatcctctttgggaagacatttgatgcacagctgtacaaggaggtgctagaagcctgcgccctcaatgatgacctcagtatcctgcctgctggagaccagacagaggtgggggagaagggtgtcacccttagcggaggacagcgtgcccggattgcccttgctcgtgctgtctaccaggaaaaggagctctatctcctcgatgaccctctggccgctgtggatgcagatgtggccaaccacctgctgcacaggtgcatcctgggcatgctgagctacaccacacggctgctctgcacccaccgcactgagtacctggagagggctgacgcggtgctgctgatggaggccgggcgcctcatccgggctggacctccctctgagattctgccactggtacaagctgtccccaaagcctgggctgagaatggacaagagtctgactcagccacagcccagtcagtacagaacccagagaaaacaaaggaggggctggaggaggagcagagcacatctggtcgcctgctgcaggaagaaagcaagaaggagggcgccgtggccttgcacgtgtaccaagcttactggaaggccgtgggccagggcttggccttagccatcctcttctctctgcttctcatgcaagccacgcggaacgctgctgactggtggctctcccactggatctctcagctgaaggctgagaatagctcccaggaggcgcaaccctccaccagcccagcttctatggggctcttctctccgcagctgctcctcttttcccctggaaacctctacatcccagtgttcccactgcccaaagctgcccccaatggctcctcagacatccgtttctacctcaccgtgtatgcgaccattgctggtgtaaattccctctgcacccttctccgggcagtgctctttgcagcaggcacccttcaagcagctgccactctgcatcgccgcctgctgcatcgagtccttatggcaccagtgactttcttcaatgccacacccacgggccggatcctaaaccgcttctcctctgatgtggcctgtgcggatgacagcctgcccttcatcctcaacatcctcctggccaacgcggcaggcctgctggggctcctggccgtgctgggctctggcctgccctggctgctgctcctgctgccgcctttgagcatcatgtactatcacgtgcagcgccactacagggcctcctcacgggagctgcggcgcctgggcagcctcaccctgtctccactgtatagccatctggccgataccttggctggcctctctgtgctccgggccacaggggccacctacaggtttgaggaggagaacctgcgactccttgagctaaaccagaggtgccagtttgccaccagtgccacaatgcagtggctggacattcggctacagctcatgggggcggcagtggtcagcgctatcgcaggcatcgctctggtgcagcaccagcagggcctcgctaacccagggctggtgggcttgtcgctgtcttatgccctgtccctgacgggcctgctctcgggcctggtgagcagcttcacacagacagaggccatgctggtgagcgtcgagcggctggaagagtacacctgtgacctgccccaggaaccccagggccagccactgcagctgggcaccggctggctgacccagggggcgtggagttccaggacgtggtgttggcgtaccggccagggctgccgaatgccctggatggagtgaccttctgcgtgcagcctggagagaagttgggcatcgtgggccgcacaggctccggcaagtcttccctgttgttggtgctcttccggctgctagagcccagttcagggcgagtgctgctggacggcgtggacaccagccagctggagctggcccagctcagatcccagttggctatcatcccccaggagccctttttgttcagtgggactgttcgggaaaacctggacccccagggcctacataaggacagggccttgtggcaggccctgaagcagtgccacctgagtgaggtgattacatccatgggtggtctggatggtgagctgggtgaggggggccggagcttatctcttgggcagaggcagctgttgtgtttggccagggctctcctcacagatgccaagatcctgtgtatcgatgaggccacagcaagtgtggaccagaagacagaccagctgctccagcagaccatctgcaaacgctttgccaacaagacagtgctgaccattgcccataggctcaacacgatcctgaactcagaccgggtgctggtgctacaagcggggagagtggtagagctggactccccggccaccctgcgcaaccagccccactccctgttccagcagctgctgcagagcagccagcagggagtccctgcctcactcggaggtccctgagcccaatcccacaccctgcagagttctcccctctctctgatccaggccgggcctatacagaggtgctggctgcttgtttacattctcctctggggctctacctctccacacttccccagaagggaaaagggcaccctggattactctttggaaatcactccttggtgggcagcatcctgaggcttccccagaaccaggcnnggtcccccgacagcgcataggcgcctgtaaccctggtccacccaactccagaggaagaccgatacctgatacactctgtgcagcacgagctcccgacactctgctctggccctcttgcatctggaacgccaggtgggtttttctggcataggagcccacttgcattttcatagttttatttgataaaattccatcttacattctgtgtattaaaaaaataatatttctggtgtg

SEQ ID NO: 359365 - DNA, 3059 bp, Homo sapiens
tgcatacaccagttctcaggatatcggaatccggtgcacagcagcttcttcaggtttgaggttccggatgcctgggggcggagaaacgggaggggaaaaacagatggcaaggtgaggcgtccatggaacgacttctggcccagctgtgcggcagcagcgcagcgtggccgctcccgctgtgggagggggacaccacaggccactgcttcacccagctggtgctcagcgccctgccccacgcgctcctcgccgtgctcagtgcctgttacttgggcaccccgaggagtccagattacatcctaccctgcagtcctggatggcgcctccgacttgcagcttccttcctgctttccgtcttcccgctgctagaccttcttccagttgctttgccaccaggggcaggcccaggacccatagggctagaggtgttggcagggtgcgtggcagctgtggcctggatcagccacagcctggccctgtgggtgttggcacattcccctcatggccactcccggggtcccttggccttggccctggtagccttgctgccagctccagccctagtgctgaccgtgttgtggcattgccagcgaggcacacttctgcccccacttctcccagggcccatggcccgcctatgcttgctcatcctgcagctggctgcactcttggcctatgcactgggatgggcagctcctgggggaccacgagaaccctgggctcaggagcccctcctgcccgaggatcaagaacctgaggtggctgaagatggggagagttggctgtcacgcttttcctatgcctggctggcacccttgctggcccgtggggcctgtggagagctccggcagcctcaggacatttgccgcctcccccacagactgcagccaacctacctggctcgtgtcttccaggcacactggcaggagggggcacggctgtggagggccttgtatggggcctttggacggtgctatctggcacttggactgctgaagctggtggggaccatgttgggattctcagggcccctgttgctctccctactggtgggcttcctggaagaggggcaggagccactaagccacggcctgctctatgctctggggctagccggtggggctgtgctgggtgctgtgctgcagaatcagtatgggtatgaggtatataaggtaacacttcaggcacggggggctgtgctgaacatcctgtactgcaaggctttacagctggggcccagccgccctcctactggggaggccctgaacctactaggcactgactctgaacggctgcttaactttgctgggagcttccatgaagcctggggcctgcccctgcaactggccatcaccctctacctgctgtaccagcaggtaggcgtggccttcgtgggtggtctcatcttggcactgctgctggtacccgtcaacaaagtgattgccacccgcatcatggccagcaaccaggaaatgctacagcacaaggatgcgcgggttaagcttgtgacagagctgctgagtggcattcgggtcatcaagttctgcgggtgggagcaggcactgggagcccgagtagaggcctgccgggctcgagagctggggcgactccgggtcatcaaatacctggatgcggcctgtgtatacctgtgggctgccctaccggttgtcatctccatcgttatcttcatcacctatgtcctcatggggcaccagctcactgccaccaaggtgttcacggccctggcactggtgcgaatgctcattcttcctctcaacaacttcccttgggtgatcaatggtctcctggaggccaaagtgtccttggaccggatccagcttttcctcgaccttccaaaccacaacccccaggcctactacagcccagatccccctgcagagccatctacagtattggagctgcatggagccttgttctcctgggacccagttggaaccagcctggagaccttcatcagtcatctcgaagtgaaaaagggtatgctggtgggcatcgtggggaaggtcggctgtgggaagagctccctgctggctgccatcgctggagagctccacaggtaaccaacctcctatgcacccctgtccttactttgtcctttagcaaacactgagcccctcttatgtgttggacaccttttgggggtcaggggtactaagaagagcaacgcatggtccctttattgggagagttttcaatctggaaagaaggaggtggccaagaaagcgaatcattgtaatcattacaccagagtgttttaaatgctataatagtcagcaaaggaatggaaacatccagtgtcagctattctttcagaaatgtggctgtgcagagaagggatccagagaggagcataggtttgagggaggaccttgttttcagatgggaacaagtacaatgtggtggccatactctccactgagctcctgaacagatgtaagtacaacagctgcttggctgtagccaaagagctatttcttcccttcttcgcccagaatgggcttcattaggaccccttgacctcaggagctgccatctcagtcatgtgacatgaagggggaccctgtgtagaagacagcagcctggggaggcttctaggagtcaagggctgggcatggagggacccagaggagagctggtcctcatattgctcgcctggctctctgcaggctgcgtgggcatgtggcagtgcgggggctgtccaagggctttggcctggccacccaggaaccctggatccagtttgccaccatccgagacaacatcctctttgggaagacatttgatgcacagctgtacaaggaggtgctagaagcctgcgccctcaatgatgacctcagtatcctgcctgctggagaccagacagaggtgggggagaagggtgtcacccttagcggaggacagcgtgcccggattgcccttgctcgtgctgtctaccaggtcagttaaagatggaggttgcagtggcagggaggtggggggagtccagagccttgggaacttggctgagttaggaggataggaatattttccttagcatc

SEQ ID NO: 359366 - DNA, 578 bp, Homo sapiens
tgcatacaccagttctcaggatatcggaatccggtgcacagcagcttcttcaggtttgaggttccggatgcctgggggcggagaaacgggaggggaaaaacagatggcaaggtgggtgaccagcgtccagaaatccactggggaaacctcctcccgtttttacccttggtaccgcgagaatgggcggggtctggcttcggggcggaagcgacgggcggtcccggttccagggcggggctggagacagggagacccggctgggaagtgcaggcaaagccggctgttaccctgcacagccgtcaccctcaactttcccttcaggtgaggcgtccatggaacgacttctggcccagctgtgcggcagcagcgcagcgtggccgctcccgctgtgggagggggacaccacaggccactgcttcacccagctggtgctcagcgccctgccccacgcgctcctcgccgtgctcagtgcctgttacttgggcaccccgaggtgggtagagacgggcgcaaggcatctgtccatgtgtgcctgcagatctcacccgcggcctacatcttccggcagtgtcaccaga

SEQ ID NO: 359367 - DNA, 541 bp, Homo sapiens
tgtatttttaacattttatggtgacacattgggagttatttccctaagtgagacccttttctgaatatatctgtgccctcatagcctagcagagtattcagacttttgaatgatggaaacaaagctgtgggaaaagagcagaatacaaaataacaataccaatttgagctagcagacattgctgtcaggggtcgggctagaaagatgagaaaaactgaagcctgcttagagaggtgttgacaaccaccagatccagaagaatgacctagataacagggcttcaagttctgacatgattttattagagatgtttcagaaatctctactggagaagttgtgggaacacaggggaataaagtcacggggatgggggaggagtcatgatggtaagtgttgatttccccagcatggatcacctgatagcatcatcagttaaattaggataatagcgatttgagcatacttaagttagtagatgcaagaatgggaggagagggcagaaatacacatggaagcaaaatagagcagaaatatatgggag

SEQ ID NO: 359368 - DNA, 491 bp, Homo sapiens
tgtatttttaacattttatggtgacacattgggagttatttccctaagtgagacccttttctgaatatatctgtgccctcatagcctagcagagtattcagacttttgaatgatggaaacaaagctgtgggaaaagagcagaatacaaaataacaataccaatttgagctagcagacattgctgtcaggggtcgggctagaaagatgagaaaaactgaagcctgcttagagaggtgttgacaaccaccagatccagaagaatgacctagataacagggcttcaagttctgacatgattttattagagatgtttcagaaatctctactggagaagttgtgggaacacaggggaataaagtcacggggatgggggaggagtcatgatggtaagtgttgatttccccagcatggatcacctgatagcatctactaacttaagtatgctcaaatcgctattatcctaatttaactgtcgacgggccgcgaattta

SEQ ID NO: 359369 - DNA, 382 bp, Homo sapiens
acaaaaaacaagcagcgggtgtgtctgggggatgggccagcctctagcctgcagtcgctcccttcccaggcaaaagagagagaactcggtcccctctccctgtaccccacaagagcctgggcaccctccccactcccaccacgaacctgggcttcactgggagggaatttagacacttggatgctggagcctagatctgaggttctgttgagccacggcactgtgacccggactgtcccctccatccccgtccaaactgggagggggcatcccttgtccctggcactcctctgtgatctggcaggtgtgatgagccacagcagggacaggggaataggggctgggctttttagggtgatggcacccagacggtaacaggacg

SEQ ID NO: 359370 - DNA, 896 bp, Homo sapiens
gagtttgagaccagcctgggcagcatagcaaggaccccatctctaccaaaaaaaaacaaaattaatactaccaaggaaatatttaataatatcagttctgcacaaattatgccaggaaataaaagaagatttaacacttcccaactcattttataaaattagtagtattgtgatatcaaaacaagtcaaatagattacaagaaagaaaactacaggcatagacaaaaaaatcttcaagaaaatattggcaaatcaaaacccagcaatattgtaaaaagggataatgcattatgaaagtaggttttatccccaaaaattcaaggttgttttaatcttcagaatgaatcaatgcaattcaccatatcaataaattaaatgaatgggaggctaagacaggcagatcacttcaggttaggagtttgagacagaccagcctggccaaagtggtgaaatcctgtctctactgaaaaaacaaataaaaaaattagccaggtgcggtggcacacacctgtaatcccagctactctggggcatgttgaggcccaagaatctctcgaacccaggaggtggaggttgtgccattgcactccagcctgggcgacagagtgagactctgtctcaaaaaaaaaaaaaaaaaaaaagaaaagaaaagaaaaaagagaaaaaaaaaattaaaaaccccatatgacccatataattactcagtggttagatactgcattaattcataataaataatctcagcaaactaggaattgaaggaatttcctcagcctagtaaagggcaaagataactatcatagagctgatgtaacacttaatggtgaaaaagtgaatgctttcttcctaaaattgagaacaagacaaggtagtcatagcaagttcagttaagcaaa

SEQ ID NO: 359371 - DNA, 357 bp, Homo sapiens
aagtaagctctcagtatttgcaaatgaaatcattttctatgcacaaaatccagcctgggcgacagagtgagactctgtctcaaaaaaaaaaaaaaaaaaaaagaaaagaaaagaaaaaagagaaaaaaaaaattaaaaaccccatatgacccatataattactcagtggttagatactgcattaattcataataaataatctcagcaaactaggaattgaaggaatttcctcagcctagtaaagggcaaagataactatcatagagctgatgtaacacttaatggtgaaaaagtgaatgctttcttcctaaaattgagaacaagacaaggtagtcatagcaagttcagttaagcaaa

SEQ ID NO: 359372 - DNA, 483 bp, Homo sapiens
gtctttgtccttggctggggtagagacagagagaagagacgcaagttggggacctgcaagtagggttccagtccaggtccgcgtgcgcaggccgggcgccctcaggtttagcggccacgcccttgcgttccttccgggttgcgtgaggattcctgaaacgcagttttcagcagctgctctgggcagctccacacgatcctttcagcgaagttgctgccatgtaagaagtccttttcacctcccgccatgattctgagacctccccagccatgtggaactcccgaggtcttggaatcctgaacagtgttccaggtagccaaagctggtctgcagaatgaagctgatgtgcacaaagatattctgccttcaacggaggtgtgaggatcagctccgtctgggtcatgcctggagtccagcttctctcctctcccaaaatgactccgatttggtgctcaaccttgtgatcacagattgccaataaac

SEQ ID NO: 359373 - DNA, 558 bp, Homo sapiens
caggccaacttaatattatgatgattcctcctcgtagggagaagacctgggcaggatgcaggtagggtgactggttgtctgggtttgcctgtgactaagggggtttctaggaacttgggccttgcaaactagaatgaattggtcaccttcaagcggagtctggagaagtcaagacacttggcctgacactctaaaagggtcagcatcttccttgcccacctccaaggagatttaaatactccttcctgcgtgctccagaacactaacttcatacctgtttacattctgccttcttcatttaatccagctgctgggtaaacagccagcatggggccttgcgtgagcacaggccggcaagtgttagatgagcaagtggctgctgaaggcaggtcagacagacccacagtctgtctgtctgtgcacccctctgggcttctatttggcgattatttctgtgtctcttgaaaaaaaaaattctgccccaatgtagcgaaaagtgagcttcttgtagttaaagagcaaaataaggatttaattaaattaaaaaaaaaagaaaag

SEQ ID NO: 359374 - DNA, 1031 bp, Homo sapiens
tgcccacgttgcgccggcctcgcgccagtccgctgggctgcagggactgcggcgcctgagggagtcgctgacgggcacgctgactggaggctggcggacaggcgacagcgacctgcggcagagagtcttgctgcgacacccaggctggagtgcaatggcgctatctcggctcactgcaacctccgcttcccggattcaagcgattctcctgcctcagcctcccgagtaggtgggactacaggcactgagtggtggggtatgccatcctcccctgctggaaccagccttggcctgccctgttagtcatcaaaaatagatctcaccagggaacaatcttctcaggttgttgtgtaatttgagtgagccaagatggagtctcgctctgttgcccaggctggagtgcagtggatcagtctagctcattgcagcctccacctcctgggttcaagagattctcctgcctcagcctcctgtgtagctgggattacaggtgtgcgccaccacgcctggctaataattctatttttagtagagttggggtctcaccatgttggccaggctgctctcgaactcctgacctcaagtgatctgcccgcctcggcctcccaaagagctgggattataggtgtgagtcaccatgcctggcctcttgctcacttttcatactaaaacaacaaattacaggctgtagtttaacctctctactgcatgcataaatgcagtgtggtacgagtgcctctgtagcccataacttcagtttccttgttgctagcagtctgtggtgacactatactaatctcacatgcagcaaccaatgaggattagccagggacacaggaggagtcaccttgcattcagaatgactcaagtttagtctcaacttgaccattagctctctgagtgatcttgcccatgttaattctcttgatcttagtttcttcagagccagtgagacattgcttgaaagtgacttagcctggtatacccaggtctgtcagacttatagtctggtgctctcttgggtgaacttg

SEQ ID NO: 359375 - DNA, 1259 bp, Homo sapiens
tgcccacgttgcgccggcctcgcgccagtccgctgggctgcagggactgcggcgcctgagggagtcgctgacgggcacgctgactggaggctggcggacaggcgacagcgacctgcggcaggaccagaggagcgagagcagcaagaaccacacccagcagcaatgtcagcggaagtggaaacctcagagggggtagacgagtcagaaaaaaagaactctggggccctagaaaaggagaaccaaatgagaatggctgacctctcggagctcctgaaggaagggaccaaggaagcacacgaccgggcagaaaacacccagtttgtcaaggacttcttgaaaggcaacattaagaaggagctgtttaagctggccaccacggcactttacttcacatactcagccctcgaggaggaaatggagcgcaacaaggaccatccagcctttgcccctttgtacttccccatggagctgcaccggaaggaggcgctgaccaaggacatggagtatttctttggtgaaaactgggaggagcaggtgcagtgccccaaggctgcccagaagtacgtggagcggatccactacatagggcagaacgagccggagctactggtggcccatgcatacacccgctacatgggggatctctcggggggccaggtgctgaagaaggtggcccagcgagcactgaaactccccagcacaggggaagggacccagttctacctgtttgagaatgtggacaatgcccagcagttcaagcagctctaccgggccaggatgaacgccctggacctgaacatgaagaccaaagagaggatcgtggaggaggccaacaaggcttttgagtataacatgcagatattcaatgaactggaccaggccggctccacactggccagagagaccttggaggatgggttccctgtacacgatgggaaaggagacatgcgtaaatgccctttctacgctgctgaacaagacaaaggtgccctggagggcagcagctgtcccttccgaacagctatggctgtgctgaggaagcccagcctccagttcatcctggccgctggtgtggccctagctgctggactcttggcctggtactacatgtgaagcacccatcatgccacaccggtaccctcctcccgactgaccactggcctacccctttctccagccctgactaaactaccacctcaggtgactttttaaaaaatgctgggtttaagaaaggcaaccaataaaagccagatgctaga

SEQ ID NO: 359376 - DNA, 1288 bp, Homo sapiens
ccgccccaggcacgtgcacagtgagtttgtgtaaatccagttagaccaaaatgagcgaggtggagagcctcttaaccggatgctacgggtgatgactgggaggaggagaaaaattacctctttatcttgcatgaacatcttaattttcaggaccagaggagcgagagcagcaagaaccacacccagcagcaatgtcagcggaagtggaaacctcagagggggtagacgagtcagaaaaaaagaactctggggccctagaaaaggagaaccaaatgagaatggctgacctctcggagctcctgaaggaagggaccaaggaagcacacgaccgggcagaaaacacccagtttgtcaaggacttcttgaaaggcaacattaagaaggagctgtttaagctggccaccacggcactttacttcacatactcagccctcgaggaggaaatggagcgcaacaaggaccatccagcctttgcccctttgtacttccccatggagctgcaccggaaggaggcgctgaccaaggacatggagtatttctttggtgaaaactgggaggagcaggtgcagtgccccaaggctgcccagaagtacgtggagcggatccactacatagggcagaacgagccggagctactggtggcccatgcatacacccgctacatgggggatctctcggggggccaggtgctgaagaaggtggcccagcgagcactgaaactccccagcacaggggaagggacccagttctacctgtttgagaatgtggacaatgcccagcagttcaagcagctctaccgggccaggatgaacgccctggacctgaacatgaagaccaaagagaggatcgtggaggaggccaacaaggcttttgagtataacatgcagatattcaatgaactggaccaggccggctccacactggccagagagaccttggaggatgggttccctgtacacgatgggaaaggagacatgcgtaaatgccctttctacgctgctgaacaagacaaaggtgccctggagggcagcagctgtcccttccgaacagctatggctgtgctgaggaagcccagcctccagttcatcctggccgctggtgtggccctagctgctggactcttggcctggtactacatgtgaagcacccatcatgccacaccggtaccctcctcccgactgaccactggcctacccctttctccagccctgactaaactaccacctcaggtgactttttaaaaaatgctgggtttaagaaaggcaaccaataaaagccagatgctaga

SEQ ID NO: 359377 - DNA, 1277 bp, Homo sapiens
gctttattttaaagaaaacaatcctggggtgtgtgggtgtcaccttggttacattcgctctgaggaaagcagaaccgacaggtatttggggaagtgactgccgtgggtgccacatcaccagctccttgtgtctctgcaggaccagaggagcgagagcagcaagaaccacacccagcagcaatgtcagcggaagtggaaacctcagagggggtagacgagtcagaaaaaaagaactctggggccctagaaaaggagaaccaaatgagaatggctgacctctcggagctcctgaaggaagggaccaaggaagcacacgaccgggcagaaaacacccagtttgtcaaggacttcttgaaaggcaacattaagaaggagctgtttaagctggccaccacggcactttacttcacatactcagccctcgaggaggaaatggagcgcaacaaggaccatccagcctttgcccctttgtacttccccatggagctgcaccggaaggaggcgctgaccaaggacatggagtatttctttggtgaaaactgggaggagcaggtgcagtgccccaaggctgcccagaagtacgtggagcggatccactacatagggcagaacgagccggagctactggtggcccatgcatacacccgctacatgggggatctctcggggggccaggtgctgaagaaggtggcccagcgagcactgaaactccccagcacaggggaagggacccagttctacctgtttgagaatgtggacaatgcccagcagttcaagcagctctaccgggccaggatgaacgccctggacctgaacatgaagaccaaagagaggatcgtggaggaggccaacaaggcttttgagtataacatgcagatattcaatgaactggaccaggccggctccacactggccagagagaccttggaggatgggttccctgtacacgatgggaaaggagacatgcgtaaatgccctttctacgctgctgaacaagacaaaggtgccctggagggcagcagctgtcccttccgaacagctatggctgtgctgaggaagcccagcctccagttcatcctggccgctggtgtggccctagctgctggactcttggcctggtactacatgtgaagcacccatcatgccacaccggtaccctcctcccgactgaccactggcctacccctttctccagccctgactaaactaccacctcaggtgactttttaaaaaatgctgggtttaagaaaggcaaccaataaaagccagatgctaga

SEQ ID NO: 359378 - DNA, 1132 bp, Homo sapiens
tgcccacgttgcgccggcctcgcgccagtccgctgggctgcagggactgcggcgcctgagggagtcgctgacgggcacgctgactggaggctggcggacaggcgacagcgacctgcggcagaatggctgacctctcggagctcctgaaggaagggaccaaggaagcacacgaccgggcagaaaacacccagtttgtcaaggacttcttgaaaggcaacattaagaaggagctgtttaagctggccaccacggcactttacttcacatactcagccctcgaggaggaaatggagcgcaacaaggaccatccagcctttgcccctttgtacttccccatggagctgcaccggaaggaggcgctgaccaaggacatggagtatttctttggtgaaaactgggaggagcaggtgcagtgccccaaggctgcccagaagtacgtggagcggatccactacatagggcagaacgagccggagctactggtggcccatgcatacacccgctacatgggggatctctcggggggccaggtgctgaagaaggtggcccagcgagcactgaaactccccagcacaggggaagggacccagttctacctgtttgagaatgtggacaatgcccagcagttcaagcagctctaccgggccaggatgaacgccctggacctgaacatgaagaccaaagagaggatcgtggaggaggccaacaaggcttttgagtataacatgcagatattcaatgaactggaccaggccggctccacactggccagagagaccttggaggatgggttccctgtacacgatgggaaaggagacatgcgtaaatgccctttctacgctgctgaacaagacaaaggtgccctggagggcagcagctgtcccttccgaacagctatggctgtgctgaggaagcccagcctccagttcatcctggccgctggtgtggccctagctgctggactcttggcctggtactacatgtgaagcacccatcatgccacaccggtaccctcctcccgactgaccactggcctacccctttctccagccctgactaaactaccacctcaggtgactttttaaaaaatgctgggtttaagaaaggcaaccaataaaagccagatgctaga

SEQ ID NO: 359379 - DNA, 833 bp, Homo sapiens
tcttctccgaaaggctacatgaatattgttgtggggaagagactgataataaaggaggcgctgaccaaggacatggagtatttctttggtgaaaactgggaggagcaggtgcagtgccccaaggctgcccagaagtacgtggagcggatccactacatagggcagaacgagccggagctactggtggcccatgcatacacccgctacatgggggatctctcggggggccaggtgctgaagaaggtggcccagcgagcactgaaactccccagcacaggggaagggacccagttctacctgtttgagaatgtggacaatgcccagcagttcaagcagctctaccgggccaggatgaacgccctggacctgaacatgaagaccaaagagaggatcgtggaggaggccaacaaggcttttgagtataacatgcagatattcaatgaactggaccaggccggctccacactggccagagagaccttggaggatgggttccctgtacacgatgggaaaggagacatgcgtaaatgccctttctacgctgctgaacaagacaaaggtgccctggagggcagcagctgtcccttccgaacagctatggctgtgctgaggaagcccagcctccagttcatcctggccgctggtgtggccctagctgctggactcttggcctggtactacatgtgaagcacccatcatgccacaccggtaccctcctcccgactgaccactggcctacccctttctccagccctgactaaactaccacctcaggtgactttttaaaaaatgctgggtttaagaaaggcaaccaataaaagccagatgctaga

SEQ ID NO: 359380 - DNA, 1160 bp, Homo sapiens
tgcccacgttgcgccggcctcgcgccagtccgctgggctgcagggactgcggcgcctgagggagtcgctgacgggcacgctgactggaggctggcggacaggcgacagcgacctgcggcaggaccagaggagcgagagcagcaagaaccacacccagcagcaatgtcagcggaagtggaaacctcagagggggtagacgagtcagaaaaaaagaactctggggccctagaaaaggagaaccaaatgagaatggctgacctctcggagctcctgaaggaagggaccaaggaagcacacgaccgggcagaaaacacccagtttgtcaaggacttcttgaaaggcaacattaagaaggagctgtttaagctggccaccacggcactttacttcacatactcagccctcgaggaggaaatggagcgcaacaaggaccatccagcctttgcccctttgtacttccccatggagctgcaccggaaggaggcgctgaccaaggacatggagtatttctttggtgaaaactgggaggagcaggtgcagtgccccaaggctgcccagaagtacgtggagcggatccactacatagggcagaacgagccggagctactggtggcccatgcatacacccgctacatgggggatctctcggggggccaggtgctgaagaaggtggcccagcgagcactgaaactccccagcacaggggaagggacccagttctacctgtttgagaatgtggacaatgcccagcagttcaagcagctctaccgggccaggatgaacgccctggacctgaacatgaagaccttggaggatgggttccctgtacacgatgggaaaggagacatgcgtaaatgccctttctacgctgctgaacaagacaaaggtgccctggagggcagcagctgtcccttccgaacagctatggctgtgctgaggaagcccagcctccagttcatcctggccgctggtgtggccctagctgctggactcttggcctggtactacatgtgaagcacccatcatgccacaccggtaccctcctcccgactgaccactggcctacccctttctccagccctgactaaactaccacctcaggtgactttttaaaaaatgctgggtttaagaaaggcaaccaataaaagccagatgctaga

SEQ ID NO: 359381 - DNA, 931 bp, Homo sapiens
cgagatcaggtcagtaggtaataatgtgttgaactaaccttcttcccattttcaataatgggcagaatgcaagagaacctatgtcaccgagtaacggtgtacacctgtggttctcggggctgccctttggccttggaggatgggttccctgtacacgatgggaaaggagacatgcgtaaatgccctttctacgctgctgaacaagacaaaggtgccctggagggcagcagctgtcccttccgaacagctatggctgtgctgaggaagcccagcctccagttcatcctggccgctggtgtggccctagctgctggactcttggcctggtactacatgtgaagcacccatcatgccacaccggtaccctcctcccgactgaccactggcctacccctttctccagccctgactaaactaccacctcaggtgactttttaaaaaatgctgggtttaagaaaggcaaccaataaaagccagatgctagagcctctgcctgacagcatcctctctatgggccatattccgcactgggcacaggccgtcaccctgggagcagtcggcacagtgcagcaagcctggcccccgacccagctctactccaggcttccacacttctgggccctaggctgcttccggtagtccctgtttttgcagtacatgggtgactatctcccctgttggaggtgagtggcctgtaagtccaagctgtgcgagggggccttgctggatgctgctgtacaacttctgggcctctcttggaccctgggagtgagggtgggtgtgggtggaagcctcagaggccttgggagctcatccctctcacccagaatccctctaaccccttgggtgcggtttgctcagccccagcttatctcctcctccgcgctgtgtaaatgctccagcactcaataaagtgggctttgcaagctac

SEQ ID NO: 359382 - DNA, 513 bp, Homo sapiens
tgcccacgttgcgccggcctcgcgccagtccgctgggctgcagggactgcggcgcctgagggagtcgctgacgggcacgctgactggaggctggcggacaggcgacagcgacctgcggcaggaccagaggagcgagagcagcaagaaccacacccagcagcaatgtcagcggaagtggaaacctcagagggggtagacgagtcagaaaaaaagaactctggggccctagaaaaggagaaccaaatgagaatggctgacctctcggagctcctgaaggaagggaccaaggaagcacacgaccgggcagaaaacacccagtttgtcaaggacttcttgaaaggcaacattaagaaggagctgtttaaggtttgtgccccgcattgggttccagactgtcatatggggttggggtgggggccttggtcccatgagaaaagtgcccctggagccactctgagggaaaagctgggcttttctccacactccattccttcttgacgttaagctctggct

SEQ ID NO: 359383 - DNA, 378 bp, Homo sapiens
ccgccccaggcacgtgcacagtgagtttgtgtaaatccagttagaccaaaatgagcgaggtggagagcctcttaaccggatgctacgggtgatgactgggaggaggagaaaaattacctctttatcttgcatgaacatcttaattttcaggaccagaggagcgagagcagcaagaaccacacccagcagcaatgtcagcggaagtggactcttggcctggtactacatgtgaagcacccatcatgccacaccggtaccctcctcccgactgaccactggcctacccctttctccagccctgactaaactaccacctcaggtgactttttaaaaaatgctgggtttaagaaaggcaaccaataaaagccagatgctaga

SEQ ID NO: 359384 - DNA, 1705 bp, Homo sapiens
tgcccacgttgcgccggcctcgcgccagtccgctgggctgcagggactgcggcgcctgagggagtcgctgacgggcacgctgactggaggctggcggacaggcgacagcgacctgcggcaggaccagaggagcgagagcagcaagaaccacacccagcagcaatgtcagcggaagtggaaacctcagagggggtagacgagtcagaaaaaaagaactctggggccctagaaaaggagaaccaaatgagaatggctgacctctcggagctcctgaaggaagggaccaaggaagcacacgaccgggcagaaaacacccagtttgtcaaggacttcttgaaaggcaacattaagaaggagctgtttaagctggccaccacggcactttacttcacatactcagccctcgaggaggaaatggagcgcaacaaggaccatccagcctttgcccctttgtacttccccatggagctgcaccggaaggaggcgctgaccaaggacatggagtatttctttggtgaaaactgggaggagcaggtgcagtgccccaaggctgcccagaagtacgtggagcggatccactacatagggcagaacgagccggagctactggtggcccatgcatacacccgctacatgggggatctctcggggggccaggtgctgaagaaggtggcccagcgagcactgaaactccccagcacaggggaagggacccagttctacctgtttgagaatgtggacaatgcccagcagttcaagcagctctaccgggccaggatgaacgccctggacctgaacatgaagaccaaagagaggatcgtggaggaggccaacaaggcttttgagtataacatgcagatattcaatgaactggaccaggccggctccacactggccagagagaccttggaggatgggttccctgtacacgatgggaaaggagacatgcgtaaatgccctttctacgctgctgaacaagacaaaggtgccctggagggcagcagctgtcccttccgaacagctatggctgtgctgaggaagcccagcctccagttcatcctggccgctggtgtggccctagctgctggactcttggcctggtactacatgtgaagcacccatcatgccacaccggtaccctcctcccgactgaccactggcctacccctttctccagccctgactaaactaccacctcaggtgactttttaaaaaatgctgggtttaagaaaggcaaccaataaaagccagatgctagagcctctgcctgacagcatcctctctatgggccatattccgcactgggcacaggccgtcaccctgggagcagtcggcacagtgcagcaagcctggcccccgacccagctctactccaggcttccacacttctgggccctaggctgcttccggtagtccctgtttttgcagtacatgggtgactatctcccctgttggaggtgagtggcctgtaagtccaagctgtgcgagggggccttgctggatgctgctgtacaacttctgggcctctcttggaccctgggagtgagggtgggtgtgggtggaagcctcagaggccttgggagctcatccctctcacccagaatccctctaaccccttgggtgcggtttgctcagccccagcttatctcctcctccgcgctgtgtaaatgctccagcactcaataaagtgggctttgcaagctac

SEQ ID NO: 359385 - DNA, 1319 bp, Homo sapiens
tggcagtacgaggccgggtgttaatcggccgaggggcggacaggcgacagcgacctgcggcagagtcttgctgcgacacccaggctggagtgcaatggcgctatctcggctcactgcaacctccgcttcccggattcaagcgattctcctgcctcagcctcccgagtaggtgggactacaggaccagaggagcgagagcagcaagaaccacacccagcagcaatgtcagcggaagtggaaacctcagagggggtagacgagtcagaaaaaaagaactctggggccctagaaaaggagaaccaaatgagaatggctgacctctcggagctcctgaaggaagggaccaaggaagcacacgaccgggcagaaaacacccagtttgtcaaggacttcttgaaaggcaacattaagaaggagctgtttaagctggccaccacggcactttacttcacatactcagccctcgaggaggaaatggagcgcaacaaggaccatccagcctttgcccctttgtacttccccatggagctgcaccggaaggaggcgctgaccaaggacatggagtatttctttggtgaaaactgggaggagcaggtgcagtgccccaaggctgcccagaagtacgtggagcggatccactacatagggcagaacgagccggagctactggtggcccatgcatacacccgctacatgggggatctctcggggggccaggtgctgaagaaggtggcccagcgagcactgaaactccccagcacaggggaagggacccagttctacctgtttgagaatgtggacaatgcccagcagttcaagcagctctaccgggccaggatgaacgccctggacctgaacatgaagaccaaagagaggatcgtggaggaggccaacaaggcttttgagtataacatgcagatattcaatgaactggaccaggccggctccacactggccagagagaccttggaggatgggttccctgtacacgatgggaaaggagacatgcgtaaatgccctttctacgctgctgaacaagacaaaggtgccctggagggcagcagctgtcccttccgaacagctatggctgtgctgaggaagcccagcctccagttcatcctggccgctggtgtggccctagctgctggactcttggcctggtactacatgtgaagcacccatcatgccacaccggtaccctcctcccgactgaccactggcctacccctttctccagccctgactaaactaccacctcaggtgactttttaaaaaatgctgggtttaagaaaggcaaccaataaaagccagatgctaga

SEQ ID NO: 359386 - DNA, 1379 bp, Homo sapiens
tgcccacgttgcgccggcctcgcgccagtccgctgggctgcagggactgcggcgcctgagggagtcgctgacgggcacgctgactggaggctggcggacaggcgacagcgacctgcggcagagagtcttgctgcgacacccaggctggagtgcaatggcgctatctcggctcactgcaacctccgcttcccggattcaagcgattctcctgcctcagcctcccgagtaggtgggactacaggaccagaggagcgagagcagcaagaaccacacccagcagcaatgtcagcggaagtggaaacctcagagggggtagacgagtcagaaaaaaagaactctggggccctagaaaaggagaaccaaatgagaatggctgacctctcggagctcctgaaggaagggaccaaggaagcacacgaccgggcagaaaacacccagtttgtcaaggacttcttgaaaggcaacattaagaaggagctgtttaagctggccaccacggcactttacttcacatactcagccctcgaggaggaaatggagcgcaacaaggaccatccagcctttgcccctttgtacttccccatggagctgcaccggaaggaggcgctgaccaaggacatggagtatttctttggtgaaaactgggaggagcaggtgcagtgccccaaggctgcccagaagtacgtggagcggatccactacatagggcagaacgagccggagctactggtggcccatgcatacacccgctacatgggggatctctcggggggccaggtgctgaagaaggtggcccagcgagcactgaaactccccagcacaggggaagggacccagttctacctgtttgagaatgtggacaatgcccagcagttcaagcagctctaccgggccaggatgaacgccctggacctgaacatgaagaccaaagagaggatcgtggaggaggccaacaaggcttttgagtataacatgcagatattcaatgaactggaccaggccggctccacactggccagagagaccttggaggatgggttccctgtacacgatgggaaaggagacatgcgtaaatgccctttctacgctgctgaacaagacaaaggtgccctggagggcagcagctgtcccttccgaacagctatggctgtgctgaggaagcccagcctccagttcatcctggccgctggtgtggccctagctgctggactcttggcctggtactacatgtgaagcacccatcatgccacaccggtaccctcctcccgactgaccactggcctacccctttctccagccctgactaaactaccacctcaggtgactttttaaaaaatgctgggtttaagaaaggcaaccaataaaagccagatgctaga

SEQ ID NO: 359387 - DNA, 1178 bp, Homo sapiens
gcacgagaggggacacgtcgaactgcttggttgtcatcaggagcattatgcagaatgaagcattatagcagcagagactgtctgacagcgcagttggaaacctcagagggggtagacgagtcagaaaaaaagaactctggggccctagaaaaggagaaccaaatgagaatggctgacctctcggagctcctgaaggaagggaccaaggaagcacacgaccgggcagaaaacacccagtttgtcaaggacttcttgaaaggcaacattaagaaggagctgtttaagctggccaccacggcactttacttcacatactcagccctcgaggaggaaatggagcgcaacaaggaccatccagcctttgcccctttgtacttccccatggagctgcaccggaaggaggcgctgaccaaggacatggagtatttctttggtgaaaactgggaggagcaggtgcagtgccccaaggctgcccagaagtacgtggagcggatccactacatagggcagaacgagccggagctactggtggcccatgcatacacccgctacatgggggatctctcggggggccaggtgctgaagaaggtggcccagcgagcactgaaactccccagcacaggggaagggacccagttctacctgtttgagaatgtggacaatgcccagcagttcaagcagctctaccgggccaggatgaacgccctggacctgaacatgaagaccaaagagaggatcgtggaggaggccaacaaggcttttgagtataacatgcagatattcaatgaactggaccaggccggctccacactggccagagagaccttggaggatgggttccctgtacacgatgggaaaggagacatgcgtaaatgccctttctacgctgctgaacaagacaaaggtgccctggagggcagcagctgtcccttccgaacagctatggctgtgctgaggaagcccagcctccagttcatcctggccgctggtgtggccctagctgctggactcttggcctggtactacatgtgaagcacccatcatgccacaccggtaccctcctcccgactgaccactggcctacccctttctccagccctgactaaactaccacctcaggtgactttttaaaaaatgctgggtttaagaaaggcaaccaataaaagccagatgctaga

SEQ ID NO: 359388 - DNA, 1606 bp, Homo sapiens
tgcccacgttgcgccggcctcgcgccagtccgctgggctgcagggactgcggcgcctgagggagtcgctgacgggcacgctgactggaggctggcggacaggcgacagcgacctgcggcaggaccagaggagcgagagcagcaagaaccacacccagcagcaatgtcagcggaagtggaaacctcagagggggtagacgagtcagaaaaaaagaactctggggccctagaaaaggagaaccaaatgagaatggctgacctctcggagctcctgaaggaagggaccaaggaagcacacgaccgggcagaaaacacccagtttgtcaaggacttcttgaaaggcaacattaagaaggagctgtttaagctggccaccacggcactttacttcacatactcagccctcgaggaggaaatggagcgcaacaaggaccatccagcctttgcccctttgtacttccccatggagctgcaccggaaggaggcgctgaccaaggacatggagtatttctttggtgaaaactgggaggagcaggtgcagtgccccaaggctgcccagaagtacgtggagcggatccactacatagggcagaacgagccggagctactggtggcccatgcatacacccgctacatgggggatctctcggggggccaggtgctgaagaaggtggcccagcgagcactgaaactccccagcacaggggaagggacccagttctacctgtttgagaatgtggacaatgcccagcagttcaagcagctctaccgggccaggatgaacgccctggacctgaacatgaagaccttggaggatgggttccctgtacacgatgggaaaggagacatgcgtaaatgccctttctacgctgctgaacaagacaaaggtgccctggagggcagcagctgtcccttccgaacagctatggctgtgctgaggaagcccagcctccagttcatcctggccgctggtgtggccctagctgctggactcttggcctggtactacatgtgaagcacccatcatgccacaccggtaccctcctcccgactgaccactggcctacccctttctccagccctgactaaactaccacctcaggtgactttttaaaaaatgctgggtttaagaaaggcaaccaataaaagccagatgctagagcctctgcctgacagcatcctctctatgggccatattccgcactgggcacaggccgtcaccctgggagcagtcggcacagtgcagcaagcctggcccccgacccagctctactccaggcttccacacttctgggccctaggctgcttccggtagtccctgtttttgcagtacatgggtgactatctcccctgttggaggtgagtggcctgtaagtccaagctgtgcgagggggccttgctggatgctgctgtacaacttctgggcctctcttggaccctgggagtgagggtgggtgtgggtggaagcctcagaggccttgggagctcatccctctcacccagaatccctctaaccccttgggtgcggtttgctcagccccagcttatctcctcctccgcgctgtgtaaatgctccagcactcaataaagtgggctttgcaagctac

SEQ ID NO: 359389 - DNA, 962 bp, Homo sapiens
tgcccacgttgcgccggcctcgcgccagtccgctgggctgcagggactgcggcgcctgagggagtcgctgacgggcacgctgactggaggctggcggacaggcgacagcgacctgcggcaggaccagaggagcgagagcagcaagaaccacacccagcagcaatgtcagcggaagtggaaacctcagagggggtagacgagtcagaaaaaaagaactctggggccctagaaaaggagaaccaaatgagaatggctgacctctcggagctcctgaaggaagggaccaaggaagcacacgaccgggcagaaaacacccagtttgtcaaggacttcttgaaaggcaacattaagaaggagctgtttaagctggccaccacggcactttacttcacatactcagccctcgaggaggaaatggagcgcaacaaggaccatccagcctttgcccctttgtacttccccatggagctgcaccggaaggaggcgctgaccaaggacatggagtatttctttggtgaaaactgggaggaggccaacaaggcttttgagtataacatgcagatattcaatgaactggaccaggccggctccacactggccagagagaccttggaggatgggttccctgtacacgatgggaaaggagacatgcgtaaatgccctttctacgctgctgaacaagacaaaggtgccctggagggcagcagctgtcccttccgaacagctatggctgtgctgaggaagcccagcctccagttcatcctggccgctggtgtggccctagctgctggactcttggcctggtactacatgtgaagcacccatcatgccacaccggtaccctcctcccgactgaccactggcctacccctttctccagccctgactaaactaccacctcaggtgactttttaaaaaatgctgggtttaagaaaggcaaccaataaaagccagatgctaga

SEQ ID NO: 359390 - DNA, 674 bp, Homo sapiens
tcgagctcggtaccgaagtctgaaggagatccccattccatcggatcctctgttccattgtctgtctgtctcctggacccatcctggcctcgtctttgccctccgtcgcagcctggccttgggcctgcccttcccggggacactcggtctgatccccttccctcctcaggtgactttttaaaaaatgctgggtttaagaaaggcaaccaataaaagccagatgctagagcctctgcctgacagcatcctctctatgggccatattccgcactgggcacaggccgtcaccctgggagcagtcggcacagtgcagcaagcctggcccccgacccagctctactccaggcttccacacttctgggccctaggctgcttccggtagtccctgtttttgcagtacatgggtgactatctcccctgttggaggtgagtggcctgtaagtccaagctgtgcgagggggccttgctggatgctgctgtacaacttctgggcctctcttggaccctgggagtgagggtgggtgtgggtggaagcctcagaggccttgggagctcatccctctcacccagaatccctctaaccccttgggtgcggtttgctcagccccagcttatctcctcctccgcgctgtgtaaatgctccagcactcaataaagtgggctttgcaagctac

SEQ ID NO: 359391 - DNA, 140 bp, Homo sapiens
ggttgaatattggtcaattccagaacagtttcatttttccctacaacgtagggctacttctctgtagcctgcaagggtggcattaacggttattaaagccaggcacagtggctcgcgcctgtaatcccagcactttggga

SEQ ID NO: 359392 - DNA, 815 bp, Homo sapiens
tacttataaattgctattttcttacctcattaatgtttattgagtgcctaccatgctccaggcattattctagcattgggaacacactgacaaacaaggcagacatagtcctgccctcagggatatagaatctagcacaaatgacagtcattttagtaaccataaagagtgtactaacaatggtaataagcatgtattgtaataaatgtcttggaagttttcgtaataaatttgaaaatgtatattctgaaatagaatcaggctaactatagcatgttgaaatgagaatttatagccttagagctgctattagtataaaacaagacttcaggttgttttaatttcattttgcttcaacatttattctgcatcatatactgtggcaagttgctttgaattgttttctgaaaaaaaaaacctttcttctttcatatagcatcacgtcatcttgacagctatgaattccttaaagccattttaaactgaggcattaagaagaaatgcactcaccatgagcaccaacttctgcatctgcctgatcatatttaaaggaacagagaaatatttgtaattaatctgcccagtaaataccagctcgtagcagttggcaggtgcatgtctagataaaatttcttgcagctaatttaaactttctacacgcaccagtagataatctcaatgtaaataatacatttcttcttggctctttaatgtaagccaacatggagaggaagatcttgacttatattctgtaccacatacacttctgtggacttttagcatttgtgggtagacttaataaagcatgtataaaa

SEQ ID NO: 359393 - DNA, 1236 bp, Homo sapiens
aaataagatgcagagcccttctccaaacgatccggctagaaatctaggaagcgctgatccggagcgcacagagacagctgtgttgctcctctatcgcgggggtggtatggccagagtagtgagagaaggtgctctgttacaccagcaggaaataggtgctgtcctgggcctagaactccccgctcgctcctttgctcgcgcacacccggatccttcgtcgcggggaggatgtttccgcccggccgcggtgggcttgacgcaacgtccagcgcgcgcttttcatgccttggcgtttcctttggcggattttctgttttcggaagttgctgggttcgttttattcagcggcagtggtgctttcccgaatctcagaatgcctgttaaaagatcactgaagttggatggtctgttagaagaaaattcatttgatccttcaaaaatcacaaggaagaaaagtgttataacttattctccaacaactggaacttgtcaaatgagtctatttgcttctcccacaagttctgaagagcaaaagcacagaaatggactatcaaatgaaaagagaaaaaaattgaatcaccccagtttaactgaaagcaaagaatctacaacaaaagacaatgatgaattcatgatgttgctatcaaaagttgagaaattgtcagaagaaatcatggagataatgcaaaatttaagtagtatacaggctttggagggcagtagagagcttgaaaatctcattggaatctcctgtgcatcacatttcttaaaaagagaaatgcagaaaaccaaagaactaatgacaaaagtgaataaacaaaaactgtttgaaaagagtacaggacttcctcacaaagcatcacgtcatcttgacagctatgaattccttaaagccattttaaactgaggcattaagaagaaatgcactcaccatgagcaccaacttctgcatctgcctgatcatatttaaaggaacagagaaatatttgtaattaatctgcccagtaaataccagctcgtagcagttggcaggtgcatgtctagataaaatttcttgcagctaatttaaactttctacacgcaccagtagataatctcaatgtaaataatacatttcttcttggctctttaatgtaagccaacatggagaggaagatcttgacttatattctgtaccacatacacttctgtggacttttagcatttgtgggtagacttaataaagcatgtataaaa

SEQ ID NO: 359394 - DNA, 1353 bp, Homo sapiens
aaataagatgcagagcccttctccaaacgatccggctagaaatctaggaagcgctgatccggagcgcacagagacagctgtgttgctcctctatcgcgggggtggtatggccagagtagtgagagaaggtgctctgttacaccagcaggaaataggtgctgtcctgggcctagaactccccgctcgctcctttgctcgcgcacacccggatccttcgtcgcggggaggatgtttccgcccggccgcggtgggcttgacgcaacgtccagcgcgcgcttttcatgccttggcgtttcctttggcggattttctgttttcggaagttgctgggttcgttttattcagcggcagtggtgctttcccgaatctcagaatgccttttgctcccgttgcccaggctggagtgcaatggcacgatttccgttcactgcaacatctgcttcccgcgttcaagcgattctcctgcctcagccttgggagtagttgggattacagtgttaaaagatcactgaagttggatggtctgttagaagaaaattcatttgatccttcaaaaatcacaaggaagaaaagtgttataacttattctccaacaactggaacttgtcaaatgagtctatttgcttctcccacaagttctgaagagcaaaagcacagaaatggactatcaaatgaaaagagaaaaaaattgaatcaccccagtttaactgaaagcaaagaatctacaacaaaagacaatgatgaattcatgatgttgctatcaaaagttgagaaattgtcagaagaaatcatggagataatgcaaaatttaagtagtatacaggctttggagggcagtagagagcttgaaaatctcattggaatctcctgtgcatcacatttcttaaaaagagaaatgcagaaaaccaaagaactaatgacaaaagtgaataaacaaaaactgtttgaaaagagtacaggacttcctcacaaagcatcacgtcatcttgacagctatgaattccttaaagccattttaaactgaggcattaagaagaaatgcactcaccatgagcaccaacttctgcatctgcctgatcatatttaaaggaacagagaaatatttgtaattaatctgcccagtaaataccagctcgtagcagttggcaggtgcatgtctagataaaatttcttgcagctaatttaaactttctacacgcaccagtagataatctcaatgtaaataatacatttcttcttggctctttaatgtaagccaacatggagaggaagatcttgacttatattctgtaccacatacacttctgtggacttttagcatttgtgggtagacttaataaagcatgtataaaa

SEQ ID NO: 359395 - DNA, 1286 bp, Homo sapiens
aaataagatgcagagcccttctccaaacgatccggctagaaatctaggaagcgctgatccggagcgcacagagacagctgtgttgctcctctatcgcgggggtggtatggccagagtagtgagagaaggtgctctgttacaccagcaggaaataggtgctgtcctgggcctagaactccccgctcgctcctttgctcgcgcacacccggatccttcgtcgcggggaggatgtttccgcccggccgcggtgggcttgacgcaacgtccagcgcgcgcttttcatgccttggcgtttcctttggcggattttctgttttcggaagttgctgggttcgttttattcagcggcagtggtgctttcccgaatctcagaatgcctgttaaaagatcactgaagttggatggtctgttagaagaaaattcatttgatccttcaaaaatcacaaggaagaaaagtgttataacttattctccaacaactggaacttgtcaaatgagtctatttgcttctcccacaagttctgaagagcaaaagcacagaaatggactatcaaatgaaaagagaaaaaaattgaatcaccccagtttaactgaaagcaaagaatctacaacaaaagacaatgatgaattcatgatgttgctatcaaaagttgagaaattgtcagaagaaatcatggagataatgcaaaatttaagtagtatacaggctttggagggcagtagagagcttgaaaatctcattggaatctcctgtgcatcacatttcttaaaaagagaaatgcagaaaaccaaagaactaatgacaaaagtgaataaacaaaaactgtttgaaaagagtacaggacttcctcacaaaggtcagcctcagatgtcacaacctctgtgaagctctccccagctctcctagcatcacgtcatcttgacagctatgaattccttaaagccattttaaactgaggcattaagaagaaatgcactcaccatgagcaccaacttctgcatctgcctgatcatatttaaaggaacagagaaatatttgtaattaatctgcccagtaaataccagctcgtagcagttggcaggtgcatgtctagataaaatttcttgcagctaatttaaactttctacacgcaccagtagataatctcaatgtaaataatacatttcttcttggctctttaatgtaagccaacatggagaggaagatcttgacttatattctgtaccacatacacttctgtggacttttagcatttgtgggtagacttaataaagcatgtataaaa

SEQ ID NO: 359396 - DNA, 634 bp, Homo sapiens
caaaaattagctgggtgtggtggcacacacctgtagtcccagctactcaggagactgaggcaggagaatcacttgaacacgggaggcagaggttgcagtcagccgagaccatgccactccactccagcctgggggagagtgagactccgtctcaaaagaaaaaagcaaatgagaggttgccagcagcatctaactaaactaggtaccaaactagattgttattaggtgttaaaatcacttcttaagtcatgtatgacgtgcatgttaactaattcttgataatataattatcttttatatctcacagcattaagaagaaatgcactcaccatgagcaccaacttctgcatctgcctgatcatatttaaaggaacagagaaatatttgtaattaatctgcccagtaaataccagctcgtagcagttggcaggtgcatgtctagataaaatttcttgcagctaatttaaactttctacacgcaccagtagataatctcaatgtaaataatacatttcttcttggctctttaatgtaagccaacatggagaggaagatcttgacttatattctgtaccacatacacttctgtggacttttagcatttgtgggtagacttaataaagcatgtataaaa

SEQ ID NO: 359397 - DNA, 419 bp, Homo sapiens
ctattcttcgtctgtccgtaagagccccacagggcttttgacatgcacgccatcttggactctatgaattccttaaagccattttaaactggcattaagaagaaatgcactcaccatgagcaccaacttctgcatctgcctgatcatatttaaaggaacagagaaatatttgtaattaatctgcccagtaaataccagctcgtagcagttggcaggtgcatgtctagataaaatttcttgcagctaatttaaactttctacacgcaccagtagataatctcaatgtaaataatacatttcttcttggctctttaatgtaagccaacatggagaggaagatcttgacttatattctgtaccacatacacttctgtggacttttagcatttgtgggtagacttaataaagcatgtataaaa

SEQ ID NO: 359398 - DNA, 382 bp, Homo sapiens
cttcattaatctagactcattatgcttgcaaccacaaccccacccccgcccttagcattaagaagaaatgcactcaccatgagcaccaacttctgcatctgcctgatcatatttaaaggaacagagaaatatttgtaattaatctgcccagtaaataccagctcgtagcagttggcaggtgcatgtctagataaaatttcttgcagctaatttaaactttctacacgcaccagtagataatctcaatgtaaataatacatttcttcttggctctttaatgtaagccaacatggagaggaagatcttgacttatattctgtaccacatacacttctgtggacttttagcatttgtgggtagacttaataaagcatgtataaaa

SEQ ID NO: 359399 - DNA, 1089 bp, Homo sapiens
aaataagatgcagagcccttctccaaacgatccggctagaaatctaggaagcgctgatccggagcgcacagagacagctgtgttgctcctctatcgcgggggtggtatggccagagtagtgagagaaggtgctctgttacaccagcaggaaataggtgctgtcctgggcctagaactccccgctcgctcctttgctcgcgcacacccggatccttcgtcgcggggaggatgtttccgcccggccgcggtgggcttgacgcaacgtccagcgcgcgcttttcatgccttggcgtttcctttggcggattttctgttttcggaagttgctgggttcgttttattcagcggcagtggtgctttcccgaatctcagaatgcctgttaaaagatcactgaagttggatggtctgttagaagaaaatattcatgatgttgctatcaaaagttgagaaattgtcagaagaaatcatggagataatgcaaaatttaagtagtatacaggctttggagggcagtagagagcttgaaaatctcattggaatctcctgtgcatcacatttcttaaaaagagaaatgcagaaaaccaaagaactaatgacaaaagtgaataaacaaaaactgtttgaaaagagtacaggacttcctcacaaaggtaagtagttgtgttttagtttattacataaagatgctttcatcccattttgccaattaaaactaatcatcatgaatcctttttagtggttttcttttttcctcagagatccctgttctgaagtatgttcttttagaagatcacaaatctcatttgaaaagctttatattgcatttagcagaagatgatatctgatgagatcaacttctctgatgattgaactttttaaatgtcttttgaaatgcaatcttcaacataagatttgaattttgtctttttattaaaatttctttttgagaatacaaataggagcaacaatgcattaatatactgcagtttttagtgttgcactagaagcattgaaagttactttctaactagtattctggaaactttcagatcattaatatgctttgttctactatgaactcttatgtc

SEQ ID NO: 359400 - DNA, 969 bp, Homo sapiens
tagttttctattttatcttaacattaaacaatatatttttttcaaacagatacttcaattttaaaagcactgaggtttgaagtttagacgtgacgacttttaggagaaacaacagaaattccccctatgctttaacattctgggtttatctggagataaaaaatgaagccattaattttgatagcacaaatatacattaatgtacaactatagtcctcagctctttataatgattcagctatcatgtatgccatatgtgaatcataacctttcctattaataatgttaatgctcttgttttacacgattcgtcattgttttggggtatgcatttcagctgctaaaaatgcttacttgagatttgtctaggatttaagtaaaaataaactgatttattacttttcaaagccttttaaataatttctttcatgatttaaattttttatactttaacagaagtatgataatttttctttcaaataaaatcagtagaaaaaattttaaactatagatttggactcacttaatagcaattaggtgtttaagaggtgtaaataacttgctatcagacattacaaatatccaggtgctcagtatgtgctgatgacaacaaaattgaaaagaaagactgtaataattctgactggttttctctgcagaagatattgattatttgtgtgtggtgagagatttggaaaattcaattaaaggagttgtgcaaaggtttcataaattttccttctacagcgtgtacacagacattgttgcgtattaaatcagtgcagcacttcacaatatattttctttgaaacataaaaataaataacatttaaacagttctgcttactacagaaacaaattttattttctgtgaagcatttagtcatgtgctatcactgactcatacacatttgccagctgtaacaaattttatagacattttccccagagacatatctcacatactat

SEQ ID NO: 359401 - DNA, 1100 bp, Homo sapiens
aaataagatgcagagcccttctccaaacgatccggctagaaatctaggaagcgctgatccggagcgcacagagacagctgtgttgctcctctatcgcgggggtggtatggccagagtagtgagagaaggtgctctgttacaccagcaggaaataggtgctgtcctgggcctagaactccccgctcgctcctttgctcgcgcacacccggatccttcgtcgcggggaggatgtttccgcccggccgcggtgggcttgacgcaacgtccagcgcgcgcttttcatgccttggcgtttcctttggcggattttctgttttcggaagttgctgggttcgttttattcagcggcagtggtgctttcccgaatctcagaatgcctgttaaaagatcactgaagttggatggtctgttagaagaaaataaaagagaaaaaaattgaatcaccccagtttaactgaaagcaaagaatctacaacaaaagacaatgatgaattcatgatgttgctatcaaaagttgagaaattgtcagaagaaatcatggagataatgcaaaatttaagtagtatacaggctttggagggcagtagagagcttgaaaatctcattggaatctcctgtgcatcacatttcttaaaaagagaaatgcagaaaaccaaagaactaatgacaaaagtgaataaacaaaaactgtttgaaaagagtacaggacttcctcacaaagcatcacgtcatcttgacagctatgaattccttaaagccattttaaactgaggcattaagaagaaatgcactcaccatgagcaccaacttctgcatctgcctgatcatatttaaaggaacagagaaatatttgtaattaatctgcccagtaaataccagctcgtagcagttggcaggtgcatgtctagataaaatttcttgcagctaatttaaactttctacacgcaccagtagataatctcaatgtaaataatacatttcttcttggctctttaatgtaagccaacatggagaggaagatcttgacttatattctgtaccacatacacttctgtggacttttagcatttgtgggtagacttaataaagcatgtataaaa

SEQ ID NO: 359402 - DNA, 1203 bp, Homo sapiens
gcgatgcgagcgatgagctggatggcctccttcatgtagaaccggccgtccccgcccaccaccagcgtggcctcctgccgctgcgccggctccacggtggagatgatactctggatgaagttctccgcgtagttggcgctgctctggaacaccttcacccgcttccgcagcccgctcgtgcccggcttctggtcctgttttattttggatgtcgacaaaagccctgattaccatgctgccctagcaacaacagtgtaagagggttcccttttctccacatccttgccagcatttgaagtccacatgaaagaaaattatatcttctgttcagttttgagaaaaaagtgttaaaagatcactgaagttggatggtctgttagaagaaaattcatttgatccttcaaaaatcacaaggaagaaaagtgttataacttattctccaacaactggaacttgtcaaatgagtctatttgcttctcccacaagttctgaagagcaaaagcacagaaatggactatcaaatgaaaagagaaaaaaattgaatcaccccagtttaactgaaagcaaagaatctacaacaaaagacaatgatgaattcatgatgttgctatcaaaagttgagaaattgtcagaagaaatcatggagataatgcaaaatttaagtagtatacaggctttggagggcagtagagagcttgaaaatctcattggaatctcctgtgcatcacatttcttaaaaagagaaatgcagaaaaccaaagaactaatgacaaaagtgaataaacaaaaactgtttgaaaagagtacaggacttcctcacaaagcatcacgtcatcttgacagctatgaattccttaaagccattttaaactgaggcattaagaagaaatgcactcaccatgagcaccaacttctgcatctgcctgatcatatttaaaggaacagagaaatatttgtaattaatctgcccagtaaataccagctcgtagcagttggcaggtgcatgtctagataaaatttcttgcagctaatttaaactttctacacgcaccagtagataatctcaatgtaaataatacatttcttcttggctctttaatgtaagccaacatggagaggaagatcttgacttatattctgtaccacatacacttctgtggacttttagcatttgtgggtagacttaataaagcatgtataaaa

SEQ ID NO: 359403 - DNA, 1030 bp, Homo sapiens
aaataagatgcagagcccttctccaaacgatccggctagaaatctaggaagcgctgatccggagcgcacagagacagctgtgttgctcctctatcgcgggggtggtatggccagagtagtgagagaaggtgctctgttacaccagcaggaaataggtgctgtcctgggcctagaactccccgctcgctcctttgctcgcgcacacccggatccttcgtcgcggggaggatgtttccgcccggccgcggtgggcttgacgcaacgtccagcgcgcgcttttcatgccttggcgtttcctttggcggattttctgttttcggaagttgctgggttcgttttattcagcggcagtggtgctttcccgaatctcagaatgcctgttaaaagatcactgaagttggatggtctgttagaagaaaatattcatgatgttgctatcaaaagttgagaaattgtcagaagaaatcatggagataatgcaaaatttaagtagtatacaggctttggagggcagtagagagcttgaaaatctcattggaatctcctgtgcatcacatttcttaaaaagagaaatgcagaaaaccaaagaactaatgacaaaagtgaataaacaaaaactgtttgaaaagagtacaggacttcctcacaaagcatcacgtcatcttgacagctatgaattccttaaagccattttaaactgaggcattaagaagaaatgcactcaccatgagcaccaacttctgcatctgcctgatcatatttaaaggaacagagaaatatttgtaattaatctgcccagtaaataccagctcgtagcagttggcaggtgcatgtctagataaaatttcttgcagctaatttaaactttctacacgcaccagtagataatctcaatgtaaataatacatttcttcttggctctttaatgtaagccaacatggagaggaagatcttgacttatattctgtaccacatacacttctgtggacttttagcatttgtgggtagacttaataaagcatgtataaaa

SEQ ID NO: 359404 - DNA, 646 bp, Homo sapiens
  misc_feature (34)..(35): n is a, c, g, or t
cacataccccttgcgaacatcgacaaccaaaggnngctcgcatgaacagttgcttcatagttgagaaattgtcagaagaaatcatggagataatgcaaaatttaagtagtatacaggctttggagggcagtagagagcttgaaaatctcattggaatctcctgtgcatcacatttcttaaaaagagaaatgcagaaaaccaaagaactaatgacaaaagtgaataaacaaaaactgtttgaaaagagtacaggacttcctcacaaagcatcacgtcatcttgacagctatgaattccttaaagccattttaaactgaggcattaagaagaaatgcactcaccatgagcaccaacttctgcatctgcctgatcatatttaaaggaacagagaaatatttgtaattaatctgcccagtaaataccagctcgtagcagttggcaggtgcatgtctagataaaatttcttgcagctaatttaaactttctacacgcaccagtagataatctcaatgtaaataatacatttcttcttggctctttaatgtaagccaacatggagaggaagatcttgacttatattctgtaccacatacacttctgtggacttttagcatttgtgggtagacttaataaagcatgtataaaa

SEQ ID NO: 359405 - DNA, 1150 bp, Homo sapiens
aaataagatgcagagcccttctccaaacgatccggctagaaatctaggaagcgctgatccggagcgcacagagacagctgtgttgctcctctatcgcgggggtggtatggccagagtagtgagagaaggtgctctgttacaccagcaggaaataggtgctgtcctgggcctagaactccccgctcgctcctttgctcgcgcacacccggatccttcgtcgcggggaggatgtttccgcccggccgcggtgggcttgacgcaacgtccagcgcgcgcttttcatgccttggcgtttcctttggcggattttctgttttcggaagttgctgggttcgttttattcagcggcagtggtgctttcccgaatctcagaatgcctgttaaaagatcactgaagttggatggtctgttagaagaaaataaaagagaaaaaaattgaatcaccccagtttaactgaaagcaaagaatctacaacaaaagacaatgatgaattcatgatgttgctatcaaaagttgagaaattgtcagaagaaatcatggagataatgcaaaatttaagtagtatacaggctttggagggcagtagagagcttgaaaatctcattggaatctcctgtgcatcacatttcttaaaaagagaaatgcagaaaaccaaagaactaatgacaaaagtgaataaacaaaaactgtttgaaaagagtacaggacttcctcacaaaggtcagcctcagatgtcacaacctctgtgaagctctccccagctctcctagcatcacgtcatcttgacagctatgaattccttaaagccattttaaactgaggcattaagaagaaatgcactcaccatgagcaccaacttctgcatctgcctgatcatatttaaaggaacagagaaatatttgtaattaatctgcccagtaaataccagctcgtagcagttggcaggtgcatgtctagataaaatttcttgcagctaatttaaactttctacacgcaccagtagataatctcaatgtaaataatacatttcttcttggctctttaatgtaagccaacatggagaggaagatcttgacttatattctgtaccacatacacttctgtggacttttagcatttgtgggtagacttaataaagcatgtataaaa

SEQ ID NO: 359406 - DNA, 663 bp, Homo sapiens
  misc_feature (12)..(12): n is a, c, g, or t
aggtcagggganataacagcgcccaccgcccgcccccctgaccccaaccccaccttgagatgtcgagccatatatagttgagaaattgtcagaagaaatcatggagataatgcaaaatttaagtagtatacaggctttggagggcagtagagagcttgaaaatctcattggaatctcctgtgcatcacatttcttaaaaagagaaatgcagaaaaccaaagaactaatgacaaaagtgaataaacaaaaactgtttgaaaagagtacaggacttcctcacaaagcatcacgtcatcttgacagctatgaattccttaaagccattttaaactgaggcattaagaagaaatgcactcaccatgagcaccaacttctgcatctgcctgatcatatttaaaggaacagagaaatatttgtaattaatctgcccagtaaataccagctcgtagcagttggcaggtgcatgtctagataaaatttcttgcagctaatttaaactttctacacgcaccagtagataatctcaatgtaaataatacatttcttcttggctctttaatgtaagccaacatggagaggaagatcttgacttatattctgtaccacatacacttctgtggacttttagcatttgtgggtagacttaataaagcatgtataaaa

SEQ ID NO: 359407 - DNA, 1777 bp, Homo sapiens
aaataagatgcagagcccttctccaaacgatccggctagaaatctaggaagcgctgatccggagcgcacagagacagctgtgttgctcctctatcgcgggggtggtatggccagagtagtgagagaaggtgctctgttacaccagcaggaaataggtgctgtcctgggcctagaactccccgctcgctcctttgctcgcgcacacccggatccttcgtcgcggggaggatgtttccgcccggccgcggtgggcttgacgcaacgtccagcgcgcgcttttcatgccttggcgtttcctttggcggattttctgttttcggaagttgctgggttcgttttattcagcggcagtggtgctttcccgaatctcagaatgcctgttaaaagatcactgaagttggatggtctgttagaagaaaattcatttgatccttcaaaaatcacaaggaagaaaagtgttataacttattctccaacaactggaacttgtcaaatgagtctatttgcttctcccacaagttctgaagagcaaaagcacagaaatggactatcaaatgaaaagagaaaaaaattgaatcaccccagtttaactgaaagcaaagaatctacaacaaaagacaatgatgaattcatgatgttgctatcaaaagttgagaaattgtcagaagaaatcatggagataatgcaaaatttaagtagtatacaggctttggagggcagtagagagcttgaaaatctcattggaatctcctgtgcatcacatttcttaaaaagagaaatgcagaaaaccaaagaactaatgacaaaagtgaataaacaaaaactgtttgaaaagagtacaggacttcctcacaaagatacttcaattttaaaagcactgaggtttgaagtttagacgtgacgacttttaggagaaacaacagaaattccccctatgctttaacattctgggtttatctggagataaaaaatgaagccattaattttgatagcacaaatatacattaatgtacaactatagtcctcagctctttataatgattcagctatcatgtatgccatatgtgaatcataacctttcctattaataatgttaatgctcttgttttacacgattcgtcattgttttggggtatgcatttcagctgctaaaaatgcttacttgagatttgtctaggatttaagtaaaaataaactgatttattacttttcaaagccttttaaataatttctttcatgatttaaattttttatactttaacagaagtatgataatttttctttcaaataaaatcagtagaaaaaattttaaactatagatttggactcacttaatagcaattaggtgtttaagaggtgtaaataacttgctatcagacattacaaatatccaggtgctcagtatgtgctgatgacaacaaaattgaaaagaaagactgtaataattctgactggttttctctgcagaagatattgattatttgtgtgtggtgagagatttggaaaattcaattaaaggagttgtgcaaaggtttcataaattttccttctacagcgtgtacacagacattgttgcgtattaaatcagtgcagcacttcacaatatattttctttgaaacataaaaataaataacatttaaacagttctgcttactacagaaacaaattttattttctgtgaagcatttagtcatgtgctatcactgactcatacacatttgccagctgtaacaaattttatagacattttccccagagacatatctcacatactat

SEQ ID NO: 359408 - DNA, 700 bp, Homo sapiens
gcgatgcgagcgatgagctggatggcctccttcatgtagaaccggccgtccccgcccaccaccagcgtggcctcctgccgctgcgccggctccacggtggagatgatactctggatgaagttctccgcgtagttggcgctgctctggaacaccttcacccgcttccgcagcccgctcgtgcccggcttctggtcctgttttattttggatgtcgacaaaagccctgattaccatgctgccctagcaacaacagtgtaagagggttcccttttctccacatccttgccagcatttgaagtccacatgaaagaaaattatatcttctgttcagttttgagaaaaaaggtatgtaactttttctcacaagtggtagcttagcatatgcttgctgctatctttagtaacaaagaaaatattgttttaaaaaatgtactggtaattagacaagaacaactttctcagaataaaattaattatgccaaaacatgtactcagtaagcagatgtccccatagctaagaaattgatacaatctatttcctactaactttaatctctaggtttagaattagctggatctaatgattaagtttgatgatagtaaaaatatcacgtagctgtagatatttaaattttgacaccatgatatggatcttttgccagggtttactttaaagttctgacatgcatctataatcctg

SEQ ID NO: 359409 - DNA, 1193 bp, Homo sapiens
aaataagatgcagagcccttctccaaacgatccggctagaaatctaggaagcgctgatccggagcgcacagagacagctgtgttgctcctctatcgcgggggtggtatggccagagtagtgagagaaggtgctctgttacaccagcaggaaataggtgctgtcctgggcctagaactccccgctcgctcctttgctcgcgcacacccggatccttcgtcgcggggaggatgtttccgcccggccgcggtgggcttgacgcaacgtccagcgcgcgcttttcatgccttggcgtttcctttggcggattttctgttttcggaagttgctgggttcgttttattcagcggcagtggtgctttcccgaatctcagaatgcctcatttgatccttcaaaaatcacaaggaagaaaagtgttataacttattctccaacaactggaacttgtcaaatgagtctatttgcttctcccacaagttctgaagagcaaaagcacagaaatggactatcaaatgaaaagagaaaaaaattgaatcaccccagtttaactgaaagcaaagaatctacaacaaaagacaatgatgaattcatgatgttgctatcaaaagttgagaaattgtcagaagaaatcatggagataatgcaaaatttaagtagtatacaggctttggagggcagtagagagcttgaaaatctcattggaatctcctgtgcatcacatttcttaaaaagagaaatgcagaaaaccaaagaactaatgacaaaagtgaataaacaaaaactgtttgaaaagagtacaggacttcctcacaaagcatcacgtcatcttgacagctatgaattccttaaagccattttaaactgaggcattaagaagaaatgcactcaccatgagcaccaacttctgcatctgcctgatcatatttaaaggaacagagaaatatttgtaattaatctgcccagtaaataccagctcgtagcagttggcaggtgcatgtctagataaaatttcttgcagctaatttaaactttctacacgcaccagtagataatctcaatgtaaataatacatttcttcttggctctttaatgtaagccaacatggagaggaagatcttgacttatattctgtaccacatacacttctgtggacttttagcatttgtgggtagacttaataaagcatgtataaaa

SEQ ID NO: 359410 - DNA, 925 bp, Homo sapiens
aaatggcaggatgcgaaggccgggggcgtttatcagcggcagggtgctttcccggaatctcagaatgcctgttaaagatcactgaagtggatggtctgttagaagaaaattcatttgatccttcaaaaatcacaaggaagaaaagtgttataacttattctccaacaactggaacttgtcaaatgagtctatttgcttctcccacaagttctgaagagcaaaagcacagaaatggactatcaaatgaaaagagaaaaaaattgaatcaccccagtttaactgaaagcaaagaatctacaacaaaagacaatgatgaattcatgatgttgctatcaaaagttgagaaattgtcagaagaaatcatggagataatgcaaaatttaagtagtatacaggctttggagggcagtagagagcttgaaaatctcattggaatctcctgtgcatcacatttcttaaaaagagaaatgcagaaaaccaaagaactaatgacaaaagtgaataaacaaaaactgtttgaaaagagtacaggacttcctcacaaagcatcacgtcatcttgacagctatgaattccttaaagccattttaaactgaggcattaagaagaaatgcactcaccatgagcaccaacttctgcatctgcctgatcatatttaaaggaacagagaaatatttgtaattaatctgcccagtaaataccagctcgtagcagttggcaggtgcatgtctagataaaatttcttgcagctaatttaaactttctacacgcaccagtagataatctcaatgtaaataatacatttcttcttggctctttaatgtaagccaacatggagaggaagatcttgacttatattctgtaccacatacacttctgtggacttttagcatttgtgggtagacttaataaagcatgtataaaa

SEQ ID NO: 359411 - DNA, 1235 bp, Homo sapiens
aaataagatgcagagcccttctccaaacgatccggctagaaatctaggaagcgctgatccggagcgcacagagacagctgtgttgctcctctatcgcgggggtggtatggccagagtagtgagagaaggtgctctgttacaccagcaggaaataggtgctgtcctgggcctagaactccccgctcgctcctttgctcgcgcacacccggatccttcgtcgcggggaggatgtttccgcccggccgcggtgggcttgacgcaacgtccagcgcgcgcttttcatgccttggcgtttcctttggcggattttctgttttcggaagttgctgggttcgttttattcagcggcagtggtgctttcccgaatctcagaatgcctgttaaaagatcactgaagttggatggtctgttagaagaaaattcatttgatccttcaaaaatcacaaggaagaaaagtgttataacttattctccaacaactggaacttgtcaaatgagtctatttgcttctcccacaagttctgaagagcaaaagcacagaaatggactatcaaatgaaaagagaaaaaaattgaatcaccccagtttaactgaaagcaaagaatctacaacaaaagacaatgatgaattcatgatgttgctatcaaaagttgagaaattgtcagaagaaatcatggagataatgcaaaatttaagtagtatacaggctttggagggcagtagagagcttgaaaatctcattggaatctcctgtgcatcacatttcttaaaaagagaaatgcagaaaaccaaagaactaatgacaaaagtgaataaacaaaaactgtttgaaaagagtacaggacttcctcacaaagcatcacgtcatcttgacagctatgaattccttaaagccattttaaactgaggcattaagaagaaatgcactcaccatgagcaccaacttctgcatctgcctgatcatatttaaaggaacagagaaatatttgtaattaatctgcccagtaaataccagctcgtagcagttggcaggtgcatgtctagataaaatttcttgcagctaatttaaactttctacacgcaccagtagataatctcaatgtaaataatacatttcttcttggctctttaatgtaagccaacatggagaggaagatcttgacttatattctgacgctgcgtatgtcaggtgtatgcctttgtataaaggcgtctaaatgcacagtgacatctgt

SEQ ID NO: 359412 - DNA, 1593 bp, Homo sapiens
aaataagatgcagagcccttctccaaacgatccggctagaaatctaggaagcgctgatccggagcgcacagagacagctgtgttgctcctctatcgcgggggtggtatggccagagtagtgagagaaggtgctctgttacaccagcaggaaataggtgctgtcctgggcctagaactccccgctcgctcctttgctcgcgcacacccggatccttcgtcgcggggaggatgtttccgcccggccgcggtgggcttgacgcaacgtccagcgcgcgcttttcatgccttggcgtttcctttggcggattttctgttttcggaagttgctgggttcgttttattcagcggcagtggtgctttcccgaatctcagaatgccttttgctcccgttgcccaggctggagtgcaatggcacgatttccgttcactgcaacatctgcttcccgcgttcaagcgattctcctgcctcagccttgggagtagttgggattacagtgttaaaagatcactgaagttggatggtctgttagaagaaaattcatttgatccttcaaaaatcacaaggaagaaaagtgttataacttattctccaacaactggaacttgtcaaatgagtctatttgcttctcccacaagttctgaagagcaaaagcacagaaatggactatcaaatgaaaagagaaaaaaattgaatcaccccagtttaactgaaagcaaagaatctacaacaaaagacaatgatgaattcatgatgttgctatcaaaagttgagaaattgtcagaagaaatcatggagataatgcaaaatttaagtagtatacaggctttggagggcagtagagagcttgaaaatctcattggaatctcctgtgcatcacatttcttaaaaagagaaatgcagaaaaccaaagaactaatgacaaaagtgaataaacaaaaactgtttgaaaagagtacaggacttcctcacaaagcatcacgtcatcttgacagctatgaattccttaaagccattttaaactgagaaacctgacagtactcctgatatcaccgtggccaacttccctacctgcacaactgctccagccctctgtcacacttcagtgattattcctcttgacctgtaattgttcagtggggaggactgtcccatacagattcactcccagagcctttaaaaagtgaagcctttgtgaaacaatgctagaataagagagaaagtaagggtgacagcaacccagaggccacagccagagtgctaagaccatcaaaagatgggaagagaaaaacattttggctaatgataacgggatattgggatactttagtaacaatgtggatgaatcacttgggtaacacaaggatgaggcttagtatgaacaaagcgctgtgtattatgacagtttgaaacctaataaggacacaaaatataaggcaagttatgataaatgatacaagttcagactcttctaagttctggccaataacaagtacaaacaaggattgtgcatccaatgaggatcaaagtatcaacttgattggtggtggaattgataacccccaacatggcaggctctctagtagaagcttggg

SEQ ID NO: 359413 - DNA, 1295 bp, Homo sapiens
aaataagatgcagagcccttctccaaacgatccggctagaaatctaggaagcgctgatccggagcgcacagagacagctgtgttgctcctctatcgcgggggtggtatggccagagtagtgagagaaggtgctctgttacaccagcaggaaataggtgctgtcctgggcctagaactccccgctcgctcctttgctcgcgcacacccggatccttcgtcgcggggaggatgtttccgcccggccgcggtgggcttgacgcaacgtccagcgcgcgcttttcatgccttggcgtttcctttggcggattttctgttttcggaagttgctgggttcgttttattcagcggcagtggtgctttcccgaatctcagaatgcctgttaaaagatcactgaagttggatggtctgttagaagaaaattcatttgatccttcaaaaatcacaaggaagaaaagtgttataacttattctccaacaactggaacttgtcaaatgagtctatttgcttctcccacaagttctgaagagcaaaagcacagaaatggactatcaaatgaaaagagaaaaaaattgaatcaccccagtttaactgaaagcaaagaatctacaacaaaagacaatgatgaattcatgatgttgctatcaaaagttgagaaattgtcagaagaaatcatggagataatgcaaaatttaagtagtatacaggctttggagggcagtagagagcttgaaaatctcattggaatctcctgtgcatcacatttcttaaaaagagaaatgcagaaaaccaaagaactaatgacaaaagtgaataaacaaaaactgtttgaaaagagtacaggacttcctcacaaaggtaagtagttgtgttttagtttattacataaagatgctttcatcccattttgccaattaaaactaatcatcatgaatcctttttagtggttttcttttttcctcagagatccctgttctgaagtatgttcttttagaagatcacaaatctcatttgaaaagctttatattgcatttagcagaagatgatatctgatgagatcaacttctctgatgattgaactttttaaatgtcttttgaaatgcaatcttcaacataagatttgaattttgtctttttattaaaatttctttttgagaatacaaataggagcaacaatgcattaatatactgcagtttttagtgttgcactagaagcattgaaagttactttctaactagtattctggaaactttcagatcattaatatgctttgttctactatgaactcttatgtc

SEQ ID NO: 359414 - DNA, 2611 bp, Homo sapiens
ggaccacagctcctcccgtgcatccactcggcctgggaggttctggattttggctgtcgagggagtttgcctgcctctccagagaaagatggtcatgaggcccctgtggagtctgcttctctgggaagatgcagtgcccaggcccgtggtacaagtgttcattgctgtagaaagggatgctcagccctccaagacctgccaggttttcttgtcctgttgggcccccaacatcagcgaaataacctatagctggcgacgggagacaaccatggactttggtatggaaccacacagcctcttcacagacggacaggtgctgagcatttccctgggaccaggagacagagatgtggcctattcctgcattgtctccaaccctgtcagctgggacttggccacagtcacgccctgggatagctgtcatcatgaggcagcaccagggaaggcctcctacaaagatgtgctgctggtggtggtgcctgtctcgctgctcctgatgctggttactctcttctctgcctggcactggtgcccctgctcagggaaaaagaaaaaggatgtccatgctgacagagtgggtccagagacagagaacccccttgtgcaggatctgccataaaggacaatatgaactgatgcctggactatcagtaaccccactgcacaggcacacgatgctctgggacataactggtgcctggaaatcaccatggtcctcatatctcccatgggaatcctgtcctgcctcgaaggagcagcctgggcagccatcacaccacgaggacaggaagcaccagcacgtttcacacctcccccttccctctcccatcttctcatatcctggctcttctctgggcaagatgagccaagcagaacattccatccaggacactggaagttctccaggatccagatccatggggacattaatagtccaaggcattccctcccccaccactattcataaagtattaaccaactggcaccaaggaattgcctccagcctgagtcctaggctctaaaagatattacatatttgaactaatagaggaactctgagtcacccatgccagcatcagcttcagccccagaccctgcagtttgagatctgatgcttcctgagggccaaggcattgctgtaagaaaaggtctagaaataggtgaaagtgagaggtgggggacaggggtttctctttctggcctaaggactttcaggtaatcagagttcatgggccctcaaaggtaaattgcagttgtagacaccgaggatggttgacaacccatggttgagatgggcaccgttttgcaggaaacaccatattaatagacatcctcaccatctccatccgctctcacgcctcctgcaggatctgggagtgagggtggagagtctttcctcacgctccagcacagtggccaggaaaagaaatactgaatttgccccagccaacaggacgttcttgcacaacttcaagaaaagcagctcagctcaggatgagtcttcctgcctgaaactgagagagtgaagaaccataaaacgctatgcagaaggaacattatggagagaaagggtactgaggcactctagaatctgccacattcattttcaaatgcaaatgcagaagacttaccttagttcaaggggaggggacaaagaccccacagcccaacagcaggactgtagaggtcactctgactccatcaaactttttattgtggccatcttaggaaaatacattctgcccctgaatgattctgtctagaaaagctctggagtattgatcactactggaaaaacacttaaggagctaaacttaccttcggggattattagctgataaggttcacagtttctctcacccaggtgtaactggattttttctggggcctcaatccagtcttgataacagcgaggaaagaggtattgaagaaacaggggtgggtttgaagtactattttccccagggtggcttcaatctccccacctaggatgtcagccctgtccaaggaccttccctcttctcccccagttccctgggcaatcacttcaccttggacaaaggatcagcacagctggcctccagatccacatcaccactcttccactcgattgttcccagatcctccctgcctggcctgctcagaggttccctgttggtaacctggctttatcaaattctcatccctttcccacacccacttctctcctatcaccttcccccaagattacctgaacagggtccatggccactcaacctgtcagcttgcaccatccccacctgccacctacagtcaggccacatgcctggtcactgaatcatgcaaaactggcctcagtccctaaaaatgatgtggaaaggaaagcccaggatctgacaatgagccctggtggatttgtggggaaaaaatacacagcactccccacctttctttcgttcatctccagggccccacctcagatcaaagcagctctggatgagatgggacctgcagctctccctccacaaggtgactcttagcaacctcatttcgacagtggtttgtagcgtggtgcaccagggccttgttgaacagatccacactgctctaataaagttcccatccttaatga

SEQ ID NO: 359415 - DNA, 2465 bp, Homo sapiens
ggaccacagctcctcccgtgcatccactcggcctgggaggttctggattttggctgtcgagggagtttgcctgcctctccagagaaagatggtcatgaggcccctgtggagtctgcttctctgggaagatgcagtgcccaggcccgtggtacaagtgttcattgctgtagaaagggatgctcagccctccaagacctgccaggttttcttgtcctgttgggcccccaacatcagcgaaataacctatagctggcgacgggagacaaccatggactttggtatggaaccacacagcctcttcacagacggacaggtgctgagcatttccctgggaccaggagacagagatgtggcctattcctgcattgtctccaaccctgtcagctgggacttggccacagtcacgccctgggatagctgtcatcatgaggcagcaccagggaaggcctcctacaaagatgtgctgctggtggtggtgcctgtctcgctgctcctgatgctggttactctcttctctgcctggcactggtgcccctgctcagggaaaaagaaaaaggatgtccatgctgacagagtgggtccagagacagagaacccccttgtgcaggatctgccataaaggacaatatgaactgatgcctggactatcagtaaccccactgcacaggcacacgatgctctgggacataactggtgcctggaaatcaccatggtcctcatatctcccatgggaatcctgtcctgcctcgaaggagcagcctgggcagccatcacaccacgaggacaggaagcaccagcacgtttcacacctcccccttccctctcccatcttctcatatcctggctcttctctgggcaagatgagccaagcagaacattccatccaggacactggaagttctccaggatccagatccatggggacattaatagtccaaggcattccctcccccaccactattcataaagtattaaccaactggcaccaaggaattgcctccagcctgagtcctaggctctaaaagatattacatatttgaactaatagaggaactctgagtcacccatgccagcatcagcttcagccccagaccctgcagtttgagatctgatgcttcctgagggccaaggcattgctgtaagaaaaggtctagaaataggtgaaagtgagaggtgggggacaggggtttctctttctggcctaaggactttcaggtaatcagagttcatgggccctcaaaggtaaattgcagttgtagacaccgaggatggttgacaacccatggttgagatgggcaccgttttgcaggaaacaccatattaatagacatcctcaccatctccatccgctctcacgcctcctgcaggatctgggagtgagggtggagagtctttcctcacgctccagcacagtggccaggaaaagaaatactgaatttgccccagccaacaggacgttcttgcacaacttcaagaaaagcagctcagctcaggatgagtcttcctgcctgaaactgagagagtgaagaaccataaaacgctatgcagaaggaacattatggagagaaagggtactgaggcactctagaatctgccacattcattttcaaatgcaaatgcagaagacttaccttagttcaaggggaggggacaaagaccccacagcccaacagcaggactgtagaggtcactctgactccatcaaactttttattgtggccatcttaggaaaatacattctgcccctgaatgattctgtctagaaaagctctggagtattgatcactactggaaaaacacttaaggagctaaacttaccttcggggattattagctgataaggttcacagtttctctcacccaggtgtaactggattttttctggggcctcaatccagtcttgataacagcgaggaaagaggtattgaagaaacaggggtgggtttgaagtactattttccccagggtggcttcaatctccccacctaggatgtcagccctgtccaaggaccttccctcttctcccccagttccctgggcaatcacttcaccttggacaaaggatcagcacagctggcctccagatccacatcaccactcttccactcgattgttcccagatcctccctgcctggcctgctcagaggttccctgttggtaacctggctttatcaaattctcatccctttcccacacccacttctctcctatcaccttcccccaagattacctgaacagggtccatggccactcaacctgtcagcttgcaccatccccacctttctttcgttcatctccagggccccacctcagatcaaagcagctctggatgagatgggacctgcagctctccctccacaaggtgactcttagcaacctcatttcgacagtggtttgtagcgtggtgcaccagggccttgttgaacagatccacactgctctaataaagttcccatccttaatga

SEQ ID NO: 359416 - DNA, 2069 bp, Homo sapiens
ggaccacagctcctcccgtgcatccactcggcctgggaggttctggattttggctgtcgagggagtttgcctgcctctccagagaaagatggtcatgaggcccctgtggagtctgcttctctgggaagatgcagtgcccaggcccgtggtacaagtgttcattgctgtagaaagggatgctcagccctccaagacctgccaggttttcttgtcctgttgggcccccaacatcagcgaaataacctatagctggcgacgggagacaaccatggactttggtatggaaccacacagcctcttcacagacggacaggtgctgagcatttccctgggaccaggagacagagatgtggcctattcctgcattgtctccaaccctgtcagctgggacttggccacagtcacgccctgggatagctgtcatcatgaggcagcaccagggaaggcctcctacaaagatgtgctgctggtggtggtgcctgtctcgctgctcctgatgctggttactctcttctctgcctggcactggtgcccctgctcagggaaaaagaaaaaggatgtccatgctgacagagtgggtccagagacagagaacccccttgtgcaggatctgccataaaggacaatatgaactgatgcctggactatcagtaaccccactgcacaggcacacgatgctctgggacataactggtgcctggaaatcaccatggtcctcatatctcccatgggaatcctgtcctgcctcgaaggagcagcctgggcagccatcacaccacgaggacaggaagcaccagcacgtttcacacctcccccttccctctcccatcttctcatatcctggctcttctctgggcaagatgagccaagcagaacattccatccaggacactggaagttctccaggatccagatccatggggacattaatagtccaaggcattccctcccccaccactattcataaagtattaaccaactggcaccaaggaattgcctccagcctgagtcctaggctctaaaagatattacatatttgaactaatagaggaactctgagtcacccatgccagcatcagcttcagccccagaccctgcagtttgagatctgatgcttcctgagggccaaggcattgctgtaagaaaaggtctagaaataggtgaaagtgagaggtgggggacaggggtttctctttctggcctaaggactttcaggtaatcagagttcatgggccctcaaaggtaaattgcagttgtagacaccgaggatggttgacaacccatggttgagatgggcaccgttttgcaggaaacaccatattaatagacatcctcaccatctccatccgctctcacgcctcctgcaggatctgggagtgagggtggagagtctttcctcacgctccagcacagtggccaggaaaagaaatactgaatttgccccagccaacaggacgttcttgcacaacttcaagaaaagcagctcagctcaggatgagtcttcctgcctgaaactgagagagtgaagaaccataaaacgctatgcagaaggaacattatggagagaaagggtactgaggcactctagaatctgccacattcattttcaaatgcaaatgcagaagacttaccttagttcaaggggaggggacaaagaccccacagcccaacagcaggactgtagaggtcactctgaggtccatggccactcaacctgtcagcttgcaccatccccacctgccacctacagtcaggccacatgcctggtcactgaatcatgcaaaactggcctcagtccctaaaaatgatgtggaaaggaaagcccaggatctgacaatgagccctggtggatttgtggggaaaaaatacacagcactccccacctttctttcgttcatctccagggccccacctcagatcaaagcagctctggatgagatgggacctgcagctctccctccacaaggtgactcttagcaacctcatttcgacagtggtttgtagcgtggtgcaccagggccttgttgaacagatccacactgctctaataaagttcccatccttaatga

SEQ ID NO: 359417 - DNA, 3181 bp, Homo sapiens
ggaccacagctcctcccgtgcatccactcggcctgggaggttctggattttggctgtcgagggagtttgcctgcctctccagagaaagatggtcatgaggcccctgtggagtctgcttctctgggaagccctacttcccattacagttactggtgcccaagtgctgagcaaagtcgggggctcggtgctgctggtggcagcgcgtccccctggcttccaagtccgtgaggctatctggcgatctctctggccttcagaagagctcctggccacgtttttccgaggctccctggagactctgtaccattcccgcttcctgggccgagcccagctacacagcaacctcagcctggagctcgggccgctggagtctggagacagcggcaacttctccgtgttgatggtggacacaaggggccagccctggacccagaccctccagctcaaggtgtacgatgcagtgcccaggcccgtggtacaagtgttcattgctgtagaaagggatgctcagccctccaagacctgccaggttttcttgtcctgttgggcccccaacatcagcgaaataacctatagctggcgacgggagacaaccatggactttggtatggaaccacacagcctcttcacagacggacaggtgctgagcatttccctgggaccaggagacagagatgtggcctattcctgcattgtctccaaccctgtcagctgggacttggccacagtcacgccctgggatagctgtcatcatgaggcagcaccagggaaggcctcctacaaagatgtgctgctggtggtggtgcctgtctcgctgctcctgatgctggttactctcttctctgcctggcactggtgcccctgctcagggaaaaagaaaaaggatgtccatgctgacagagtgggtccagagacagagaacccccttgtgcaggatctgccataaaggacaatatgaactgatgcctggactatcagtaaccccactgcacaggcacacgatgctctgggacataactggtgcctggaaatcaccatggtcctcatatctcccatgggaatcctgtcctgcctcgaaggagcagcctgggcagccatcacaccacgaggacaggaagcaccagcacgtttcacacctcccccttccctctcccatcttctcatatcctggctcttctctgggcaagatgagccaagcagaacattccatccaggacactggaagttctccaggatccagatccatggggacattaatagtccaaggcattccctcccccaccactattcataaagtattaaccaactggcaccaaggaattgcctccagcctgagtcctaggctctaaaagatattacatatttgaactaatagaggaactctgagtcacccatgccagcatcagcttcagccccagaccctgcagtttgagatctgatgcttcctgagggccaaggcattgctgtaagaaaaggtctagaaataggtgaaagtgagaggtgggggacaggggtttctctttctggcctaaggactttcaggtaatcagagttcatgggccctcaaaggtaaattgcagttgtagacaccgaggatggttgacaacccatggttgagatgggcaccgttttgcaggaaacaccatattaatagacatcctcaccatctccatccgctctcacgcctcctgcaggatctgggagtgagggtggagagtctttcctcacgctccagcacagtggccaggaaaagaaatactgaatttgccccagccaacaggacgttcttgcacaacttcaagaaaagcagctcagctcaggatgagtcttcctgcctgaaactgagagagtgaagaaccataaaacgctatgcagaaggaacattatggagagaaagggtactgaggcactctagaatctgccacattcattttcaaatgcaaatgcagaagacttaccttagttcaaggggaggggacaaagaccccacagcccaacagcaggactgtagaggtcactctgactccatcaaactttttattgtggccatcttaggaaaatacattctgcccctgaatgattctgtctagaaaagctctggagtattgatcactactggaaaaacacttaaggagctaaacttaccttcggggattattagctgataaggttcacagtttctctcacccaggtgtaactggattttttctggggcctcaatccagtcttgataacagcgaggaaagaggtattgaagaaacaggggtgggtttgaagtactattttccccagggtggcttcaatctccccacctaggatgtcagccctgtccaaggaccttccctcttctcccccagttccctgggcaatcacttcaccttggacaaaggatcagcacagctggcctccagatccacatcaccactcttccactcgattgttcccagatcctccctgcctggcctgctcagaggttccctgttggtaacctggctttatcaaattctcatccctttcccacacccacttctctcctatcaccttcccccaagattacctgaacagggtccatggccactcaacctgtcagcttgcaccatccccacctgccacctacagtcaggccacatgcctggtcactgaatcatgcaaaactggcctcagtccctaaaaatgatgtggaaaggaaagcccaggatctgacaatgagccctggtggatttgtggggaaaaaatacacagcactccccacctttctttcgttcatctccagggccccacctcagatcaaagcagctctggatgagatgggacctgcagctctccctccacaaggtgactcttagcaacctcatttcgacagtggtttgtagcgtggtgcaccagggccttgttgaacagatccacactgctctaataaagttcccatccttaatgactcacttgtcaactagtggactaattaaccctccaccaaaaaaacacaaagtgcttctgtgagaccaattttgtgctaatgagcattgagactgatgctttgtaagtcacaccacaacaaatattgattgagggcgctgcatgtgctgggtacatttcttggcacttgggaatcagtagtcaagcgaaacccttgcctttgagagtttatggtctggataatataaataaacaagtaagcata

SEQ ID NO: 359418 - DNA, 2854 bp, Homo sapiens
ggaccacagctcctcccgtgcatccactcggcctgggaggttctggattttggctgtcgagggagtttgcctgcctctccagagaaagatggtcatgaggcccctgtggagtctgcttctctgggaagatgcagtgcccaggcccgtggtacaagtgttcattgctgtagaaagggatgctcagccctccaagacctgccaggttttcttgtcctgttgggcccccaacatcagcgaaataacctatagctggcgacgggagacaaccatggactttggtatggaaccacacagcctcttcacagacggacaggtgctgagcatttccctgggaccaggagacagagatgtggcctattcctgcattgtctccaaccctgtcagctgggacttggccacagtcacgccctgggatagctgtcatcatgaggcagcaccagggaaggcctcctacaaagatgtgctgctggtggtggtgcctgtctcgctgctcctgatgctggttactctcttctctgcctggcactggtgcccctgctcagggaaaaagaaaaaggatgtccatgctgacagagtgggtccagagacagagaacccccttgtgcaggatctgccataaaggacaatatgaactgatgcctggactatcagtaaccccactgcacaggcacacgatgctctgggacataactggtgcctggaaatcaccatggtcctcatatctcccatgggaatcctgtcctgcctcgaaggagcagcctgggcagccatcacaccacgaggacaggaagcaccagcacgtttcacacctcccccttccctctcccatcttctcatatcctggctcttctctgggcaagatgagccaagcagaacattccatccaggacactggaagttctccaggatccagatccatggggacattaatagtccaaggcattccctcccccaccactattcataaagtattaaccaactggcaccaaggaattgcctccagcctgagtcctaggctctaaaagatattacatatttgaactaatagaggaactctgagtcacccatgccagcatcagcttcagccccagaccctgcagtttgagatctgatgcttcctgagggccaaggcattgctgtaagaaaaggtctagaaataggtgaaagtgagaggtgggggacaggggtttctctttctggcctaaggactttcaggtaatcagagttcatgggccctcaaaggtaaattgcagttgtagacaccgaggatggttgacaacccatggttgagatgggcaccgttttgcaggaaacaccatattaatagacatcctcaccatctccatccgctctcacgcctcctgcaggatctgggagtgagggtggagagtctttcctcacgctccagcacagtggccaggaaaagaaatactgaatttgccccagccaacaggacgttcttgcacaacttcaagaaaagcagctcagctcaggatgagtcttcctgcctgaaactgagagagtgaagaaccataaaacgctatgcagaaggaacattatggagagaaagggtactgaggcactctagaatctgccacattcattttcaaatgcaaatgcagaagacttaccttagttcaaggggaggggacaaagaccccacagcccaacagcaggactgtagaggtcactctgactccatcaaactttttattgtggccatcttaggaaaatacattctgcccctgaatgattctgtctagaaaagctctggagtattgatcactactggaaaaacacttaaggagctaaacttaccttcggggattattagctgataaggttcacagtttctctcacccaggtgtaactggattttttctggggcctcaatccagtcttgataacagcgaggaaagaggtattgaagaaacaggggtgggtttgaagtactattttccccagggtggcttcaatctccccacctaggatgtcagccctgtccaaggaccttccctcttctcccccagttccctgggcaatcacttcaccttggacaaaggatcagcacagctggcctccagatccacatcaccactcttccactcgattgttcccagatcctccctgcctggcctgctcagaggttccctgttggtaacctggctttatcaaattctcatccctttcccacacccacttctctcctatcaccttcccccaagattacctgaacagggtccatggccactcaacctgtcagcttgcaccatccccacctgccacctacagtcaggccacatgcctggtcactgaatcatgcaaaactggcctcagtccctaaaaatgatgtggaaaggaaagcccaggatctgacaatgagccctggtggatttgtggggaaaaaatacacagcactccccacctttctttcgttcatctccagggccccacctcagatcaaagcagctctggatgagatgggacctgcagctctccctccacaaggtgactcttagcaacctcatttcgacagtggtttgtagcgtggtgcaccagggccttgttgaacagatccacactgctctaataaagttcccatccttaatgactcacttgtcaactagtggactaattaaccctccaccaaaaaaacacaaagtgcttctgtgagaccaattttgtgctaatgagcattgagactgatgctttgtaagtcacaccacaacaaatattgattgagggcgctgcatgtgctgggtacatttcttggcacttgggaatcagtagtcaagcgaaacccttgcctttgagagtttatggtctggataatataaataaacaagtaagcata

SEQ ID NO: 359419 - DNA, 1999 bp, Homo sapiens
  misc_feature (35)..(35): n is a, c, g, or t
  misc_feature (87)..(87): n is a, c, g, or t
  misc_feature (92)..(92): n is a, c, g, or t
ggaagaggggggaagagggacacggggaagggagnaggggaaaaaggggggggggggaagggggagaagaggccaggggaagagagnagganaaccaagggacagaaaagagcgcaaggccacccgggcaggccgaggaggagcagcctgggcagccatcacaccacgaggacaggaagcaccagcacgtttcacacctcccccttccctctcccatcttctcatatcctggctcttctctgggcaagatgagccaagcagaacattccatccaggacactggaagttctccaggatccagatccatggggacattaatagtccaaggcattccctcccccaccactattcataaagtattaaccaactggcaccaaggaattgcctccagcctgagtcctaggctctaaaagatattacatatttgaactaatagaggaactctgagtcacccatgccagcatcagcttcagccccagaccctgcagtttgagatctgatgcttcctgagggccaaggcattgctgtaagaaaaggtctagaaataggtgaaagtgagaggtgggggacaggggtttctctttctggcctaaggactttcaggtaatcagagttcatgggccctcaaaggtaaattgcagttgtagacaccgaggatggttgacaacccatggttgagatgggcaccgttttgcaggaaacaccatattaatagacatcctcaccatctccatccgctctcacgcctcctgcaggatctgggagtgagggtggagagtctttcctcacgctccagcacagtggccaggaaaagaaatactgaatttgccccagccaacaggacgttcttgcacaacttcaagaaaagcagctcagctcaggatgagtcttcctgcctgaaactgagagagtgaagaaccataaaacgctatgcagaaggaacattatggagagaaagggtactgaggcactctagaatctgccacattcattttcaaatgcaaatgcagaagacttaccttagttcaaggggaggggacaaagaccccacagcccaacagcaggactgtagaggtcactctgactccatcaaactttttattgtggccatcttaggaaaatacattctgcccctgaatgattctgtctagaaaagctctggagtattgatcactactggaaaaacacttaaggagctaaacttaccttcggggattattagctgataaggttcacagtttctctcacccaggtgtaactggattttttctggggcctcaatccagtcttgataacagcgaggaaagaggtattgaagaaacaggggtgggtttgaagtactattttccccagggtggcttcaatctccccacctaggatgtcagccctgtccaaggaccttccctcttctcccccagttccctgggcaatcacttcaccttggacaaaggatcagcacagctggcctccagatccacatcaccactcttccactcgattgttcccagatcctccctgcctggcctgctcagaggttccctgttggtaacctggctttatcaaattctcatccctttcccacacccacttctctcctatcaccttcccccaagattacctgaacagggtccatggccactcaacctgtcagcttgcaccatccccacctgccacctacagtcaggccacatgcctggtcactgaatcatgcaaaactggcctcagtccctaaaaatgatgtggaaaggaaagcccaggatctgacaatgagccctggtggatttgtggggaaaaaatacacagcactccccacctttctttcgttcatctccagggccccacctcagatcaaagcagctctggatgagatgggacctgcagctctccctccacaaggtgactcttagcaacctcatttcgacagtggtttgtagcgtggtgcaccagggccttgttgaacagatccacactgctctaataaagttcccatccttaatga

SEQ ID NO: 359420 - DNA, 2104 bp, Homo sapiens
ggaccacagctcctcccgtgcatccactcggcctgggaggttctggattttggctgtcgagggagtttgcctgcctctccagagaaagatggtcatgaggcccctgtggagtctgcttctctgggaagatgcagtgcccaggcccgtggtacaagtgttcattgctgtagaaagggatgctcagccctccaagacctgccaggttttcttgtcctgttgggcccccaacatcagcgaaataacctatagctggcgacgggagacaaccatggactttggtatggaaccacacagcctcttcacagacggacaggtgctgagcatttccctgggaccaggagacagagatgtggcctattcctgcattgtctccaaccctgtcagctgggacttggccacagtcacgccctgggatagctgtcatcatgaggcagcaccagggaaggcctcctacaaagatgtgctgctggtggtggtgcctgtctcgctgctcctgatgctggttactctcttctctgcctggcactggtgcccctgctcagggaaaaagaaaaaggatgtccatgctgacagagtgggtccagagacagagaacccccttgtgcaggatctgccataaaggacaatatgaactgatgcctggactatcagtaaccccactgcacaggcacacgatgctctgggacataactggtgcctggaaatcaccatggtcctcatatctcccatgggaatcctgtcctgcctcgaaggagcagcctgggcagccatcacaccacgaggacaggaagcaccagcacgtttcacacctcccccttccctctcccatcttctcatatcctggctcttctctgggcaagatgagccaagcagaacattccatccaggacactggaagttctccaggatccagatccatggggacattaatagtccaaggcattccctcccccaccactattcataaagtattaaccaactggcaccaaggaattgcctccagcctgagtcctaggctctaaaagatattacatatttgaactaatagaggaactctgagtcacccatgccagcatcagcttcagccccagaccctgcagtttgagatctgatgcttcctgagggccaaggcattgctgtaagaaaaggtctagaaataggtgaaagtgagaggtgggggacaggggtttctctttctggcctaaggactttcaggtaatcagagttcatgggccctcaaaggtaaattgcagttgtagacaccgaggatggttgacaacccatggttgagatgggcaccgttttgcaggaaacaccatattaatagacatcctcaccatctccatccgctctcacgcctcctgcaggatctgggagtgagggtggagagtctttcctcacgctccagcacagtggccaggaaaagaaatactgaatttgccccagccaacaggacgttcttgcacaacttcaagaaaagcagctcagctcaggatgagtcttcctgcctgaaactgagagagtgaagaaccataaaacgctatgcagaaggaacattatggagagaaagggtactgaggcactctagaatctgccacattcattttcaaatgcaaatgcagaagacttaccttagttcaaggggaggggacaaagaccccacagcccaacagcaggactgtagaggtcactctgactccatcaaactttttattgtggccatcttaggaaaatacattctgcccctgaatgattctgtctagaaaagctctggagtattgatcactactggaaaaacacttaaggagctaaacttaccttcggggattattagctgataaggttcacagtttctctcacccaggtgtaactggattttttctggggcctcaatccagtcttgataacagcgaggaaagaggtacttggagaaccggggtggttgagtaaaattcccagggggtgatatcccacaaggagtgacggcgaggcctccctctccattcggcaaaccccgggcaagagaccggtggaaaccaaaccgccacgggcaaacgcgcgcgaacgggaacatactaaacaattaccagggggcacagacgcc

SEQ ID NO: 359421 - DNA, 1034 bp, Homo sapiens
ggaccacagctcctcccgtgcatccactcggcctgggaggttctggattttggctgtcgagggagtttgcctgcctctccagagaaagatggtcatgaggcccctgtggagtctgcttctctgggaagccctacttcccattacagttactggtgcccaagtgctgagcaaagtcgggggctcggtgctgctggtggcagcgcgtccccctggcttccaagtccgtgaggctatctggcgatctctctggccttcagaagagctcctggccacgtttttccgaggctccctggagactctgtaccattcccgcttcctgggccgagcccagctacacagcaacctcagcctggagctcgggccgctggagtctggagacagcggcaacttctccgtgttgatggtggacacaaggggccagccctggacccagaccctccagctcaaggtgtacgatgcagtgcccaggcccgtggtacaagtgttcattgctgtagaaagggatgctcagccctccaagacctgccaggttttcttgtcctgttgggcccccaacatcagcgaaataacctatagctggcgacgggagacaaccatggactttggtatggaaccacacagcctcttcacagacggacaggtgctgagcatttccctgggaccaggagacagagatgtggcctattcctgcattgtctccaaccctgtcagctgggacttggccacagtcacgccctgggatagctgtcatcatgaggcagcaccagggaaggcctcctacaaagatgtgctgctggtggtggtgcctgtctcgctgctcctgatgctggttactctcttctctgcctggcactggtgcccctgctcagggccccacctcagatcaaagcagctctggatgagatgggacctgcagctctccctccacaaggtgactcttagcaacctcatttcgacagtggtttgtagcgtggtgcaccagggccttgttgaacagatccacactgctctaataaagttcccatccttaatga

SEQ ID NO: 359422 - DNA, 460 bp, Homo sapiens
tcaccacagtccccgcccctccctctagtacccccggacctgggggctcaatgtcacttgtcatcatggcgctttccctcccagttctataggggtgcagttaagagaaaagtgaagtatttcttgaaactgtgtctctatcaaaaagaaggaaacaaaagatcaaccgaaatgaccacttgtttaaacattaatagtacatagcatgattgctttgtggcagagcaaaaaatttctatgaatttcatatgcaaagagaatacgtcagtgttgaaaatcgctggccccttcactctctgaggttaccttccccttctctgccagtgttacacttgccatccctgcgtgccaaggccatagtttccacttatttttttaaggcagcattaaacttatttgacctacatctgcccccctcctgtgaaacttgaaatgctattaaaccaaattaagaagtttt

SEQ ID NO: 359423 - DNA, 323 bp, Homo sapiens
cacagtattgcactaaagaagcaagccataaaagattacataaaatataactttcttgtattcttatacagtttaaaacaagttaaaactaaactatgtagtttaagtttgtgcacataggtagtaaaactaaaggagcaaaaggaatgatcacagaagtcagattagtgttccatctggtggtaggagagggacaatgaacttggaggaacatatggaggacttcaattattggcaacattctatttcttaatctgttgctgatctgattgttccctttataattattatttaaattgtacatatgcttttagatacatttt

SEQ ID NO: 359424 - DNA, 508 bp, Homo sapiens
atagcccctaactatctagagaaaattgttcaaagttcttagcctgttttcattcttgcaaattcatttccattgccttcctatgtatcccctccctgccagctagccttttctacttctaaacgcaccacgcaatttcccgccttggtatttttgcttgagccattcctcctacatgaaatgtcttccccctcacttgtatttatgtaaggtcttacttttatgagcctgattacagtcatcttgccatacagatcctcctcttcggaagcattttctgcttaggtcttttggaacttttagtgctccaagaagattcaagcctcttcctccagtgccaaaggggtcccatctccctttgtctgccatgccacagcttccagatcttgtctgaacacacccatctgctttccagtttgagagaaaatgactacttcccaaatatacccaccatataccccacaccttgagacactgtttccagcatgcttactacctgtcaacaccc

SEQ ID NO: 359425 - DNA, 1239 bp, Homo sapiens
ggaatcacatcgagccactgaaaattcagtggctcgatgtgcttcagcgagaacccagacctttcccaaagctcaggattcttcgaaaagttgagaaaattgatgacttcaaagctgaagactttcagattgaagggtacaatccgcatccaactattaaaatggaaatggctgtttagggtgctttcaaaggagctcgaaggatattgtcagtctttaggggttgggctggatgccgaggtaaaagttctttttgctctaaaagaaaaaggaactaggtcaaaaatctgtccgtgacctatcagttattaatttttaaggatgttgccactggcaaatgtaactgtgccagttctttccataataaaaggctttgagttaactcactgagggtatctgacaatgctgaggttatgaacaaagtgaggagaatgaaatgtatgtgctcttagcaaaaacatgtatgtgcatttcaatcccacgtacttataaagaaggttggtgaatttcacaagctatttttggaatatttttagaatattttaagaatttcacaagctattccctcaaatctgagggagctgagtaacaccatcgatcatgatgtagagtgtggttatgaactttaaagttatagttgttttatatgttgctataataaagaagtgttctgcattcgtccacgctttgttcattctgtactgccacttatctgctcagttccttcctaaaatagattaaagaactctccttaagtaaacatgtgctgtattctggtttggatgctacttaaaagagtatattttagaaataatagtgaatatattttgccctatttttctcattttaactgcatcttatcctcaaaatataatgaccatttaggatagagtttttttttttttttttttaaacttttataaccttaaagggttattttaaaataatctatggactaccattttgccctcattagcttcagcatggtgtgacttctctaataatatgcttagattaagcaaggaaaagatgcaaaaccacttcggggttaatcagtgaaatatttttcccttcgttgcataccagatacccccggtgttgcacgactatttttattctgctaatttatgacaagtgttaaacagaacaaggaattattccaacaagttatgcaacatgttgcttattttcaaattacagtttaatgtctaggtgccagcccttgatatagctattttt

SEQ ID NO: 359426 - DNA, 877 bp, Homo sapiens
  misc_feature (28)..(28): n is a, c, g, or t
tggctagtacgaggctcggttaatcggncgagggtctgccaccgctccacttggcctgcctccgtcccgccgcgccacttcacttggcctgcctccgtcccgccgcgccacttcgcctgcctccgtcccccgcccgccgcgccatgcctgtggccggctcggagctgccgcgccggcccttgccccccgccgcacaggagcgggacgccgagccgcgtccgccgcacggggagctgcagtacctggggcagatccaacacatcctccgctgcggcgtcaggaaggacgaccgcacgggcaccggcaccctgtcggtattcggcatgcaggcgcgctacagcctgagagatgaattccctctgctgacaaccaaacgtgtgttctggaagggtgttttggaggagttgctgtggtttatcaagggatccacaaatgctaaagagctgtcttccaagggagtgaaaatctgggatgccaatggatcccgagactttttggacagcctgggattctccaccagagaagaaggggacttgggcccagtttatggcttccagtggaggcattttggggcagaatacagagatatggaatcagattattcaggacagggagttgaccaactgcaaagagtgattgacaccatcaaaaccaaccctgacgacagaagaatcatcatgtgcgcttggaatccaagaggttgaaagaaccccgtcgtcttcatttatactaaccatactcttagagggaagcaatctggttttgtgcagaggcacctgagggaggcaggaccctgggaacttcccccagccacatggttgattgtgtgacgttgggcaagtcacattttgctgcactatcaccttcagatcatgag

SEQ ID NO: 359427 - DNA, 1722 bp, Homo sapiens
ttgcctaacatcaggaacgtgcttaatgcttctgaattgcacacaaaaatggcaagtttaatattatgtgtactttatcacaatgaaaaaagctgctgcgtgggccaagttacttgtgcaggtaagtgttctgcaggtcgttgcctgcacctcagttgtagggtgtccgtaggatgtgaggccagtccccgggcttaatgatgctttaaatcctgcctagtattcaattatttcttgtcgcttaaaaggcctaataaaattatggttttagtttacagtggtatgaatgcttagctgttggattttagtaggaaagtttgtccctttttgtttttaattttgttttacagattcacaggaatttttttttttttttttttttaatgcacagaaagtttccctggacacactacccagtttcccccagtgataatatcttgggtaacatcctgtatacattcacattggtgcattcctcagagttgtcagattttgctagttttacgtgcacttgtgtatgtgtgtatttgcaattttagcacgtgtagactcttgtaaccactacaatcaagttacagaactacactaccaaggttcatctttttaaaatctttgatgttacctttttcggaacagtgaccatgagaggactttcctcccaaaattttgagaactactgaaccagaatatagtctgacactaataggtagaaatttaaccaaaggagattatgaagctctgcacttcagttaacaaatcacttctcagcttccagttccatctcagaaggaaggaaagggattaaaatccagagaccagaaatgggagcaaagtacaaggtggtgtaatcattacagaggtttcctgatgtttccaagtcagtcgtgtgttgagctgctaaactctaaagtaattttaggtggaagtgttggaaacatgctgctgaggtgatagaaaggaatccatggtcctctgttagttggaaagtatatggaatactatattctacataagatacaacactctctgtgagacaaggataaagtagattttgtcagtgaaattgtgacaagaatcgctgatgggtttagagcctaagtttgcgaggagcactggaagaaattaagattgttgagattggaaagggttagctatggggggaacaggaggaggtgactccatgacagaccaaatattcaaaggactgtgtagaagaggaaaaagactttgttagggctccagaggacagagccaggagtcagacagggccttgaactcaacccaccgagatctgcaaactttgcaggatgcaccagatgtcttgtagccatgggtcaaggggggaccctgggtaagagactgtaatagatgacctctaaggccatctcatgacatgtgtgattaatgtatgtacctgtcctctctttttgacaattctacagattattcaggacagggagttgaccaactgcaaagagtgattgacaccatcaaaaccaaccctgacgacagaagaatcatcatgtgcgcttggaatccaagaggttgaaagaaccccgtcgtcttcatttatactaaccatactcttagagggaagcaatctggttttgtgcagaggcacctgagggaggcaggaccctgggaacttcccccagccacatggttgattgtgtgacgttgggcaagtcacattttgctgcactatcaccttcagatcatgag

SEQ ID NO: 359428 - DNA, 1675 bp, Homo sapiens
ttgcctaacatcaggaacgtgcttaatgcttctgaattgcacacaaaaatggcaagtttaatattatgtgtactttatcacaatgaaaaaagctgctgcgtgggccaagttacttgtgcaggtaagtgttctgcaggtcgttgcctgcacctcagttgtagggtgtccgtaggatgtgaggccagtccccgggcttaatgatgctttaaatcctgcctagtattcaattatttcttgtcgcttaaaaggcctaataaaattatggttttagtttacagtggtatgaatgcttagctgttggattttagtaggaaagtttgtccctttttgtttttaattttgttttacagattcacaggaatttttttttttttttttttttaatgcacagaaagtttccctggacacactacccagtttcccccagtgataatatcttgggtaacatcctgtatacattcacattggtgcattcctcagagttgtcagattttgctagttttacgtgcacttgtgtatgtgtgtatttgcaattttagcacgtgtagactcttgtaaccactacaatcaagttacagaactacactaccaaggttcatctttttaaaatctttgatgttacctttttcggaacagtgaccatgagaggactttcctcccaaaattttgagaactactgaaccagaatatagtctgacactaataggtagaaatttaaccaaaggagattatgaagctctgcacttcagttaacaaatcacttctcagcttccagttccatctcagaaggaaggaaagggattaaaatccagagaccagaaatgggagcaaagtacaaggtggtgtaatcattacagaggtttcctgatgtttccaagtcagtcgtgtgttgagctgctaaactctaaagtaattttaggtggaagtgttggaaacatgctgctgaggtgatagaaaggaatccatggtcctctgttagttggaaagtatatggaatactatattctacataagatacaacactctctgtgagacaaggataaagtagattttgtcagtgaaattgtgacaagaatcgctgatgggtttagagcctaagtttgcgaggagcactggaagaaattaagattgttgagattggaaagggttagctatggggggaacaggaggaggtgactccatgacagaccaaatattcaaaggactgtgtagaagaggaaaaagactttgttagggctccagaggacagagccaggagtcagacagggccttgaactcaacccaccgagatctgcaaactttgcaggatgcaccagatgtcttgtagccatgggtcaaggggggaccctgggtaagagactgtaatagatgacctctaaggccatctcatgacatgtgtgattaatgtatgtacctgtcctctctttttgacaattctacagattattcaggacagggagttgaccaactgcaaagagtgattgacaccatcaaaaccaaccctgacgacagaagaatcatcctagtgagtgtgatgtggtatctcattgtggttttgctttgcatttccctaatggctgatggggttgactatcttttatatataacttaatttttctattaggtaacattcacaattatttttaatatcagctgccatgattgccagatgaga

SEQ ID NO: 359429 - DNA, 1375 bp, Homo sapiens
cttcccaggctcaagccattctcctgcctcagcctcctgagtagctgggattacaggcacacatcaccgcgccctgctaattttttttttttttctgagatggagtctcgctctgtcacccaggctggagtgcagtggtgcgattttggctcactgcaagctcctcctcctgggttcacgccattctcctgcctcagcctctccgagtagctgggactataggtgggcggatcacgaggtcagaagatcgagaccagctaatttttgtatttttagtagagacgaggtttcaccatgttggccaggctggtctcaaactcctgacctcaggtgatccacccacctcggcctcccaaagtgctggggttacaggtgtgagccactatgcctggccactatgccgttctttcatcggagaagctgcagtggctcactctgactggctgcatcctctgagtggacagaccccataatccagccccacgtggcagcctgtccctggcatgtgccctgtgctccctggggcatctccactgcccccgcctggacctgcaggctctgcagctgctccttcctcagatactcctaaggggatggcctccctcatgtaagcaaaacctgggagggttagagccctgaggagcttcctgtgagatgctcaggtaggcagagatcaggttggtgctaggccagctggcattcagcagggcacagccaacctgaaagagccctaaggaggaaaaagcaagtgggacccaaggtgaaaagtcttgtttccccggggctcctcacctgagattcctattgtggaatgattcctcagaaaatttgggctctgtttaaataatgaaggctgtggtcgctccatggctcctgctcacccttccctcacctgaggcttagctttccttatggagtcagctctggccatctccctcgtcccagcccacacccaacgttctcctcaatgaacttttctactgtgcttggcattcagtgccctggcccagtatcctccggtctttgtttcacatatctcggctgttctctccagcgaggctgcaatgtggaaggggagggcatttctgaaacccaggctttggcagagtatcccacataatgtagatcatgtgctgatttgctgagagaaacagagaactggtccctgagtccccgactccacacctccagtacgacccatgaatttatgtgggatgcatcaaggtgtccctcctagaactggaaccaagactgctccatcagagttaaaggtgtaagatcaacacaaaatggggagtgtatagctatgcaaagtcacctcaggaaaaaatgttcctaggcaggcaggatgtggctataagccacatgaatgtac

SEQ ID NO: 359430 - DNA, 556 bp, Homo sapiens
accgtcctgccgtcctggatcctgcgccagctgcgcgggggaggggactcgaaggtgtgtgagccaggggctgaccttgaccgctcagataaatggagcgcagccttgacacaggggtggaggtggttttgaatggggaaacccattcgtggtgaagcagattcactgtagctagcggaaaagccctccggcccacggacccatctagagacgaatacatagcagctgctgtggctgattggcgtgggacagcgtggggagttttgtctgaggagagggatccacttttctgcagctccaagcccaggggcctttgatgagccatagacctcatttttaacccacctttctgcttagacattgagcaagttacttctcatatagcttccctatatgttaaaaatggagaaaataatgcttagtaggcaattctgataaaagcaggtgcttgcaaaaatctctctgttgtctgaatataaactgtaccacaagcgagtgcggatgaacgaggactgcatttaaagataagttttacactttcatttctccgtgcctc

SEQ ID NO: 359431 - DNA, 444 bp, Homo sapiens
cccgtttagtcctaacctcaatcctggggcagatccaacacatcctccgctgcggcgtcaggaaggacgaccgcacgggcaccggcaccctgtcggtattcggcatgcaggcgcgctacagcctgagaggtgacgccgcgggcccctgcgggacgggtggcgggaaggagggaggcgcggctggggagagcgctcgggagctgccgggcgctgcggaccccgtttagtcctaacctcaatcctgcgagggaggggacgcatcgtcctcctcgccttacagacgccgaaacggagggtcccattagggacgtgactggcgcgggcaacacacacagcagcgacagccgggaggtaagccgcgtcccagcggctccgcggccgggctcgcagtcgccccagtgatgccgtggcccccgaggcgggcgtcatcgggcagcgtttgcc

SEQ ID NO: 359432 - DNA, 2148 bp, Homo sapiens
cgcgggacggccgcgggaaaaggcgcgcggaaggggtcctgccaccgcgccacttggcctgcctccgtcccgccgcgccacttcacttggcctgcctccgtcccgccgcgccacttcgcctgcctccgtcccccgcccgccgcgccatgcctgtggccggctcggagctgccgcgccggcccttgccccccgccgcacaggagcgggacgccgagccgcgtccgccgcacggggagctgcagtacctggggcagatccaacacatcctccgctgcggcgtcaggaaggacgaccgcacgggcaccggcaccctgtcggtattcggcatgcaggcgcgctacagcctgagagatgaattccctctgctgacaaccaaacgtgtgttctggaagggtgttttggaggagttgctgtggtttatcaagggatccacaaatgctaaagagctgtcttccaagggagtgaaaatctgggatgccaatggatcccgagactttttggacagcctgggattctccaccagagaagaaggggacttgggcccagtttatggcttccagtggaggcattttggggcagaatacagagatatggaatcagattattcaggacagggagttgaccaactgcaaagagtgattgacaccatcaaaaccaaccctgacgacagaagaatcatcatgtgcgcttggaatccaagagatcttcctctgatggcgctgcctccatgccatgccctctgccagttctatgtggtgaacagtgagctgtcctgccagctgtaccagagatcgggagacatgggcctcggtgtgcctttcaacatcgccagctacgccctgctcacgtacatgattgcgcacatcacgggcctgaagccaggtgactttatacacactttgggagatgcacatatttacctgaatcacatcgagccactgaaaattcagcttcagcgagaacccagacctttcccaaagctcaggattcttcgaaaagttgagaaaattgatgacttcaaagctgaagactttcagattgaagggtacaatccgcatccaactattaaaatggaaatggctgtttagggtgctttcaaaggagctcgaaggatattgtcagtctttaggggttgggctggatgccgaggtaaaagttctttttgctctaaaagaaaaaggaactaggtcaaaaatctgtccgtgacctatcagttattaatttttaaggatgttgccactggcaaatgtaactgtgccagttctttccataataaaaggctttgagttaactcactgagggtatctgacaatgctgaggttatgaacaaagtgaggagaatgaaatgtatgtgctcttagcaaaaacatgtatgtgcatttcaatcccacgtacttataaagaaggttggtgaatttcacaagctatttttggaatatttttagaatattttaagaatttcacaagctattccctcaaatctgagggagctgagtaacaccatcgatcatgatgtagagtgtggttatgaactttaaagttatagttgttttatatgttgctataataaagaagtgttctgcattcgtccacgctttgttcattctgtactgccacttatctgctcagttccttcctaaaatagattaaagaactctccttaagtaaacatgtgctgtattctggtttggatgctacttaaaagagtatattttagaaataatagtgaatatattttgccctatttttctcattttaactgcatcttatcctcaaaatataatgaccatttaggatagagtttttttttttttttttttaaacttttataaccttaaagggttattttaaaataatctatggactaccattttgccctcattagcttcagcatggtgtgacttctctaataatatgcttagattaagcaaggaaaagatgcaaaaccacttcggggttaatcagtgaaatatttttcccttcgttgcataccagatacccccggtgttgcacgactatttttattctgctaatttatgacaagtgttaaacagaacaaggaattattccaacaagttatgcaacatgttgcttattttcaaattacagtttaatgtctaggtgccagcccttgatatagctattttt

SEQ ID NO: 359433 - DNA, 2110 bp, Homo sapiens
caaaaaaaataaagctaggacgaggctggtggaattggacaaggtgacttggcctgcctccgtcccgccgcgccacttcgcctgcctccgtcccccgcccgccgcgccatgcctgtggccggctcggagctgccgcgccggcccttgccccccgccgcacaggagcgggacgccgagccgcgtccgccgcacggggagctgcagtacctggggcagatccaacacatcctccgctgcggcgtcaggaaggacgaccgcacgggcaccggcaccctgtcggtattcggcatgcaggcgcgctacagcctgagagatgaattccctctgctgacaaccaaacgtgtgttctggaagggtgttttggaggagttgctgtggtttatcaagggatccacaaatgctaaagagctgtcttccaagggagtgaaaatctgggatgccaatggatcccgagactttttggacagcctgggattctccaccagagaagaaggggacttgggcccagtttatggcttccagtggaggcattttggggcagaatacagagatatggaatcagattattcaggacagggagttgaccaactgcaaagagtgattgacaccatcaaaaccaaccctgacgacagaagaatcatcatgtgcgcttggaatccaagagatcttcctctgatggcgctgcctccatgccatgccctctgccagttctatgtggtgaacagtgagctgtcctgccagctgtaccagagatcgggagacatgggcctcggtgtgcctttcaacatcgccagctacgccctgctcacgtacatgattgcgcacatcacgggcctgaagccaggtgactttatacacactttgggagatgcacatatttacctgaatcacatcgagccactgaaaattcagcttcagcgagaacccagacctttcccaaagctcaggattcttcgaaaagttgagaaaattgatgacttcaaagctgaagactttcagattgaagggtacaatccgcatccaactattaaaatggaaatggctgtttagggtgctttcaaaggagctcgaaggatattgtcagtctttaggggttgggctggatgccgaggtaaaagttctttttgctctaaaagaaaaaggaactaggtcaaaaatctgtccgtgacctatcagttattaatttttaaggatgttgccactggcaaatgtaactgtgccagttctttccataataaaaggctttgagttaactcactgagggtatctgacaatgctgaggttatgaacaaagtgaggagaatgaaatgtatgtgctcttagcaaaaacatgtatgtgcatttcaatcccacgtacttataaagaaggttggtgaatttcacaagctatttttggaatatttttagaatattttaagaatttcacaagctattccctcaaatctgagggagctgagtaacaccatcgatcatgatgtagagtgtggttatgaactttaaagttatagttgttttatatgttgctataataaagaagtgttctgcattcgtccacgctttgttcattctgtactgccacttatctgctcagttccttcctaaaatagattaaagaactctccttaagtaaacatgtgctgtattctggtttggatgctacttaaaagagtatattttagaaataatagtgaatatattttgccctatttttctcattttaactgcatcttatcctcaaaatataatgaccatttaggatagagtttttttttttttttttttaaacttttataaccttaaagggttattttaaaataatctatggactaccattttgccctcattagcttcagcatggtgtgacttctctaataatatgcttagattaagcaaggaaaagatgcaaaaccacttcggggttaatcagtgaaatatttttcccttcgttgcataccagatacccccggtgttgcacgactatttttattctgctaatttatgacaagtgttaaacagaacaaggaattattccaacaagttatgcaacatgttgcttattttcaaattacagtttaatgtctaggtgccagcccttgatatagctattttt

SEQ ID NO: 359434 - DNA, 2320 bp, Homo sapiens
accgtcctgccgtcctggatcctgcgccagctgcgcgggggaggggactcgaaggtgtgtgagccaggggctgaccttgaccgctcagataaatggagcgcagccttgacacaggggtggaggtggttttgaatggggaaacccattcgtggtgaagcagattcactgtagctagcggaaaagccctccggcccacggacccatctagagacgaatacatagcagctgctgtggctgattggcgtgggacagcgtggggagttttgtctgaggagagggatccacttttctgcagctccaagcccaggggcctttgatgagccatagacctcatttttaacccacctttctgcttagacattgagcaagttacttctcatatagcttccctatatgttaaaaatggagaaaataatgcttagtaggcaattctgataaaagcaggtgcttgcaaaaatctctctgttgtctgaatataaactgtaccacaagcgagtgcggatgaacgaggactgcatttaaaatgaattccctctgctgacaaccaaacgtgtgttctggaagggtgttttggaggagttgctgtggtttatcaagggatccacaaatgctaaagagctgtcttccaagggagtgaaaatctgggatgccaatggatcccgagactttttggacagcctgggattctccaccagagaagaaggggacttgggcccagtttatggcttccagtggaggcattttggggcagaatacagagatatggaatcagattattcaggacagggagttgaccaactgcaaagagtgattgacaccatcaaaaccaaccctgacgacagaagaatcatcatgtgcgcttggaatccaagagatcttcctctgatggcgctgcctccatgccatgccctctgccagttctatgtggtgaacagtgagctgtcctgccagctgtaccagagatcgggagacatgggcctcggtgtgcctttcaacatcgccagctacgccctgctcacgtacatgattgcgcacatcacgggcctgaagccaggtgactttatacacactttgggagatgcacatatttacctgaatcacatcgagccactgaaaattcagcttcagcgagaacccagacctttcccaaagctcaggattcttcgaaaagttgagaaaattgatgacttcaaagctgaagactttcagattgaagggtacaatccgcatccaactattaaaatggaaatggctgtttagggtgctttcaaaggagctcgaaggatattgtcagtctttaggggttgggctggatgccgaggtaaaagttctttttgctctaaaagaaaaaggaactaggtcaaaaatctgtccgtgacctatcagttattaatttttaaggatgttgccactggcaaatgtaactgtgccagttctttccataataaaaggctttgagttaactcactgagggtatctgacaatgctgaggttatgaacaaagtgaggagaatgaaatgtatgtgctcttagcaaaaacatgtatgtgcatttcaatcccacgtacttataaagaaggttggtgaatttcacaagctatttttggaatatttttagaatattttaagaatttcacaagctattccctcaaatctgagggagctgagtaacaccatcgatcatgatgtagagtgtggttatgaactttaaagttatagttgttttatatgttgctataataaagaagtgttctgcattcgtccacgctttgttcattctgtactgccacttatctgctcagttccttcctaaaatagattaaagaactctccttaagtaaacatgtgctgtattctggtttggatgctacttaaaagagtatattttagaaataatagtgaatatattttgccctatttttctcattttaactgcatcttatcctcaaaatataatgaccatttaggatagagtttttttttttttttttttaaacttttataaccttaaagggttattttaaaataatctatggactaccattttgccctcattagcttcagcatggtgtgacttctctaataatatgcttagattaagcaaggaaaagatgcaaaaccacttcggggttaatcagtgaaatatttttcccttcgttgcataccagatacccccggtgttgcacgactatttttattctgctaatttatgacaagtgttaaacagaacaaggaattattccaacaagttatgcaacatgttgcttattttcaaattacagtttaatgtctaggtgccagcccttgatatagctattttt

SEQ ID NO: 359435 - DNA, 1203 bp, Homo sapiens
  misc_feature (1150)..(1150): n is a, c, g, or t
  misc_feature (1157)..(1157): n is a, c, g, or t
  misc_feature (1160)..(1160): n is a, c, g, or t
cgcgggacggccgcgggaaaaggcgcgcggaaggggtcctgccaccgcgccacttggcctgcctccgtcccgccgcgccacttcacttggcctgcctccgtcccgccgcgccacttcgcctgcctccgtcccccgcccgccgcgccatgcctgtggccggctcggagctgccgcgccggcccttgccccccgccgcacaggagcgggacgccgagccgcgtccgccgcacggggagctgcagtacctggggcagatccaacacatcctccgctgcggcgtcaggaaggacgaccgcacgggcaccggcaccctgtcggtattcggcatgcaggcgcgctacagcctgagagatgaattccctctgctgacaaccaaacgtgtgttctggaagggtgttttggaggagttgctgtggtttatcaagggatccacaaatgctaaagagctgtcttccaagggagtgaaaatctgggatgccaatggatcccgagactttttggacagcctgggattctccaccagagaagaaggggacttgggcccagtttatggcttccagtggaggcattttggggcagaatacagagatatggaatcagattattcaggacagggagttgaccaactgcaaagagtgattgacaccatcaaaaccaaccctgacgacagaagaatcatcatgtgcgcttggaatccaagagatcttcctctgatggcgctgcctccatgccatgccctctgccagttctatgtggtgaacagtgagctgtcctgccagctgtaccagagatcgggagacatgggcctcggtgtgcctttcaacatcgccagctacgccctgctcacgtacatgattgcgcacatcacgggcctgaagccaggtgactttatacacactttgggagatgcacatatttacctgaatcacatcgagccactgaaaattcagcttcagcgagaacccagacctttcccaaagctcaggattcttcgaaaagttgagaaaattgatgacttcaaagctgaagactttcagattgaagggtacaatccgcatccaactattaaaatggaaatggctgtttagggtgctttcaaaggagctcgaaggatattgtcagtctttaggggttgggatgcgggaaaatntttggtnaanaaagctgggcaattgtcgggcatcataattagagtggccgggg

SEQ ID NO: 359436 - DNA, 2660 bp, Homo sapiens
cgcgggacggccgcgggaaaaggcgcgcggaaggggtcctgccaccgcgccacttggcctgcctccgtcccgccgcgccacttcacttggcctgcctccgtcccgccgcgccacttcgcctgcctccgtcccccgcccgccgcgccatgcctgtggccggctcggagctgccgcgccggcccttgccccccgccgcacaggagcgggacgccgagccgcgtccgccgcacggggagctgcagtacctggggcagatccaacacatcctccgctgcggcgtcaggaaggacgaccgcacgggcaccggcaccctgtcggtattcggcatgcaggcgcgctacagcctgagagatgaattccctctgctgacaaccaaacgtgtgttctggaagggtgttttggaggagttgctgtggtttatcaagggatccacaaatgctaaagagctgtcttccaagggagtgaaaatctgggatgccaatggatcccgagactttttggacagcctgggattctccaccagagaagaaggggacttgggcccagtttatggcttccagtggaggcattttggggcagaatacagagatatggaatcagattattcaggacagggagttgaccaactgcaaagagtgattgacaccatcaaaaccaaccctgacgacagaagaatcatcatgtgcgcttggaatccaagagatcttcctctgatggcgctgcctccatgccatgccctctgccagttctatgtggtgaacagtgagctgtcctgccagctgtaccagagatcgggagacatgggcctcggtgtgcctttcaacatcgccagctacgccctgctcacgtacatgattgcgcacatcacgggcctgaaggtgggctgtctcgggaagggtgacttgccagcctaccacactgagctcttcagttctttaatatgggaaaacaaattgcagagtttagtctctgattagcttttaaatttgatatgtgtaagtaagaaatgaaccagcttttactttgaaaccttcctcttctggaaggttttctggccctgtggtatacgcactaacagatctatacaggttgtttgtgatacagcttctatggattttctcaaaagctatgctgaggttgggtatggtggctcatgcctgtaatcccagcactttgggagactgagacaggagcaattgcttgaggtctggagttcaataccagcctgggcaacataacaagatgctgttgctacaaaaaaatggaaaagctacactaaattatttttttaaaaaaagccttgcggtgtctgcatattctaatgtttttaaatgatgttttaaagaattgaaactaacatactgttctgctttctcccccgggtttatagccaggtgactttatacacactttgggagatgcacatatttacctgaatcacatcgagccactgaaaattcagcttcagcgagaacccagacctttcccaaagctcaggattcttcgaaaagttgagaaaattgatgacttcaaagctgaagactttcagattgaagggtacaatccgcatccaactattaaaatggaaatggctgtttagggtgctttcaaaggagctcgaaggatattgtcagtctttaggggttgggctggatgccgaggtaaaagttctttttgctctaaaagaaaaaggaactaggtcaaaaatctgtccgtgacctatcagttattaatttttaaggatgttgccactggcaaatgtaactgtgccagttctttccataataaaaggctttgagttaactcactgagggtatctgacaatgctgaggttatgaacaaagtgaggagaatgaaatgtatgtgctcttagcaaaaacatgtatgtgcatttcaatcccacgtacttataaagaaggttggtgaatttcacaagctatttttggaatatttttagaatattttaagaatttcacaagctattccctcaaatctgagggagctgagtaacaccatcgatcatgatgtagagtgtggttatgaactttaaagttatagttgttttatatgttgctataataaagaagtgttctgcattcgtccacgctttgttcattctgtactgccacttatctgctcagttccttcctaaaatagattaaagaactctccttaagtaaacatgtgctgtattctggtttggatgctacttaaaagagtatattttagaaataatagtgaatatattttgccctatttttctcattttaactgcatcttatcctcaaaatataatgaccatttaggatagagtttttttttttttttttttaaacttttataaccttaaagggttattttaaaataatctatggactaccattttgccctcattagcttcagcatggtgtgacttctctaataatatgcttagattaagcaaggaaaagatgcaaaaccacttcggggttaatcagtgaaatatttttcccttcgttgcataccagatacccccggtgttgcacgactatttttattctgctaatttatgacaagtgttaaacagaacaaggaattattccaacaagttatgcaacatgttgcttattttcaaattacagtttaatgtctaggtgccagcccttgatatagctattttt

SEQ ID NO: 359437 - DNA, 2380 bp, Homo sapiens
cgcgggacggccgcgggaaaaggcgcgcggaaggggtcctgccaccgcgccacttggcctgcctccgtcccgccgcgccacttcacttggcctgcctccgtcccgccgcgccacttcgcctgcctccgtcccccgcccgccgcgccatgcctgtggccggctcggagctgccgcgccggcccttgccccccgccgcacaggagcgggacgccgagccgcgtccgccgcacggggagctgcagtacctggggcagatccaacacatcctccgctgcggcgtcaggaaggacgaccgcacgggcaccggcaccctgtcggtattcggcatgcaggcgcgctacagcctgagagatgaattccctctgctgacaaccaaacgtgtgttctggaagggtgttttggaggagttgctgtggtttatcaagggatccacaaatgctaaagagctgtcttccaagggagtgaaaatctgggatgccaatggatcccgagactttttggacagcctgggattctccaccagagaagaaggggacttgggcccagtttatggcttccagtggaggcattttggggcagaatacagagatatggaatcagattattcaggacagggagttgaccaactgcaaagagtgattgacaccatcaaaaccaaccctgacgacagaagaatcatcatgtgcgcttggaatccaagagatcttcctctgatggcgctgcctccatgccatgccctctgccagttctatgtggtgaacagtgagctgtcctgccagctgtaccagagatcgggagacatgggcctcggtgtgcctttcaacatcgccagctacgccctgctcacgtacatgattgcgcacatcacgggcctgaaggtgggctgtctcgggaagggtgacttgccagcctaccacactgagctcttcagttcctgatgaggcaccaggctcctgatgctgtgtaatgtcacaaaatacccctcactctcgatctgtgcaagagaacagctggttgcgctccaatcatgttacataacctacggcaaggtatcgacaggatcatactcctgtaaaatagaactttgttgatcacatcctgtgtacttgtttcacggacatgaggagcaattacaacaggtcgtacaattatggcaaaataatggccttattttgtttttagcttcagcgagaacccagacctttcccaaagctcaggattcttcgaaaagttgagaaaattgatgacttcaaagctgaagactttcagattgaagggtacaatccgcatccaactattaaaatggaaatggctgtttagggtgctttcaaaggagctcgaaggatattgtcagtctttaggggttgggctggatgccgaggtaaaagttctttttgctctaaaagaaaaaggaactaggtcaaaaatctgtccgtgacctatcagttattaatttttaaggatgttgccactggcaaatgtaactgtgccagttctttccataataaaaggctttgagttaactcactgagggtatctgacaatgctgaggttatgaacaaagtgaggagaatgaaatgtatgtgctcttagcaaaaacatgtatgtgcatttcaatcccacgtacttataaagaaggttggtgaatttcacaagctatttttggaatatttttagaatattttaagaatttcacaagctattccctcaaatctgagggagctgagtaacaccatcgatcatgatgtagagtgtggttatgaactttaaagttatagttgttttatatgttgctataataaagaagtgttctgcattcgtccacgctttgttcattctgtactgccacttatctgctcagttccttcctaaaatagattaaagaactctccttaagtaaacatgtgctgtattctggtttggatgctacttaaaagagtatattttagaaataatagtgaatatattttgccctatttttctcattttaactgcatcttatcctcaaaatataatgaccatttaggatagagtttttttttttttttttttaaacttttataaccttaaagggttattttaaaataatctatggactaccattttgccctcattagcttcagcatggtgtgacttctctaataatatgcttagattaagcaaggaaaagatgcaaaaccacttcggggttaatcagtgaaatatttttcccttcgttgcataccagatacccccggtgttgcacgactatttttattctgctaatttatgacaagtgttaaacagaacaaggaattattccaacaagttatgcaacatgttgcttattttcaaattacagtttaatgtctaggtgccagcccttgatatagctattttt

SEQ ID NO: 359438 - DNA, 2221 bp, Homo sapiens
cgcgggacggccgcgggaaaaggcgcgcggaaggggtcctgccaccgcgccacttggcctgcctccgtcccgccgcgccacttcacttggcctgcctccgtcccgccgcgccacttcgcctgcctccgtcccccgcccgccgcgccatgcctgtggccggctcggagctgccgcgccggcccttgccccccgccgcacaggagcgggacgccgagccgcgtccgccgcacggggagctgcagtacctggggcagatccaacacatcctccgctgcggcgtcaggaaggacgaccgcacgggcaccggcaccctgtcggtattcggcatgcaggcgcgctacagcctgagagatgaattccctctgctgacaaccaaacgtgtgttctggaagggtgttttggaggagttgctgtggtttatcaagggatccacaaatgctaaagagctgtcttccaagggagtgaaaatctgggatgccaatggatcccgagactttttggacagcctgggattctccaccagagaagaaggggacttgggcccagtttatggcttccagtggaggcattttggggcagaatacagagatatggaatcagattattcaggacagggagttgaccaactgcaaagagtgattgacaccatcaaaaccaaccctgacgacagaagaatcatcatgtgcgcttggaatccaagagatcttcctctgatggcgctgcctccatgccatgccctctgccagttctatgtggtgaacagtgagctgtcctgccagctgtaccagagatcgggagacatggcaggacagctcactgttcaccacatagaactggcagagggcatggcagctgtaccagagatcgggagacatgggcctcggtgtgcctttcaacatcgccagctacgccctgctcacgtacatgattgcgcacatcacgggcctgaagccaggtgactttatacacactttgggagatgcacatatttacctgaatcacatcgagccactgaaaattcagcttcagcgagaacccagacctttcccaaagctcaggattcttcgaaaagttgagaaaattgatgacttcaaagctgaagactttcagattgaagggtacaatccgcatccaactattaaaatggaaatggctgtttagggtgctttcaaaggagctcgaaggatattgtcagtctttaggggttgggctggatgccgaggtaaaagttctttttgctctaaaagaaaaaggaactaggtcaaaaatctgtccgtgacctatcagttattaatttttaaggatgttgccactggcaaatgtaactgtgccagttctttccataataaaaggctttgagttaactcactgagggtatctgacaatgctgaggttatgaacaaagtgaggagaatgaaatgtatgtgctcttagcaaaaacatgtatgtgcatttcaatcccacgtacttataaagaaggttggtgaatttcacaagctatttttggaatatttttagaatattttaagaatttcacaagctattccctcaaatctgagggagctgagtaacaccatcgatcatgatgtagagtgtggttatgaactttaaagttatagttgttttatatgttgctataataaagaagtgttctgcattcgtccacgctttgttcattctgtactgccacttatctgctcagttccttcctaaaatagattaaagaactctccttaagtaaacatgtgctgtattctggtttggatgctacttaaaagagtatattttagaaataatagtgaatatattttgccctatttttctcattttaactgcatcttatcctcaaaatataatgaccatttaggatagagtttttttttttttttttttaaacttttataaccttaaagggttattttaaaataatctatggactaccattttgccctcattagcttcagcatggtgtgacttctctaataatatgcttagattaagcaaggaaaagatgcaaaaccacttcggggttaatcagtgaaatatttttcccttcgttgcataccagatacccccggtgttgcacgactatttttattctgctaatttatgacaagtgttaaacagaacaaggaattattccaacaagttatgcaacatgttgcttattttcaaattacagtttaatgtctaggtgccagcccttgatatagctattttt

SEQ ID NO: 359439 - DNA, 2990 bp, Homo sapiens
ttgcctaacatcaggaacgtgcttaatgcttctgaattgcacacaaaaatggcaagtttaatattatgtgtactttatcacaatgaaaaaagctgctgcgtgggccaagttacttgtgcaggtaagtgttctgcaggtcgttgcctgcacctcagttgtagggtgtccgtaggatgtgaggccagtccccgggcttaatgatgctttaaatcctgcctagtattcaattatttcttgtcgcttaaaaggcctaataaaattatggttttagtttacagtggtatgaatgcttagctgttggattttagtaggaaagtttgtccctttttgtttttaattttgttttacagattcacaggaatttttttttttttttttttttaatgcacagaaagtttccctggacacactacccagtttcccccagtgataatatcttgggtaacatcctgtatacattcacattggtgcattcctcagagttgtcagattttgctagttttacgtgcacttgtgtatgtgtgtatttgcaattttagcacgtgtagactcttgtaaccactacaatcaagttacagaactacactaccaaggttcatctttttaaaatctttgatgttacctttttcggaacagtgaccatgagaggactttcctcccaaaattttgagaactactgaaccagaatatagtctgacactaataggtagaaatttaaccaaaggagattatgaagctctgcacttcagttaacaaatcacttctcagcttccagttccatctcagaaggaaggaaagggattaaaatccagagaccagaaatgggagcaaagtacaaggtggtgtaatcattacagaggtttcctgatgtttccaagtcagtcgtgtgttgagctgctaaactctaaagtaattttaggtggaagtgttggaaacatgctgctgaggtgatagaaaggaatccatggtcctctgttagttggaaagtatatggaatactatattctacataagatacaacactctctgtgagacaaggataaagtagattttgtcagtgaaattgtgacaagaatcgctgatgggtttagagcctaagtttgcgaggagcactggaagaaattaagattgttgagattggaaagggttagctatggggggaacaggaggaggtgactccatgacagaccaaatattcaaaggactgtgtagaagaggaaaaagactttgttagggctccagaggacagagccaggagtcagacagggccttgaactcaacccaccgagatctgcaaactttgcaggatgcaccagatgtcttgtagccatgggtcaaggggggaccctgggtaagagactgtaatagatgacctctaaggccatctcatgacatgtgtgattaatgtatgtacctgtcctctctttttgacaattctacagattattcaggacagggagttgaccaactgcaaagagtgattgacaccatcaaaaccaaccctgacgacagaagaatcatcatgtgcgcttggaatccaagagatcttcctctgatggcgctgcctccatgccatgccctctgccagttctatgtggtgaacagtgagctgtcctgccagctgtaccagagatcgggagacatgggcctcggtgtgcctttcaacatcgccagctacgccctgctcacgtacatgattgcgcacatcacgggcctgaagccaggtgactttatacacactttgggagatgcacatatttacctgaatcacatcgagccactgaaaattcagcttcagcgagaacccagacctttcccaaagctcaggattcttcgaaaagttgagaaaattgatgacttcaaagctgaagactttcagattgaagggtacaatccgcatccaactattaaaatggaaatggctgtttagggtgctttcaaaggagctcgaaggatattgtcagtctttaggggttgggctggatgccgaggtaaaagttctttttgctctaaaagaaaaaggaactaggtcaaaaatctgtccgtgacctatcagttattaatttttaaggatgttgccactggcaaatgtaactgtgccagttctttccataataaaaggctttgagttaactcactgagggtatctgacaatgctgaggttatgaacaaagtgaggagaatgaaatgtatgtgctcttagcaaaaacatgtatgtgcatttcaatcccacgtacttataaagaaggttggtgaatttcacaagctatttttggaatatttttagaatattttaagaatttcacaagctattccctcaaatctgagggagctgagtaacaccatcgatcatgatgtagagtgtggttatgaactttaaagttatagttgttttatatgttgctataataaagaagtgttctgcattcgtccacgctttgttcattctgtactgccacttatctgctcagttccttcctaaaatagattaaagaactctccttaagtaaacatgtgctgtattctggtttggatgctacttaaaagagtatattttagaaataatagtgaatatattttgccctatttttctcattttaactgcatcttatcctcaaaatataatgaccatttaggatagagtttttttttttttttttttaaacttttataaccttaaagggttattttaaaataatctatggactaccattttgccctcattagcttcagcatggtgtgacttctctaataatatgcttagattaagcaaggaaaagatgcaaaaccacttcggggttaatcagtgaaatatttttcccttcgttgcataccagatacccccggtgttgcacgactatttttattctgctaatttatgacaagtgttaaacagaacaaggaattattccaacaagttatgcaacatgttgcttattttcaaattacagtttaatgtctaggtgccagcccttgatatagctattttt

SEQ ID NO: 359440 - DNA, 1622 bp, Homo sapiens
cgcgggacggccgcgggaaaaggcgcgcggaaggggtcctgccaccgcgccacttggcctgcctccgtcccgccgcgccacttcacttggcctgcctccgtcccgccgcgccacttcgcctgcctccgtcccccgcccgccgcgccatgcctgtggccggctcggagctgccgcgccggcccttgccccccgccgcacaggagcgggacgccgagccgcgtccgccgcacggggagctgcagtacctggggcagatccaacacatcctccgctgcggcgtcaggaaggacgaccgcacgggcaccggcaccctgtcggtattcggcatgcaggcgcgctacagcctgagagatgaattccctctgctgacaaccaaacgtgtgttctggaagggtgttttggaggagttgctgtggtttatcaagggatccacaaatgctaaagagctgtcttccaagggagtgaaaatctgggatgccaatggatcccgagactttttggacagcctgggattctccaccagagaagaaggggacttgggcccagtttatggcttccagtggaggcattttggggcagaatacagagatatggaatcagattattcaggacagggagttgaccaactgcaaagagtgattgacaccatcaaaaccaaccctgacgacagaagaatcatcatgtgcgcttggaatccaagagatcttcctctgatggcgctgcctccatgccatgccctctgccagttctatgtggtgaacagtgagctgtcctgccagctgtaccagagatcgggagacatgggcctcggtgtgcctttcaacatcgccagctacgccctgctcacgtacatgattgcgcacatcacgggcctgaaggtgggctgtctcgggaagggtgacttgccagcctaccacactgagctcttcagttcctgatgaggcaccaggctcctgatgctgtgtaatgtcacaaaatacccctcactctcgatctgtgcaagagaacagctggttgcgctccaatcatgttacataacctacggcaaggtatcgacaggatcatactcctgtaaaatagaactttgttgatcacatcctgtgtacttgtttcacggacatgaggagcaattacaacaggtcgtacaattatggcaaaataatggccttattttgtttttagcttcagcgagaacccagacctttcccaaagctcaggattcttcgaaaagttgagaaaattgatgacttcaaagctgaagactttcagattgaagggtacaatccgcatccaactattaaaatggaaatggctgtttagggtgctttcaaaggagctcgaaggatattgtcagtctttaggggttgggctggatgccgaggtaaaagttctttttgctttagctgattcctgagggtggtatgacttctagctgaactcatcttgatcggtaggattttttaaatccatttttgtaaaactatttccaagaaattttaagccctttcacttcagaaagaaaaaagttgttggggctgagcacttaattttcttgagcaggaaggagtttcttccaaacttcaccatctggatactggtgtttctttacagattcctccttc

SEQ ID NO: 359441 - DNA, 1430 bp, Homo sapiens
cgcgggacggccgcgggaaaaggcgcgcggaaggggtcctgccaccgcgccacttggcctgcctccgtcccgccgcgccacttcacttggcctgcctccgtcccgccgcgccacttcgcctgcctccgtcccccgcccgccgcgccatgcctgtggccggctcggagctgccgcgccggcccttgccccccgccgcacaggagcgggacgccgagccgcgtccgccgcacggggagctgcagtacctggggcagatccaacacatcctccgctgcggcgtcaggaaggacgaccgcacgggcaccggcaccctgtcggtattcggcatgcaggcgcgctacagcctgagagatgaattccctctgctgacaaccaaacgtgtgttctggaagggtgttttggaggagttgctgtggtttatcaagggatccacaaatgctaaagagctgtcttccaagggagtgaaaatctgggatgccaatggatcccgagactttttggacagcctgggattctccaccagagaagaaggggacttgggcccagtttatggcttccagtggaggcattttggggcagaatacagagatatggaatcagattattcaggacagggagttgaccaactgcaaagagtgattgacaccatcaaaaccaaccctgacgacagaagaatcatcatgtgcgcttggaatccaagagatcttcctctgatggcgctgcctccatgccatgccctctgccagttctatgtggtgaacagtgagctgtcctgccagctgtaccagagatcgggagacatgggcctcggtgtgcctttcaacatcgccagctacgccctgctcacgtacatgattgcgcacatcacgggcctgaaggtgggctgtctcgggaagggtgacttgccagcctaccacactgagctcttcagttcctgatgaggcaccaggctcctgatgctgtgtaatgtcacaaaatacccctcactctcgatctgtgcaagagaacagctggttgcgctccaatcatgttacataacctacggcaaggtatcgacaggatcatactcctgtaaaatagaactttgttgatcacatcctgtgtacttgtttcacggacatgaggagcaattacaacaggtcgtacaattatggcaaaataatggccttattttgtttttagcttcagcgagaacccagacctttcccaaagctcaggattcttcgaaaagttgagaaaattgatgacttcaaagctgaagactttcagattgaagggtacaatccgcatccaactattaaaatggaaatggctgtttagggtgctttcaaaggagctcgaaggatattgtcagtctttaggggttgggctggatgccgaggtaaaagttctttttgctttagctgattcctgaaggtctcttgggcaag

SEQ ID NO: 359442 - DNA, 2076 bp, Homo sapiens
ttgagacacagtctcaccctgttgcccaggctggagtgcagtggtgtgatctccgctcacggcaacctccatctcccaggttcaagtgagttcccattcctcagccccagagctgggaccacaggcgcgcgaatttttgtatttttagcagagacggggtttcactatgttggccaggctagtctcgaactcaagttggcctcaagtgatctgcccaccctggcgtcccagtgttgggatttcaggcatgagccactgtgcctggccatgtaatagagacttttaatataggagggtgtaccagaagcaccagtttcctgtggcaaacagaattattcctgctgtatttgtaatctggtgccacgaggtagcccagatcccttcagctctgatggaagagcattgcttcagccgtaaatggacacctgcagaaaccttgcaccgatggatagtctccctcagctccgtgccatcgctgcagaggctgttatggacatcactgcagcccagtggctctctctcctggtctccaccatatgagttggcttctgtttctctcctgttttactttgcctttagctgtggtctttcaaaccaccatccctccttatcttcctctgctggttcctcatcttcctctgatggcgctgcctccatgccatgccctctgccagttctatgtggtgaacagtgagctgtcctgccagctgtaccagagatcgggagacatgggcctcggtgtgcctttcaacatcgccagctacgccctgctcacgtacatgattgcgcacatcacgggcctgaagccaggtgactttatacacactttgggagatgcacatatttacctgaatcacatcgagccactgaaaattcagcttcagcgagaacccagacctttcccaaagctcaggattcttcgaaaagttgagaaaattgatgacttcaaagctgaagactttcagattgaagggtacaatccgcatccaactattaaaatggaaatggctgtttagggtgctttcaaaggagctcgaaggatattgtcagtctttaggggttgggctggatgccgaggtaaaagttctttttgctctaaaagaaaaaggaactaggtcaaaaatctgtccgtgacctatcagttattaatttttaaggatgttgccactggcaaatgtaactgtgccagttctttccataataaaaggctttgagttaactcactgagggtatctgacaatgctgaggttatgaacaaagtgaggagaatgaaatgtatgtgctcttagcaaaaacatgtatgtgcatttcaatcccacgtacttataaagaaggttggtgaatttcacaagctatttttggaatatttttagaatattttaagaatttcacaagctattccctcaaatctgagggagctgagtaacaccatcgatcatgatgtagagtgtggttatgaactttaaagttatagttgttttatatgttgctataataaagaagtgttctgcattcgtccacgctttgttcattctgtactgccacttatctgctcagttccttcctaaaatagattaaagaactctccttaagtaaacatgtgctgtattctggtttggatgctacttaaaagagtatattttagaaataatagtgaatatattttgccctatttttctcattttaactgcatcttatcctcaaaatataatgaccatttaggatagagtttttttttttttttttttaaacttttataaccttaaagggttattttaaaataatctatggactaccattttgccctcattagcttcagcatggtgtgacttctctaataatatgcttagattaagcaaggaaaagatgcaaaaccacttcggggttaatcagtgaaatatttttcccttcgttgcataccagatacccccggtgttgcacgactatttttattctgctaatttatgacaagtgttaaacagaacaaggaattattccaacaagttatgcaacatgttgcttattttcaaattacagtttaatgtctaggtgccagcccttgatatagctattttt

SEQ ID NO: 359443 - DNA, 2749 bp, Homo sapiens
accaatttgacctttctgcagtatttctagggcatcctcctcagtcaggacatcagtgatgtacctgaaatctatgcaggataccagcgtcctgggatcctggcaacgtgacaggaggggaagaggcctgaatcaattataaggtgggttatattttgttttttaaaattttttttttttttttttgagacagagttttgctctgttgcccaggctggaatgcaacggcgtgatcttggctcactgtaacctctgcctcctgggttcgagtgattctcctgcctcagcctcccaagtagctgggattacaggcatgtgccaccatgcccggctaattttgtatttttagtagagacggggtttcacaatgttgtccaggttgtcttgaactcctgacctcagatgatctgcctgcctcagcctcccaaccagatgatcttaatttgtgtatttatactcattcttacaccaaaaagggttttaaattgcctagaaactacatgtaagatgttaacattttaaatggaagcagatgaagttccagctcgctgccacctcactaacatttttaacaattatattgtaaaattcaactctaccagggtgtagagccaggtgtggtggctcacacctgtaattccaacaactccagaggccaaggcgagaggatcatttgaacccaggaatttgaggctgtagtgagtcatgatcacgccattgcactccagctcacggcaacctccatctcccaggttcaagtgagttcccattcctcagccccagagctgggaccacaggcgcgcgaatttttgtatttttagcagagacggggtttcactatgttggccaggctagtctcgaactcaagttggcctcaagtgatctgcccaccctggcgtcccagtgttgggatttcaggcatgagccactgtgcctggccatgtaatagagacttttaatataggagggtgtaccagaagcaccagtttcctgtggcaaacagaattattcctgctgtatttgtaatctggtgccacgaggtagcccagatcccttcagctctgatggaagagcattgcttcagccgtaaatggacacctgcagaaaccttgcaccgatggatagtctccctcagctccgtgccatcgctgcagaggctgttatggacatcactgcagcccagtggctctctctcctggtctccaccatatgagttggcttctgtttctctcctgttttactttgcctttagctgtggtctttcaaaccaccatccctccttatcttcctctgctggttcctcatcttcctctgatggcgctgcctccatgccatgccctctgccagttctatgtggtgaacagtgagctgtcctgccagctgtaccagagatcgggagacatgggcctcggtgtgcctttcaacatcgccagctacgccctgctcacgtacatgattgcgcacatcacgggcctgaagccaggtgactttatacacactttgggagatgcacatatttacctgaatcacatcgagccactgaaaattcagcttcagcgagaacccagacctttcccaaagctcaggattcttcgaaaagttgagaaaattgatgacttcaaagctgaagactttcagattgaagggtacaatccgcatccaactattaaaatggaaatggctgtttagggtgctttcaaaggagctcgaaggatattgtcagtctttaggggttgggctggatgccgaggtaaaagttctttttgctctaaaagaaaaaggaactaggtcaaaaatctgtccgtgacctatcagttattaatttttaaggatgttgccactggcaaatgtaactgtgccagttctttccataataaaaggctttgagttaactcactgagggtatctgacaatgctgaggttatgaacaaagtgaggagaatgaaatgtatgtgctcttagcaaaaacatgtatgtgcatttcaatcccacgtacttataaagaaggttggtgaatttcacaagctatttttggaatatttttagaatattttaagaatttcacaagctattccctcaaatctgagggagctgagtaacaccatcgatcatgatgtagagtgtggttatgaactttaaagttatagttgttttatatgttgctataataaagaagtgttctgcattcgtccacgctttgttcattctgtactgccacttatctgctcagttccttcctaaaatagattaaagaactctccttaagtaaacatgtgctgtattctggtttggatgctacttaaaagagtatattttagaaataatagtgaatatattttgccctatttttctcattttaactgcatcttatcctcaaaatataatgaccatttaggatagagtttttttttttttttttttaaacttttataaccttaaagggttattttaaaataatctatggactaccattttgccctcattagcttcagcatggtgtgacttctctaataatatgcttagattaagcaaggaaaagatgcaaaaccacttcggggttaatcagtgaaatatttttcccttcgttgcataccagatacccccggtgttgcacgactatttttattctgctaatttatgacaagtgttaaacagaacaaggaattattccaacaagttatgcaacatgttgcttattttcaaattacagtttaatgtctaggtgccagcccttgatatagctattttt

SEQ ID NO: 359444 - DNA, 2170 bp, Homo sapiens
aaatatgcatagtacgaggcctgggtgttatctctaccagggtgtagagccaggtgtggtggctcacacctgtaattccaacaactccagaggccaaggcgagaggatcatttgaacccaggaatttgagtgcagtggtgtgatctccgctcacggcaacctccatctcccaggttcaagtgagttcccattcctcagccccagagctgggaccacaggcgcgcgaatttttgtatttttagcagagacggggtttcactatgttggccaggctagtctcgaactcaagttggcctcaagtgatctgcccaccctggcgtcccagtgttgggatttcaggcatgagccactgtgcctggccatgtaatagagacttttaatataggagggtgtaccagaagcaccagtttcctgtggcaaacagaattattcctgctgtatttgtaatctggtgccacgaggtagcccagatcccttcagctctgatggaagagcattgcttcagccgtaaatggacacctgcagaaaccttgcaccgatggatagtctccctcagctccgtgccatcgctgcagaggctgttatggacatcactgcagcccagtggctctctctcctggtctccaccatatgagttggcttctgtttctctcctgttttactttgcctttagctgtggtctttcaaaccaccatccctccttatcttcctctgctggttcctcatcttcctctgatggcgctgcctccatgccatgccctctgccagttctatgtggtgaacagtgagctgtcctgccagctgtaccagagatcgggagacatgggcctcggtgtgcctttcaacatcgccagctacgccctgctcacgtacatgattgcgcacatcacgggcctgaagccaggtgactttatacacactttgggagatgcacatatttacctgaatcacatcgagccactgaaaattcagcttcagcgagaacccagacctttcccaaagctcaggattcttcgaaaagttgagaaaattgatgacttcaaagctgaagactttcagattgaagggtacaatccgcatccaactattaaaatggaaatggctgtttagggtgctttcaaaggagctcgaaggatattgtcagtctttaggggttgggctggatgccgaggtaaaagttctttttgctctaaaagaaaaaggaactaggtcaaaaatctgtccgtgacctatcagttattaatttttaaggatgttgccactggcaaatgtaactgtgccagttctttccataataaaaggctttgagttaactcactgagggtatctgacaatgctgaggttatgaacaaagtgaggagaatgaaatgtatgtgctcttagcaaaaacatgtatgtgcatttcaatcccacgtacttataaagaaggttggtgaatttcacaagctatttttggaatatttttagaatattttaagaatttcacaagctattccctcaaatctgagggagctgagtaacaccatcgatcatgatgtagagtgtggttatgaactttaaagttatagttgttttatatgttgctataataaagaagtgttctgcattcgtccacgctttgttcattctgtactgccacttatctgctcagttccttcctaaaatagattaaagaactctccttaagtaaacatgtgctgtattctggtttggatgctacttaaaagagtatattttagaaataatagtgaatatattttgccctatttttctcattttaactgcatcttatcctcaaaatataatgaccatttaggatagagtttttttttttttttttttaaacttttataaccttaaagggttattttaaaataatctatggactaccattttgccctcattagcttcagcatggtgtgacttctctaataatatgcttagattaagcaaggaaaagatgcaaaaccacttcggggttaatcagtgaaatatttttcccttcgttgcataccagatacccccggtgttgcacgactatttttattctgctaatttatgacaagtgttaaacagaacaaggaattattccaacaagttatgcaacatgttgcttattttcaaattacagtttaatgtctaggtgccagcccttgatatagctattttt

SEQ ID NO: 359445 - DNA, 891 bp, Homo sapiens
  misc_feature (838)..(838): n is a, c, g, or t
  misc_feature (869)..(869): n is a, c, g, or t
  misc_feature (884)..(884): n is a, c, g, or t
cgcgggacggccgcgggaaaaggcgcgcggaaggggtcctgccaccgcgccacttggcctgcctccgtcccgccgcgccacttcacttggcctgcctccgtcccgccgcgccacttcgcctgcctccgtcccccgcccgccgcgccatgcctgtggccggctcggagctgccgcgccggcccttgccccccgccgcacaggagcgggacgccgagccgcgtccgccgcacggggagctgcagtacctggggcagatccaacacatcctccgctgcggcgtcaggaaggacgaccgcacgggcaccggcaccctgtcggtattcggcatgcaggcgcgctacagcctgagagatgaattccctctgctgacaaccaaacgtgtgttctggaagggtgttttggaggagttgctgtggtttatcaagggatccacaaatgctaaagagctgtcttccaagggagtgaaaatctgggatgccaatggatcccgagactttttggacagcctgggattctccaccagagaagaaggggacttgggcccagtttatggcttccagtggaggcattttggggcagaatacagagatatggaatcagattattcaggacagggagttgaccaactgcaaagagtgattgacaccatcaaaaccaaccctgacgacagaagaatcatcatgtgcgcttggaatccaagagatcttcctctgatggcgctgcctccatgccatgccctctgccagttctatgtggtgaacagtgagctgtcctgccagctgtaccagagatcgggagacatgggcctcggtgtgcctttcaacaattcggcccaggnttaccgccccttgggtttaaccgttacccantggaatttggccggncaaccaa

SEQ ID NO: 359446 - DNA, 2308 bp, Homo sapiens
ttgagacacagtctcaccctgttgcccaggctggagtgcagtggtgtgatctccgctcacggcaacctccatctcccaggttcaagtgagttcccattcctcagccccagagctgggaccacaggcgcgcgaatttttgtatttttagcagagacggggtttcactatgttggccaggctagtctcgaactcaagttggcctcaagtgatctgcccaccctggcgtcccagtgttgggatttcaggcatgagccactgtgcctggccatgtaatagagacttttaatataggagggtgtaccagaagcaccagtttcctgtggcaaacagaattattcctgctgtatttgtaatctggtgccacgaggtagcccagatcccttcagctctgatggaagagcattgcttcagccgtaaatggacacctgcagaaaccttgcaccgatggatagtctccctcagctccgtgccatcgctgcagaggctgttatggacatcactgcagcccagtggctctctctcctggtctccaccatatgagttggcttctgtttctctcctgttttactttgcctttagctgtggtctttcaaaccaccatccctccttatcttcctctgctggttcctcatcttcctctgatggcgctgcctccatgccatgccctctgccagttctatgtggtgaacagtgagctgtcctgccagctgtaccagagatcgggagacatgggcctcggtgtgcctttcaacatcgccagctacgccctgctcacgtacatgattgcgcacatcacgggcctgaaggtgggctgtctcgggaagggtgacttgccagcctaccacactgagctcttcagttcctgatgaggcaccaggctcctgatgctgtgtaatgtcacaaaatacccctcactctcgatctgtgcaagagaacagctggttgcgctccaatcatgttacataacctacggcaaggtatcgacaggatcatactcctgtaaaatagaactttgttgatcacatcctgtgtacttgtttcacggacatgaggagcaattacaacaggtcgtacaattatggcaaaataatggccttattttgtttttagcttcagcgagaacccagacctttcccaaagctcaggattcttcgaaaagttgagaaaattgatgacttcaaagctgaagactttcagattgaagggtacaatccgcatccaactattaaaatggaaatggctgtttagggtgctttcaaaggagctcgaaggatattgtcagtctttaggggttgggctggatgccgaggtaaaagttctttttgctctaaaagaaaaaggaactaggtcaaaaatctgtccgtgacctatcagttattaatttttaaggatgttgccactggcaaatgtaactgtgccagttctttccataataaaaggctttgagttaactcactgagggtatctgacaatgctgaggttatgaacaaagtgaggagaatgaaatgtatgtgctcttagcaaaaacatgtatgtgcatttcaatcccacgtacttataaagaaggttggtgaatttcacaagctatttttggaatatttttagaatattttaagaatttcacaagctattccctcaaatctgagggagctgagtaacaccatcgatcatgatgtagagtgtggttatgaactttaaagttatagttgttttatatgttgctataataaagaagtgttctgcattcgtccacgctttgttcattctgtactgccacttatctgctcagttccttcctaaaatagattaaagaactctccttaagtaaacatgtgctgtattctggtttggatgctacttaaaagagtatattttagaaataatagtgaatatattttgccctatttttctcattttaactgcatcttatcctcaaaatataatgaccatttaggatagagtttttttttttttttttttaaacttttataaccttaaagggttattttaaaataatctatggactaccattttgccctcattagcttcagcatggtgtgacttctctaataatatgcttagattaagcaaggaaaagatgcaaaaccacttcggggttaatcagtgaaatatttttcccttcgttgcataccagatacccccggtgttgcacgactatttttattctgctaatttatgacaagtgttaaacagaacaaggaattattccaacaagttatgcaacatgttgcttattttcaaattacagtttaatgtctaggtgccagcccttgatatagctattttt

SEQ ID NO: 359447 - DNA, 880 bp, Homo sapiens
cgcgggacggccgcgggaaaaggcgcgcggaaggggtcctgccaccgcgccacttggcctgcctccgtcccgccgcgccacttcacttggcctgcctccgtcccgccgcgccacttcgcctgcctccgtcccccgcccgccgcgccatgcctgtggccggctcggagctgccgcgccggcccttgccccccgccgcacaggagcgggacgccgagccgcgtccgccgcacggggagctgcagtacctggggcagatccaacacatcctccgctgcggcgtcaggaaggacgaccgcacgggcaccggcaccctgtcggtattcggcatgcaggcgcgctacagcctgagagatgaattccctctgctgacaaccaaacgtgtgttctggaagggtgttttggaggagttgctgtggtttatcaagggatccacaaatgctaaagagctgtcttccaagggagtgaaaatctgggatgccaatggatcccgagactttttggacagcctgggattctccaccagagaagaaggggacttgggcccagtttatggcttccagtggaggcattttggggcagaatacagagatatggaatcagattattcaggacagggagttgaccaactgcaaagagtgattgacaccatcaaaaccaaccctgacgacagaagaatcatcatgtgcgcttggaatccaagaggttgaaagaaccccgtcgtcttcatttatactaaccatactcttagagggaagcaatctggttttgtgcagaggcacctgagggaggcaggaccctgggaacttcccccagccacatggttgattgtgtgacgttgggcaagtcacattttgctgcactatcaccttcagatcatgag

SEQ ID NO: 359448 - DNA, 1493 bp, Homo sapiens
accaatttgacctttctgcagtatttctagggcatcctcctcagtcaggacatcagtgatgtacctgaaatctatgcaggataccagcgtcctgggatcctggcaacgtgacaggaggggaagaggcctgaatcaattataaggtgggttatattttgttttttaaaattttttttttttttttttgagacagagttttgctctgttgcccaggctggaatgcaacggcgtgatcttggctcactgtaacctctgcctcctgggttcgagtgattctcctgcctcagcctcccaagtagctgggattacaggcatgtgccaccatgcccggctaattttgtatttttagtagagacggggtttcacaatgttgtccaggttgtcttgaactcctgacctcagatgatctgcctgcctcagcctcccaaccagatgatcttaatttgtgtatttatactcattcttacaccaaaaagggttttaaattgcctagaaactacatgtaagatgttaacattttaaatggaagcagatgaagttccagctcgctgccacctcactaacatttttaacaattatattgtaaaattcaactctaccagggtgtagagccaggtgtggtggctcacacctgtaattccaacaactccagaggccaaggcgagaggatcatttgaacccaggaatttgaggctgtagtgagtcatgatcacgccattgcactccagctcacggcaacctccatctcccaggttcaagtgagttcccattcctcagccccagagctgggaccacaggcgcgcgaatttttgtatttttagcagagacggggtttcactatgttggccaggctagtctcgaactcaagttggcctcaagtgatctgcccaccctggcgtcccagtgttgggatttcaggcatgagccactgtgcctggccatgtaatagagacttttaatataggagggtgtaccagaagcaccagtttcctgtggcaaacagaattattcctgctgtatttgtaatctggtgccacgaggtagcccagatcccttcagctctgatggaagagcattgcttcagccgtaaatggacacctgcagaaaccttgcaccgatggatagtctccctcagctccgtgccatcgctgcagaggctgttatggacatcactgcagcccagtggctctctctcctggtctccaccatatgagttggcttctgtttctctcctgttttactttgcctttagctgtggtctttcaaaccaccatccctccttatcttcctctgctggttcctcctccagtacgacccatgaatttatgtgggatgcatcaaggtgtccctcctagaactggaaccaagactgctccatcagagttaaaggtgtaagatcaacacaaaatggggagtgtatagctatgcaaagtcacctcaggaaaaaatgttcctaggcaggcaggatgtggctataagccacatgaatgtac

SEQ ID NO: 359449 - DNA, 776 bp, Homo sapiens
accaatttgacctttctgcagtatttctagggcatcctcctcagtcaggacatcagtgatgtacctgaaatctatgcaggataccagcgtcctgggatcctggcaacgtgacaggaggggaagaggcctgaatcaattataaggtgggttatattttgttttttaaaattttttttttttttttttgagacagagttttgctctgttgcccaggctggaatgcaacggcgtgatcttggctcactgtaacctctgcctcctgggttcgagtgattctcctgcctcagcctcccaagtagctgggattacaggcatgtgccaccatgcccggctaattttgtatttttagtagagacggggtttcacaatgttgtccaggttgtcttgaactcctgacctcagatgatctgcctgcctcagcctcccaaccagatgatcttaatttgtgtatttatactcattcttacaccaaaaagggttttaaattgcctagaaactacatgtaagatgttaacattttaaatggaagcagatgaagttccagctcgctgccacctcactaacatttttaacaattatattgtaaaattcaactctaccagggtgtagagccaggtgtggtggctcacacctgtaattccaacaactccagaggccaaggcgagaggatcatttgaacccaggaatttgaggctgtagtgagtcatgatcacgccattgcactccagcctgggcaacagagtgagaccctgaatatttaaaaacaacaacaacaa

SEQ ID NO: 359450 - DNA, 1572 bp, Homo sapiens
aaaaaggcgcgcggaaggggtcctgccaccgcgccacttggcctgcctccgtcccgccgcgccacttcacttggcctgcctccgtcccgccgcgccacttcgcctgcctccgtcccccgcccgccgcgccatgcctgtggccggctcggagctgccgcgccggcccttgccccccgccgcacaggagcgggacgccgagccgcgtccgccgcacggggagctgcagtacctggggcagatccaacacatcctccgctgcggcgtcaggaaggacgaccgcacgggcaccggcaccctgtcggtattcggcatgcaggcgcgctacagcctgagagatgaattccctctgctgacaaccaaacgtgtgttctggaagggtgttttggaggagttgctgtggtttatcaagggatccacaaatgctaaagagctgtcttccaagggagtgaaaatctgggatgccaatggatcccgagactttttggacagcctgggattctccaccagagaagaaggggacttgggcccagtttatggcttccagtggaggcattttggggcagaatacagagatatggaatcagattattcaggacagggagttgaccaactgcaaagagtgattgacaccatcaaaaccaaccctgacgacagaagaatcatcatgtgcgcttggaatccaagagatcttcctctgatggcgctgcctccatgccatgccctctgccagttctatgtggtgaacagtgagctgtcctgccagctgtaccagagatcgggagacatgggcctcggtgtgcctttcaacatcgccagctacgccctgctcacgtacatgattgcgcacatcacgggcctgaagccaggtgactttatacacactttgggagatgcacatatttacctgaatcacatcgagccactgaaaattcagcttcagcgagaacccagacctttcccaaagctcaggattcttcgaaaagttgagaaaattgatgacttcaaagctgaagactttcagattgaagggtacaatccgcatccaactattaaaatggaaatggctgtttagggtgctttcaaaggagctcgaaggatattgtcagtctttaggggttgggctggatgccgaggtaaaagttctttttgctctaaaagaaaaaggaactaggtcaaaaatctgtccgtgacctatcagttattaatttttaaggatgttgccactggcaaatgtaactgtgccagttctttccataataaaaggctttgagttaactcactgagggtatctgacaatgctgaggttatgaacaaagtgaggagaatgaaatgtatgtgctcttagcaaaaacatgtatgtgcatttcaatcccacgtacttataaagaaggttggtgaatttcacaagctatttttggaatatttttagaatattttaagaatttcacaagctattccctcaaatctgagggagctgagtaacaccatcgatcatgatgtagagtgtggttatgaactttaaagttatagttgttttatatgttgctataataaagaagtgttctgcattcg

SEQ ID NO: 359451 - DNA, 1560 bp, Homo sapiens
cgcgggacggccgcgggaaaaggcgcgcggaaggggtcctgccaccgcgccacttgacttggcctgcctccgtcccgccgcgccacttcgcctgcctccgtcccccgcccgccgcgccatgcctgtggccggctcggagctgccgcgccggcccttgccccccgccgcacaggagcgggacgccgagccgcgtccgccgcacggggagctgcagtacctggggcagatccaacacatcctccgctgcggcgtcaggaaggacgaccgcacgggcaccggcaccctgtcggtattcggcatgcaggcgcgctacagcctgagagatgaattccctctgctgacaaccaaacgtgtgttctggaagggtgttttggaggagttgctgtggtttatcaagggatccacaaatgctaaagagctgtcttccaagggagtgaaaatctgggatgccaatggatcccgagactttttggacagcctgggattctccaccagagaagaaggggacttgggcccagtttatggcttccagtggaggcattttggggcagaatacagagatatggaatcagattattcaggacagggagttgaccaactgcaaagagtgattgacaccatcaaaaccaaccctgacgacagaagaatcatcatgtgcgcttggaatccaagagatcttcctctgatggcgctgcctccatgccatgccctctgccagttctatgtggtgaacagtgagctgtcctgccagctgtaccagagatcgggagacatgggcctcggtgtgcctttcaacatcgccagctacgccctgctcacgtacatgattgcgcacatcacgggcctgaagccaggtgactttatacacactttgggagatgcacatatttacctgaatcacatcgagccactgaaaattcagcttcagcgagaacccagacctttcccaaagctcaggattcttcgaaaagttgagaaaattgatgacttcaaagctgaagactttcagattgaagggtacaatccgcatccaactattaaaatggaaatggctgtttagggtgctttcaaaggagctcgaaggatattgtcagtctttaggggttgggctggatgccgaggtaaaagttctttttgctctaaaagaaaaaggaactaggtcaaaaatctgtccgtgacctatcagttattaatttttaaggatgttgccactggcaaatgtaactgtgccagttctttccataataaaaggctttgagttaactcactgagggtatctgacaatgctgaggttatgaacaaagtgaggagaatgaaatgtatgtgctcttagcaaaaacatgtatgtgcatttcaatcccacgtacttataaagaaggttggtgaatttcacaagctatttttggaatatttttagaatattttaagaatttcacaagctattccctcaaatctgagggagctgagtaacaccatcgatcatgatgtagagtgtggttatgaactttaaagttatagttgttttatatgttgctataataaagaagtgttctgcattcg

SEQ ID NO: 359452 - DNA, 1299 bp, Homo sapiens
gggaacttgaccagaatttgtcaagatgtttcaaatttcatgaaaaatgccaaaaatgtcaggctcacctatctgaagactgtcctgatgtacctgctctgcacacagaattagacgaggcgatcaggttggtcaatgtatccaatcagcagtatggccagattctccagatgacccggaagcacttggaggacaccgcctatctggtggagaagatgagagggcaatttggctgggtgtctgaactggcaaaccaggccccagaaacagagatcatctttaattcaatacaggtagttccaaggattcatgaaggaaatatttccaaacaagatgaaacaatgatgacagacttaagcattctgccttcctctaatttcacactcaagatccctcttgaagaaagtgctgagagttctaacttcattggctacgtagtggcaaaagctctacagcattttaaggaacattttaaaacctggtaagaagatctaatgcatcctatatccagtaagtagaattatctcttcatctgggacctggaaatcctgaaataaaaaaggataatgcaataaacacagttgcaggaaagtatgttagctatatactatgaagtactcttagtttacttatgttgaatggcttagctattaatactcaaattgagttaaaatgaaaattcctccttaaaaaatcaaacgtaatatgtattacatttcatggtacattagtagttctttgtatattgaataaatactaaatcacctaggtgtctatgttctatcacatctacaaacatgtcacttcctaattaacaaaatgttcttcctttagtttgcttttgcacttaaaatatatataattgacttttttggaaaaaaatctaagattcattgctttgttttgtaaagaccaataggttctgtatagtctttttttaaattgtggtaaaatacacatggcattaatttaccattttaaccattttaaagtgcacaatttgtggcattaagtacactcacgttgctgtgcaaccatcaccaccgtccatcttcagaacctttttatcttcctaaactgaaactctgtactcgttaagcactcacttcccttttccccatcccccagcccgtagcaaccacgactgtactttctatgaatttgactactctaggtactgcatgtaggtggaatcatacagtatttgtcttttgctttgttttgttttgttttttgttttctaagacagggtctcactctgtcgcccaggctggagtgcagtggtgcaatcacagtgtc

SEQ ID NO: 359453 - DNA, 2145 bp, Homo sapiens
  misc_feature (28)..(28): n is a, c, g, or t
tggctagtacgaggctcggttaatcggncgagggtctgccaccgctccacttggcctgcctccgtcccgccgcgccacttcacttggcctgcctccgtcccgccgcgccacttcgcctgcctccgtcccccgcccgccgcgccatgcctgtggccggctcggagctgccgcgccggcccttgccccccgccgcacaggagcgggacgccgagccgcgtccgccgcacggggagctgcagtacctggggcagatccaacacatcctccgctgcggcgtcaggaaggacgaccgcacgggcaccggcaccctgtcggtattcggcatgcaggcgcgctacagcctgagagatgaattccctctgctgacaaccaaacgtgtgttctggaagggtgttttggaggagttgctgtggtttatcaagggatccacaaatgctaaagagctgtcttccaagggagtgaaaatctgggatgccaatggatcccgagactttttggacagcctgggattctccaccagagaagaaggggacttgggcccagtttatggcttccagtggaggcattttggggcagaatacagagatatggaatcagattattcaggacagggagttgaccaactgcaaagagtgattgacaccatcaaaaccaaccctgacgacagaagaatcatcatgtgcgcttggaatccaagagatcttcctctgatggcgctgcctccatgccatgccctctgccagttctatgtggtgaacagtgagctgtcctgccagctgtaccagagatcgggagacatgggcctcggtgtgcctttcaacatcgccagctacgccctgctcacgtacatgattgcgcacatcacgggcctgaagccaggtgactttatacacactttgggagatgcacatatttacctgaatcacatcgagccactgaaaattcagcttcagcgagaacccagacctttcccaaagctcaggattcttcgaaaagttgagaaaattgatgacttcaaagctgaagactttcagattgaagggtacaatccgcatccaactattaaaatggaaatggctgtttagggtgctttcaaaggagctcgaaggatattgtcagtctttaggggttgggctggatgccgaggtaaaagttctttttgctctaaaagaaaaaggaactaggtcaaaaatctgtccgtgacctatcagttattaatttttaaggatgttgccactggcaaatgtaactgtgccagttctttccataataaaaggctttgagttaactcactgagggtatctgacaatgctgaggttatgaacaaagtgaggagaatgaaatgtatgtgctcttagcaaaaacatgtatgtgcatttcaatcccacgtacttataaagaaggttggtgaatttcacaagctatttttggaatatttttagaatattttaagaatttcacaagctattccctcaaatctgagggagctgagtaacaccatcgatcatgatgtagagtgtggttatgaactttaaagttatagttgttttatatgttgctataataaagaagtgttctgcattcgtccacgctttgttcattctgtactgccacttatctgctcagttccttcctaaaatagattaaagaactctccttaagtaaacatgtgctgtattctggtttggatgctacttaaaagagtatattttagaaataatagtgaatatattttgccctatttttctcattttaactgcatcttatcctcaaaatataatgaccatttaggatagagtttttttttttttttttttaaacttttataaccttaaagggttattttaaaataatctatggactaccattttgccctcattagcttcagcatggtgtgacttctctaataatatgcttagattaagcaaggaaaagatgcaaaaccacttcggggttaatcagtgaaatatttttcccttcgttgcataccagatacccccggtgttgcacgactatttttattctgctaatttatgacaagtgttaaacagaacaaggaattattccaacaagttatgcaacatgttgcttattttcaaattacagtttaatgtctaggtgccagcccttgatatagctattttt

SEQ ID NO: 359454 - DNA, 2128 bp, Homo sapiens
ccccccccacccccccctccccaccctcgcccgccacctaggcttaggtacgagctgggtttaaacttggcctgcctccgtcccgccgcgccacttcgcctgcctccgtcccccgcccgccgcgccatgcctgtggccggctcggagctgccgcgccggcccttgccccccgccgcacaggagcgggacgccgagccgcgtccgccgcacggggagctgcagtacctggggcagatccaacacatcctccgctgcggcgtcaggaaggacgaccgcacgggcaccggcaccctgtcggtattcggcatgcaggcgcgctacagcctgagagatgaattccctctgctgacaaccaaacgtgtgttctggaagggtgttttggaggagttgctgtggtttatcaagggatccacaaatgctaaagagctgtcttccaagggagtgaaaatctgggatgccaatggatcccgagactttttggacagcctgggattctccaccagagaagaaggggacttgggcccagtttatggcttccagtggaggcattttggggcagaatacagagatatggaatcagattattcaggacagggagttgaccaactgcaaagagtgattgacaccatcaaaaccaaccctgacgacagaagaatcatcatgtgcgcttggaatccaagagatcttcctctgatggcgctgcctccatgccatgccctctgccagttctatgtggtgaacagtgagctgtcctgccagctgtaccagagatcgggagacatgggcctcggtgtgcctttcaacatcgccagctacgccctgctcacgtacatgattgcgcacatcacgggcctgaagccaggtgactttatacacactttgggagatgcacatatttacctgaatcacatcgagccactgaaaattcagcttcagcgagaacccagacctttcccaaagctcaggattcttcgaaaagttgagaaaattgatgacttcaaagctgaagactttcagattgaagggtacaatccgcatccaactattaaaatggaaatggctgtttagggtgctttcaaaggagctcgaaggatattgtcagtctttaggggttgggctggatgccgaggtaaaagttctttttgctctaaaagaaaaaggaactaggtcaaaaatctgtccgtgacctatcagttattaatttttaaggatgttgccactggcaaatgtaactgtgccagttctttccataataaaaggctttgagttaactcactgagggtatctgacaatgctgaggttatgaacaaagtgaggagaatgaaatgtatgtgctcttagcaaaaacatgtatgtgcatttcaatcccacgtacttataaagaaggttggtgaatttcacaagctatttttggaatatttttagaatattttaagaatttcacaagctattccctcaaatctgagggagctgagtaacaccatcgatcatgatgtagagtgtggttatgaactttaaagttatagttgttttatatgttgctataataaagaagtgttctgcattcgtccacgctttgttcattctgtactgccacttatctgctcagttccttcctaaaatagattaaagaactctccttaagtaaacatgtgctgtattctggtttggatgctacttaaaagagtatattttagaaataatagtgaatatattttgccctatttttctcattttaactgcatcttatcctcaaaatataatgaccatttaggatagagtttttttttttttttttttaaacttttataaccttaaagggttattttaaaataatctatggactaccattttgccctcattagcttcagcatggtgtgacttctctaataatatgcttagattaagcaaggaaaagatgcaaaaccacttcggggttaatcagtgaaatatttttcccttcgttgcataccagatacccccggtgttgcacgactatttttattctgctaatttatgacaagtgttaaacagaacaaggaattattccaacaagttatgcaacatgttgcttattttcaaattacagtttaatgtctaggtgccagcccttgatatagctattttt

SEQ ID NO: 359455 - DNA, 1390 bp, Homo sapiens
cgcgggacggccgcgggaaaaggcgcgcggaaggggtcctgccaccgcgccacttggcctgcctccgtcccgccgcgccacttcacttggcctgcctccgtcccgccgcgccacttcgcctgcctccgtcccccgcccgccgcgccatgcctgtggccggctcggagctgccgcgccggcccttgccccccgccgcacaggagcgggacgccgagccgcgtccgccgcacggggagctgcagtacctggggcagatccaacacatcctccgctgcggcgtcaggaaggacgaccgcacgggcaccggcaccctgtcggtattcggcatgcaggcgcgctacagcctgagagatgaattccctctgctgacaaccaaacgtgtgttctggaagggtgttttggaggagttgctgtggtttatcaagggatccacaaatgctaaagagctgtcttccaagggagtgaaaatctgggatgccaatggatcccgagactttttggacagcctgggattctccaccagagaagaaggggacttgggcccagtttatggcttccagtggaggcattttggggcagaatacagagatatggaatcagattattcaggacagggagttgaccaactgcaaagagtgattgacaccatcaaaaccaaccctgacgacagaagaatcatcatgtgcgcttggaatccaagagatcttcctctgatggcgctgcctccatgccatgccctctgccagttctatgtggtgaacagtgagctgtcctgccagctgtaccagagatcgggagacatgggcctcggtgtgcctttcaacatcgccagctacgccctgctcacgtacatgattgcgcacatcacgggcctgaagccaggtgactttatacacactttgggagatgcacatatttacctgaatcacatcgagccactgaaaattcagcttcagcgagaacccagacctttcccaaagctcaggattcttcgaaaagttgagaaaattgatgacttcaaagctgaagactttcagattgaagggtacaatccgcatccaactattaaaatggaaatggctgtttagggtgctttcaaaggagctcgaaggatattgtcagtctttaggggttgggctggatgccgaggtaaaagttctttttgctttagctgattcctgagggtggtatgacttctagctgaactcatcttgatcggtaggattttttaaatccatttttgtaaaactatttccaagaaattttaagccctttcacttcagaaagaaaaaagttgttggggctgagcacttaattttcttgagcaggaaggagtttcttccaaacttcaccatctggatactggtgtttctttacagattcctccttc

SEQ ID NO: 359456 - DNA, 1778 bp, Homo sapiens
caaaaaaaacagaacggaaagaacaataggctagtacagctgcttatcggcagaggagggctcatgatgctatgagctgtcttccaagggagtgaaaatctgggatgccaatggatcccgagactttttggacagcctgggattctccaccagagaagaaggggacttgggcccagtttatggcttccagtggaggcattttggggcagaatacagagatatggaatcagattattcaggacagggagttgaccaactgcaaagagtgattgacaccatcaaaaccaaccctgacgacagaagaatcatcatgtgcgcttggaatccaagagatcttcctctgatggcgctgcctccatgccatgccctctgccagttctatgtggtgaacagtgagctgtcctgccagctgtaccagagatcgggagacatgggcctcggtgtgcctttcaacatcgccagctacgccctgctcacgtacatgattgcgcacatcacgggcctgaagccaggtgactttatacacactttgggagatgcacatatttacctgaatcacatcgagccactgaaaattcagcttcagcgagaacccagacctttcccaaagctcaggattcttcgaaaagttgagaaaattgatgacttcaaagctgaagactttcagattgaagggtacaatccgcatccaactattaaaatggaaatggctgtttagggtgctttcaaaggagctcgaaggatattgtcagtctttaggggttgggctggatgccgaggtaaaagttctttttgctctaaaagaaaaaggaactaggtcaaaaatctgtccgtgacctatcagttattaatttttaaggatgttgccactggcaaatgtaactgtgccagttctttccataataaaaggctttgagttaactcactgagggtatctgacaatgctgaggttatgaacaaagtgaggagaatgaaatgtatgtgctcttagcaaaaacatgtatgtgcatttcaatcccacgtacttataaagaaggttggtgaatttcacaagctatttttggaatatttttagaatattttaagaatttcacaagctattccctcaaatctgagggagctgagtaacaccatcgatcatgatgtagagtgtggttatgaactttaaagttatagttgttttatatgttgctataataaagaagtgttctgcattcgtccacgctttgttcattctgtactgccacttatctgctcagttccttcctaaaatagattaaagaactctccttaagtaaacatgtgctgtattctggtttggatgctacttaaaagagtatattttagaaataatagtgaatatattttgccctatttttctcattttaactgcatcttatcctcaaaatataatgaccatttaggatagagtttttttttttttttttttaaacttttataaccttaaagggttattttaaaataatctatggactaccattttgccctcattagcttcagcatggtgtgacttctctaataatatgcttagattaagcaaggaaaagatgcaaaaccacttcggggttaatcagtgaaatatttttcccttcgttgcataccagatacccccggtgttgcacgactatttttattctgctaatttatgacaagtgttaaacagaacaaggaattattccaacaagttatgcaacatgttgcttattttcaaattacagtttaatgtctaggtgccagcccttgatatagctattttt

SEQ ID NO: 359457 - DNA, 1672 bp, Homo sapiens
ggtcccaccaagacctggagctcaacaagcagaagcagggcagaagcaggaagcagggacttgggcccagtttatggcttccagtggaggcattttggggcagaatacagagatatggaatcagattattcaggacagggagttgaccaactgcaaagagtgattgacaccatcaaaaccaaccctgacgacagaagaatcatcatgtgcgcttggaatccaagagatcttcctctgatggcgctgcctccatgccatgccctctgccagttctatgtggtgaacagtgagctgtcctgccagctgtaccagagatcgggagacatgggcctcggtgtgcctttcaacatcgccagctacgccctgctcacgtacatgattgcgcacatcacgggcctgaagccaggtgactttatacacactttgggagatgcacatatttacctgaatcacatcgagccactgaaaattcagcttcagcgagaacccagacctttcccaaagctcaggattcttcgaaaagttgagaaaattgatgacttcaaagctgaagactttcagattgaagggtacaatccgcatccaactattaaaatggaaatggctgtttagggtgctttcaaaggagctcgaaggatattgtcagtctttaggggttgggctggatgccgaggtaaaagttctttttgctctaaaagaaaaaggaactaggtcaaaaatctgtccgtgacctatcagttattaatttttaaggatgttgccactggcaaatgtaactgtgccagttctttccataataaaaggctttgagttaactcactgagggtatctgacaatgctgaggttatgaacaaagtgaggagaatgaaatgtatgtgctcttagcaaaaacatgtatgtgcatttcaatcccacgtacttataaagaaggttggtgaatttcacaagctatttttggaatatttttagaatattttaagaatttcacaagctattccctcaaatctgagggagctgagtaacaccatcgatcatgatgtagagtgtggttatgaactttaaagttatagttgttttatatgttgctataataaagaagtgttctgcattcgtccacgctttgttcattctgtactgccacttatctgctcagttccttcctaaaatagattaaagaactctccttaagtaaacatgtgctgtattctggtttggatgctacttaaaagagtatattttagaaataatagtgaatatattttgccctatttttctcattttaactgcatcttatcctcaaaatataatgaccatttaggatagagtttttttttttttttttttaaacttttataaccttaaagggttattttaaaataatctatggactaccattttgccctcattagcttcagcatggtgtgacttctctaataatatgcttagattaagcaaggaaaagatgcaaaaccacttcggggttaatcagtgaaatatttttcccttcgttgcataccagatacccccggtgttgcacgactatttttattctgctaatttatgacaagtgttaaacagaacaaggaattattccaacaagttatgcaacatgttgcttattttcaaattacagtttaatgtctaggtgccagcccttgatatagctattttt

SEQ ID NO: 359458 - DNA, 1854 bp, Homo sapiens
cgcgggacggccgcgggaaaaggcgcgcggaaggggtcctgccaccgcgccacttggcctgcctccgtcccgccgcgccacttcacttggcctgcctccgtcccgccgcgccacttcgcctgcctccgtcccccgcccgccgcgccatgcctgtggccggctcggagctgccgcgccggcccttgccccccgccgcacaggagcgggacgccgagccgcgtccgccgcacggggagctgcagtacctggggcagatccaacacatcctccgctgcggcgtcaggaaggacgaccgcacgggcaccggcaccctgtcggtattcggcatgcaggcgcgctacagcctgagagatgaattccctctgctgacaaccaaacgtgtgttctggaagggtgttttggaggagttgctgtggtttatcaagggatccacaaatgctaaagagctgtcttccaagggagtgaaaatctgggatgccaatggatcccgagactttttggacagcctgggattctccaccagagaagaaggggacttgggcccagtttatggcttccagtggaggcattttggggcagaatacagagatatggaatcagattattcaggacagggagttgaccaactgcaaagagtgattgacaccatcaaaaccaaccctgacgacagaagaatcatcatgtgcgcttggaatccaagagatcttcctctgatggcgctgcctccatgccatgccctctgccagttctatgtggtgaacagtgagctgtcctgccagctgtaccagagatcgggagacatgggcctcggtgtgcctttcaacatcgccagctacgccctgctcacgtacatgattgcgcacatcacgggcctgaagccaggtgactttatacacactttgggagatgcacatatttacctgaatcacatcgagccactgaaaattcaggtaagaattagatgttatacttttgggtttggtaccttctcttgataaaaggttgactgtggaacaggcatctgctcaatgctgtgtccaagataaagatgactgctccaaatgtggggcttcagtttagggagaagtggtgggcaggtgggcaggacaaggcaggcatctgcctcagcaaccatgggcacttaacatgtcaggtgctgtgaggtactaagcaccagtaccagagagggaagagccacattcaagccaggggattgtccaaaagggggcattttaactcattttaacttgaaggagaattgaagtgcaaatgtttttccttttcttttttttttgagatggagtctttctctgtcggccaggctggagtgtgccgtggtgcgatctcagctcactgcaacctccacctcccgggttcaagcaattcttctgcctcagcctcccaggtagctgggattacaggcacatgccaccacacccagctaatttttgtattattagtagagatggggtttcgtcatgttggccaggctagtctcaaactcctgacttcaagtgatccacctgcctcagcctccgaaagttctggaattacaggcataagccaccaccctggccataaatattttttgttaattttacattaagtacaatatttaggtccaaacttcaaaagtctgttgaaatccctaagttatagcagccaacaattgatatgaaatggcaataaaaatgtaagttcatctgcttcatgagccttaaggaaaaaaactcagaaccagacactttttagccccttccaggttagatccaggttttaaaagttactcctttgagggagtttggctgcttttgagtggaggtgacttcaggcttattctctctggctctctgc

SEQ ID NO: 359459 - DNA, 2366 bp, Homo sapiens
cgcgggacggccgcgggaaaaggcgcgcggaaggggtcctgccaccgcgccacttggcctgcctccgtcccgccgcgccacttcacttggcctgcctccgtcccgccgcgccacttcgcctgcctccgtcccccgcccgccgcgccatgcctgtggccggctcggagctgccgcgccggcccttgccccccgccgcacaggagcgggacgccgagccgcgtccgccgcacggggagctgcagtacctggggcagatccaacacatcctccgctgcggcgtcaggaaggacgaccgcacgggcaccggcaccctgtcggtattcggcatgcaggcgcgctacagcctgagagatgaattccctctgctgacaaccaaacgtgtgttctggaagggtgttttggaggagttgctgtggtttatcaagggatccacaaatgctaaagagctgtcttccaagggagtgaaaatctgggatgccaatggatcccgagactttttggacagcctgggattctccaccagagaagaaggggacttgggcccagtttatggcttccagtggaggcattttggggcagaatacagagatatggaatcagattattcaggacagggagttgaccaactgcaaagagtgattgacaccatcaaaaccaaccctgacgacagaagaatcatcatgtgcgcttggaatccaagagatcttcctctgatggcgctgcctccatgccatgccctctgccagttctatgtggtgaacagtgagctgtcctgccagctgtaccagagatcgggagacatgggcctcggtgtgcctttcaacatcgccagctacgccctgctcacgtacatgattgcgcacatcacgggcctgaaggtgggctgtctcgggaagggtgacttgccagcctaccacactgagctcttcagttctttaatatgggaaaacaaattgcagagtttagtctctgattagcttttaaatttgatatgtgtaagtaagaaatgaaccagcttttactttgaaaccttcctcttctggaaggttttctggccctgtggtatacgcactaacagatctatacaggttgtttgtgatacagcttctatggattttctcaaaagctatgctgaggttgggtatggtggctcatgcctgtaatcccagcactttgggagactgagacaggagcaattgcttgaggtctggagttcaataccagcctgggcaacataacaagatgctgttgctacaaaaaaatggaaaagctacactaaattatttttttaaaaaaagccttgcggtgtctgcatattctaatgtttttaaatgatgttttaaagaattgaaactaacatactgttctgctttctcccccgggtttatagccaggtgactttatacacactttgggagatgcacatatttacctgaatcacatcgagccactgaaaattcaggtaagaattagatgttatacttttgggtttggtaccttctcttgataaaaggttgactgtggaacaggcatctgctcaatgctgtgtccaagataaagatgactgctccaaatgtggggcttcagtttagggagaagtggtgggcaggtgggcaggacaaggcaggcatctgcctcagcaaccatgggcacttaacatgtcaggtgctgtgaggtactaagcaccagtaccagagagggaagagccacattcaagccaggggattgtccaaaagggggcattttaactcattttaacttgaaggagaattgaagtgcaaatgtttttccttttcttttttttttgagatggagtctttctctgtcggccaggctggagtgtgccgtggtgcgatctcagctcactgcaacctccacctcccgggttcaagcaattcttctgcctcagcctcccaggtagctgggattacaggcacatgccaccacacccagctaatttttgtattattagtagagatggggtttcgtcatgttggccaggctagtctcaaactcctgacttcaagtgatccacctgcctcagcctccgaaagttctggaattacaggcataagccaccaccctggccataaatattttttgttaattttacattaagtacaatatttaggtccaaacttcaaaagtctgttgaaatccctaagttatagcagccaacaattgatatgaaatggcaataaaaatgtaagttcatctgcttcatgagccttaaggaaaaaaactcagaaccagacactttttagccccttccaggttagatccaggttttaaaagttactcctttgagggagtttggctgcttttgagtggaggtgacttcaggcttattctctctggctctctgc

SEQ ID NO: 359460 - DNA, 1184 bp, Homo sapiens
cgcgggacggccgcgggaaaaggcgcgcggaaggggtcctgccaccgcgccacttggcctgcctccgtcccgccgcgccacttcacttggcctgcctccgtcccgccgcgccacttcgcctgcctccgtcccccgcccgccgcgccatgcctgtggccggctcggagctgccgcgccggcccttgccccccgccgcacaggagcgggacgccgagccgcgtccgccgcacggggagctgcagtacctggggcagatccaacacatcctccgctgcggcgtcaggaaggacgaccgcacgggcaccggcaccctgtcggtattcggcatgcaggcgcgctacagcctgagagatgaattccctctgctgacaaccaaacgtgtgttctggaagggtgttttggaggagttgctgtggtttatcaagggatccacaaatgctaaagagctgtcttccaagggagtgaaaatctgggatgccaatggatcccgagactttttggacagcctgggattctccaccagagaagaaggggacttgggcccagtttatggcttccagtggaggcattttggggcagaatacagagatatggaatcagattattcaggacagggagttgaccaactgcaaagagtgattgacaccatcaaaaccaaccctgacgacagaagaatcatcatgtgcgcttggaatccaagagatcttcctctgatggcgctgcctccatgccatgccctctgccagttctatgtggtgaacagtgagctgtcctgccagctgtaccagagatcgggagacatgggcctcggtgtgcctttcaacatcgccagctacgccctgctcacgtacatgattgcgcacatcacgggcctgaaggtgggctgtctcgggaagggtgacttgccagcctaccacactgagctcttcagttctttaatatgggaaaacaaattgcagagtttagtctctgattagcttttaaatttgatatgtgtaagtaagaaatgaaccagcttttactttgaaaccttcctcttctggaaggttttctggccctgtggtatacgcactaacagatctatacaggttgtttgtgatacagcttctatggattttctcaaaagctatgctgaggttgggtatggtggctgtagttactgtgttcagggtgaataagctttt

SEQ ID NO: 359461 - DNA, 1896 bp, Homo sapiens
tgaaaccgtatggcaaattgtttttcatgaattccctctgctgacaaccaaacgtgtgttctggaagggtgttttggaggagttgctgtggtttatcaagggatccacaaatgctaaagagctgtcttccaagggagtgaaaatctgggatgccaatggatcccgagactttttggacagcctgggattctccaccagagaagaaggggacttgggcccagtttatggcttccagtggaggcattttggggcagaatacagagatatggaatcagattattcaggacagggagttgaccaactgcaaagagtgattgacaccatcaaaaccaaccctgacgacagaagaatcatcatgtgcgcttggaatccaagagatcttcctctgatggcgctgcctccatgccatgccctctgccagttctatgtggtgaacagtgagctgtcctgccagctgtaccagagatcgggagacatggcaggacagctcactgttcaccacatagaactggcagagggcatggcagctgtaccagagatcgggagacatgggcctcggtgtgcctttcaacatcgccagctacgccctgctcacgtacatgattgcgcacatcacgggcctgaagccaggtgactttatacacactttgggagatgcacatatttacctgaatcacatcgagccactgaaaattcagcttcagcgagaacccagacctttcccaaagctcaggattcttcgaaaagttgagaaaattgatgacttcaaagctgaagactttcagattgaagggtacaatccgcatccaactattaaaatggaaatggctgtttagggtgctttcaaaggagctcgaaggatattgtcagtctttaggggttgggctggatgccgaggtaaaagttctttttgctctaaaagaaaaaggaactaggtcaaaaatctgtccgtgacctatcagttattaatttttaaggatgttgccactggcaaatgtaactgtgccagttctttccataataaaaggctttgagttaactcactgagggtatctgacaatgctgaggttatgaacaaagtgaggagaatgaaatgtatgtgctcttagcaaaaacatgtatgtgcatttcaatcccacgtacttataaagaaggttggtgaatttcacaagctatttttggaatatttttagaatattttaagaatttcacaagctattccctcaaatctgagggagctgagtaacaccatcgatcatgatgtagagtgtggttatgaactttaaagttatagttgttttatatgttgctataataaagaagtgttctgcattcgtccacgctttgttcattctgtactgccacttatctgctcagttccttcctaaaatagattaaagaactctccttaagtaaacatgtgctgtattctggtttggatgctacttaaaagagtatattttagaaataatagtgaatatattttgccctatttttctcattttaactgcatcttatcctcaaaatataatgaccatttaggatagagtttttttttttttttttttaaacttttataaccttaaagggttattttaaaataatctatggactaccattttgccctcattagcttcagcatggtgtgacttctctaataatatgcttagattaagcaaggaaaagatgcaaaaccacttcggggttaatcagtgaaatatttttcccttcgttgcataccagatacccccggtgttgcacgactatttttattctgctaatttatgacaagtgttaaacagaacaaggaattattccaacaagttatgcaacatgttgcttattttcaaattacagtttaatgtctaggtgccagcccttgatatagctattttt

SEQ ID NO: 359462 - DNA, 1672 bp, Homo sapiens
attggcacttactgggcgcttggcactttccatactgtgtcatcggcagatagctgcatggttggtgttcgtgctggggaatgggaagttcatcggtgggacaagggacaaaatgcccccattgctttgttgtggctttaatctccctttcgaggctgagccacagcgtgctgtaggtggcgctgctgtgaagcgcagtgccagggtcacactccactcccagctcctgatgaggcaccaggctcctgatgctgtgtaatgtcacaaaatacccctcactctcgatctgtgcaagagaacagctggttgcgctccaatcatgttacataacctacggcaaggtatcgacaggatcatactcctgtaaaatagaactttgttgatcacatcctgtgtacttgtttcacggacatgaggagcaattacaacaggtcgtacaattatggcaaaataatggccttattttgtttttagcttcagcgagaacccagacctttcccaaagctcaggattcttcgaaaagttgagaaaattgatgacttcaaagctgaagactttcagattgaagggtacaatccgcatccaactattaaaatggaaatggctgtttagggtgctttcaaaggagctcgaaggatattgtcagtctttaggggttgggctggatgccgaggtaaaagttctttttgctctaaaagaaaaaggaactaggtcaaaaatctgtccgtgacctatcagttattaatttttaaggatgttgccactggcaaatgtaactgtgccagttctttccataataaaaggctttgagttaactcactgagggtatctgacaatgctgaggttatgaacaaagtgaggagaatgaaatgtatgtgctcttagcaaaaacatgtatgtgcatttcaatcccacgtacttataaagaaggttggtgaatttcacaagctatttttggaatatttttagaatattttaagaatttcacaagctattccctcaaatctgagggagctgagtaacaccatcgatcatgatgtagagtgtggttatgaactttaaagttatagttgttttatatgttgctataataaagaagtgttctgcattcgtccacgctttgttcattctgtactgccacttatctgctcagttccttcctaaaatagattaaagaactctccttaagtaaacatgtgctgtattctggtttggatgctacttaaaagagtatattttagaaataatagtgaatatattttgccctatttttctcattttaactgcatcttatcctcaaaatataatgaccatttaggatagagtttttttttttttttttttaaacttttataaccttaaagggttattttaaaataatctatggactaccattttgccctcattagcttcagcatggtgtgacttctctaataatatgcttagattaagcaaggaaaagatgcaaaaccacttcggggttaatcagtgaaatatttttcccttcgttgcataccagatacccccggtgttgcacgactatttttattctgctaatttatgacaagtgttaaacagaacaaggaattattccaacaagttatgcaacatgttgcttattttcaaattacagtttaatgtctaggtgccagcccttgatatagctattttt

SEQ ID NO: 359463 - DNA, 1668 bp, Homo sapiens
cttctgcctgtactgctgctgctgctgctcagggcttcgtgcccatggggtcaggaacagggagcgaggagcccctcggaggagcctccagaggaggaaatccccaaggaggatgggatcttggtgctgagccgccacaccctgggcctggccctgcgggagcaccctgccctgctggtggaattctatgccccgtggtgtgggcactgccaggccctggcccccgagtacagcaaggcagctgccgtgctcgcggccgagtcaatggtggtcacgctggccaaggtggatgggcccgcgcagcgcgagctggctgaggagtttggtgtgacggagtaccctacgctcaagttcttccgcaatgggaaccgcacgcacccggaggagtacacaggaccacgggacgctgagggcattgccgagtggctgcgacggcgggtggggcccagtgccatgcggctggaggacgaggcggccgcccaggcgctgatcggtggccgggacctagtggtcattggcttcttccaggacctgcaggacgaggacgtggccaccttcttggccttggcccaggacgccctggacatgacctttggcctcacagaccggccgcggctctttcagcagtttggcctcaccaaggacactgtggttctcttcaagaagtttgatgaggggcgggcagacttccccgtggacgaggagcttggcctggacctgggggatctgtcgcgcttcctggtcacacacagcatgcgcctggtcacggagttcaacagccagacgtctgccaagatcttcgcggccaggatcctcaaccacctgctgctgtttgtcaaccagacgctggctgcgcaccgggagctcctagcgggctttggggaggcagctccccgcttccgggggcaggtgctgttcgtggtggtggacgtggcggccgacaatgagcacgtgctgcagtactttggactcaaggctgaggcagcccccactctgcgcttggtcaaccttgaaaccactaagaagtatgcgcctgtggatgggggccctgtcaccgcagcgtccatcactgctttctgccatgcagtcctcaacggccaagtcaagccctatctcctgagccaggagataccccctgattgggatcagcggccagttaagaccctcgtgggcaagaattttgagcaggtggcttttgacgaaaccaagaatgtgtttgtcaagttctatgccccgtggtgcacccactgcaaggagatggcccctgcctgggaggcattggctgagaagtaccaagaccacgaggacatcatcattgctgagctggatgccacggccaacgagctggatgccttcgctgtgcacggcttccctactctcaagtacttcccagcagggccaggtcggaaggtgattgaatacaaaagcaccagggacctggagactttctccaagttcctggacaacgggggcgtgctgcccacggaggagcccccggaggagccagcagccccgttcccggagccaccggccaactccactatggggtccaaggaggaactgtagctgcccccgtgtcacccccgccatcactgctggacaggagccacccccttgggtaccagagggagctgtgcattgtgaataaagagtgagcttggttctgga

SEQ ID NO: 359464 - DNA, 2157 bp, Homo sapiens
cttctgcctgtactgctgctgctgctgctcagggcttcgtgcccatggggtcaggaacagggagcgaggagcccctcggaggagcctccagaggaggaaatccccaaggaggatgggatcttggtgctgagccgccacaccctgggcctggccctgcgggagcaccctgccctgctggtggaattctatgccccgtggtgtgggcactgccaggccctggcccccgagtacagcaaggcagctgccgtgctcgcggccgagtcaatggtggtcacgctggccaaggtggatgggcccgcgcagcgcgagctggctgaggagtttggtgtgacggagtaccctacgctcaagttcttccgcaatgggaaccgcacgcacccggaggagtacacaggaccacgggacgctgagggcattgccgagtggctgcgacggcgggtggggcccagtgccatgcggctggaggacgaggcggccgcccaggcgctgatcggtggccgggacctagtggtcattggcttcttccaggacctgcaggacgaggacgtggccaccttcttggccttggcccaggacgccctggacatgacctttggcctcacagaccggccgcggctctttcagcagtttggcctcaccaaggacactgtggttctcttcaagaaggtaggtcaggcccaggtgtgggttggggtccggctgcagcgcccgctaacccacctgctgctgtccagtttgatgaggggcgggcagacttccccgtggacgaggagcttggcctggacctgggggatctgtcgcgcttcctggtcacacacagcatgcgcctggtcacggagttcaacagccaggtgcgtaggctgcagtgcctgggctgggggtgtcccagggtagagtcgtccagggatgggggtgcctaggctgggggtcctgtggagtcatgagcaccctccctactgtagacgtctgccaagatcttcgcggccaggatcctcaaccacctgctgctgtttgtcaaccagacgctggctgcgcaccgggagctcctagcgggctttggggaggcagctccccgcttccgggggcaggtactggggggctgggggaaaggggcagcgggagagtggccggtgccagcatggactccctgccacaggtgctgttcgtggtggtggacgtggcggccgacaatgagcacgtgctgcagtactttggactcaaggctgaggcagcccccactctgcgcttggtcaaccttgaaaccactaagaagtatgcgcctgtggatgggggccctgtcaccgcagcgtccatcactgctttctgccatgcagtcctcaacggccaagtcaagccctatctcctgagccaggagataccccctgattgggatcagcggccagttaagaccctcgtgggcaagaattttgagcaggtggcttttgacgaaaccaagaatgtgtttgtcaagttctatgccccgtggtgcacccactgcaaggagatggcccctgcctgggaggcattggctgagaagtaccaagaccacgaggacatcatcattgctgagctggatgccacggccaacgagctggatgccttcgctgtgcacggcttccctactctcaagtacttcccagcagggccaggtcggaaggtgattgaatacaaaagcaccagggacctggagactttctccaagttcctggacaacgggggcgtgctgcccacggaggagcccccggaggagccagcagccccgttcccggagccaccggccaactccactatggggtccaaggaggaactgtagctgcccccgtgtcacccccgccatcactgctggacaggagccacccccttgggtaccagagggagctgtgcattgtgaataaagagtgagcttggttctggaaaaaaaaaaaacaaacaaaaaaaaaaaaacacaaagaacatgaaaaaacacaacaaaggaacaaacgccgcggaacgaataaagagaggggaggcgaaaaaagaacgagacacagaagcgggcaccagcacacagagaaagatgaacacagaggcaatgtagcgacaacgagggcggataccaacaggcggaaaccacaaaaaaggagagaagaaataatgaacggagacaagggagccaac

SEQ ID NO: 359465 - DNA, 1963 bp, Homo sapiens
gccactgagcctggctgtggggggagggggggtggtctttcaagctctcccaagccttactggtccctgtgctgcagcctggggggccacgaagaggcactggtgctcggcttgtccacggccagggctcagggcagaatggagcagcacgcttgttccctgctgggttgtcaggtgtggagagggtgctcctggggttgtggtggcctggggcactcacggccccatcccccagatgccccgtggtgtgggcactgccaggccctggcccccgagtacagcaaggcagctgccgtgctcgcggccgagtcaatggtggtcacgctggccaaggtggatgggcccgcgcagcgcgagctggctgaggagtttggtgtgacggagtaccctacgctcaagttcttccgcaatgggaaccgcacgcacccggaggagtacacaggaccacgggacgctgagggcattgccgagtggctgcgacggcgggtggggcccagtgccatgcggctggaggacgaggcggccgcccaggcgctgatcggtggccgggacctagtggtcattggcttcttccaggacctgcaggacgaggacgtggccaccttcttggccttggcccaggacgccctggacatgacctttggcctcacagaccggccgcggctctttcagcagtttggcctcaccaaggacactgtggttctcttcaagaaggtaggtcaggcccaggtgtgggttggggtccggctgcagcgcccgctaacccacctgctgctgtccagtttgatgaggggcgggcagacttccccgtggacgaggagcttggcctggacctgggggatctgtcgcgcttcctggtcacacacagcatgcgcctggtcacggagttcaacagccaggtgcgtaggctgcagtgcctgggctgggggtgtcccagggtagagtcgtccagggatgggggtgcctaggctgggggtcctgtggagtcatgagcaccctccctactgtagacgtctgccaagatcttcgcggccaggatcctcaaccacctgctgctgtttgtcaaccagacgctggctgcgcaccgggagctcctagcgggctttggggaggcagctccccgcttccgggggcaggtactggggggctgggggaaaggggcagcgggagagtggccggtgccagcatggactccctgccacaggtgctgttcgtggtggtggacgtggcggccgacaatgagcacgtgctgcagtactttggactcaaggctgaggcagcccccactctgcgcttggtcaaccttgaaaccactaagaagtatgcgcctgtggatgggggccctgtcaccgcagcgtccatcactgctttctgccatgcagtcctcaacggccaagtcaagccctatctcctgagccaggagataccccctgattgggatcagcggccagttaagaccctcgtgggcaagaattttgagcaggtggcttttgacgaaaccaagaatgtgtttgtcaagttctatgccccgtggtgcacccactgcaaggagatggcccctgcctgggaggcattggctgagaagtaccaagaccacgaggacatcatcattgctgagctggatgccacggccaacgagctggatgccttcgctgtgcacggcttccctactctcaagtacttcccagcagggccaggtcggaaggtgattgaatacaaaagcaccagggacctggagactttctccaagttcctggacaacgggggcgtgctgcccacggaggagcccccggaggagccagcagccccgttcccggagccaccggccaactccactatggggtccaaggaggaactgtagctgcccccgtgtcacccccgccatcactgctggacaggagccacccccttgggtaccagagggagctgtgcattgtgaataaagagtgagcttggttctgga

SEQ ID NO: 359466 - DNA, 1802 bp, Homo sapiens
cttctgcctgtactgctgctgctgctgctcagggcttcgtgcccatggggtcaggaacagggagcgaggagcccctcggaggagcctccagaggaggaaatccccaaggaggatgggatcttggtgctgagccgccacaccctgggcctggccctgcgggagcaccctgccctgctggtggaattctatgccccgtggtgtgggcactgccaggccctggcccccgagtacagcaaggcagctgccgtgctcgcggccgagtcaatggtggtcacgctggccaaggtggatgggcccgcgcagcgcgagctggctgaggagtttggtgtgacggagtaccctacgctcaagttcttccgcaatgggaaccgcacgcacccggaggagtacacaggaccacgggacgctgagggcattgccgagtggctgcgacggcgggtggggcccagtgccatgcggctggaggacgaggcggccgcccaggcgctgatcggtggccgggacctagtggtcattggcttcttccaggacgccctggacatgacctttggcctcacagaccggccgcggctctttcagcagtttggcctcaccaaggacactgtggttctcttcaagaagtttgatgaggggcgggcagacttccccgtggacgaggagcttggcctggacctgggggatctgtcgcgcttcctggtcacacacagcatgcgcctggtcacggagttcaacagccaggtgcgtaggctgcagtgcctgggctgggggtgtcccagggtagagtcgtccagggatgggggtgcctaggctgggggtcctgtggagtcatgagcaccctccctactgtagacgtctgccaagatcttcgcggccaggatcctcaaccacctgctgctgtttgtcaaccagacgctggctgcgcaccgggagctcctagcgggctttggggaggcagctccccgcttccgggggcaggtactggggggctgggggaaaggggcagcgggagagtggccggtgccagcatggactccctgccacaggtgctgttcgtggtggtggacgtggcggccgacaatgagcacgtgctgcagtactttggactcaaggctgaggcagcccccactctgcgcttggtcaaccttgaaaccactaagaagtatgcgcctgtggatgggggccctgtcaccgcagcgtccatcactgctttctgccatgcagtcctcaacggccaagtcaagccctatctcctgagccaggagataccccctgattgggatcagcggccagttaagaccctcgtgggcaagaattttgagcaggtggcttttgacgaaaccaagaatgtgtttgtcaagttctatgccccgtggtgcacccactgcaaggagatggcccctgcctgggaggcattggctgagaagtaccaagaccacgaggacatcatcattgctgagctggatgccacggccaacgagctggatgccttcgctgtgcacggcttccctactctcaagtacttcccagcagggccaggtcggaaggtgattgaatacaaaagcaccagggacctggagactttctccaagttcctggacaacgggggcgtgctgcccacggaggagcccccggaggagccagcagccccgttcccggagccaccggccaactccactatggggtccaaggaggaactgtagctgcccccgtgtcacccccgccatcactgctggacaggagccacccccttgggtaccagagggagctgtgcattgtgaataaagagtgagcttggttctgga

SEQ ID NO: 359467 - DNA, 2443 bp, Homo sapiens
cagcgctgagctgcaggcgcggcgaaacttccctctacccgcccggcccgcggcgcgcaccgttggcgctggacgcttcctccttggaagcgcctctccctcagttatggagaaaacttgtatagatgcacttcctcttactatgaattcttcagaaaagcaagagactgtatgtatttttggaactggtgattttggaagatcactgggattgaaaatgctccagtgtggttattctgttgtttttggaagtcgaaacccccagaagaccaccctactgcccagtggtgcagaagtcttgagctattcagaagcagccaagaagtctgacatcataatcatagcaatccacagagagcattatgattttctcacagaattaactgaggttctcaatggaaaaatattggtagacatcagcaacaacctcaaaatcaatcaatatccagaatctaatgcagagtaccttgctcatttggtgccaggagcccacgtggtaaaagcatttaacaccatctcagcctgggctctccagtcaggagcactggatgcaagtcggcaggtgtttgtgtgtggaaatgacagcaaagccaagcaaagagtgatggatattgttcgtaatcttggacttactccaatggatcaaggatcactcatggcagccaaagaaattgaaaagtaccccctgcagctatttccaatgtggaggttccccttctatttgtctgctgtgctgtgtgtcttcttgtttttctattgtgttataagagacgtaatctacccttatgtttatgaaaagaaagataatacatttcgtatggctatttccattccaaatcgtatctttccaataacagcaccttacactgcttgctttggtttacctccctggtgttattgctgccattctacaactgtaccgaggcacaaaataccgtcgattcccagactggcttgaccactggatgctttgccgaaagcagcttggcttggtagctctgggatttgccttccttcatgtcctctacacacttgtgattcctattcgatattatgtacgatggagattgggaaacttaaccgttacccaggcaatactcaagaaggagaatccatttagcacctcctcagcctggctcagtgattcatatgtggctttgggaatacttgggttttttctgtttgtactcttggggaatcacttctttgccatctgttagcaatgcagtcaactggagagagttccgatttgtccagtccaaactgggttatttgaccctgatcttgtgtacagcccacaccctggtgtacggtgggaagagattcctcagcccttcaaatctcagatggtatcttcctgcagcctacgtgttagggcttatcattccttgcactgtgctggtgatcaagtttgtcctaatcatgccatgtgtagacaacacccttacaaggatccgccagggctgggaaaggaactcaaaacactagaaaaagcattgaatggaaaatcaatatttaaaacaaagttcaatttagctggatttctgaactatggttttgaatgtttaaagaagaatgatgggtacagttaggaaagtttttttcttacaccgtgactgagggaaacattgcttgtctttgagaaattgactgacatactggaagagaacaccattttatctcaggttagtgaagaatcagtgcaggtccctgactcttattttcccagaggccatggagctgagattgagactagccttgtggtttcacactaaagagtttccttgttatgggcaacatgcatgacctaatgtcttgcaaaatccaatagaagtattgcagcttccttctctggctcaagggctgagttaagtgaaaggaaaaacagcacaatggtgaccactgataaaggctttattaggtatatctgaggaagtgggtcacatgaaatgtaaaaagggaatgaggtttttgttgttttttggaagtaaaggcaaacataaatattaccatgatgaattctagtgaaatgaccccttgactttgcttttcttaatacagatatttactgagaggaactatttttataacacaagaaaaatttacaattgattaaaagtatccatgtcttggatacatacgtatctatagagctggcatgtaattcttcctctataaagaataggtataggaaagactgaataaaaatggagggatatccccttggatttcacttgcattgtgcaataagcaaagaagggttgataaaagttcttgatcaaaaagttcaaagaaaccagaattttagacagcaagctaaataaatattgtaaaattgcactatattaggttaagtattatttaggtattataatatgctttgtaaattttatattccaaatattgctcaatatttttcatctattaaattaatttctagtgt

SEQ ID NO: 359468 - DNA, 3928 bp, Homo sapiens
  misc_feature (2432)..(2432): n is a, c, g, or t
cagcgctgagctgcaggcgcggcgaaacttccctctacccgcccggcccgcggcgcgcaccgttggcgctggacgcttcctccttggaagcgcctctccctcagttatggagaaaacttgtatagatgcacttcctcttactatgaattcttcagaaaagcaagagactgtatgtatttttggaactggtgattttggaagatcactgggattgaaaatgctccagtgtggttattctgttgtttttggaagtcgaaacccccagaagaccaccctactgcccagtggtgcagaagtcttgagctattcagaagcagccaagaagtctgacatcataatcatagcaatccacagagagcattatgattttctcacagaattaactgaggttctcaatggaaaaatattggtagacatcagcaacaacctcaaaatcaatcaatatccagaatctaatgcagagtaccttgctcatttggtgccaggagcccacgtggtaaaagcatttaacaccatctcagcctgggctctccagtcaggagcactggatgcaagtcggcaggcaatactcaagaaggagaatccatttagcacctcctcagcctggctcagtgattcatatgtggctttgggaatacttgggttttttctgtttgtactcttggggaatcacttctttgccatctgttagcaatgcagtcaactggagagagttccgatttgtccagtccaaactgggttatttgaccctgatcttgtgtacagcccacaccctggtgtacggtgggaagagattcctcagcccttcaaatctcagatggtatcttcctgcagcctacgtgttagggcttatcattccttgcactgtgctggtgatcaagtttgtcctaatcatgccatgtgtagacaacacccttacaaggatccgccagggctgggaaaggaactcaaaacactagaaaaagcattgaatggaaaatcaatatttaaaacaaagttcaatttagctggatttctgaactatggttttgaatgtttaaagaagaatgatgggtacagttaggaaagtttttttcttacaccgtgactgagggaaacattgcttgtctttgagaaattgactgacatactggaagagaacaccattttatctcaggttagtgaagaatcagtgcaggtccctgactcttattttcccagaggccatggagctgagattgagactagccttgtggtttcacactaaagagtttccttgttatgggcaacatgcatgacctaatgtcttgcaaaatccaatagaagtattgcagcttccttctctggctcaagggctgagttaagtgaaaggaaaaacagcacaatggtgaccactgataaaggctttattaggtatatctgaggaagtgggtcacatgaaatgtaaaaagggaatgaggtttttgttgttttttggaagtaaaggcaaacataaatattaccatgatgaattctagtgaaatgaccccttgactttgcttttcttaatacagatatttactgagaggaactatttttataacacaagaaaaatttacaattgattaaaagtatccatgtcttggatacatacgtatctatagagctggcatgtaattcttcctctataaagaataggtataggaaagactgaataaaaatggagggatatccccttggatttcacttgcattgtgcaataagcaaagaagggttgataaaagttcttgatcaaaaagttcaaagaaaccagaattttagacagcaagctaaataaatattgtaaaattgcactatattaggttaagtattatttaggtattataatatgctttgtaaattttatattccaaatattgctcaatatttttcatctattaaattaatttctagtgtaaataagtagcttctatatctgtcttagtctattataattgtaaggagtaaaattaaatgaatagtctgcaggtataaatttgaacaatgcatagatgatcgaaaattacggaaaatcatagggcagagaggtgtgaagattcatcattatgtgaaatttggatctttctcaaatccttgctgaaatttaggatggttctcactgtttttctgtgctgatagtaccctttccaaggtgaccttcagggggattaaccttcctagctcaagcaatgagctaaaaggagccttatgcatgatcttcccacatatcaaaataactaaaaggcactgagtttggcatttttctgcctgctctgctaagacctttttttttttttactttcattataacatattatacatgacattatacaaaaatgattaaaatatattaaaacaacatcaacaatccaggatatttttctataaaactttttaaaaataattgtatctatatattcaattttacatccttnttcaaaggctttgtttttctaaaggctttgttttcctttttattatttttttcttttttatttttttgagacagtcttgctctgtcgctcaggctggagtgcagtggcacgatctcagctcactgcaacctcctcctcccaggttcaagtgattcttgttcatcagcctcccgagtagctgggactacaggcatgtgccactatgcccagctaatttttgtacttttagtagagacagggtttcaccacattggtcaggctggtcttgaaatgctggcgtcaagtgatctgcctgcctccgcctcacaaagcactgggattacaggcatgaatctggccttacgtaatatattttcttaatggctgcataatatcacatcaaataggcatttttcaaacctctttccttattaaacatgtagactatatccattttttactaaaataaataacatttcagataatatctttgcactgataatgttgccaagccatttctaaagtgaccttatcaatttaattaccattggatgagggtgttgctttcatcgcaccattgtagattgtcttttttatttcaatttgcgtttatttataactggttgcaaaggtacacagaacacacgctccttcaacttatctttgataaacccaagcaaggatacaaaaagttggacgacattgagtagagtcatggtatacggtgctgaccctacagtatcagtggaaaagataaggaaaatgtcactactcacctatgttatgcaaaacagttaggtgtgctggggctggatactgctcttttacttgagcattggttgattaaagtttaggtaccatccaggctggtctagagaagtctttggagttaaccatgctctttttgttaaagaagagagtaatgtgtttatcctggctcatagtccgtcaccgaaaatagaaaatgccatccataggtaaaatgctgacctatagaaaaaaatgaactctacttttatagcctagtaaaaatgctctacctgagtagttaaaagcaattcatgaagcctgaagctaaagagcactctgatggttttggcataatagctgcatttccagacctgacctttggccccaaccacaagtgctccaagccccaccagctgaccaaagaaagcccaagttctccttctgtccttcccacaacctccctgctcccaaaactatgaaattaatttgaccatattaacacagctgactcctccagtttacttaaggtagaaagaatgagtttacaacagatgaaaataagtgctttgggcgaactgtattccttttaacagatccaaactattttacatttaaaaaaaaagttaaactaaacttctttactgctgatatgtttcctgtattctagaaaaatttttacactttcacattatttttgtacactttccccatgttaagggatgatggcttttataaatgtgtattcattaaatgttactttaaaaata

SEQ ID NO: 359469 - DNA, 4480 bp, Homo sapiens
  misc_feature (3060)..(3060): n is a, c, g, or t
cagcgctgagctgcaggcgcggcgaaacttccctctacccgcccggcccgcggcgcgcaccgttggcgctggacgcttcctccttggaagcgcctctccctcaggtctcaagaactgttttgagatgcaggaattcatctaattttcactgccgggcgaggtgtgagagccctagcatctgaaagtggtcgacttgcgagttgttatggagaaaacttgtatagatgcacttcctcttactatgaattcttcagaaaagcaagagactgtatgtatttttggaactggtgattttggaagatcactgggattgaaaatgctccagtgtggttattctgttgtttttggaagtcgaaacccccagaagaccaccctactgcccagtggtgcagaagtcttgagctattcagaagcagccaagaagtctgacatcataatcatagcaatccacagagagcattatgattttctcacagaattaactgaggttctcaatggaaaaatattggtagacatcagcaacaacctcaaaatcaatcaatatccagaatctaatgcagagtaccttgctcatttggtgccaggagcccacgtggtaaaagcatttaacaccatctcagcctgggctctccagtcaggagcactggatgcaagtcggcaggtgtttgtgtgtggaaatgacagcaaagccaagcaaagagtgatggatattgttcgtaatcttggacttactccaatggatcaaggatcactcatggcagccaaagaaattgaaaagtaccccctgcagctatttccaatgtggaggttccccttctatttgtctgctgtgctgtgtgtcttcttgtttttctattgtgttataagagacgtaatctacccttatgtttatgaaaagaaagataatacatttcgtatggctatttccattccaaatcgtatctttccaataacagcaccttacactgcttgctttggtttacctccctggtgttattgctgccattctacaactgtaccgaggcacaaaataccgtcgattcccagactggcttgaccactggatgctttgccgaaagcagcttggcttggtagctctgggatttgccttccttcatgtcctctacacacttgtgattcctattcgatattatgtacgatggagattgggaaacttaaccgttacccaggcaatactcaagaaggagaatccatttagcacctcctcagcctggctcagtgattcatatgtggctttgggaatacttgggttttttctgtttgtactcttggggaatcacttctttgccatctgttagcaatgcagtcaactggagagagttccgatttgtccagtccaaactgggttatttgaccctgatcttgtgtacagcccacaccctggtgtacggtgggaagagattcctcagcccttcaaatctcagatggtatcttcctgcagcctacgtgttagggcttatcattccttgcactgtgctggtgatcaagtttgtcctaatcatgccatgtgtagacaacacccttacaaggatccgccagggctgggaaaggaactcaaaacactagaaaaagcattgaatggaaaatcaatatttaaaacaaagttcaatttagctggatttctgaactatggttttgaatgtttaaagaagaatgatgggtacagttaggaaagtttttttcttacaccgtgactgagggaaacattgcttgtctttgagaaattgactgacatactggaagagaacaccattttatctcaggttagtgaagaatcagtgcaggtccctgactcttattttcccagaggccatggagctgagattgagactagccttgtggtttcacactaaagagtttccttgttatgggcaacatgcatgacctaatgtcttgcaaaatccaatagaagtattgcagcttccttctctggctcaagggctgagttaagtgaaaggaaaaacagcacaatggtgaccactgataaaggctttattaggtatatctgaggaagtgggtcacatgaaatgtaaaaagggaatgaggtttttgttgttttttggaagtaaaggcaaacataaatattaccatgatgaattctagtgaaatgaccccttgactttgcttttcttaatacagatatttactgagaggaactatttttataacacaagaaaaatttacaattgattaaaagtatccatgtcttggatacatacgtatctatagagctggcatgtaattcttcctctataaagaataggtataggaaagactgaataaaaatggagggatatccccttggatttcacttgcattgtgcaataagcaaagaagggttgataaaagttcttgatcaaaaagttcaaagaaaccagaattttagacagcaagctaaataaatattgtaaaattgcactatattaggttaagtattatttaggtattataatatgctttgtaaattttatattccaaatattgctcaatatttttcatctattaaattaatttctagtgtaaataagtagcttctatatctgtcttagtctattataattgtaaggagtaaaattaaatgaatagtctgcaggtataaatttgaacaatgcatagatgatcgaaaattacggaaaatcatagggcagagaggtgtgaagattcatcattatgtgaaatttggatctttctcaaatccttgctgaaatttaggatggttctcactgtttttctgtgctgatagtaccctttccaaggtgaccttcagggggattaaccttcctagctcaagcaatgagctaaaaggagccttatgcatgatcttcccacatatcaaaataactaaaaggcactgagtttggcatttttctgcctgctctgctaagacctttttttttttttactttcattataacatattatacatgacattatacaaaaatgattaaaatatattaaaacaacatcaacaatccaggatatttttctataaaactttttaaaaataattgtatctatatattcaattttacatccttnttcaaaggctttgtttttctaaaggctttgttttcctttttattatttttttcttttttatttttttgagacagtcttgctctgtcgctcaggctggagtgcagtggcacgatctcagctcactgcaacctcctcctcccaggttcaagtgattcttgttcatcagcctcccgagtagctgggactacaggcatgtgccactatgcccagctaatttttgtacttttagtagagacagggtttcaccacattggtcaggctggtcttgaaatgctggcgtcaagtgatctgcctgcctccgcctcacaaagcactgggattacaggcatgaatctggccttacgtaatatattttcttaatggctgcataatatcacatcaaataggcatttttcaaacctctttccttattaaacatgtagactatatccattttttactaaaataaataacatttcagataatatctttgcactgataatgttgccaagccatttctaaagtgaccttatcaatttaattaccattggatgagggtgttgctttcatcgcaccattgtagattgtcttttttatttcaatttgcgtttatttataactggttgcaaaggtacacagaacacacgctccttcaacttatctttgataaacccaagcaaggatacaaaaagttggacgacattgagtagagtcatggtatacggtgctgaccctacagtatcagtggaaaagataaggaaaatgtcactactcacctatgttatgcaaaacagttaggtgtgctggggctggatactgctcttttatttgttaaagaagagagtaatgtgtttatcctggctcatagtccgtcaccgaaaatagaaaatgccatccataggtaaaatgctgacctatagaaaaaaatgaactctacttttatagcctagtaaaaatgctctacctgagtagttaaaagcaattcatgaagcctgaagctaaagagcactctgatggttttggcataatagctgcatttccagacctgacctttggccccaaccacaagtgctccaagccccaccagctgaccaaagaaagcccaagttctccttctgtccttcccacaacctccctgctcccaaaactatgaaattaatttgaccatattaacacagctgactcctccagtttacttaaggtagaaagaatgagtttacaacagatgaaaataagtgctttgggcgaactgtattccttttaacagatccaaactattttacatttaaaaaaaaagttaaactaaacttctttactgctgatatgtttcctgtattctagaaaaatttttacactttcacattatttttgtacactttccccatgttaagggatgatggcttttataaatgtgtattcattaaatgttactttaaaaata

SEQ ID NO: 359470 - DNA, 4556 bp, Homo sapiens
  misc_feature (3060)..(3060): n is a, c, g, or t
cagcgctgagctgcaggcgcggcgaaacttccctctacccgcccggcccgcggcgcgcaccgttggcgctggacgcttcctccttggaagcgcctctccctcaggtctcaagaactgttttgagatgcaggaattcatctaattttcactgccgggcgaggtgtgagagccctagcatctgaaagtggtcgacttgcgagttgttatggagaaaacttgtatagatgcacttcctcttactatgaattcttcagaaaagcaagagactgtatgtatttttggaactggtgattttggaagatcactgggattgaaaatgctccagtgtggttattctgttgtttttggaagtcgaaacccccagaagaccaccctactgcccagtggtgcagaagtcttgagctattcagaagcagccaagaagtctgacatcataatcatagcaatccacagagagcattatgattttctcacagaattaactgaggttctcaatggaaaaatattggtagacatcagcaacaacctcaaaatcaatcaatatccagaatctaatgcagagtaccttgctcatttggtgccaggagcccacgtggtaaaagcatttaacaccatctcagcctgggctctccagtcaggagcactggatgcaagtcggcaggtgtttgtgtgtggaaatgacagcaaagccaagcaaagagtgatggatattgttcgtaatcttggacttactccaatggatcaaggatcactcatggcagccaaagaaattgaaaagtaccccctgcagctatttccaatgtggaggttccccttctatttgtctgctgtgctgtgtgtcttcttgtttttctattgtgttataagagacgtaatctacccttatgtttatgaaaagaaagataatacatttcgtatggctatttccattccaaatcgtatctttccaataacagcaccttacactgcttgctttggtttacctccctggtgttattgctgccattctacaactgtaccgaggcacaaaataccgtcgattcccagactggcttgaccactggatgctttgccgaaagcagcttggcttggtagctctgggatttgccttccttcatgtcctctacacacttgtgattcctattcgatattatgtacgatggagattgggaaacttaaccgttacccaggcaatactcaagaaggagaatccatttagcacctcctcagcctggctcagtgattcatatgtggctttgggaatacttgggttttttctgtttgtactcttggggaatcacttctttgccatctgttagcaatgcagtcaactggagagagttccgatttgtccagtccaaactgggttatttgaccctgatcttgtgtacagcccacaccctggtgtacggtgggaagagattcctcagcccttcaaatctcagatggtatcttcctgcagcctacgtgttagggcttatcattccttgcactgtgctggtgatcaagtttgtcctaatcatgccatgtgtagacaacacccttacaaggatccgccagggctgggaaaggaactcaaaacactagaaaaagcattgaatggaaaatcaatatttaaaacaaagttcaatttagctggatttctgaactatggttttgaatgtttaaagaagaatgatgggtacagttaggaaagtttttttcttacaccgtgactgagggaaacattgcttgtctttgagaaattgactgacatactggaagagaacaccattttatctcaggttagtgaagaatcagtgcaggtccctgactcttattttcccagaggccatggagctgagattgagactagccttgtggtttcacactaaagagtttccttgttatgggcaacatgcatgacctaatgtcttgcaaaatccaatagaagtattgcagcttccttctctggctcaagggctgagttaagtgaaaggaaaaacagcacaatggtgaccactgataaaggctttattaggtatatctgaggaagtgggtcacatgaaatgtaaaaagggaatgaggtttttgttgttttttggaagtaaaggcaaacataaatattaccatgatgaattctagtgaaatgaccccttgactttgcttttcttaatacagatatttactgagaggaactatttttataacacaagaaaaatttacaattgattaaaagtatccatgtcttggatacatacgtatctatagagctggcatgtaattcttcctctataaagaataggtataggaaagactgaataaaaatggagggatatccccttggatttcacttgcattgtgcaataagcaaagaagggttgataaaagttcttgatcaaaaagttcaaagaaaccagaattttagacagcaagctaaataaatattgtaaaattgcactatattaggttaagtattatttaggtattataatatgctttgtaaattttatattccaaatattgctcaatatttttcatctattaaattaatttctagtgtaaataagtagcttctatatctgtcttagtctattataattgtaaggagtaaaattaaatgaatagtctgcaggtataaatttgaacaatgcatagatgatcgaaaattacggaaaatcatagggcagagaggtgtgaagattcatcattatgtgaaatttggatctttctcaaatccttgctgaaatttaggatggttctcactgtttttctgtgctgatagtaccctttccaaggtgaccttcagggggattaaccttcctagctcaagcaatgagctaaaaggagccttatgcatgatcttcccacatatcaaaataactaaaaggcactgagtttggcatttttctgcctgctctgctaagacctttttttttttttactttcattataacatattatacatgacattatacaaaaatgattaaaatatattaaaacaacatcaacaatccaggatatttttctataaaactttttaaaaataattgtatctatatattcaattttacatccttnttcaaaggctttgtttttctaaaggctttgttttcctttttattatttttttcttttttatttttttgagacagtcttgctctgtcgctcaggctggagtgcagtggcacgatctcagctcactgcaacctcctcctcccaggttcaagtgattcttgttcatcagcctcccgagtagctgggactacaggcatgtgccactatgcccagctaatttttgtacttttagtagagacagggtttcaccacattggtcaggctggtcttgaaatgctggcgtcaagtgatctgcctgcctccgcctcacaaagcactgggattacaggcatgaatctggccttacgtaatatattttcttaatggctgcataatatcacatcaaataggcatttttcaaacctctttccttattaaacatgtagactatatccattttttactaaaataaataacatttcagataatatctttgcactgataatgttgccaagccatttctaaagtgaccttatcaatttaattaccattggatgagggtgttgctttcatcgcaccattgtagattgtcttttttatttcaatttgcgtttatttataactggttgcaaaggtacacagaacacacgctccttcaacttatctttgataaacccaagcaaggatacaaaaagttggacgacattgagtagagtcatggtatacggtgctgaccctacagtatcagtggaaaagataaggaaaatgtcactactcacctatgttatgcaaaacagttaggtgtgctggggctggatactgctcttttacttgagcattggttgattaaagtttaggtaccatccaggctggtctagagaagtctttggagttaaccatgctctttttgttaaagaagagagtaatgtgtttatcctggctcatagtccgtcaccgaaaatagaaaatgccatccataggtaaaatgctgacctatagaaaaaaatgaactctacttttatagcctagtaaaaatgctctacctgagtagttaaaagcaattcatgaagcctgaagctaaagagcactctgatggttttggcataatagctgcatttccagacctgacctttggccccaaccacaagtgctccaagccccaccagctgaccaaagaaagcccaagttctccttctgtccttcccacaacctccctgctcccaaaactatgaaattaatttgaccatattaacacagctgactcctccagtttacttaaggtagaaagaatgagtttacaacagatgaaaataagtgctttgggcgaactgtattccttttaacagatccaaactattttacatttaaaaaaaaagttaaactaaacttctttactgctgatatgtttcctgtattctagaaaaatttttacactttcacattatttttgtacactttccccatgttaagggatgatggcttttataaatgtgtattcattaaatgttactttaaaaata

SEQ ID NO: 359471 - DNA, 4818 bp, Homo sapiens
  misc_feature (3060)..(3060): n is a, c, g, or t
cagcgctgagctgcaggcgcggcgaaacttccctctacccgcccggcccgcggcgcgcaccgttggcgctggacgcttcctccttggaagcgcctctccctcaggtctcaagaactgttttgagatgcaggaattcatctaattttcactgccgggcgaggtgtgagagccctagcatctgaaagtggtcgacttgcgagttgttatggagaaaacttgtatagatgcacttcctcttactatgaattcttcagaaaagcaagagactgtatgtatttttggaactggtgattttggaagatcactgggattgaaaatgctccagtgtggttattctgttgtttttggaagtcgaaacccccagaagaccaccctactgcccagtggtgcagaagtcttgagctattcagaagcagccaagaagtctgacatcataatcatagcaatccacagagagcattatgattttctcacagaattaactgaggttctcaatggaaaaatattggtagacatcagcaacaacctcaaaatcaatcaatatccagaatctaatgcagagtaccttgctcatttggtgccaggagcccacgtggtaaaagcatttaacaccatctcagcctgggctctccagtcaggagcactggatgcaagtcggcaggtgtttgtgtgtggaaatgacagcaaagccaagcaaagagtgatggatattgttcgtaatcttggacttactccaatggatcaaggatcactcatggcagccaaagaaattgaaaagtaccccctgcagctatttccaatgtggaggttccccttctatttgtctgctgtgctgtgtgtcttcttgtttttctattgtgttataagagacgtaatctacccttatgtttatgaaaagaaagataatacatttcgtatggctatttccattccaaatcgtatctttccaataacagcaccttacactgcttgctttggtttacctccctggtgttattgctgccattctacaactgtaccgaggcacaaaataccgtcgattcccagactggcttgaccactggatgctttgccgaaagcagcttggcttggtagctctgggatttgccttccttcatgtcctctacacacttgtgattcctattcgatattatgtacgatggagattgggaaacttaaccgttacccaggcaatactcaagaaggagaatccatttagcacctcctcagcctggctcagtgattcatatgtggctttgggaatacttgggttttttctgtttgtactcttggggaatcacttctttgccatctgttagcaatgcagtcaactggagagagttccgatttgtccagtccaaactgggttatttgaccctgatcttgtgtacagcccacaccctggtgtacggtgggaagagattcctcagcccttcaaatctcagatggtatcttcctgcagcctacgtgttagggcttatcattccttgcactgtgctggtgatcaagtttgtcctaatcatgccatgtgtagacaacacccttacaaggatccgccagggctgggaaaggaactcaaaacactagaaaaagcattgaatggaaaatcaatatttaaaacaaagttcaatttagctggatttctgaactatggttttgaatgtttaaagaagaatgatgggtacagttaggaaagtttttttcttacaccgtgactgagggaaacattgcttgtctttgagaaattgactgacatactggaagagaacaccattttatctcaggttagtgaagaatcagtgcaggtccctgactcttattttcccagaggccatggagctgagattgagactagccttgtggtttcacactaaagagtttccttgttatgggcaacatgcatgacctaatgtcttgcaaaatccaatagaagtattgcagcttccttctctggctcaagggctgagttaagtgaaaggaaaaacagcacaatggtgaccactgataaaggctttattaggtatatctgaggaagtgggtcacatgaaatgtaaaaagggaatgaggtttttgttgttttttggaagtaaaggcaaacataaatattaccatgatgaattctagtgaaatgaccccttgactttgcttttcttaatacagatatttactgagaggaactatttttataacacaagaaaaatttacaattgattaaaagtatccatgtcttggatacatacgtatctatagagctggcatgtaattcttcctctataaagaataggtataggaaagactgaataaaaatggagggatatccccttggatttcacttgcattgtgcaataagcaaagaagggttgataaaagttcttgatcaaaaagttcaaagaaaccagaattttagacagcaagctaaataaatattgtaaaattgcactatattaggttaagtattatttaggtattataatatgctttgtaaattttatattccaaatattgctcaatatttttcatctattaaattaatttctagtgtaaataagtagcttctatatctgtcttagtctattataattgtaaggagtaaaattaaatgaatagtctgcaggtataaatttgaacaatgcatagatgatcgaaaattacggaaaatcatagggcagagaggtgtgaagattcatcattatgtgaaatttggatctttctcaaatccttgctgaaatttaggatggttctcactgtttttctgtgctgatagtaccctttccaaggtgaccttcagggggattaaccttcctagctcaagcaatgagctaaaaggagccttatgcatgatcttcccacatatcaaaataactaaaaggcactgagtttggcatttttctgcctgctctgctaagacctttttttttttttactttcattataacatattatacatgacattatacaaaaatgattaaaatatattaaaacaacatcaacaatccaggatatttttctataaaactttttaaaaataattgtatctatatattcaattttacatccttnttcaaaggctttgtttttctaaaggctttgttttcctttttattatttttttcttttttatttttttgagacagtcttgctctgtcgctcaggctggagtgcagtggcacgatctcagctcactgcaacctcctcctcccaggttcaagtgattcttgttcatcagcctcccgagtagctgggactacaggcatgtgccactatgcccagctaatttttgtacttttagtagagacagggtttcaccacattggtcaggctggtcttgaaatgctggcgtcaagtgatctgcctgcctccgcctcacaaagcactgggattacaggcatgaatctggccttacgtaatatattttcttaatggctgcataatatcacatcaaataggcatttttcaaacctctttccttattaaacatgtagactatatccattttttactaaaataaataacatttcagataatatctttgcactgataatgttgccaagccatttctaaagtgaccttatcaatttaattaccattggatgagggtgttgctttcatcgcaccattgtagattgtcttttttatttcaatttgcgtttatttataactggttgcaaaggtacacagaacacacgctccttcaacttatctttgataaacccaagcaaggatacaaaaagttggacgacattgagtagagtcatggtatacggtgctgaccctacagtatcagtggaaaagataaggaaaatgtcactactcacctatgttatgcaaaacagttaggtgtgctggggctggatactgctcttttacttgagcattggttgattaaagtttaggtaccatccaggctggtctagagaagtctttggagttaaccatgctctttttgttaaagaagagagtaatgtgtttatcctggctcatagtccgtcaccgaaaatagaaaatgccatccataggtaaaatgctgacctatagaaaaaaatgaactctacttttatagcctagtaaaaatgctctacctgagtagttaaaagcaattcatgaagcctgaagctaaagagcactctgatggttttggcataatagctgcatttccagacctgacctttggccccaaccacaagtgctccaagccccaccagctgaccaaagaaagcccaagttctccttctgtccttcccacaacctccctgctcccaaaactatgaaattaatttgaccatattaacacagctgactcctccagtttacttaaggtagaaagaatgagtttacaacagatgaaaataagtgctttgggcgaactgtattccttttaacagatccaaactattttacatttaaaaaaaaagttaaactaaacttctttactgctgatatgtttcctgtattctagaaaaatttttacactttcacattatttttgtacactttccccatgttaagggatgatggcttttataaatgtgtattcattaaatgttactttaaaaataaaaaacacacacacacacacacaaaaaacaacacccgtgcggcgcccacgggccccagaaaagcctcaacacacatcgtgaggacgcggaccaaaaatgaaacaacgacaaacgtgaccacacggcgggatcccccagagaaacccgagggcagccagcaagacgcatgaagtatcccccccagtaaaaaacagcccgggggagaccacgaggctttagaacaactccagggagatgtaaggcgcagcacagaggacatccc

SEQ ID NO: 359472 - DNA, 2732 bp, Homo sapiens
  misc_feature (2220)..(2220): n is a, c, g, or t
ctgcgtacgcgcacttccggtctttgtggcttgcagctcggggtgggtggctcatttcctggccgctcctgggcttcgcggaaagaagagattactcacactccttctcaagcacagaaccagttgtactgagctttttgctaagctgtttcagccaagaatggctgtggaatctggagtgatttcaaccctgatacctcaggatcctccggaacaagaactaatactagtgaaagtagaagataacttttcctgggatgagaaatttaagcagaatgggagtactcaatcctgccaagaattgtttcgtcagcaattcagaaaattttgctaccaggagacacctgggccccgggaggctctgagccgactccaggaactttgctatcagtggctaatgccagagttgcacacaaaggagcagatcttagaactgctggtactggagcagttcctgagcattctgcctgaggagctgcagatctgggttcagcaacataatccagaaagcggcgaggaagctgtgaccctgttggaggatttagagagggagtttgatgacccagggcagcaggtcccagctagtccacagggaccagcagtgccatggaaggatttaacatgtctcagagcatcccaagagtcaacagacatccacctccagcccttaaagacacagctgaaatcctggaaaccatgcctttcccctaaaagtgagttgtccagacctcccaaagcttcttcagctatccgttgggaatgtgtttctccaggaagttttcccggcgatatcatagctgctgaggctacacattcaacaatttcttgctttgccatcaacactttgccagccaccatcctgccatctaaaaatgtgaatagaaagtatttttcctgaagaacacatcgtcaataaatcacctgcacccaaatctccatctcaggcgctacttctggcaaggcatatcatgaggctagtgaagcacctacaagaaacttataactcaaggttgtaaaaatggcatggtgactcttacaatcatatcacagtgggcctctccaacaatttaaacctcatgacctaggtgaaagctgtgaaaggatccacattaattcttcagaggcagggctaagactttcaagactgaaaagagactagcataaggagacttaacaggaacccagtcaaggccattcatggccatgggaccacgcataaatggagaacgagtaaattttgctaagtccaaggacattggagagatagagtcactattactgatatggtgactgagtcaacaacatactgccactatgaagtaataagaaaataaaaagttaaaaaatgtaacagataacagttggagggtgaatatattttaaatcaatcagaaaaaaaaaagagtattttattttgtcttgatccccaaacttcagatgaatgtggagaaactgaagcatgtccagagaaaagtggcaagatatccaaacagacagaacacagatgggatcagagggagtgagaggcttagttaaaacaaggtcaggaggctgggcacggtggctcatgcctgtaattccagcactttgggaggccgaggcgggtggataacaaggtcaggagtttgagaacagcctggccaatatggtgaaaccccatctctgctaaaaatacaaaaattagccaggcgtggtggcgggtgcctgtagtcccagctactcgggaggctgaggcaggagaatcacttgaacccaggagttggaggttgtagtgagccaagatcacaccactgcactctagcttgggcgacagagccagactccatctcaaaaaaaaaaaaaaaaaaaaaaaaaaaaaaaaggtcaaagtgcagtgtactcactgcattcaagtatagattgtgttttatgaggactctgtaaactaaagaaagtggattatgaataaattaaagttgggagtatttcatatggacataaggaagaattttaatatagtatgtttactagggtttccacaacaaaataccacagaatgggtggtaaacaacagaaatctcttttctcacaattctagagactagaagtccaagatcaatgtgtcagcaggtttggtttcttctctctccttggcttgcagatgatggccaccttcttttcttgttgttgttgagatagtctcactctgtcatccaggctggagtgcagtggcgcaatctnagctcactgcaacctccaccttctgggctcaggtgaccctcctgtctcagcctcccaagtagctggggctacaggcatgcaccaccatccctggctaatttttgtatttttagtaaagacagggtttcacagtggtcttgaactcctgacctcaagtaatctgcctgcctcaacctcttaaagcgctggcattacaggcataagccactgcacccggccacagatggccactttcttgctaggtcctcacaagatcatcccttggtctgtgttgtgtcctaatctcctcttcttttaaggacatcaattattttggattaaggccaaccctaatgaccccattttaacctttataaaggccctatctctaaaaaaatgcagtcatactctaaggttctggctgggggttacagcttcaacatatgaattttgaagggacacaactcatcccataacaaataacaatatgaaaagcccaagaaacacttaccacagtctctgttccttaagat

SEQ ID NO: 359473 - DNA, 1450 bp, Homo sapiens
ctgcgtacgcgcacttccggtctttgtggcttgcagctcggggtgggtggctcatttcctggccgctcctgggcttcgcggaaagaagagattactcacactccttctcaagcacagaaccagttgtactgagctttttgctaagctgtttcagccaagaatggctgtggaatctggagtgatttcaaccctgatacctcaggatcctccggaacaagaactaatactagtgaaagtagaagataacttttcctgggatgagaaatttaagcagaatgggagtactcaatcctgccaagaattgtttcgtcagcaattcagaaaattttgctaccaggagacacctgggccccgggaggctctgagccgactccaggaactttgctatcagtggctaatgccagagttgcacacaaaggagcagatcttagaactgctggtactggagcagttcctgagcattctgcctgaggagctgcagatctgggttcagcaacataatccagaaagcggcgaggaagctgtgaccctgttggaggatttagagagggagtttgatgacccagggcagcaggtcccagctagtccacagggaccagcagtgccatggaaggatttaacatgtctcagagcatcccaagagtcaacagacatccacctccagcccttaaagacacagctgaaatcctggaaaccatgcctttcccctaaaagtgattgtgagaacagtgaaacagcaacaaaagagggcatctcagaagaaaaatcacagggactccctcaggaaccttcatttcgaggaattagtgagcagttgtccagacctcccaaagcttcttcagctatccgttgggaatgtgtttctccaggaagttttcccggcgatatcatagctgctgaggctacacattcaacaatttcttgctttgccatcaacactttgccagccaccatcctgccatctaaaaatgtgaatagaaagtatttttcctgaagaacacatcgtcaataaatcacctgcacccaaatctccatctcaggcgctacttctggcaaggcatatcatgaggctagtgaagcacctacaagaaacttataactcaaggttgtaaaaatggcatggtgactcttacaatcatatcacagtgggcctctccaacaatttaaacctcatgacctaggtgaaagctgtgaaaggatccacattaattcttcagaggcagggctaagactttcaagactgaaaagagactagcataaggagacttaacaggaacccagtcaaggccattcatggccatgggaccacgcataaatggagaacgagtaaattttgctaagtccaaggacattggagagatagagtcactattactgatatggtgactgagtcaacaacatactgccactatgaagtaataagaaaataaaaagttaaaaaatgtaacag

SEQ ID NO: 359474 - DNA, 753 bp, Homo sapiens
ctgcgtacgcgcacttccggtctttgtggcttgcagctcggggtgggtggctcatttcctggccgctcctgggcttcgcggaaagaagagattactcacactccttctcaagcacagaaccagttgtactgagctttttgctaagctgtttcagccaagaatggctgtggaatctggagtgatttcaaccctgatacctcaggatcctccggaacaagaactaatactagtgaaagtagaagataacttttcctgggatgagaaatttaagcagaatgggagtactcaatcctgccaagaattgtttcgtcagcaattcagaaaattttgctaccaggagacacctgggccccgggaggctctgagccgactccaggaactttgctatcagtggctaatgccagagttgcacacaaaggagcagatcttagaactgctggtactggagcagttcctgagcattctgcctgaggagctgcagatctgggttcagcaacataatccagaaagcggcgaggaagctgtgaccctgttggaggatttagagagggagtttgatgacccagggcagcagcaactttccaagtagtccacagggaaccgcagttgccatgcgaggtattaaccatgttctagagccatcccaaggagttaacatgacctttaacctttaagccctttcaagggcaccaggtttgaaattccttggccattgccctttactcttgcggggttgtctccgctctcccccct

SEQ ID NO: 359475 - DNA, 394 bp, Homo sapiens
aggtggtcatggcaggtccacaggtctaagcttggtccttctcagcaattagtgttgaagattccagtctggtgcatacagccacctccactaaagggaagagagagtcctaattctggtgaacacaggacgtgtttgtgtttaagaggctccttcttgctctcattcccattgtcttccaacaacaactaaatctcagatgccccctcactttggttaactgcagccccagagactgtctcttttagtttcccgacactttttggctcagaaaatagaaactgagaacaccagttccctatcttcttcccacaacctcttccccatcgtcctagcattatctctgttcatgttattgtgttccgtattcctgaatgaataatttcaaagcaaa

SEQ ID NO: 359476 - DNA, 2170 bp, Homo sapiens
ctgcgtacgcgcacttccggtctttgtggcttgcagctcggggtgggtggctcatttcctggccgctcctgggcttcgcggaaagaagagattactcacactccttctcaagcacagaaccagttgtactgagctttttgctaagctgtttcagccaagaatggctgtggaatctggagtgatttcaaccctgatacctcaggatcctccggaacaagaactaatactagtgaaagtagaagataacttttcctgggatgagaaatttaagcagaatgggagtactcaatcctgccaagaattgtttcgtcagcaattcagaaaattttgctaccaggagacacctgggccccgggaggctctgagccgactccaggaactttgctatcagtggctaatgccagagttgcacacaaaggagcagatcttagaactgctggtactggagcagttcctgagcattctgcctgaggagctgcagatctgggttcagcaacataatccagaaagcggcgaggaagctgtgaccctgttggaggatttagagagggagtttgatgacccagggcagcaggtcccagctagtccacagggaccagcagtgccatggaaggatttaacatgtctcagagcatcccaagagtcaacagacatccacctccagcccttaaagacacagctgaaatcctggaaaccatgcctttcccctaaaagtgattgtgagaacagtgaaacagcaacaaaagagggcatctcagaagaaaaatcacagggactccctcaggaaccttcatttcgaggaattagtgagcatgaaagcaatttagtgtggaagcaaggaagtgctacaggggagaaactaagatctccttcccaagggggcagttttagtcaagtgatcttcacaaacaaatctctaggaaagagagacctttatgatgaggctgaaagatgcttgattctaactacagactctataatgtgtcagaaagttcctccagaagagagaccttatagatgtgatgtatgtgggcacagcttcaagcagcattcctctctaacacaacatcagagaatccatactggagaaaagccctataaatgtaaccagtgtgggaaggcctttagtttgaggtcctatcttattattcatcagagaattcatagtggtgagaaagcatatgaatgtagtgaatgtgggaaagctttcaatcagagctcagccctcattagacatcggaaaatccatactggtgagaaagcttgtaaatgtaatgagtgtggcaaagcattcagtcaaagttcatatctcattatacatcaaagaattcacactggtgagaaaccttatgagtgtaatgaatgtgggaaaacctttagccagagctcaaaactcattagacatcagcgaattcacacaggagagagaccctatgaatgtaatgaatgtggaaaagctttcaggcagagctcagagctgattactcatcagagaatacatagtggagagaaaccctatgaatgtagtgaatgtggaaaagctttcagtttgagctcaaaccttatcagacatcagagaattcatagtggggaggaaccttatcagtgtaatgaatgtggcaaaactttcaaaaggagctcagcccttgttcagcatcagagaattcattctggggatgaagcttatatatgtaatgaatgtgggaaggctttcaggcacagatcggtccttatgcgccatcaaagagtccacactataaagtaatttgtgaatactgtgaatagtgtaaatacttcagtcagatttttaagtttgttagtcaaaagagtttactttggagcaaaactccataaaggttataaaatactaggtcttgagtctagcttgctttgtgcagcatttcccagtgctaatgtaaagtgtcccttgaaagcttttcctgtgactaatcagaacagaatacagaagaatcattacttccagctcttctcttattaggaatactcaggaaatacgaaaagtgggaatgtaacattgaaacctcattttgtatgaaagtgtcatgaatatagcaacccaggctctgtcactgcatctgattgttagtgtgccaggttatggggctggtgtggactgtgtgaggcacttcgtctcaggaactaaaaaaaa

SEQ ID NO: 359477 - DNA, 2767 bp, Homo sapiens
ctgcgtacgcgcacttccggtctttgtggcttgcagctcggggtgggtggctcatttcctggccgctcctgggcttcgcggtgagggacgtgggcccctaggaagagggaggtggggttgggagcgcgcgccggacagtggaggagctccgctcctcggcctgcccatccccaggtcgcggccctttggcccgcgcggcgtctccaagcgactggggaactcagaggaggccagcactcaaactcctgctttccaaaggaaaacgcagttccgctgaccccgtgacttcgtaaatgctgcggtttaaccaaggatataaaaatagaagggctagttagttagttagttagtgcggccggactggttaaaccttaaatttgtaggctaaatattttaattcatctcttaacgttaaccgtagtgtgaggaatgaattttactcatctgtcctgacaaactaagggcatacattcctatcgatatctcgccatcctaaaagcaggtcaagtttggtctgtgtcacaacatttaatacctatttgttaccatattttgcttttgaacatttttagtcttgggatattctaagctttttcagaactgatacggatctctttgctgcttttgtgtatgtgatacctatcatgtttttgaacacatggaaagaagagattactcacactccttctcaagcacagaaccagttgtactgagctttttgctaagctgtttcagccaagaatggctgtggaatctggagtgatttcaaccctgatacctcaggatcctccggaacaagaactaatactagtgaaagtagaagataacttttcctgggatgagaaatttaagcagaatgggagtactcaatcctgccaagaattgtttcgtcagcaattcagagaactttgctatcagtggctaatgccagagttgcacacaaaggagcagatcttagaactgctggtactggagcagttcctgagcattctgcctgaggagctgcagatctgggttcagcaacataatccagaaagcggcgaggaagctgtgaccctgttggaggatttagagagggagtttgatgacccagggcagcagggtgggaaccggagaaaagtgatgtgggaaaaggaatttacagcctggagcatgtaatggtatcataacagtcccagctagtccacagggaccagcagtgccatggaaggatttaacatgtctcagagcatcccaagagtcaacagacatccacctccagcccttaaagacacagctgaaatcctggaaaccatgcctttcccctaaaagtgattgtgagaacagtgaaacagcaacaaaagagggcatctcagaagaaaaatcacagggactccctcaggaaccttcatttcgaggaattagtgagcatgaaagcaatttagtgtggaagcaaggaagtgctacaggggagaaactaagatctccttcccaagggggcagttttagtcaagtgatcttcacaaacaaatctctaggaaagagagacctttatgatgaggctgaaagatgcttgattctaactacagactctataatgtgtcagaaagttcctccagaagagagaccttatagatgtgatgtatgtgggcacagcttcaagcagcattcctctctaacacaacatcagagaatccatactggagaaaagccctataaatgtaaccagtgtgggaaggcctttagtttgaggtcctatcttattattcatcagagaattcatagtggtgagaaagcatatgaatgtagtgaatgtgggaaagctttcaatcagagctcagccctcattagacatcggaaaatccatactggtgagaaagcttgtaaatgtaatgagtgtggcaaagcattcagtcaaagttcatatctcattatacatcaaagaattcacactggtgagaaaccttatgagtgtaatgaatgtgggaaaacctttagccagagctcaaaactcattagacatcagcgaattcacacaggagagagaccctatgaatgtaatgaatgtggaaaagctttcaggcagagctcagagctgattactcatcagagaatacatagtggagagaaaccctatgaatgtagtgaatgtggaaaagctttcagtttgagctcaaaccttatcagacatcagagaattcatagtggggaggaaccttatcagtgtaatgaatgtggcaaaactttcaaaaggagctcagcccttgttcagcatcagagaattcattctggggatgaagcttatatatgtaatgaatgtgggaaggctttcaggcacagatcggtccttatgcgccatcaaagagtccacactataaagtaatttgtgaatactgtgaatagtgtaaatacttcagtcagatttttaagtttgttagtcaaaagagtttactttggagcaaaactccataaaggttataaaatactaggtcttgagtctagcttgctttgtgcagcatttcccagtgctaatgtaaagtgtcccttgaaagcttttcctgtgactaatcagaacagaatacagaagaatcattacttccagctcttctcttattaggaatactcaggaaatacgaaaagtgggaatgtaacattgaaacctcattttgtatgaaagtgtcatgaatatagcaacccaggctctgtcactgcatctgattgttagtgtgccaggttatggggctggtgtggactgtgtgaggcacttcgtctcaggaactaaaaaaaa

SEQ ID NO: 359478 - DNA, 1979 bp, Homo sapiens
ctgcgtacgcgcacttccggtctttgtggcttgcagctcggggtgggtggctcatttcctggccgctcctgggcttcgcggaaagaagagattactcacactccttctcaagcacagaaccagttgtactgagctttttgctaagctgtttcagccaagaatggctgtggaatctggagtgatttcaaccctgatacctcaggatcctccggaacaagaactaatactagtgaaagtagaagataacttttcctgggatgagaaatttaagcagaatgggagtactcaatcctgccaagaattgtttcgtcagcaattcagaaaattttgctaccaggagacacctgggccccgggaggctctgagccgactccaggaactttgctatcagtggctaatgccagagttgcacacaaaggagcagatcttagaactgctggtactggagcagttcctgagcattctgcctgaggagctgcagatctgggttcagcaacataatccagaaagcggcgaggaagctgtgaccctgttggaggatttagagagggagtttgatgacccagggcagcaggtcccagctagtccacagggaccagcagtgccatggaaggatttaacatgtctcagagcatcccaagagtcaacagacatccacctccagcccttaaagacacagctgaaatcctggaaaccatgcctttcccctaaaagtgattgtgagaacagtgaaacagcaacaaaagagggcatctcagaagaaaaatcacagggactccctcaggaaccttcatttcgaggaattagtgagcagttgtccagacctcccaaagcttcttcagctatccgttgggaatgtgtttctccaggaagttttcccggcgatatcatagctgctgaggctacacattcaacaatttcttgctttgccatcaacactttgccagccaccatcctgccatctaaaaatgtgaatagaaagtatttttcctgaagaacacatcgtcaataaatcacctgcacccaaatctccatctcaggcgctacttctggcaaggcatatcatgaggctagtgaagcacctacaagaaacttataactcaaggttgtaaaaatggcatggtgactcttacaatcatatcacagtgggcctctccaacaatttaaacctcatgacctaggtgaaagctgtgaaaggatccacattaattcttcagaggcagggctaagactttcaagactgaaaagagactagcataaggagacttaacaggaacccagtcaaggccattcatggccatgggaccacgcataaatggagaacgagtaaattttgctaagtccaaggacattggagagatagagtcactattactgatatggtgactgagtcaacaacatactgccactatgaagtaataagaaaataaaaagttaaaaaatgtaacagataacagttggagggtgaatatattttaaatcaatcagaaaaaaaaaagagtattttattttgtcttgatccccaaacttcagatgaatgtggagaaactgaagcatgtccagagaaaagtggcaagatatccaaacagacagaacacagatgggatcagagggagtgagaggcttagttaaaacaaggtcaggaggctgggcacggtggctcatgcctgtaattccagcactttgggaggccgaggcgggtggataacaaggtcaggagtttgagaacagcctggccaatatggtgaaaccccatctctgctaaaaatacaaaaattagccaggcgtggtggcgggtgcctgtagtcccagctactcgggaggctgaggcaggagaatcacttgaacccaggagttggaggttgtagtgagccaagatcacaccactgcactctagcttgggcgacagagccagactccatctcaaaaaaaaaaaaaaaaaaaaaaaagtcgacgcggccgcgaatttagtactagta

SEQ ID NO: 359479 - DNA, 2136 bp, Homo sapiens
  misc_feature (1624)..(1624): n is a, c, g, or t
attcaaggacactgtgttctgtggggattcttctgttgaaggttgccagactgaaatgtctgtcctgggaaggaagctgactgattttgttccctgcagcatttcccttttgcttcttagagttgtccagacctcccaaagcttcttcagctatccgttgggaatgtgtttctccaggaagttttcccggcgatatcatagctgctgaggctacacattcaacaatttcttgctttgccatcaacactttgccagccaccatcctgccatctaaaaatgtgaatagaaagtatttttcctgaagaacacatcgtcaataaatcacctgcacccaaatctccatctcaggcgctacttctggcaaggcatatcatgaggctagtgaagcacctacaagaaacttataactcaaggttgtaaaaatggcatggtgactcttacaatcatatcacagtgggcctctccaacaatttaaacctcatgacctaggtgaaagctgtgaaaggatccacattaattcttcagaggcagggctaagactttcaagactgaaaagagactagcataaggagacttaacaggaacccagtcaaggccattcatggccatgggaccacgcataaatggagaacgagtaaattttgctaagtccaaggacattggagagatagagtcactattactgatatggtgactgagtcaacaacatactgccactatgaagtaataagaaaataaaaagttaaaaaatgtaacagataacagttggagggtgaatatattttaaatcaatcagaaaaaaaaaagagtattttattttgtcttgatccccaaacttcagatgaatgtggagaaactgaagcatgtccagagaaaagtggcaagatatccaaacagacagaacacagatgggatcagagggagtgagaggcttagttaaaacaaggtcaggaggctgggcacggtggctcatgcctgtaattccagcactttgggaggccgaggcgggtggataacaaggtcaggagtttgagaacagcctggccaatatggtgaaaccccatctctgctaaaaatacaaaaattagccaggcgtggtggcgggtgcctgtagtcccagctactcgggaggctgaggcaggagaatcacttgaacccaggagttggaggttgtagtgagccaagatcacaccactgcactctagcttgggcgacagagccagactccatctcaaaaaaaaaaaaaaaaaaaaaaaaaaaaaaaaggtcaaagtgcagtgtactcactgcattcaagtatagattgtgttttatgaggactctgtaaactaaagaaagtggattatgaataaattaaagttgggagtatttcatatggacataaggaagaattttaatatagtatgtttactagggtttccacaacaaaataccacagaatgggtggtaaacaacagaaatctcttttctcacaattctagagactagaagtccaagatcaatgtgtcagcaggtttggtttcttctctctccttggcttgcagatgatggccaccttcttttcttgttgttgttgagatagtctcactctgtcatccaggctggagtgcagtggcgcaatctnagctcactgcaacctccaccttctgggctcaggtgaccctcctgtctcagcctcccaagtagctggggctacaggcatgcaccaccatccctggctaatttttgtatttttagtaaagacagggtttcacagtggtcttgaactcctgacctcaagtaatctgcctgcctcaacctcttaaagcgctggcattacaggcataagccactgcacccggccacagatggccactttcttgctaggtcctcacaagatcatcccttggtctgtgttgtgtcctaatctcctcttcttttaaggacatcaattattttggattaaggccaaccctaatgaccccattttaacctttataaaggccctatctctaaaaaaatgcagtcatactctaaggttctggctgggggttacagcttcaacatatgaattttgaagggacacaactcatcccataacaaataacaatatgaaaagcccaagaaacacttaccacagtctctgttccttaagat

SEQ ID NO: 359480 - DNA, 1533 bp, Homo sapiens
ctgcgtacgcgcacttccggtctttgtggcttgcagctcggggtgggtggctcatttcctggccgctcctgggcttcgcggtgagggacgtgggcccctaggaagagggaggtggggttgggagcgcgcgccggacagtggaggagctccgctcctcggcctgcccatccccaggtcgcggccctttggcccgcgcggcgtctccaagcgactggggaactcagaggaggccagcactcaaactcctgctttccaaaggaaaacgcagttccgctgaccccgtgacttcgtaaatgctgcggtttaaccaaggatataaaaatagaagggctagttagttagttagttagtgcggccggactggttaaaccttaaatttgtaggctaaatattttaattcatctcttaacgttaaccgtagtgtgaggaatgaattttactcatctgtcctgacaaactaagggcatacattcctatcgatatctcgccatcctaaaagcaggtcaagtttggtctgtgtcacaacatttaatacctatttgttaccatattttgcttttgaacatttttagtcttgggatattctaagctttttcagaactgatacggatctctttgctgcttttgtgtatgtgatacctatcatgtttttgaacacatggaaagaagagattactcacactccttctcaagcacagaaccagttgtactgagctttttgctaagctgtttcagccaagaatggctgtggaatctggagtgatttcaaccctgatacctcaggatcctccggaacaagaactaatactagtgaaagtagaagataacttttcctgggatgagaaatttaagcagaatgggagtactcaatcctgccaagaattgtttcgtcagcaattcagagaactttgctatcagtggctaatgccagagttgcacacaaaggagcagatcttagaactgctggtactggagcagttcctgagcattctgcctgaggagctgcagatctgggttcagcaacataatccagaaagcggcgaggaagctgtgaccctgttggaggatttagagagggagtttgatgacccagggcagcaggtcccagctagtccacagggaccagcagtgccatggaaggatttaacatgtctcagagcatcccaagagtcaacagacatccacctccagcccttaaagacacagctgaaatcctggaaaccatgcctttcccctaaaagtggtgaggaatgggaaatcatctggaaactcttgacacttaggcctctgtttttgagaatgcagaattaattgcacttgacaaacttgccacatgtgagcatcacctttattattctaaaccagaggtgctcgctttagcgggctttgtattcaccccttcatgaattggtgtcagccctccctgtgtgagtttccctgttattcattcattcatttcattatgttgtaactttataaagcgtcaatacatgtctggtactgtggtaggccccaggagaggtttcaggtcta

SEQ ID NO: 359481 - DNA, 1276 bp, Homo sapiens
ctgcgtacgcgcacttccggtctttgtggcttgcagctcggggtgggtggctcatttcctggccgctcctgggcttcgcggaaagaagagattactcacactccttctcaagcacagaaccagttgtactgagctttttgctaagctgtttcagccaagaatggctgtggaatctggagtgatttcaaccctgatacctcaggatcctccggaacaagaactaatactagtgaaagtagaagataacttttcctgggatgagaaatttaagcagaatgggagtactcaatcctgccaagaattgtttcgtcagcaattcagaaaattttgctaccaggagacacctgggccccgggaggctctgagccgactccaggaactttgctatcagtggctaatgccagagttgcacacaaaggagcagatcttagaactgctggtactggagcagttcctgagcattctgcctgaggagctgcagatctgggttcagcaacataatccagaaagcggcgaggaagctgtgaccctgttggaggatttagagagggagtttgatgacccagggcagcagggtgggaaccggagaaaagtgatgtgggaaaaggaatttacagcctggagcatgtaatggtatcataacagtaggataaaaatttttatgtctctacttgaaccctaacctgaagtgactaatagagccatacttgtctatacccttgaatggtctttttcccctgtccttcatccctggagatgtcatcattgacctctttgagatttttactaagcaagttttcttagggattttctcacaaagctaaccatattttactgatttcaggtcccagctagtccacagggaccagcagtgccatggaaggatttaacatgtctcagagcatcccaagagtcaacagacatccacctccagcccttaaagacacagctgaaatcctggaaaccatgcctttcccctaaaagtggtgaggaatgggaaatcatctggaaactcttgacacttaggcctctgtttttgagaatgcagaattaattgcacttgacaaacttgccacatgtgagcatcacctttattattctaaaccagaggtgctcgctttagcgggctttgtattcaccccttcatgaattggtgtcagccctccctgtgtgagtttccctgttattcattcattcatttcattatgttgtaactttataaagcgtcaatacatgtctggtactgtggtaggccccaggagaggtttcaggtcta

SEQ ID NO: 359482 - DNA, 1006 bp, Homo sapiens
ctgcgtacgcgcacttccggtctttgtggcttgcagctcggggtgggtggctcatttcctggccgctcctgggcttcgcggaaagaagagattactcacactccttctcaagcacagaaccagttgtactgagctttttgctaagctgtttcagccaagaatggctgtggaatctggagtgatttcaaccctgatacctcaggatcctccggaacaagaactaatactagtgaaagtagaagataacttttcctgggatgagaaatttaagcagaatgggagtactcaatcctgccaagaattgtttcgtcagcaattcagaaaattttgctaccaggagacacctgggccccgggaggctctgagccgactccaggaactttgctatcagtggctaatgccagagttgcacacaaaggagcagatcttagaactgctggtactggagcagttcctgagcattctgcctgaggagctgcagatctgggttcagcaacataatccagaaagcggcgaggaagctgtgaccctgttggaggatttagagagggagtttgatgacccagggcagcaggtcccagctagtccacagggaccagcagtgccatggaaggatttaacatgtctcagagcatcccaagagtcaacagacatccacctccagcccttaaagacacagctgaaatcctggaaaccatgcctttcccctaaaagtggtgaggaatgggaaatcatctggaaactcttgacacttaggcctctgtttttgagaatgcagaattaattgcacttgacaaacttgccacatgtgagcatcacctttattattctaaaccagaggtgctcgctttagcgggctttgtattcaccccttcatgaattggtgtcagccctccctgtgtgagtttccctgttattcattcattcatttcattatgttgtaactttataaagcgtcaatacatgtctggtactgtggtaggccccaggagaggtttcaggtcta

SEQ ID NO: 359483 - DNA, 2123 bp, Homo sapiens
ctgcgtacgcgcacttccggtctttgtggcttgcagctcggggtgggtggctcatttcctggccgctcctgggcttcgcggaaagaagagattactcacactccttctcaagcacagaaccagttgtactgagctttttgctaagctgtttcagccaagaatggctgtggaatctggagtgatttcaaccctgatacctcaggatcctccggaacaagaactaatactagtgaaagtagaagataacttttcctgggatgagaaatttaagcagaatgggagtactcaatcctgccaagaattgtttcgtcagcaattcagaaaattttgctaccaggagacacctgggccccgggaggctctgagccgactccaggaactttgctatcagtggctaatgccagagttgcacacaaaggagcagatcttagaactgctggtactggagcagttcctgagcattctgcctgaggagctgcagatctgggttcagcaacataatccagaaagcggcgaggaagctgtgaccctgttggaggatttagagagggagtttgatgacccagggcagcaggtcccagctagtccacagggaccagcagtgccatggaaggatttaacatgtctcagagcatcccaagagtcaacagacatccacctccagcccttaaagacacagctgaaatcctggaaaccatgcctttcccctaaaagtgattgtgagaacagtgaaacagcaacaaaagagggcatctcagaagaaaaatgaaagcaatttagtgtggaagcaaggaagtgctacaggggagaaactaagatctccttcccaagggggcagttttagtcaagtgatcttcacaaacaaatctctaggaaagagagacctttatgatgaggctgaaagatgcttgattctaactacagactctataatgtgtcagaaagttcctccagaagagagaccttatagatgtgatgtatgtgggcacagcttcaagcagcattcctctctaacacaacatcagagaatccatactggagaaaagccctataaatgtaaccagtgtgggaaggcctttagtttgaggtcctatcttattattcatcagagaattcatagtggtgagaaagcatatgaatgtagtgaatgtgggaaagctttcaatcagagctcagccctcattagacatcggaaaatccatactggtgagaaagcttgtaaatgtaatgagtgtggcaaagcattcagtcaaagttcatatctcattatacatcaaagaattcacactggtgagaaaccttatgagtgtaatgaatgtgggaaaacctttagccagagctcaaaactcattagacatcagcgaattcacacaggagagagaccctatgaatgtaatgaatgtggaaaagctttcaggcagagctcagagctgattactcatcagagaatacatagtggagagaaaccctatgaatgtagtgaatgtggaaaagctttcagtttgagctcaaaccttatcagacatcagagaattcatagtggggaggaaccttatcagtgtaatgaatgtggcaaaactttcaaaaggagctcagcccttgttcagcatcagagaattcattctggggatgaagcttatatatgtaatgaatgtgggaaggctttcaggcacagatcggtccttatgcgccatcaaagagtccacactataaagtaatttgtgaatactgtgaatagtgtaaatacttcagtcagatttttaagtttgttagtcaaaagagtttactttggagcaaaactccataaaggttataaaatactaggtcttgagtctagcttgctttgtgcagcatttcccagtgctaatgtaaagtgtcccttgaaagcttttcctgtgactaatcagaacagaatacagaagaatcattacttccagctcttctcttattaggaatactcaggaaatacgaaaagtgggaatgtaacattgaaacctcattttgtatgaaagtgtcatgaatatagcaacccaggctctgtcactgcatctgattgttagtgtgccaggttatggggctggtgtggactgtgtgaggcacttcgtctcaggaactaaaaaaaa

SEQ ID NO: 359484 - DNA, 2440 bp, Homo sapiens
ctgcgtacgcgcacttccggtctttgtggcttgcagctcggggtgggtggctcatttcctggccgctcctgggcttcgcggaaagaagagattactcacactccttctcaagcacagaaccagttgtactgagctttttgctaagctgtttcagccaagaatggctgtggaatctggagtgatttcaaccctgatacctcaggatcctccggaacaagaactaatactagtgaaagtagaagataacttttcctgggatgagaaatttaagcagaatgggagtactcaatcctgccaagaattgtttcgtcagcaattcagaaaattttgctaccaggagacacctgggccccgggaggctctgagccgactccaggaactttgctatcagtggctaatgccagagttgcacacaaaggagcagatcttagaactgctggtactggagcagttcctgagcattctgcctgaggagctgcagatctgggttcagcaacataatccagaaagcggcgaggaagctgtgaccctgttggaggatttagagagggagtttgatgacccagggcagcagggtgggaaccggagaaaagtgatgtgggaaaaggaatttacagcctggagcatgtaatggtatcataacagtaggataaaaatttttatgtctctacttgaaccctaacctgaagtgactaatagagccatacttgtctatacccttgaatggtctttttcccctgtccttcatccctggagatgtcatcattgacctctttgagatttttactaagcaagttttcttagggattttctcacaaagctaaccatattttactgatttcaggtcccagctagtccacagggaccagcagtgccatggaaggatttaacatgtctcagagcatcccaagagtcaacagacatccacctccagcccttaaagacacagctgaaatcctggaaaccatgcctttcccctaaaagtgattgtgagaacagtgaaacagcaacaaaagagggcatctcagaagaaaaatcacagggactccctcaggaaccttcatttcgaggaattagtgagcatgaaagcaatttagtgtggaagcaaggaagtgctacaggggagaaactaagatctccttcccaagggggcagttttagtcaagtgatcttcacaaacaaatctctaggaaagagagacctttatgatgaggctgaaagatgcttgattctaactacagactctataatgtgtcagaaagttcctccagaagagagaccttatagatgtgatgtatgtgggcacagcttcaagcagcattcctctctaacacaacatcagagaatccatactggagaaaagccctataaatgtaaccagtgtgggaaggcctttagtttgaggtcctatcttattattcatcagagaattcatagtggtgagaaagcatatgaatgtagtgaatgtgggaaagctttcaatcagagctcagccctcattagacatcggaaaatccatactggtgagaaagcttgtaaatgtaatgagtgtggcaaagcattcagtcaaagttcatatctcattatacatcaaagaattcacactggtgagaaaccttatgagtgtaatgaatgtgggaaaacctttagccagagctcaaaactcattagacatcagcgaattcacacaggagagagaccctatgaatgtaatgaatgtggaaaagctttcaggcagagctcagagctgattactcatcagagaatacatagtggagagaaaccctatgaatgtagtgaatgtggaaaagctttcagtttgagctcaaaccttatcagacatcagagaattcatagtggggaggaaccttatcagtgtaatgaatgtggcaaaactttcaaaaggagctcagcccttgttcagcatcagagaattcattctggggatgaagcttatatatgtaatgaatgtgggaaggctttcaggcacagatcggtccttatgcgccatcaaagagtccacactataaagtaatttgtgaatactgtgaatagtgtaaatacttcagtcagatttttaagtttgttagtcaaaagagtttactttggagcaaaactccataaaggttataaaatactaggtcttgagtctagcttgctttgtgcagcatttcccagtgctaatgtaaagtgtcccttgaaagcttttcctgtgactaatcagaacagaatacagaagaatcattacttccagctcttctcttattaggaatactcaggaaatacgaaaagtgggaatgtaacattgaaacctcattttgtatgaaagtgtcatgaatatagcaacccaggctctgtcactgcatctgattgttagtgtgccaggttatggggctggtgtggactgtgtgaggcacttcgtctcaggaactaaaaaaaa

SEQ ID NO: 359485 - DNA, 2561 bp, Homo sapiens
  misc_feature (2049)..(2049): n is a, c, g, or t
ctgcgtacgcgcacttccggtctttgtggcttgcagctcggggtgggtggctcatttcctggccgctcctgggcttcgcggaaagaagagattactcacactccttctcaagcacagaaccagttgtactgagctttttgctaagctgtttcagccaagaatggctgtggaatctggagtgatttcaaccctgatacctcaggatcctccggaacaagaactaatactagtgaaagtagaagataacttttcctgggatgagaaatttaagcagaatgggagtactcaatcctgccaagaattgtttcgtcagcaattcagaaaattttgctaccaggagacacctgggccccgggaggctctgagccgactccaggaactttgctatcagtggctaatgccagagttgcacacaaaggagcagatcttagaactgctggtactggagcagttcctgagcattctgcctgaggagctgcagatctgggttcagcaacataatccagaaagcggcgaggaagctgtgaccctgttggaggatttagagagggagtttgatgacccagggcagcaggtcccagctagtccacagggaccagcagtgccatggaaggatttaacatgtctcagagcatcccaagagtcaacagacatccacctccagcccttaaagacacagctgaaatcctggaaaccatgcctttcccctaaaagtgatttttcctgaagaacacatcgtcaataaatcacctgcacccaaatctccatctcaggcgctacttctggcaaggcatatcatgaggctagtgaagcacctacaagaaacttataactcaaggttgtaaaaatggcatggtgactcttacaatcatatcacagtgggcctctccaacaatttaaacctcatgacctaggtgaaagctgtgaaaggatccacattaattcttcagaggcagggctaagactttcaagactgaaaagagactagcataaggagacttaacaggaacccagtcaaggccattcatggccatgggaccacgcataaatggagaacgagtaaattttgctaagtccaaggacattggagagatagagtcactattactgatatggtgactgagtcaacaacatactgccactatgaagtaataagaaaataaaaagttaaaaaatgtaacagataacagttggagggtgaatatattttaaatcaatcagaaaaaaaaaagagtattttattttgtcttgatccccaaacttcagatgaatgtggagaaactgaagcatgtccagagaaaagtggcaagatatccaaacagacagaacacagatgggatcagagggagtgagaggcttagttaaaacaaggtcaggaggctgggcacggtggctcatgcctgtaattccagcactttgggaggccgaggcgggtggataacaaggtcaggagtttgagaacagcctggccaatatggtgaaaccccatctctgctaaaaatacaaaaattagccaggcgtggtggcgggtgcctgtagtcccagctactcgggaggctgaggcaggagaatcacttgaacccaggagttggaggttgtagtgagccaagatcacaccactgcactctagcttgggcgacagagccagactccatctcaaaaaaaaaaaaaaaaaaaaaaaaaaaaaaaaggtcaaagtgcagtgtactcactgcattcaagtatagattgtgttttatgaggactctgtaaactaaagaaagtggattatgaataaattaaagttgggagtatttcatatggacataaggaagaattttaatatagtatgtttactagggtttccacaacaaaataccacagaatgggtggtaaacaacagaaatctcttttctcacaattctagagactagaagtccaagatcaatgtgtcagcaggtttggtttcttctctctccttggcttgcagatgatggccaccttcttttcttgttgttgttgagatagtctcactctgtcatccaggctggagtgcagtggcgcaatctnagctcactgcaacctccaccttctgggctcaggtgaccctcctgtctcagcctcccaagtagctggggctacaggcatgcaccaccatccctggctaatttttgtatttttagtaaagacagggtttcacagtggtcttgaactcctgacctcaagtaatctgcctgcctcaacctcttaaagcgctggcattacaggcataagccactgcacccggccacagatggccactttcttgctaggtcctcacaagatcatcccttggtctgtgttgtgtcctaatctcctcttcttttaaggacatcaattattttggattaaggccaaccctaatgaccccattttaacctttataaaggccctatctctaaaaaaatgcagtcatactctaaggttctggctgggggttacagcttcaacatatgaattttgaagggacacaactcatcccataacaaataacaatatgaaaagcccaagaaacacttaccacagtctctgttccttaagat

SEQ ID NO: 359486 - DNA, 1169 bp, Homo sapiens
ctgcgtacgcgcacttccggtctttgtggcttgcagctcggggtgggtggctcatttcctggccgctcctgggcttcgcggaaagaagagattactcacactccttctcaagcacagaaccagttgtactgagctttttgctaagctgtttcagccaagaatggctgtggaatctggagtgatttcaaccctgatacctcaggatcctccggaacaagaactaatactagtgaaagtagaagataacttttcctgggatgagaaatttaagcagaatgggagtactcaatcctgccaagaattgtttcgtcagcaattcagaaaattttgctaccaggagacacctgggccccgggaggctctgagccgactccaggaactttgctatcagtggctaatgccagagttgcacacaaaggagcagatcttagaactgctggtactggagcagttcctgagcattctgcctgaggagctgcagatctgggttcagcaacataatccagaaagcggcgaggaagctgtgaccctgttggaggatttagagagggagtttgatgacccagggcagcaggtcccagctagtccacagggaccagcagtgccatggaaggatttaacatgtctcagagcatcccaagagtcaacagacatccacctccagcccttaaagacacagctgaaatcctggaaaccatgcctttcccctaaaagtgattgtgagaacagtgaaacagcaacaaaagagggcatctcagaagaaaaatcacagggactccctcaggaaccttcatttcgaggaattagtgagcagttgtccagacctcccaaagcttcttcagctatccgttgggaatgtgtttctccaggaagttttcccggcgatatcatagctgctgaggctacacattcaacaatttcttgctttgccatcaacactttgccagccaccatcctgccatctaaaaatgtgaatagaaagtgtaagtatcatttacttcccatgacagaagaaactgttgtagcaggaacacaaactcaatgaaataggtatttatttattaggaggacagttctcaaaactagattcccaatctagaattcagagaagtggcctggggtagccaaatatggccccctgtcggcatgtaggggtcctctagcgcccc

SEQ ID NO: 359487 - DNA, 6457 bp, Homo sapiens
ccggccggtgtttcaggccctttaagaggcgacgctggagccggagccattttccccccttcggccgcggcgaggaggagccggagcgggagtgacaccgagccggacccagcgcgacctgcggcggctccgggtgactcgggccagtgtagaggtcctcaggccgccggcaggagcagctgggccaattccctggccgggagcggaaggggatggcgtcgggcctgggctccccgtccccctgctcggcgggcagtgaggaggaggatatggatgcacttttgaacaacagcctgcccccaccccacccagaaaatgaagaggacccagaagaggatttgtcagaaacagagactccaaagctcaagaagaagaaaaagcctaagaaacctcgggaccctaaaatccctaagagcaagcgccaaaaaaaggagcgtatgctcttatgccggcagctgggggacagctctggggaggggccagagtttgtggaggaggaggaagaggtggctctgcgctcagacagtgagggcagcgactatactcctggcaagaagaagaagaagaagcttggacctaagaaagagaagaagagcaaatccaagcggaaggaggaggaggaggaggaggatgatgatgatgattcaaaggagcctaaatcatctgctcagctcctggaagactggggcatggaagacattgaccacgtgttctcagaggaggattatcgaaccctcaccaactacaaggccttcagccagtttgtcagacccctcattgctgccaaaaatcccaagattgctgtctccaagatgatgatggttttgggtgcaaaatggcgggagttcagtaccaataaccccttcaaaggcagttctggggcatcagtggcagctgcggcagcagcagcggtagctgtggtggagagcatggtgacagccactgaggttgcaccaccacctccccctgtggaggtgcctatccgcaaggccaagaccaaggagggcaaaggtcccaatgctcggaggaagcccaagggcagccctcgtgtacctgatgccaagaagcctaaacccaagaaagtagctcccctgaaaatcaagctgggaggttttggttccaagcgtaagagatcctcgagtgaggatgatgacttagatgtggaatctgacttcgatgatgccagtatcaatagctattctgtttctgatggttccaccagccgtagtagccgcagccgcaagaaactccgaaccactaaaaagaaaaagaaaggcgaggaggaggtgactgctgtggatggttatgagacagaccaccaggactattgcgaggtgtgccagcaaggcggtgagatcatcctgtgtgatacctgtccccgtgcttaccacatggtctgcctggatcccgacatggagaaggctcccgagggcaagtggagctgcccacactgcgagaaggaaggcatccagtgggaagctaaagaggacaattcggagggtgaggagatcctggaagaggttgggggagacctcgaagaggaggatgaccaccatatggaattctgtcgggtctgcaaggatggtggggaactgctctgctgtgatacctgtccttcttcctaccacatccactgcctgaatcccccacttccagagatccccaacggtgaatggctctgtccccgttgtacgtgtccagctctgaagggcaaagtgcagaagatcctaatctggaagtggggtcagccaccatctcccacaccagtgcctcggcctccagatgctgatcccaacacgccctccccaaagcccttggaggggcggccagagcggcagttctttgtgaaatggcaaggcatgtcttactggcactgctcctgggtttctgaactgcagctggagctgcactgtcaggtgatgttccgaaactatcagcggaagaatgatatggatgagccaccttctggggactttggtggtgatgaagagaaaagccgaaagcgaaagaacaaggaccctaaatttgcagagatggaggaacgcttctatcgctatgggataaaacccgagtggatgatgatccaccgaatcctcaaccacagtgtggacaagaagggccacgtccactacttgatcaagtggcgggacttaccttacgatcaggcttcttgggagagtgaggatgtggagatccaggattacgacctgttcaagcagagctattggaatcacagggagttaatgaggggtgaggaaggccgaccaggcaagaagctcaagaaggtgaagcttcggaagttggagaggcctccagaaacgccaacagttgatccaacagtgaagtatgagcgacagccagagtacctggatgctacaggtggaaccctgcacccctatcaaatggagggcctgaattggttgcgcttctcctgggctcagggcactgacaccatcttggctgatgagatgggccttgggaaaactgtacagacagcagtcttcctgtattccctttacaaggagggtcattccaaaggccccttcctagtgagcgcccctctttctaccatcatcaactgggagcgggagtttgaaatgtgggctccagacatgtatgtcgtaacctatgtgggtgacaaggacagccgtgccatcatccgagagaatgagttctcctttgaagacaatgccattcgtggtggcaagaaggcctcccgcatgaagaaagaggcatctgtgaaattccatgtgctgctgacatcctatgaattgatcaccattgacatggctattttgggctctattgattgggcctgcctcatcgtggatgaagcccatcggctgaagaacaatcagtctaagttcttccgggtattgaatggttactcactccagcacaagctgttgctgactgggacaccattacaaaacaatctggaagagttgtttcatctgctcaactttctcacccccgagaggttccacaatttggaaggttttttggaggagtttgctgacattgccaaggaggaccagataaaaaaactgcatgacatgctggggccgcacatgttgcggcggctcaaagccgatgtgttcaagaacatgccctccaagacagaactaattgtgcgtgtggagctgagccctatgcagaagaaatactacaagtacatcctcactcgaaattttgaagcactcaatgcccgaggtggtggcaaccaggtgtctctgctgaatgtggtgatggatcttaagaagtgctgcaaccatccatacctcttccctgtggctgcaatggaagctcctaagatgcctaatggcatgtatgatggcagtgccctaatcagagcatctgggaaattattgctgctgcagaaaatgctcaagaaccttaaggagggtgggcatcgtgtactcatcttttcccagatgaccaagatgctagacctgctagaggatttcttggaacatgaaggttataaatacgaacgcatcgatggtggaatcactgggaacatgcggcaagaggccattgaccgcttcaatgcaccgggtgctcagcagttctgcttcttgctttccactcgagctgggggccttggaatcaatctggccactgctgacacagttattatctatgactctgactggaacccccataatgacattcaggcctttagcagagctcaccggattgggcaaaataaaaaggtaatgatctaccggtttgtgacccgtgcgtcagtggaggagcgcatcacgcaggtggcaaagaagaaaatgatgctgacgcatctagtggtgcggcctgggctgggctccaagactggatctatgtccaaacaggagcttgatgatatcctcaaatttggcactgaggaactattcaaggatgaagccactgatggaggaggagacaacaaagagggagaagatagcagtgttatccactacgatgataaggccattgaacggctgctagaccgtaaccaggatgagactgaagacacagaattgcagggcatgaatgaatatttgagctcattcaaagtggcccagtatgtggtacgggaagaagaaatgggggaggaagaggaggtagaacgggaaatcattaaacaggaagaaagtgtggatcctgactactgggagaaattgctgcggcaccattatgagcagcagcaagaagatctagcccgaaatctgggcaaaggaaaaagaatccgtaaacaggtcaactacaatgatggctcccaggaggaccgagattggcaggacgaccagtccgacaaccagtccgattactcagtggcttcagaggaaggtgatgaagactttgatgaacgttcagaagctccccgtaggcccagtcgtaagggcctgcggaatgataaagataagccattgcctcctctgttggcccgtgttggtgggaatattgaagtacttggttttaatgctcgtcagcgaaaagcctttcttaatgcaattatgcgatatggtatgccacctcaggatgcttttactacccagtggcttgtaagagacctgcgaggcaaatcagagaaagagttcaaggcatatgtctctcttttcatgcggcatttatgtgagccgggggcagatggggctgagacctttgctgatggtgtcccccgagaaggcctgtctcgccagcatgtccttactagaattggtgttatgtctttgattcgcaagaaggttcaggagtttgaacatgttaatgggcgctggagcatgcctgaactggctgaggtggaggaaaacaagaagatgtcccagccagggtcaccctccccaaaaactcctacaccctccactccaggggacacgcagcccaacactcctgcacctgtcccacctgctgaagatgggataaaaatagaggaaaatagcctcaaagaagaagagagcatagaaggagaaaaggaggttaaatctacagcccctgagactgccattgagtgtacacaggcccctgcccctgcctcagaggatgaaaaggtcgttgttgaaccccctgagggagaggagaaagtggaaaaggcagaggtgaaggagagaacagaggaacctatggagacagagcccaaaggtgctgctgatgtagagaaggtggaggaaaagtcagcaatagatctgacccctattgtggtagaagacaaagaagagaagaaagaagaagaagagaaaaaagaggtgatgcttcagaatggagagacccccaaggacctgaatgatgagaaacagaagaaaaatattaaacaacgtttcatgtttaacattgcagatggtggttttactgagttgcactccctttggcagaatgaagagcgggcagccacagttaccaagaagacttatgagatctggcatcgacggcatgactactggctgctagccggcattataaaccatggctatgcccggtggcaagacatccagaatgacccacgctatgccatcctcaatgagcctttcaagggtgaaatgaaccgtggcaatttcttagagatcaagaataaatttctagctcgaaggtttaagctcttagaacaagctctggtgattgaggaacagctgcgccgggctgcttacttgaacatgtcagaagacccttctcacccttccatggccctcaacacccgctttgctgaggtggagtgtttggcggaaagtcatcagcacctgtccaaggagtcaatggcaggaaacaagccagccaatgcagtcctgcacaaagttctgaaacagctggaagaactgctgagtgacatgaaagctgatgtgactcgactcccagctaccattgcccgaattcccccagttgctgtgaggttacagatgtcagagcgtaacattctcagccgcctggcaaaccgggcacccgaacctaccccacagcaggtagcccagcagcagtgaagatgcagactgataccacctccaccgctgagcagtgaccttcctcactttctcttgtcccagcttctcccctgggggcctgagagaccctcaccttccttctgcccatcttccatgttgtaaaggaacagccccagtgcactgggggaggggagggagtgaggggcagtggtgcccttcctgcagaagagacatgcagcagtagcgctggcgccatctgcaggagctggcgggctggccttctggaccctggcttctccccactgtaacgcctgttacacacaaactgttgtgggttcctgccaggcttgaagaaaatgatctgaattttttcctccttttggttttattttgttggtttattttgtgttttcttttctcctttttggggggtattcagagtgggctgggcccctgggcgagacacagctacctctgttggcatctttttaataccaggaacccagcggctctagccactgagcggctaaatgaaataaagtgga

SEQ ID NO: 359488 - DNA, 730 bp, Homo sapiens
gaattaaaggagacaaaaagaggcagagcgagtagagagcagcccaacactcctgcacctgtcccacctgcgaagatgggataaaaatagaggaaaatagcctcaaagaagaagagagcatagaaggagaaaaggaggttaaatctacagcccctgagactgccattgagtgtacacaggcccctgcccctgcctcagaggatgaaaaggtcgttgttgaaccccctgagggagaggagaaagtggaaaaggcagaggtgaaggagagaacagaggaacctatggagacagagcccaaaggtgctgctgatgtagagaaggtggaggaaaagtcagcaatagatctgacccctattgtggtagaagacaagaaagaagaagaagagaaaaaagaggtgatgcttcagaatggagagacccccaaggacctgaatgatgagaaacagaagaaaaatattaaacaacgtttcatgtttaacattgcagatggtggttttactgagttgcactccctttggcagagtgaagagcgggcagccacagttaccaagaagacttatgagatctggcgtccgtagcggggattgaccttaactgggtgatagcccgggattcattaaaccatgggatatgccgcggtggcaagacattcagaattgaaccagatatgcccatcctcaattaagccttcaagggtgaaatgaccgggggaatgcttagagatcagatg

SEQ ID NO: 359489 - DNA, 444 bp, Homo sapiens
gacatgctcttcaaccttttgctgcaggctcttttcctcattcagggaatgtttgtgagtctctttcccatccatcttgtcggtcagctggttagtctcctgcacctgtcccacctgcgaagatgggataaaaatagaggaaaatagcctcaaagaagaagagagcatagaaggagaaaaggaggttaaatctacagcccctgagactgccattgagtgtacacaggcccctgcccctgcctcagaggatgaaaaggtcgttgttgaaccccctgagggagaggagaaagtggaaaaggcagaggtgaaggagagaacagaggaacctatggagacagagcccaaaggtaaaggtatccacattttttttgtttgtttgtttgttttgagacagtgtagtgctgccgccaggctggagtgctgtggcgcgatcttggcttactg

SEQ ID NO: 359490 - DNA, 6418 bp, Homo sapiens
ccggccggtgtttcaggccctttaagaggcgacgctggagccggagccattttccccccttcggccgcggcgaggaggagccggagcgggagtgacaccgagccggacccagcgcgacctgcggcggctccgggtgactcgggccagtgtagaggtcctcaggccgccggcaggagcagctgggccaattccctggccgggagcggaaggggatggcgtcgggcctgggctccccgtccccctgctcggcgggcagtgaggaggaggatatggatgcacttttgaacaacagcctgcccccaccccacccagaaaatgaagaggacccagaagaggatttgtcagaaacagagactccaaagctcaagaagaagaaaaagcctaagaaacctcgggaccctaaaatccctaagagcaagcgccaaaaaaaggagcgtatgctcttatgccggcagctgggggacagctctggggaggggccagagtttgtggaggaggaggaagaggtggctctgcgctcagacagtgagggcagcgactatactcctggcaagaagaagaagaagaagcttggacctaagaaagagaagaagagcaaatccaagcggaaggaggaggaggaggaggaggatgatgatgatgattcaaaggagcctaaatcatctgctcagctcctggaagactggggcatggaagacattgaccacgtgttctcagaggaggattatcgaaccctcaccaactacaaggccttcagccagtttgtcagacccctcattgctgccaaaaatcccaagattgctgtctccaagatgatgatggttttgggtgcaaaatggcgggagttcagtaccaataaccccttcaaaggcagttctggggcatcagtggcagctgcggcagcagcagcggtagctgtggtggagagcatggtgacagccactgaggttgcaccaccacctccccctgtggaggtgcctatccgcaaggccaagaccaaggagggcaaaggtcccaatgctcggaggaagcccaagggcagccctcgtgtacctgatgccaagaagcctaaacccaagaaagtagctcccctgaaaatcaagctgggaggttttggttccaagcgtaagagatcctcgagtgaggatgatgacttagatgtggaatctgacttcgatgatgccagtatcaatagctattctgtttctgatggttccaccagccgtagtagccgcagccgcaagaaactccgaaccactaaaaagaaaaagaaagaccaccaggactattgcgaggtgtgccagcaaggcggtgagatcatcctgtgtgatacctgtccccgtgcttaccacatggtctgcctggatcccgacatggagaaggctcccgagggcaagtggagctgcccacactgcgagaaggaaggcatccagtgggaagctaaagaggacaattcggagggtgaggagatcctggaagaggttgggggagacctcgaagaggaggatgaccaccatatggaattctgtcgggtctgcaaggatggtggggaactgctctgctgtgatacctgtccttcttcctaccacatccactgcctgaatcccccacttccagagatccccaacggtgaatggctctgtccccgttgtacgtgtccagctctgaagggcaaagtgcagaagatcctaatctggaagtggggtcagccaccatctcccacaccagtgcctcggcctccagatgctgatcccaacacgccctccccaaagcccttggaggggcggccagagcggcagttctttgtgaaatggcaaggcatgtcttactggcactgctcctgggtttctgaactgcagctggagctgcactgtcaggtgatgttccgaaactatcagcggaagaatgatatggatgagccaccttctggggactttggtggtgatgaagagaaaagccgaaagcgaaagaacaaggaccctaaatttgcagagatggaggaacgcttctatcgctatgggataaaacccgagtggatgatgatccaccgaatcctcaaccacagtgtggacaagaagggccacgtccactacttgatcaagtggcgggacttaccttacgatcaggcttcttgggagagtgaggatgtggagatccaggattacgacctgttcaagcagagctattggaatcacagggagttaatgaggggtgaggaaggccgaccaggcaagaagctcaagaaggtgaagcttcggaagttggagaggcctccagaaacgccaacagttgatccaacagtgaagtatgagcgacagccagagtacctggatgctacaggtggaaccctgcacccctatcaaatggagggcctgaattggttgcgcttctcctgggctcagggcactgacaccatcttggctgatgagatgggccttgggaaaactgtacagacagcagtcttcctgtattccctttacaaggagggtcattccaaaggccccttcctagtgagcgcccctctttctaccatcatcaactgggagcgggagtttgaaatgtgggctccagacatgtatgtcgtaacctatgtgggtgacaaggacagccgtgccatcatccgagagaatgagttctcctttgaagacaatgccattcgtggtggcaagaaggcctcccgcatgaagaaagaggcatctgtgaaattccatgtgctgctgacatcctatgaattgatcaccattgacatggctattttgggctctattgattgggcctgcctcatcgtggatgaagcccatcggctgaagaacaatcagtctaagttcttccgggtattgaatggttactcactccagcacaagctgttgctgactgggacaccattacaaaacaatctggaagagttgtttcatctgctcaactttctcacccccgagaggttccacaatttggaaggttttttggaggagtttgctgacattgccaaggaggaccagataaaaaaactgcatgacatgctggggccgcacatgttgcggcggctcaaagccgatgtgttcaagaacatgccctccaagacagaactaattgtgcgtgtggagctgagccctatgcagaagaaatactacaagtacatcctcactcgaaattttgaagcactcaatgcccgaggtggtggcaaccaggtgtctctgctgaatgtggtgatggatcttaagaagtgctgcaaccatccatacctcttccctgtggctgcaatggaagctcctaagatgcctaatggcatgtatgatggcagtgccctaatcagagcatctgggaaattattgctgctgcagaaaatgctcaagaaccttaaggagggtgggcatcgtgtactcatcttttcccagatgaccaagatgctagacctgctagaggatttcttggaacatgaaggttataaatacgaacgcatcgatggtggaatcactgggaacatgcggcaagaggccattgaccgcttcaatgcaccgggtgctcagcagttctgcttcttgctttccactcgagctgggggccttggaatcaatctggccactgctgacacagttattatctatgactctgactggaacccccataatgacattcaggcctttagcagagctcaccggattgggcaaaataaaaaggtaatgatctaccggtttgtgacccgtgcgtcagtggaggagcgcatcacgcaggtggcaaagaagaaaatgatgctgacgcatctagtggtgcggcctgggctgggctccaagactggatctatgtccaaacaggagcttgatgatatcctcaaatttggcactgaggaactattcaaggatgaagccactgatggaggaggagacaacaaagagggagaagatagcagtgttatccactacgatgataaggccattgaacggctgctagaccgtaaccaggatgagactgaagacacagaattgcagggcatgaatgaatatttgagctcattcaaagtggcccagtatgtggtacgggaagaagaaatgggggaggaagaggaggtagaacgggaaatcattaaacaggaagaaagtgtggatcctgactactgggagaaattgctgcggcaccattatgagcagcagcaagaagatctagcccgaaatctgggcaaaggaaaaagaatccgtaaacaggtcaactacaatgatggctcccaggaggaccgagattggcaggacgaccagtccgacaaccagtccgattactcagtggcttcagaggaaggtgatgaagactttgatgaacgttcagaagctccccgtaggcccagtcgtaagggcctgcggaatgataaagataagccattgcctcctctgttggcccgtgttggtgggaatattgaagtacttggttttaatgctcgtcagcgaaaagcctttcttaatgcaattatgcgatatggtatgccacctcaggatgcttttactacccagtggcttgtaagagacctgcgaggcaaatcagagaaagagttcaaggcatatgtctctcttttcatgcggcatttatgtgagccgggggcagatggggctgagacctttgctgatggtgtcccccgagaaggcctgtctcgccagcatgtccttactagaattggtgttatgtctttgattcgcaagaaggttcaggagtttgaacatgttaatgggcgctggagcatgcctgaactggctgaggtggaggaaaacaagaagatgtcccagccagggtcaccctccccaaaaactcctacaccctccactccaggggacacgcagcccaacactcctgcacctgtcccacctgctgaagatgggataaaaatagaggaaaatagcctcaaagaagaagagagcatagaaggagaaaaggaggttaaatctacagcccctgagactgccattgagtgtacacaggcccctgcccctgcctcagaggatgaaaaggtcgttgttgaaccccctgagggagaggagaaagtggaaaaggcagaggtgaaggagagaacagaggaacctatggagacagagcccaaaggtgctgctgatgtagagaaggtggaggaaaagtcagcaatagatctgacccctattgtggtagaagacaaagaagagaagaaagaagaagaagagaaaaaagaggtgatgcttcagaatggagagacccccaaggacctgaatgatgagaaacagaagaaaaatattaaacaacgtttcatgtttaacattgcagatggtggttttactgagttgcactccctttggcagaatgaagagcgggcagccacagttaccaagaagacttatgagatctggcatcgacggcatgactactggctgctagccggcattataaaccatggctatgcccggtggcaagacatccagaatgacccacgctatgccatcctcaatgagcctttcaagggtgaaatgaaccgtggcaatttcttagagatcaagaataaatttctagctcgaaggtttaagctcttagaacaagctctggtgattgaggaacagctgcgccgggctgcttacttgaacatgtcagaagacccttctcacccttccatggccctcaacacccgctttgctgaggtggagtgtttggcggaaagtcatcagcacctgtccaaggagtcaatggcaggaaacaagccagccaatgcagtcctgcacaaagttctgaaacagctggaagaactgctgagtgacatgaaagctgatgtgactcgactcccagctaccattgcccgaattcccccagttgctgtgaggttacagatgtcagagcgtaacattctcagccgcctggcaaaccgggcacccgaacctaccccacagcaggtagcccagcagcagtgaagatgcagactgataccacctccaccgctgagcagtgaccttcctcactttctcttgtcccagcttctcccctgggggcctgagagaccctcaccttccttctgcccatcttccatgttgtaaaggaacagccccagtgcactgggggaggggagggagtgaggggcagtggtgcccttcctgcagaagagacatgcagcagtagcgctggcgccatctgcaggagctggcgggctggccttctggaccctggcttctccccactgtaacgcctgttacacacaaactgttgtgggttcctgccaggcttgaagaaaatgatctgaattttttcctccttttggttttattttgttggtttattttgtgttttcttttctcctttttggggggtattcagagtgggctgggcccctgggcgagacacagctacctctgttggcatctttttaataccaggaacccagcggctctagccactgagcggctaaatgaaataaagtgga

SEQ ID NO: 359491 - DNA, 5471 bp, Homo sapiens
ggcgtttcccacagaacaagatgagactaggctccctgtataacggtgcttgctgggattctggtgtccccagtgagagagtactcccctctctgccactctgtccttccccttggcttgaacgtctaaccttattctttttcatcctgccagagtgaggatgatgacttagatgtggaatctgacttcgatgatgccagtatcaatagctattctgtttctgatggttccaccagccgtagtagccgcagccgcaagaaactccgaaccactaaaaagaaaaagaaaggcgaggaggaggtgactgctgtggatggttatgagacagaccaccaggactattgcgaggtgtgccagcaaggcggtgagatcatcctgtgtgatacctgtccccgtgcttaccacatggtctgcctggatcccgacatggagaaggctcccgagggcaagtggagctgcccacactgcgagaaggaaggcatccagtgggaagctaaagaggacaattcggagggtgaggagatcctggaagaggttgggggagacctcgaagaggaggatgaccaccatatggaattctgtcgggtctgcaaggatggtggggaactgctctgctgtgatacctgtccttcttcctaccacatccactgcctgaatcccccacttccagagatccccaacggtgaatggctctgtccccgttgtacgtgtccagctctgaagggcaaagtgcagaagatcctaatctggaagtggggtcagccaccatctcccacaccagtgcctcggcctccagatgctgatcccaacacgccctccccaaagcccttggaggggcggccagagcggcagttctttgtgaaatggcaaggcatgtcttactggcactgctcctgggtttctgaactgcagctggagctgcactgtcaggtgatgttccgaaactatcagcggaagaatgatatggatgagccaccttctggggactttggtggtgatgaagagaaaagccgaaagcgaaagaacaaggaccctaaatttgcagagatggaggaacgcttctatcgctatgggataaaacccgagtggatgatgatccaccgaatcctcaaccacagtgtggacaagaagggccacgtccactacttgatcaagtggcgggacttaccttacgatcaggcttcttgggagagtgaggatgtggagatccaggattacgacctgttcaagcagagctattggaatcacagggagttaatgaggggtgaggaaggccgaccaggcaagaagctcaagaaggtgaagcttcggaagttggagaggcctccagaaacgccaacagttgatccaacagtgaagtatgagcgacagccagagtacctggatgctacaggtggaaccctgcacccctatcaaatggagggcctgaattggttgcgcttctcctgggctcagggcactgacaccatcttggctgatgagatgggccttgggaaaactgtacagacagcagtcttcctgtattccctttacaaggagggtcattccaaaggccccttcctagtgagcgcccctctttctaccatcatcaactgggagcgggagtttgaaatgtgggctccagacatgtatgtcgtaacctatgtgggtgacaaggacagccgtgccatcatccgagagaatgagttctcctttgaagacaatgccattcgtggtggcaagaaggcctcccgcatgaagaaagaggcatctgtgaaattccatgtgctgctgacatcctatgaattgatcaccattgacatggctattttgggctctattgattgggcctgcctcatcgtggatgaagcccatcggctgaagaacaatcagtctaagttcttccgggtattgaatggttactcactccagcacaagctgttgctgactgggacaccattacaaaacaatctggaagagttgtttcatctgctcaactttctcacccccgagaggttccacaatttggaaggttttttggaggagtttgctgacattgccaaggaggaccagataaaaaaactgcatgacatgctggggccgcacatgttgcggcggctcaaagccgatgtgttcaagaacatgccctccaagacagaactaattgtgcgtgtggagctgagccctatgcagaagaaatactacaagtacatcctcactcgaaattttgaagcactcaatgcccgaggtggtggcaaccaggtgtctctgctgaatgtggtgatggatcttaagaagtgctgcaaccatccatacctcttccctgtggctgcaatggaagctcctaagatgcctaatggcatgtatgatggcagtgccctaatcagagcatctgggaaattattgctgctgcagaaaatgctcaagaaccttaaggagggtgggcatcgtgtactcatcttttcccagatgaccaagatgctagacctgctagaggatttcttggaacatgaaggttataaatacgaacgcatcgatggtggaatcactgggaacatgcggcaagaggccattgaccgcttcaatgcaccgggtgctcagcagttctgcttcttgctttccactcgagctgggggccttggaatcaatctggccactgctgacacagttattatctatgactctgactggaacccccataatgacattcaggcctttagcagagctcaccggattgggcaaaataaaaaggtaatgatctaccggtttgtgacccgtgcgtcagtggaggagcgcatcacgcaggtggcaaagaagaaaatgatgctgacgcatctagtggtgcggcctgggctgggctccaagactggatctatgtccaaacaggagcttgatgatatcctcaaatttggcactgaggaactattcaaggatgaagccactgatggaggaggagacaacaaagagggagaagatagcagtgttatccactacgatgataaggccattgaacggctgctagaccgtaaccaggatgagactgaagacacagaattgcagggcatgaatgaatatttgagctcattcaaagtggcccagtatgtggtacgggaagaagaaatgggggaggaagaggaggtagaacgggaaatcattaaacaggaagaaagtgtggatcctgactactgggagaaattgctgcggcaccattatgagcagcagcaagaagatctagcccgaaatctgggcaaaggaaaaagaatccgtaaacaggtcaactacaatgatggctcccaggaggaccgagattggcaggacgaccagtccgacaaccagtccgattactcagtggcttcagaggaaggtgatgaagactttgatgaacgttcagaagctccccgtaggcccagtcgtaagggcctgcggaatgataaagataagccattgcctcctctgttggcccgtgttggtgggaatattgaagtacttggttttaatgctcgtcagcgaaaagcctttcttaatgcaattatgcgatatggtatgccacctcaggatgcttttactacccagtggcttgtaagagacctgcgaggcaaatcagagaaagagttcaaggcatatgtctctcttttcatgcggcatttatgtgagccgggggcagatggggctgagacctttgctgatggtgtcccccgagaaggcctgtctcgccagcatgtccttactagaattggtgttatgtctttgattcgcaagaaggttcaggagtttgaacatgttaatgggcgctggagcatgcctgaactggctgaggtggaggaaaacaagaagatgtcccagccagggtcaccctccccaaaaactcctacaccctccactccaggggacacgcagcccaacactcctgcacctgtcccacctgctgaagatgggataaaaatagaggaaaatagcctcaaagaagaagagagcatagaaggagaaaaggaggttaaatctacagcccctgagactgccattgagtgtacacaggcccctgcccctgcctcagaggatgaaaaggtcgttgttgaaccccctgagggagaggagaaagtggaaaaggcagaggtgaaggagagaacagaggaacctatggagacagagcccaaaggtgctgctgatgtagagaaggtggaggaaaagtcagcaatagatctgacccctattgtggtagaagacaaagaagagaagaaagaagaagaagagaaaaaagaggtgatgcttcagaatggagagacccccaaggacctgaatgatgagaaacagaagaaaaatattaaacaacgtttcatgtttaacattgcagatggtggttttactgagttgcactccctttggcagaatgaagagcgggcagccacagttaccaagaagacttatgagatctggcatcgacggcatgactactggctgctagccggcattataaaccatggctatgcccggtggcaagacatccagaatgacccacgctatgccatcctcaatgagcctttcaagggtgaaatgaaccgtggcaatttcttagagatcaagaataaatttctagctcgaaggtttaagctcttagaacaagctctggtgattgaggaacagctgcgccgggctgcttacttgaacatgtcagaagacccttctcacccttccatggccctcaacacccgctttgctgaggtggagtgtttggcggaaagtcatcagcacctgtccaaggagtcaatggcaggaaacaagccagccaatgcagtcctgcacaaagttctgaaacagctggaagaactgctgagtgacatgaaagctgatgtgactcgactcccagctaccattgcccgaattcccccagttgctgtgaggttacagatgtcagagcgtaacattctcagccgcctggcaaaccgggcacccgaacctaccccacagcaggtagcccagcagcagtgaagatgcagactgataccacctccaccgctgagcagtgaccttcctcactttctcttgtcccagcttctcccctgggggcctgagagaccctcaccttccttctgcccatcttccatgttgtaaaggaacagccccagtgcactgggggaggggagggagtgaggggcagtggtgcccttcctgcagaagagacatgcagcagtagcgctggcgccatctgcaggagctggcgggctggccttctggaccctggcttctccccactgtaacgcctgttacacacaaactgttgtgggttcctgccaggcttgaagaaaatgatctgaattttttcctccttttggttttattttgttggtttattttgtgttttcttttctcctttttggggggtattcagagtgggctgggcccctgggcgagacacagctacctctgttggcatctttttaataccaggaacccagcggctctagccactgagcggctaaatgaaataaagtgga

SEQ ID NO: 359492 - DNA, 5209 bp, Homo sapiens
  misc_feature (20)..(20): n is a, c, g, or t
  misc_feature (24)..(24): n is a, c, g, or t
taacggctaggtacgaggcngggntaggcgaggaggaggtgactgctgtggatggttatgagacagaccaccaggactattgcgaggtgtgccagcaaggcggtgagatcatcctgtgtgatacctgtccccgtgcttaccacatggtctgcctggatcccgacatggagaaggctcccgagggcaagtggagctgcccacactgcgagaaggaaggcatccagtgggaagctaaagaggacaattcggagggtgaggagatcctggaagaggttgggggagacctcgaagaggaggatgaccaccatatggaattctgtcgggtctgcaaggatggtggggaactgctctgctgtgatacctgtccttcttcctaccacatccactgcctgaatcccccacttccagagatccccaacggtgaatggctctgtccccgttgtacgtgtccagctctgaagggcaaagtgcagaagatcctaatctggaagtggggtcagccaccatctcccacaccagtgcctcggcctccagatgctgatcccaacacgccctccccaaagcccttggaggggcggccagagcggcagttctttgtgaaatggcaaggcatgtcttactggcactgctcctgggtttctgaactgcagctggagctgcactgtcaggtgatgttccgaaactatcagcggaagaatgatatggatgagccaccttctggggactttggtggtgatgaagagaaaagccgaaagcgaaagaacaaggaccctaaatttgcagagatggaggaacgcttctatcgctatgggataaaacccgagtggatgatgatccaccgaatcctcaaccacagtgtggacaagaagggccacgtccactacttgatcaagtggcgggacttaccttacgatcaggcttcttgggagagtgaggatgtggagatccaggattacgacctgttcaagcagagctattggaatcacagggagttaatgaggggtgaggaaggccgaccaggcaagaagctcaagaaggtgaagcttcggaagttggagaggcctccagaaacgccaacagttgatccaacagtgaagtatgagcgacagccagagtacctggatgctacaggtggaaccctgcacccctatcaaatggagggcctgaattggttgcgcttctcctgggctcagggcactgacaccatcttggctgatgagatgggccttgggaaaactgtacagacagcagtcttcctgtattccctttacaaggagggtcattccaaaggccccttcctagtgagcgcccctctttctaccatcatcaactgggagcgggagtttgaaatgtgggctccagacatgtatgtcgtaacctatgtgggtgacaaggacagccgtgccatcatccgagagaatgagttctcctttgaagacaatgccattcgtggtggcaagaaggcctcccgcatgaagaaagaggcatctgtgaaattccatgtgctgctgacatcctatgaattgatcaccattgacatggctattttgggctctattgattgggcctgcctcatcgtggatgaagcccatcggctgaagaacaatcagtctaagttcttccgggtattgaatggttactcactccagcacaagctgttgctgactgggacaccattacaaaacaatctggaagagttgtttcatctgctcaactttctcacccccgagaggttccacaatttggaaggttttttggaggagtttgctgacattgccaaggaggaccagataaaaaaactgcatgacatgctggggccgcacatgttgcggcggctcaaagccgatgtgttcaagaacatgccctccaagacagaactaattgtgcgtgtggagctgagccctatgcagaagaaatactacaagtacatcctcactcgaaattttgaagcactcaatgcccgaggtggtggcaaccaggtgtctctgctgaatgtggtgatggatcttaagaagtgctgcaaccatccatacctcttccctgtggctgcaatggaagctcctaagatgcctaatggcatgtatgatggcagtgccctaatcagagcatctgggaaattattgctgctgcagaaaatgctcaagaaccttaaggagggtgggcatcgtgtactcatcttttcccagatgaccaagatgctagacctgctagaggatttcttggaacatgaaggttataaatacgaacgcatcgatggtggaatcactgggaacatgcggcaagaggccattgaccgcttcaatgcaccgggtgctcagcagttctgcttcttgctttccactcgagctgggggccttggaatcaatctggccactgctgacacagttattatctatgactctgactggaacccccataatgacattcaggcctttagcagagctcaccggattgggcaaaataaaaaggtaatgatctaccggtttgtgacccgtgcgtcagtggaggagcgcatcacgcaggtggcaaagaagaaaatgatgctgacgcatctagtggtgcggcctgggctgggctccaagactggatctatgtccaaacaggagcttgatgatatcctcaaatttggcactgaggaactattcaaggatgaagccactgatggaggaggagacaacaaagagggagaagatagcagtgttatccactacgatgataaggccattgaacggctgctagaccgtaaccaggatgagactgaagacacagaattgcagggcatgaatgaatatttgagctcattcaaagtggcccagtatgtggtacgggaagaagaaatgggggaggaagaggaggtagaacgggaaatcattaaacaggaagaaagtgtggatcctgactactgggagaaattgctgcggcaccattatgagcagcagcaagaagatctagcccgaaatctgggcaaaggaaaaagaatccgtaaacaggtcaactacaatgatggctcccaggaggaccgagattggcaggacgaccagtccgacaaccagtccgattactcagtggcttcagaggaaggtgatgaagactttgatgaacgttcagaagctccccgtaggcccagtcgtaagggcctgcggaatgataaagataagccattgcctcctctgttggcccgtgttggtgggaatattgaagtacttggttttaatgctcgtcagcgaaaagcctttcttaatgcaattatgcgatatggtatgccacctcaggatgcttttactacccagtggcttgtaagagacctgcgaggcaaatcagagaaagagttcaaggcatatgtctctcttttcatgcggcatttatgtgagccgggggcagatggggctgagacctttgctgatggtgtcccccgagaaggcctgtctcgccagcatgtccttactagaattggtgttatgtctttgattcgcaagaaggttcaggagtttgaacatgttaatgggcgctggagcatgcctgaactggctgaggtggaggaaaacaagaagatgtcccagccagggtcaccctccccaaaaactcctacaccctccactccaggggacacgcagcccaacactcctgcacctgtcccacctgctgaagatgggataaaaatagaggaaaatagcctcaaagaagaagagagcatagaaggagaaaaggaggttaaatctacagcccctgagactgccattgagtgtacacaggcccctgcccctgcctcagaggatgaaaaggtcgttgttgaaccccctgagggagaggagaaagtggaaaaggcagaggtgaaggagagaacagaggaacctatggagacagagcccaaaggtgctgctgatgtagagaaggtggaggaaaagtcagcaatagatctgacccctattgtggtagaagacaaagaagagaagaaagaagaagaagagaaaaaagaggtgatgcttcagaatggagagacccccaaggacctgaatgatgagaaacagaagaaaaatattaaacaacgtttcatgtttaacattgcagatggtggttttactgagttgcactccctttggcagaatgaagagcgggcagccacagttaccaagaagacttatgagatctggcatcgacggcatgactactggctgctagccggcattataaaccatggctatgcccggtggcaagacatccagaatgacccacgctatgccatcctcaatgagcctttcaagggtgaaatgaaccgtggcaatttcttagagatcaagaataaatttctagctcgaaggtttaagctcttagaacaagctctggtgattgaggaacagctgcgccgggctgcttacttgaacatgtcagaagacccttctcacccttccatggccctcaacacccgctttgctgaggtggagtgtttggcggaaagtcatcagcacctgtccaaggagtcaatggcaggaaacaagccagccaatgcagtcctgcacaaagttctgaaacagctggaagaactgctgagtgacatgaaagctgatgtgactcgactcccagctaccattgcccgaattcccccagttgctgtgaggttacagatgtcagagcgtaacattctcagccgcctggcaaaccgggcacccgaacctaccccacagcaggtagcccagcagcagtgaagatgcagactgataccacctccaccgctgagcagtgaccttcctcactttctcttgtcccagcttctcccctgggggcctgagagaccctcaccttccttctgcccatcttccatgttgtaaaggaacagccccagtgcactgggggaggggagggagtgaggggcagtggtgcccttcctgcagaagagacatgcagcagtagcgctggcgccatctgcaggagctggcgggctggccttctggaccctggcttctccccactgtaacgcctgttacacacaaactgttgtgggttcctgccaggcttgaagaaaatgatctgaattttttcctccttttggttttattttgttggtttattttgtgttttcttttctcctttttggggggtattcagagtgggctgggcccctgggcgagacacagctacctctgttggcatctttttaataccaggaacccagcggctctagccactgagcggctaaatgaaataaagtgga

SEQ ID NO: 359493 - DNA, 6437 bp, Homo sapiens
ccggccggtgtttcaggccctttaagaggcgacgctggagccggagccattttccccccttcggccgcggcgaggaggagccggagcgggagtgacaccgagccggacccagcgcgacctgcggcggctccgggtgactcgggccagtgtagaggtcctcaggccgccggcaggagcagctgggccaattccctggccgggagcggaaggggatggcgtcgggcctgggctccccgtccccctgctcggcgggcagtgaggaggaggatatggatgcacttttgaacaacagcctgcccccaccccacccagaaaatgaagaggacccagaagaggatttgtcagaaacagagactccaaagctcaagaagaagaaaaagcctaagaaacctcgggaccctaaaatccctaagagcaagcgccaaaaaaaggagcgtatgctcttatgccggcagctgggggacagctctggggaggggccagagtttgtggaggaggaggaagaggtggctctgcgctcagacagtgagggcagcgactatactcctggcaagaagaagaagaagaagcttggacctaagaaagagaagaagagcaaatccaagcggaaggaggaggaggaggaggaggatgatgatgatgattcaaaggagcctaaatcatctgctcagctcctggaagactggggcatggaagacattgaccacgtgttctcagaggaggattatcgaaccctcaccaactacaaggccttcagccagtttgtcagacccctcattgctgccaaaaatcccaagattgctgtctccaagatgatgatggttttgggtgcaaaatggcgggagttcagtaccaataaccccttcaaaggcagttctggggcatcagtggcagctgcggcagcagcagcggtagctgtggtggagagcatggtgacagccactgaggttgcaccaccacctccccctgtggaggtgcctatccgcaaggccaagaccaaggagggcaaaggtcccaatgctcggaggaagcccaagggcagccctcgtgtacctgatgccaagaagcctaaacccaagaaagtagctcccctgaaaatcaagctgggaggttttggttccaagcgtaagagatcctcgagtgaggatgatgacttagatgtggaatctgacttcgatgatgccagtatcaatagctattctgtttctgatggttccaccagccgtagtagccgcagccgcaagaaactccgaaccactaaaaagaaaaagaaaggcgaggaggaggtgactgctgtggatggttatgagacagaccaccaggactattgcgaggtgtgccagcaaggcggtgagatcatcctgtgtgatacctgtccccgtgcttaccacatggtctgcctggatcccgacatggagaaggctcccgagggcaagtggagctgcccacactgcgagaaggaaggcatccagtgggaagctaaagaggacaattcggagggtgaggagatcctggaagaggttgggggagacctcgaagaggaggatgaccaccatatggaattctgtcgggtctgcaaggatggtggggaactgctctgctgtgatacctgtccttcttcctaccacatccactgcctgaatcccccacttccagagatccccaacggtgaatggctctgtccccgttgtacgtgtccagctctgaagggcaaagtgcagaagatcctaatctggaagtggggtcagccaccatctcccacaccagtgcctcggcctccagatgctgatcccaacacgccctccccaaagcccttggaggggcggccagagcggcagttctttgtgaaatggcaaggcatgtcttactggcactgctcctgggtttctgaactgcagctggagctgcactgtcaggtgatgttccgaaactatcagcggaagaatgatatggatgagccaccttctggggactttggtggtgatgaagagaaaagccgaaagcgaaagaacaaggaccctaaatttgcagagatggaggaacgcttctatcgctatgggataaaacccgagtggatgatgatccaccgaatcctcaaccacagtgtggacaagaagggccacgtccactacttgatcaagtggcgggacttaccttacgatcaggcttcttgggagagtgaggatgtggagatccaggattacgacctgttcaagcagagctattggaatcacagggagttaatgaggggtgaggaaggccgaccaggcaagaagctcaagaaggtgaagcttcggaagttggagaggcctccagaaacgccaacagttgatccaacagtgaagtatgagcgacagccagagtacctggatgctacaggtggaaccctgcacccctatcaaatggagggcctgaattggttgcgcttctcctgggctcagggcactgacaccatcttggctgatgagatgggccttgggaaaactgtacagacagcagtcttcctgtattccctttacaaggagggtcattccaaaggccccttcctagtgagcgcccctctttctaccatcatcaactgggagcgggagtttgaaatgtgggctccagacatgtatgtcgtaacctatgtgggtgacaaggacagccgtgccatcatccgagagaatgagttctcctttgaagacaatgccattcgtggtggcaagaaggcctcccgcatgaagaaagaggcatctgtgaaattccatgtgctgctgacatcctatgaattgatcaccattgacatggctattttgggctctattgattgggcctgcctcatcgtggatgaagcccatcggctgaagaacaatcagtctaagttcttccgggtattgaatggttactcactccagcacaagctgttgctgactgggacaccattacaaaacaatctggaagagttgtttcatctgctcaactttctcacccccgagaggttccacaatttggaaggttttttggaggagtttgctgacattgccaaggaggaccagataaaaaaactgcatgacatgctggggccgcacatgttgcggcggctcaaagccgatgtgttcaagaacatgccctccaagacagaactaattgtgcgtgtggagctgagccctatgcagaagaaatactacaagtacatcctcactcgaaattttgaagcactcaatgcccgaggtggtggcaaccaggtgtctctgctgaatgtggtgatggatcttaagaagtgctgcaaccatccatacctcttccctgtggctgcaatggaagctcctaagatgcctaatggcatgtatgatggcagtgccctaatcagagcatctgggaaattattgctgctgcagaaaatgctcaagaaccttaaggagggtgggcatcgtgtactcatcttttcccagatgaccaagatgctagacctgctagaggatttcttggaacatgaaggttataaatacgaacgcatcgatggtggaatcactgggaacatgcggcaagaggccattgaccgcttcaatgcaccgggtgctcagcagttctgcttcttgctttccactcgagctgggggccttggaatcaatctggccactgctgacacagttattatctatgactctgactggaacccccataatgacattcaggcctttagcagagctcaccggattgggcaaaataaaaaggtaatgatctaccggtttgtgacccgtgcgtcagtggaggagcgcatcacgcaggtggcaaagaagaaaatgatgctgacgcatctagtggtgcggcctgggctgggctccaagactggatctatgtccaaacaggagcttgatgatatcctcaaatttggcactgaggaactattcaaggatgaagccactgatggaggaggagacaacaaagagggagaagatagcagtgttatccactacgatgataaggccattgaacggctgctagaccgtaaccaggatgagactgaagacacagaattgcagggcatgaatgaatatttgagctcattcaaagtggcccagtatgtggtacgggaagaagaaatgggggaggaagaggaggtagaacgggaaatcattaaacaggaagaaagtgtggatcctgactactgggagaaattgctgcggcaccattatgagcagcagcaagaagatctagcccgaaatctgggcaaaggaaaaagaatccgtaaacaggtcaactacaatgatggctcccaggaggaccgagattggcaggacgaccagtccgacaaccagtccgattactcagtggcttcagaggaaggtgatgaagactttgatgaacgttcagaagctccccgtaggcccagtcgtaagggcctgcggaatgataaagataagccattgcctcctctgttggcccgtgttggtgggaatattgaagtacttggttttaatgctcgtcagcgaaaagcctttcttaatgcaattatgcgatatggtatgccacctcaggatgcttttactacccagtggcttgtaagagacctgcgaggcaaatcagagaaagagttcaaggcatatgtctctcttttcatgcggcatttatgtgagccgggggcagatggggctgagacctttgctgatggtgtcccccgagaaggcctgtctcgccagcatgtccttactagaattggtgttatgtctttgattcgcaagaaggttcaggagtttgaacatgttaatgggcgctggagcatgcctgaactggctgaggtggaggaaaacaagaagatgtcccagccagggtcaccctccccaaaaactcctacaccctccactccaggggacacgcagcccaacactcctgcacctgtcccacctgctgaagatgggataaaaatagaggaaaatagcctcaaagaagaagagagcatagaaggagaaaaggaggttaaatctacagcccctgagactgccattgagtgtacacaggcccctgcccctgcctcagaggatgaaaaggtcgttgttgaaccccctgagggagaggagaaagtggaaaaggcagaggtgaaggagagaacagaggaacctatggagacagagcccaaaggtgctgctgatgtagagaaggtggaggaaaagtcagcaatagatctgacccctattgtggtagaagacaaagaagagaagaaagaagaagaagagaaaaaagaggtgatgcttcagaatggagagacccccaaggacctgaatgatgagaaacagaagaaaaatattaaacaacgtttcatgtttaacattgcagatggtggttttactgaatgaagagcgggcagccacagttaccaagaagacttatgagatctggcatcgacggcatgactactggctgctagccggcattataaaccatggctatgcccggtggcaagacatccagaatgacccacgctatgccatcctcaatgagcctttcaagggtgaaatgaaccgtggcaatttcttagagatcaagaataaatttctagctcgaaggtttaagctcttagaacaagctctggtgattgaggaacagctgcgccgggctgcttacttgaacatgtcagaagacccttctcacccttccatggccctcaacacccgctttgctgaggtggagtgtttggcggaaagtcatcagcacctgtccaaggagtcaatggcaggaaacaagccagccaatgcagtcctgcacaaagttctgaaacagctggaagaactgctgagtgacatgaaagctgatgtgactcgactcccagctaccattgcccgaattcccccagttgctgtgaggttacagatgtcagagcgtaacattctcagccgcctggcaaaccgggcacccgaacctaccccacagcaggtagcccagcagcagtgaagatgcagactgataccacctccaccgctgagcagtgaccttcctcactttctcttgtcccagcttctcccctgggggcctgagagaccctcaccttccttctgcccatcttccatgttgtaaaggaacagccccagtgcactgggggaggggagggagtgaggggcagtggtgcccttcctgcagaagagacatgcagcagtagcgctggcgccatctgcaggagctggcgggctggccttctggaccctggcttctccccactgtaacgcctgttacacacaaactgttgtgggttcctgccaggcttgaagaaaatgatctgaattttttcctccttttggttttattttgttggtttattttgtgttttcttttctcctttttggggggtattcagagtgggctgggcccctgggcgagacacagctacctctgttggcatctttttaataccaggaacccagcggctctagccactgagcggctaaatgaaataaagtgga

SEQ ID NO: 359494 - DNA, 6457 bp, Homo sapiens
ccggccggtgtttcaggccctttaagaggcgacgctggagccggagccattttccccccttcggccgcggcgaggaggagccggagcgggagtgacaccgagccggacccagcgcgacctgcggcggctccgggtgactcgggccagtgtagaggtcctcaggccgccggcaggagcagctgggccaattccctggccgggagcggaaggggatggcgtcgggcctgggctccccgtccccctgctcggcgggcagtgaggaggaggatatggatgcacttttgaacaacagcctgcccccaccccacccagaaaatgaagaggacccagaagaggatttgtcagaaacagagactccaaagctcaagaagaagaaaaagcctaagaaacctcgggaccctaaaatccctaagagcaagcgccaaaaaaaggagcgtatgctcttatgccggcagctgggggacagctctggggaggggccagagtttgtggaggaggaggaagaggtggctctgcgctcagacagtgagggcagcgactatactcctggcaagaagaagaagaagaagcttggacctaagaaagagaagaagagcaaatccaagcggaaggaggaggaggaggaggaggatgatgatgatgattcaaaggagcctaaatcatctgctcagctcctggaagactggggcatggaagacattgaccacgtgttctcagaggaggattatcgaaccctcaccaactacaaggccttcagccagtttgtcagacccctcattgctgccaaaaatcccaagattgctgtctccaagatgatgatggttttgggtgcaaaatggcgggagttcagtaccaataaccccttcaaaggcagttctggggcatcagtggcagctgcggcagcagcagcggtagctgtggtggagagcatggtgacagccactgaggttgcaccaccacctccccctgtggaggtgcctatccgcaaggccaagaccaaggagggcaaaggtcccaatgctcggaggaagcccaagggcagccctcgtgtacctgatgccaagaagcctaaacccaagaaagtagctcccctgaaaatcaagctgggaggttttggttccaagcgtaagagatcctcgagtgaggatgatgacttagatgtggaatctgacttcgatgatgccagtatcaatagctattctgtttctgatggttccaccagccgtagtagccgcagccgcaagaaactccgaaccactaaaaagaaaaagaaaggcgaggaggaggtgactgctgtggatggttatgagacagaccaccaggactattgcgaggtgtgccagcaaggcggtgagatcatcctgtgtgatacctgtccccgtgcttaccacatggtctgcctggatcccgacatggagaaggctcccgagggcaagtggagctgcccacactgcgagaaggaaggcatccagtgggaagctaaagaggacaattcggagggtgaggagatcctggaagaggttgggggagacctcgaagaggaggatgaccaccatatggaattctgtcgggtctgcaaggatggtggggaactgctctgctgtgatacctgtccttcttcctaccacatccactgcctgaatcccccacttccagagatccccaacggtgaatggctctgtccccgttgtacgtgtccagctctgaagggcaaagtgcagaagatcctaatctggaagtggggtcagccaccatctcccacaccagtgcctcggcctccagatgctgatcccaacacgccctccccaaagcccttggaggggcggccagagcggcagttctttgtgaaatggcaaggcatgtcttactggcactgctcctgggtttctgaactgcagctggagctgcactgtcaggtgatgttccgaaactatcagcggaagaatgatatggatgagccaccttctggggactttggtggtgatgaagagaaaagccgaaagcgaaagaacaaggaccctaaatttgcagagatggaggaacgcttctatcgctatgggataaaacccgagtggatgatgatccaccgaatcctcaaccacagtgtggacaagaagggccacgtccactacttgatcaagtggcgggacttaccttacgatcaggcttcttgggagagtgaggatgtggagatccaggattacgacctgttcaagcagagctattggaatcacagggagttaatgaggggtgaggaaggccgaccaggcaagaagctcaagaaggtgaagcttcggaagttggagaggcctccagaaacgccaacagttgatccaacagtgaagtatgagcgacagccagagtacctggatgctacaggtggaaccctgcacccctatcaaatggagggcctgaattggttgcgcttctcctgggctcagggcactgacaccatcttggctgatgagatgggccttgggaaaactgtacagacagcagtcttcctgtattccctttacaaggagggtcattccaaaggccccttcctagtgagcgcccctctttctaccatcatcaactgggagcgggagtttgaaatgtgggctccagacatgtatgtcgtaacctatgtgggtgacaaggacagccgtgccatcatccgagagaatgagttctcctttgaagacaatgccattcgtggtggcaagaaggcctcccgcatgaagaaagaggcatctgtgaaattccatgtgctgctgacatcctatgaattgatcaccattgacatggctattttgggctctattgattgggcctgcctcatcgtggatgaagcccatcggctgaagaacaatcagtctaagttcttccgggtattgaatggttactcactccagcacaagctgttgctgactgggacaccattacaaaacaatctggaagagttgtttcatctgctcaactttctcacccccgagaggttccacaatttggaaggttttttggaggagtttgctgacattgccaaggaggaccagataaaaaaactgcatgacatgctggggccgcacatgttgcggcggctcaaagccgatgtgttcaagaacatgccctccaagacagaactaattgtgcgtgtggagctgagccctatgcagaagaaatactacaagtacatcctcactcgaaattttgaagcactcaatgcccgaggtggtggcaaccaggtgtctctgctgaatgtggtgatggatcttaagaagtgctgcaaccatccatacctcttccctgtggctgcaatggaagctcctaagatgcctaatggcatgtatgatggcagtgccctaatcagagcatctgggaaattattgctgctgcagaaaatgctcaagaaccttaaggagggtgggcatcgtgtactcatcttttcccagatgaccaagatgctagacctgctagaggatttcttggaacatgaaggttataaatacgaacgcatcgatggtggaatcactgggaacatgcggcaagaggccattgaccgcttcaatgcaccgggtgctcagcagttctgcttcttgctttccactcgagctgggggccttggaatcaatctggccactgctgacacagttattatctatgactctgactggaacccccataatgacattcaggcctttagcagagctcaccggattgggcaaaataaaaaggtaatgatctaccggtttgtgacccgtgcgtcagtggaggagcgcatcacgcaggtggcaaagaagaaaatgatgctgacgcatctagtggtgcggcctgggctgggctccaagactggatctatgtccaaacaggagcttgatgatatcctcaaatttggcactgaggaactattcaaggatgaagccactgatggaggaggagacaacaaagagggagaagatagcagtgttatccactacgatgataaggccattgaacggctgctagaccgtaaccaggatgagactgaagacacagaattgcagggcatgaatgaatatttgagctcattcaaagtggcccagtatgtggtacgggaagaagaaatgggggaggaagaggaggtagaacgggaaatcattaaacaggaagaaagtgtggatcctgactactgggagaaattgctgcggcaccattatgagcagcagcaagaagatctagcccgaaatctgggcaaaggaaaaagaatccgtaaacaggtcaactacaatgatggctcccaggaggaccgagattggcaggacgaccagtccgacaaccagtccgattactcagtggcttcagaggaaggtgatgaagactttgatgaacgttcagaagctccccgtaggcccagtcgtaagggcctgcggaatgataaagataagccattgcctcctctgttggcccgtgttggtgggaatattgaagtacttggttttaatgctcgtcagcgaaaagcctttcttaatgcaattatgcgatatggtatgccacctcaggatgcttttactacccagtggcttgtaagagacctgcgaggcaaatcagagaaagagttcaaggcatatgtctctcttttcatgcggcatttatgtgagccgggggcagatggggctgagacctttgctgatggtgtcccccgagaaggcctgtctcgccagcatgtccttactagaattggtgttatgtctttgattcgcaagaaggttcaggagtttgaacatgttaatgggcgctggagcatgcctgaactggctgaggtggaggaaaacaagaagatgtcccagccagggtcaccctccccaaaaactcctacaccctccactccaggggacacgcaggcccaacactcctgcacctgtcccacctgcgaagatgggataaaaatagaggaaaatagcctcaaagaagaagagagcatagaaggagaaaaggaggttaaatctacagcccctgagactgccattgagtgtacacaggcccctgcccctgcctcagaggatgaaaaggtcgttgttgaaccccctgagggagaggagaaagtggaaaaggcagaggtgaaggagagaacagaggaacctatggagacagagcccaaaggtgctgctgatgtagagaaggtggaggaaaagtcagcaatagatctgacccctattgtggtagaagacaaagaagagaagaaagaagaagaagagaaaaaagaggtgatgcttcagaatggagagacccccaaggacctgaatgatgagaaacagaagaaaaatattaaacaacgtttcatgtttaacattgcagatggtggttttactgagttgcactccctttggcagaatgaagagcgggcagccacagttaccaagaagacttatgagatctggcatcgacggcatgactactggctgctagccggcattataaaccatggctatgcccggtggcaagacatccagaatgacccacgctatgccatcctcaatgagcctttcaagggtgaaatgaaccgtggcaatttcttagagatcaagaataaatttctagctcgaaggtttaagctcttagaacaagctctggtgattgaggaacagctgcgccgggctgcttacttgaacatgtcagaagacccttctcacccttccatggccctcaacacccgctttgctgaggtggagtgtttggcggaaagtcatcagcacctgtccaaggagtcaatggcaggaaacaagccagccaatgcagtcctgcacaaagttctgaaacagctggaagaactgctgagtgacatgaaagctgatgtgactcgactcccagctaccattgcccgaattcccccagttgctgtgaggttacagatgtcagagcgtaacattctcagccgcctggcaaaccgggcacccgaacctaccccacagcaggtagcccagcagcagtgaagatgcagactgataccacctccaccgctgagcagtgaccttcctcactttctcttgtcccagcttctcccctgggggcctgagagaccctcaccttccttctgcccatcttccatgttgtaaaggaacagccccagtgcactgggggaggggagggagtgaggggcagtggtgcccttcctgcagaagagacatgcagcagtagcgctggcgccatctgcaggagctggcgggctggccttctggaccctggcttctccccactgtaacgcctgttacacacaaactgttgtgggttcctgccaggcttgaagaaaatgatctgaattttttcctccttttggttttattttgttggtttattttgtgttttcttttctcctttttggggggtattcagagtgggctgggcccctgggcgagacacagctacctctgttggcatctttttaataccaggaacccagcggctctagccactgagcggctaaatgaaataaagtgga

SEQ ID NO: 359495 - DNA, 6508 bp, Homo sapiens
ccggccggtgtttcaggccctttaagaggcgacgctggagccggagccattttccccccttcggccgcggcgaggaggagccggagcgggagtgacaccgagccggacccagcgcgacctgcggcggctccgggtgactcgggccagtgtagaggtcctcaggccgccggcaggagcagctgggccaattccctggccgggagcggaaggggatggcgtcgggcctgggctccccgtccccctgctcggcgggcagtgaggaggaggatatggatgcacttttgaacaacagcctgcccccaccccacccagaaaatgaagaggacccagaagaggatttgtcagaaacagagactccaaagctcaagaagaagaaaaagcctaagaaacctcgggaccctaaaatccctaagagcaagcgccaaaaaaaggagcgtatgctcttatgccggcagctgggggacagctctggggaggggccagagtttgtggaggaggaggaagaggtggctctgcgctcagacagtgagggcagcgactatactcctggcaagaagaagaagaagaagcttggacctaagaaagagaagaagagcaaatccaagcggaaggaggaggaggaggaggaggatgatgatgatgattcaaaggagcctaaatcatctgctcagctcctggaagactggggcatggaagacattgaccacgtgttctcagaggaggattatcgaaccctcaccaactacaaggccttcagccagtttgtcagacccctcattgctgccaaaaatcccaagattgctgtctccaagatgatgatggttttgggtgcaaaatggcgggagttcagtaccaataaccccttcaaaggcagttctggggcatcagtggcagctgcggcagcagcagcggtagctgtggtggagagcatggtgacagccactgaggttgcaccaccacctccccctgtggaggtgcctatccgcaaggccaagaccaaggagggcaaaggtcccaatgctcggaggaagcccaagggcagccctcgtgtacctgatgccaagaagcctaaacccaagaaagtagctcccctgaaaatcaagctgggaggttttggttccaagcgtaagagatcctcgagtgaggatgatgacttagatgtggaatctgacttcgatgatgccagtatcaatagctattctgtttctgatggttccaccagccgtagtagccgcagccgcaagaaactccgaaccactaaaaagaaaaagaaaggcgaggaggaggtgactgctgtggatggttatgagacagaccaccaggactattgcgaggtgtgccagcaaggcggtgagatcatcctgtgtgatacctgtccccgtgcttaccacatggtctgcctggatcccgacatggagaaggctcccgagggcaagtggagctgcccacactgcgagaaggaaggcatccagtgggaagctaaagaggacaattcggagggtgaggagatcctggaagaggttgggggagacctcgaagaggaggatgaccaccatatggaattctgtcgggtctgcaaggatggtggggaactgctctgctgtgatacctgtccttcttcctaccacatccactgcctgaatcccccacttccagagatccccaacggtgaatggctctgtccccgttgtacgtgtccagctctgaagggcaaagtgcagaagatcctaatctggaagtggggtcagccaccatctcccacaccagtgcctcggcctccagatgctgatcccaacacgccctccccaaagcccttggaggggcggccagagcggcagttctttgtgaaatggcaaggcatgtcttactggcactgctcctgggtttctgaactgcagctggagctgcactgtcaggtgatgttccgaaactatcagcggaagaatgatatggatgagccaccttctggggactttggtggtgatgaagagaaaagccgaaagcgaaagaacaaggaccctaaatttgcagagatggaggaacgcttctatcgctatgggataaaacccgagtggatgatgatccaccgaatcctcaaccacagtgtggacaagaagggccacgtccactacttgatcaagtggcgggacttaccttacgatcaggcttcttgggagagtgaggatgtggagatccaggattacgacctgttcaagcagagctattggaatcacagggagttaatgaggggtgaggaaggccgaccaggcaagaagctcaagaaggtgaagcttcggaagttggagaggcctccagaaacgccaacagttgatccaacagtgaagtatgagcgacagccagagtacctggatgctacaggtggaaccctgcacccctatcaaatggagggcctgaattggttgcgcttctcctgggctcagggcactgacaccatcttggctgatgagatgggccttgggaaaactgtacagacagcagtcttcctgtattccctttacaaggagggtcattccaaaggccccttcctagtgagcgcccctctttctaccatcatcaactgggagcgggagtttgaaatgtgggctccagacatgtatgtcgtaacctatgtgggtgacaaggacagccgtgccatcatccgagagaatgagttctcctttgaagacaatgccattcgtggtggcaagaaggcctcccgcatgaagaaagaggcatctgtgaaattccatgtgctgctgacatcctatgaattgatcaccattgacatggctattttgggctctattgattgggcctgcctcatcgtggatgaagcccatcggctgaagaacaatcagtctaagttcttccgggtattgaatggttactcactccagcacaagctgttgctgactgggacaccattacaaaacaatctggaagagttgtttcatctgctcaactttctcacccccgagaggttccacaatttggaaggttttttggaggagtttgctgacattgccaaggaggaccagataaaaaaactgcatgacatgctggggccgcacatgttgcggcggctcaaagccgatgtgttcaagaacatgccctccaagacagaactaattgtgcgtgtggagctgagccctatgcagaagaaatactacaagtacatcctcactcgaaattttgaagcactcaatgcccgaggtggtggcaaccaggtgtctctgctgaatgtggtgatggatcttaagaagtgctgcaaccatccatacctcttccctgtggctgcaatggaagctcctaagatgcctaatggcatgtatgatggcagtgccctaatcagagcatctgggaaattattgctgctgcagaaaatgctcaagaaccttaaggagggtgggcatcgtgtactcatcttttcccagatgaccaagatgctagacctgctagaggatttcttggaacatgaaggttataaatacgaacgcatcgatggtggaatcactgggaacatgcggcaagaggccattgaccgcttcaatgcaccgggtgctcagcagttctgcttcttgctttccactcgagctgggggccttggaatcaatctggccactgctgacacagttattatctatgactctgactggaacccccataatgacattcaggcctttagcagagctcaccggattgggcaaaataaaaaggtaatgatctaccggtttgtgacccgtgcgtcagtggaggagcgcatcacgcaggtggcaaagaagaaaatgatgctgacgcatctagtggtgcggcctgggctgggctccaagactggatctatgtccaaacaggagcttgatgatatcctcaaatttggcactgaggaactattcaaggatgaagccactgatggaggaggagacaacaaagagggagaagatagcagtgttatccactacgatgataaggccattgaacggctgctagaccgtaaccaggatgagactgaagacacagaattgcagggcatgaatgaatatttgagctcattcaaagtggcccagtatgtggtacgggaagaagaaatgggggaggaagaggaggtagaacgggaaatcattaaacaggaagaaagtgtggatcctgactactgggagaaattgctgcggcaccattatgagcagcagcaagaagatctagcccgaaatctgggcaaaggaaaaagaatccgtaaacaggtcaactacaatgatggctcccaggaggaccgagattggcaggacgaccagtccgacaaccagtccgattactcagtggcttcagaggaaggtgatgaagactttgatgaacgttcagaagctccccgtaggcccagtcgtaagggcctgcggaatgataaagataagccattgcctcctctgttggcccgtgttggtgggaatattgaagtacttggttttaatgctcgtcagcgaaaagcctttcttaatgcaattatgcgatatggtatgccacctcaggatgcttttactacccagtggcttgtaagagacctgcgaggcaaatcagagaaagagttcaaggcatatgtctctcttttcatgcggcatttatgtgagccgggggcagatggggctgagacctttgctgatggtgtcccccgagaaggcctgtctcgccagcatgtccttactagaattggtgttatgtctttgattcgcaagaaggttcaggagtttgaacatgttaatgggcgctggagcatgcctgaactggctgaggtggaggaaaacaagaagatgtcccagccagggtcaccctccccaaaaactcctacaccctccactccaggggacacgcagcccaacactcctgcacctgtcccacctgctgaagatgggataaaaatagaggaaaatagcctcaaagaagaagagagcatagaaggagaaaaggaggttaaatctacagcccctgagactgccattgagtgtacacaggcccctgcccctgcctcagaggatgaaaaggtcgttgttgaaccccctgagggagaggagaaagtggaaaaggcagaggtgaaggagagaacagaggaacctatggagacagagcccaaaggtgctgctgatgtagagaaggtggaggaaaagtcagcaatagatctgacccctattgtggtagaagacaaagaagagaagaaagaagaagaagagaaaaaagaggtgatgcttcagaatggagagacccccaaggacctgaatgatgagaaacagaagaaaaatattaaacaacgtttcatgtttaacattgcagatggtggttttactgagttgcactccctttggcagaatgaagagcgggcagccacagttaccaagaagacttatgagatctggcatcgacggcatgactactggctgctagccggcattataaaccatggctatgcccggtggcaagacatccagaatgacccacgctatgccatcctcaatgagcctttcaagggtgaaatgaaccgtggcaatttcttagagatcaagaataaatttctagctcgaaggtttaagctcttagaacaagctctggtgattgaggaacagctgcgccgggctgcttacttgaacatgtcagaagacccttctcacccttccatggccctcaacacccgctttgctgaggtggagtgtttggcggaaagtcatcagcacctgtccaaggagtcaatggcaggaaacaagccagccaatgcagtcctgcacaaagttctgaaacagctggaagaactgctgagtgacatgaaagctgatgtgactcgactcccagctaccattgcccgaattcccccagttgctgtgaggttacagatgtcagagcgtaacattctcagccgcctggcaaaccgggcacccgaacctaccccacagcaggtagcccagcagcagtgaagatgcagactgataccacctccaccgctgagcagtgaccttcctcactttctcttgtcccagcttctcccctgggggcctgagagaacagaggaacctatggagacagagcccaaaggtgctgctgatgtagagaaggtggaggaaaagtcagcaatagatctgacccctattgtggtagaagacaaagaagagaagaaagaagaagaagagaaaaaagaggtgatgcttcagaatggagagacccccaaggacctgaatgatgagaaacagaagaaaaatattaaacaacgtttcatgtttaacattgcagatggtggttttactgagttgcactccctttggcagagtgaagagcgggcagccacagttaccaagaagacttatgagatctggcgtccgtagcggggattgaccttaactgggtgatagcccgggattcattaaaccatgggatatgccgcggtggcaagacattcagaattgaaccagatatgcccatcctcaattaagccttcaagggtgaaatgaccgggggaatgcttagagatcagatg

SEQ ID NO: 359496 - DNA, 2629 bp, Homo sapiens
gagacaacaaagagggagaagatagcagtgttatccactacgatgataaggccattgaactattcaaggatgaagccactgatggaggaggagacaacaaagagggagaagatagcagtgttatccactacgatgataaggccattgaacggctgctagaccgtaaccaggatgagactgaagacacagaattgcagggcatgaatgaatatttgagctcattcaaagtggcccagtatgtggtacgggaagaagaaatgggggaggaagaggaggtagaacgggaaatcattaaacaggaagaaagtgtggatcctgactactgggagaaattgctgcggcaccattatgagcagcagcaagaagatctagcccgaaatctgggcaaaggaaaaagaatccgtaaacaggtcaactacaatgatggctcccaggaggaccgagattggcaggacgaccagtccgacaaccagtccgattactcagtggcttcagaggaaggtgatgaagactttgatgaacgttcagaagctccccgtaggcccagtcgtaagggcctgcggaatgataaagataagccattgcctcctctgttggcccgtgttggtgggaatattgaagtacttggttttaatgctcgtcagcgaaaagcctttcttaatgcaattatgcgatatggtatgccacctcaggatgcttttactacccagtggcttgtaagagacctgcgaggcaaatcagagaaagagttcaaggcatatgtctctcttttcatgcggcatttatgtgagccgggggcagatggggctgagacctttgctgatggtgtcccccgagaaggcctgtctcgccagcatgtccttactagaattggtgttatgtctttgattcgcaagaaggttcaggagtttgaacatgttaatgggcgctggagcatgcctgaactggctgaggtggaggaaaacaagaagatgtcccagccagggtcaccctccccaaaaactcctacaccctccactccaggggacacgcagcccaacactcctgcacctgtcccacctgctgaagatgggataaaaatagaggaaaatagcctcaaagaagaagagagcatagaaggagaaaaggaggttaaatctacagcccctgagactgccattgagtgtacacaggcccctgcccctgcctcagaggatgaaaaggtcgttgttgaaccccctgagggagaggagaaagtggaaaaggcagaggtgaaggagagaacagaggaacctatggagacagagcccaaaggtgctgctgatgtagagaaggtggaggaaaagtcagcaatagatctgacccctattgtggtagaagacaaagaagagaagaaagaagaagaagagaaaaaagaggtgatgcttcagaatggagagacccccaaggacctgaatgatgagaaacagaagaaaaatattaaacaacgtttcatgtttaacattgcagatggtggttttactgagttgcactccctttggcagaatgaagagcgggcagccacagttaccaagaagacttatgagatctggcatcgacggcatgactactggctgctagccggcattataaaccatggctatgcccggtggcaagacatccagaatgacccacgctatgccatcctcaatgagcctttcaagggtgaaatgaaccgtggcaatttcttagagatcaagaataaatttctagctcgaaggtttaagctcttagaacaagctctggtgattgaggaacagctgcgccgggctgcttacttgaacatgtcagaagacccttctcacccttccatggccctcaacacccgctttgctgaggtggagtgtttggcggaaagtcatcagcacctgtccaaggagtcaatggcaggaaacaagccagccaatgcagtcctgcacaaagttctgaaacagctggaagaactgctgagtgacatgaaagctgatgtgactcgactcccagctaccattgcccgaattcccccagttgctgtgaggttacagatgtcagagcgtaacattctcagccgcctggcaaaccgggcacccgaacctaccccacagcaggtagcccagcagcagtgaagatgcagactgataccacctccaccgctgagcagtgaccttcctcactttctcttgtcccagcttctcccctgggggcctgagagaccctcaccttccttctgcccatcttccatgttgtaaaggaacagccccagtgcactgggggaggggagggagtgaggggcagtggtgcccttcctgcagaagagacatgcagcagtagcgctggcgccatctgcaggagctggcgggctggccttctggaccctggcttctccccactgtaacgcctgttacacacaaactgttgtgggttcctgccaggcttgaagaaaatgatctgaattttttcctccttttggttttattttgttggtttattttgtgttttcttttctcctttttggggggtattcagagtgggctgggcccctgggcgagacacagctacctctgttggcatctttttaataccaggaacccagcggctctagccactgagcggctaaatgaaataaagtgga

SEQ ID NO: 359497 - DNA, 6348 bp, Homo sapiens
ccggccggtgtttcaggccctttaagaggcgacgctggagccggagccattttccccccttcggccgcggcgaggaggagccggagcgggagtgacaccgagccggacccagcgcgacctgcggcggctccgggtgactcgggccagtgtagaggtcctcaggccgccggcaggagcagctgggccaattccctggccgggagcggaaggggatggcgtcgggcctgggctccccgtccccctgctcggcgggcagtgaggaggaggatatggatgcacttttgaacaacagcctgcccccaccccacccagaaaatgaagaggacccagaagaggatttgtcagaaacagagactccaaagctcaagaagaagaaaaagcctaagaaacctcgggaccctaaaatccctaagagcaagcgccaaaaaaaggagcgtatgctcttatgccggcagctgggggacagctctggggaggggccagagtttgtggaggaggaggaagaggtggctctgcgctcagacagtgagggcagcgactatactcctggcaagaagaagaagaagaagcttggacctaagaaagagaagaagagcaaatccaagcggaaggaggaggaggaggaggaggatgatgatgatgattcaaaggagcctaaatcatctgctcagctcctggaagactggggcatggaagacattgaccacgtgttctcagaggaggattatcgaaccctcaccaactacaaggccttcagccagtttgtcagacccctcattgctgccaaaaatcccaagattgctgtctccaagatgatgatggttttgggtgcaaaatggcgggagttcagtaccaataaccccttcaaaggcagttctggggcatcagtggcagctgcggcagcagcagcggtagctgtggtggagagcatggtgacagccactgaggttgcaccaccacctccccctgtggaggtgcctatccgcaaggccaagaccaaggagggcaaaggtcccaatgctcggaggaagcccaagggcagccctcgtgtacctgatgccaagaagcctaaacccaagaaagtagctcccctgaaaatcaagctgggaggttttggttccaagcgtaagagatcctcgagtgaggatgatgacttagatgtggaatctgacttcgatgatgccagtatcaatagctattctgtttctgatggttccaccagccgtagtagccgcagccgcaagaaactccgaaccactaaaaagaaaaagaaaggcgaggaggaggtgactgctgtggatggttatgagacagaccaccaggactattgcgaggtgtgccagcaaggcggtgagatcatcctgtgtgatacctgtccccgtgcttaccacatggtctgcctggatcccgacatggagaaggctcccgagggcaagtggagctgcccacactgcgagaaggaaggcatccagtgggaagctaaagaggacaattcggagggtgaggagatcctggaagaggttgggggagacctcgaagaggaggatgaccaccatatggaattctgtcgggtctgcaaggatggtggggaactgctctgctgtgatacctgtccttcttcctaccacatccactgcctgaatcccccacttccagagatccccaacggtgaatggctctgtccccgttgtacgtgtccagctctgaagggcaaagtgcagaagatcctaatctggaagtggggtcagccaccatctcccacaccagtgcctcggcctccagatgctgatcccaacacgccctccccaaagcccttggaggggcggccagagcggcagttctttgtgaaatggcaaggcatgtcttactggcactgctcctgggtttctgaactgcagctggagctgcactgtcaggtgatgttccgaaactatcagcggaagaatgatatggatgagccaccttctggggactttggtggtgatgaagagaaaagccgaaagcgaaagaacaaggaccctaaatttgcagagatggaggaacgcttctatcgctatgggataaaacccgagtggatgatgatccaccgaatcctcaaccacagtgtggacaagaagggccacgtccactacttgatcaagtggcgggacttaccttacgatcaggcttcttgggagagtgaggatgtggagatccaggattacgacctgttcaagcagagctattggaatcacagggagttaatgaggggtgaggaaggccgaccaggcaagaagctcaagaaggtgaagcttcggaagttggagaggcctccagaaacgccaacagttgatccaacagtgaagtatgagcgacagccagagtacctggatgctacaggtggaaccctgcacccctatcaaatggagggcctgaattggttgcgcttctcctgggctcagggcactgacaccatcttggctgatgagatgggccttgggaaaactgtacagacagcagtcttcctgtattccctttacaaggagggtcattccaaaggccccttcctagtgagcgcccctctttctaccatcatcaactgggagcgggagtttgaaatgtgggctccagacatgtatgtcgtaacctatgtgggtgacaaggacagccgtgccatcatccgagagaatgagttctcctttgaagacaatgccattcgtggtggcaagaaggcctcccgcatgaagaaagaggcatctgtgaaattccatgtgctgctgacatcctatgaattgatcaccattgacatggctattttgggctctattgattgggcctgcctcatcgtggatgaagcccatcggctgaagaacaatcagtctaagttcttccgggtattgaatggttactcactccagcacaagctgttgctgactgggacaccattacaaaacaatctggaagagttgtttcatctgctcaactttctcacccccgagaggttccacaatttggaaggttttttggaggagtttgctgacattgccaaggaggaccagataaaaaaactgcatgacatgctggggccgcacatgttgcggcggctcaaagccgatgtgttcaagaacatgccctccaagacagaactaattgtgcgtgtggagctgagccctatgcagaagaaatactacaagtacatcctcactcgaaattttgaagcactcaatgcccgaggtggtggcaaccaggtgtctctgctgaatgtggtgatggatcttaagaagtgctgcaaccatccatacctcttccctgtggctgcaatggaagctcctaagatgcctaatggcatgtatgatggcagtgccctaatcagagcatctgggaaattattgctgctgcagaaaatgctcaagaaccttaaggagggtgggcatcgtgtactcatcttttcccagatgaccaagatgctagacctgctagaggatttcttggaacatgaaggttataaatacgaacgcatcgatggtggaatcactgggaacatgcggcaagaggccattgaccgcttcaatgcaccgggtgctcagcagttctgcttcttgctttccactcgagctgggggccttggaatcaatctggccactgctgacacagttattatctatgactctgactggaacccccataatgacattcaggcctttagcagagctcaccggattgggcaaaataaaaaggtaatgatctaccggtttgtgacccgtgcgtcagtggaggagcgcatcacgcaggtggcaaagaagaaaatgatgctgacgcatctagtggtgcggcctgggctgggctccaagactggatctatgtccaaacaggagcttgatgatatcctcaaatttggcactgaggaactattcaaggatgaagccactgatggaggaggagacaacaaagagggagaagatagcagtgttatccactacgatgataaggccattgaacggctgctagaccgtaaccaggatgagactgaagacacagaattgcagggcatgaatgaatatttgagctcattcaaagtggcccagtatgtggtacgggaagaagaaatgggggaggaagaggaggtagaacgggaaatcattaaacaggaagaaagtgtggatcctgactactgggagaaattgctgcggcaccattatgagcagcagcaagaagatctagcccgaaatctgggcaaaggaaaaagaatccgtaaacaggtcaactacaatgatggctcccaggaggaccgagattggcaggacgaccagtccgacaaccagtccgattactcagtggcttcagaggaaggtgatgaagactttgatgaacgttcagaagctccccgtaggcccagtcgtaagggcctgcggaatgataaagataagccattgcctcctctgttggcccgtgttggtgggaatattgaagtacttggttttaatgctcgtcagcgaaaagcctttcttaatgcaattatgcgatatggtatgccacctcaggatgcttttactacccagtggcttgtaagagacctgcgaggcaaatcagagaaagagttcaaggcatatgtctctcttttcatgcggcatttatgtgagccgggggcagatggggctgagacctttgctgatggtgtcccccgagaaggcctgtctcgccagcatgtccttactagaattggtgttatgtctttgattcgcaagaaggttcaggagtttgaacatgttaatgggcgctggagcatgcctgaactggctgaggtggaggaaaacaagaagatgtcccagccagggtcaccctccccaaaaactcctacaccctccactccaggggacacgcagcccaacactcctgcacctgtcccacctgctgaagatgggataaaaatagaggaaaatagcctcaaagaagaagagagcatagaaggagaaaaggaggttaaatctacagcccctgagactgccattgagtgtacacaggcccctgcccctgcctcagaggatgaaaaggtcgttgttgaaccccctgagggagaggagaaagtggaaaaggcagaggtgaaggagagaacagaggaacctatggagacagagcccaaaggtgctgctgatgtagagaaggtggaggaaaagtcagcaatagatctgacccctattgtggtagaagacaaagaagagaagaaagaagaagaagagaaaaaagaggtgatgcttcagaatggagagacccccaaggacctgaatgatgagaaacagaagaaaaatattaaacaacgtttcatgtttaacattgcagatggtggttttactgagttgcactccctttggcagaatgaagagcgggcagccacagttaccaagaagacttatgagatctggcatcgacggcatgactactggctgctagccggcattataaaccatggctatgcccggtggcaagacatccagaatgacccacgctatgccatcctcaatgagcctttcaagggtgaaatgaaccgtggcaatttcttagagatcaagaataaatttctagctcgaaggtttaagctcttagaacaagctctggtgattgaggaacagctgcgccgggctgcttacttgaacatgtcagaagacccttctcacccttccatggccctcaacacccgctttgctgaggtggagtgtttggcggaaagtcatcagcacctgtccaaggagtcaatggcaggaaacaagccagccaatgcagtcctgcacaaagttctgaaacagctggaagaactgctgagtgacatgaaagctgatgtgactcgactcccagctaccattgcccgaattcccccagttgctgtgaggttacagatgtcagagcgtaacattctcagccgcctggcaaaccgggcacccgaacctaccccacagcaggtagcccagcagcaatagatctgacccctattgtggtagaagacaaagaagagaagaaagaagaagaagagaaaaaagaggtgatgcttcagaatggagagacccccaaggacctgaatgatgagaaacagaagaaaaatattaaacaacgtttcatgtttaacattgcagatggtggttttactgagttgcactccctttggcagagtgaagagcgggcagccacagttaccaagaagacttatgagatctggcgtccgtagcggggattgaccttaactgggtgatagcccgggattcattaaaccatgggatatgccgcggtggcaagacattcagaattgaaccagatatgcccatcctcaattaagccttcaagggtgaaatgaccgggggaatgcttagagatcagatg

SEQ ID NO: 359498 - DNA, 5128 bp, Homo sapiens
ccggccggtgtttcaggccctttaagaggcgacgctggagccggagccattttccccccttcggccgcggcgaggaggagccggagcgggagtgacaccgagccggacccagcgcgacctgcggcggctccgggtgactcgggccagtgtagaggtcctcaggccgccggcaggagcagctgggccaattccctggccgggagcggaaggggatggcgtcgggcctgggctccccgtccccctgctcggcgggcagtgaggaggaggatatggatgcacttttgaacaacagcctgcccccaccccacccagaaaatgaagaggacccagaagaggatttgtcagaaacagagactccaaagctcaagaagaagaaaaagcctaagaaacctcgggaccctaaaatccctaagagcaagcgccaaaaaaaggagcgtatgctcttatgccggcagctgggggacagctctggggaggggccagagtttgtggaggaggaggaagaggtggctctgcgctcagacagtgagggcagcgactatactcctggcaagaagaagaagaagaagcttggacctaagaaagagaagaagagcaaatccaagcggaaggaggaggaggaggaggaggatgatgatgatgattcaaaggagcctaaatcatctgctcagctcctggaagactggggcatggaagacattgaccacgtgttctcagaggaggattatcgaaccctcaccaactacaaggccttcagccagtttgtcagacccctcattgctgccaaaaatcccaagattgctgtctccaagatgatgatggttttgggtgcaaaatggcgggagttcagtaccaataaccccttcaaaggcagttctggggcatcagtggcagctgcggcagcagcagcggtagctgtggtggagagcatggtgacagccactgaggttgcaccaccacctccccctgtggaggtgcctatccgcaaggccaagaccaaggagggcaaaggtcccaatgctcggaggaagcccaagggcagccctcgtgtacctgatgccaagaagcctaaacccaagaaagtagctcccctgaaaatcaagctgggaggttttggttccaagcgtaagagatcctcgagtgaggatgatgacttagatgtggaatctgacttcgatgatgccagtatcaatagctattctgtttctgatggttccaccagccgtagtagccgcagccgcaagaaactccgaaccactaaaaagaaaaagaaaggcgaggaggaggtgactgctgtggatggttatgagacagaccaccaggactattgcgaggtgtgccagcaaggcggtgagatcatcctgtgtgatacctgtccccgtgcttaccacatggtctgcctggatcccgacatggagaaggctcccgagggcaagtggagctgcccacactgcgagaaggaaggcatccagtgggaagctaaagaggacaattcggagggtgaggagatcctggaagaggttgggggagacctcgaagaggaggatgaccaccatatggaattctgtcgggtctgcaaggatggtggggaactgctctgctgtgatacctgtccttcttcctaccacatccactgcctgaatcccccacttccagagatccccaacggtgaatggctctgtccccgttgtacgtgtccagctctgaagggcaaagtgcagaagatcctaatctggaagtggggtcagccaccatctcccacaccagtgcctcggcctccagatgctgatcccaacacgccctccccaaagcccttggaggggcggccagagcggcagttctttgtgaaatggcaaggcatgtcttactggcactgctcctgggtttctgaactgcagctggagctgcactgtcaggtgatgttccgaaactatcagcggaagaatgatatggatgagccaccttctggggactttggtggtgatgaagagaaaagccgaaagcgaaagaacaaggaccctaaatttgcagagatggaggaacgcttctatcgctatgggataaaacccgagtggatgatgatccaccgaatcctcaaccacagtgtggacaagaagggccacgtccactacttgatcaagtggcgggacttaccttacgatcaggcttcttgggagagtgaggatgtggagatccaggattacgacctgttcaagcagagctattggaatcacagggagttaatgaggggtgaggaaggccgaccaggcaagaagctcaagaaggtgaagcttcggaagttggagaggcctccagaaacgccaacagttgatccaacagtgaagtatgagcgacagccagagtacctggatgctacaggtggaaccctgcacccctatcaaatggagggcctgaattggttgcgcttctcctgggctcagggcactgacaccatcttggctgatgagatgggccttgggaaaactgtacagacagcagtcttcctgtattccctttacaaggagggtcattccaaaggccccttcctagtgagcgcccctctttctaccatcatcaactgggagcgggagtttgaaatgtgggctccagacatgtatgtcgtaacctatgtgggtgacaaggacagccgtgccatcatccgagagaatgagttctcctttgaagacaatgccattcgtggtggcaagaaggcctcccgcatgaagaaagaggcatctgtgaaattccatgtgctgctgacatcctatgaattgatcaccattgacatggctattttgggctctattgattgggcctgcctcatcgtggatgaagcccatcggctgaagaacaatcagtctaagttcttccgggtattgaatggttactcactccagcacaagctgttgctgactgggacaccattacaaaacaatctggaagagttgtttcatctgctcaactttctcacccccgagaggttccacaatttggaaggttttttggaggagtttgctgacattgccaaggaggaccagataaaaaaactgcatgacatgctggggccgcacatgttgcggcggctcaaagccgatgtgttcaagaacatgccctccaagacagaactaattgtgcgtgtggagctgagccctatgcagaagaaatactacaagtacatcctcactcgaaattttgaagcactcaatgcccgaggtggtggcaaccaggtgtctctgctgaatgtggtgatggatcttaagaagtgctgcaaccatccatacctcttccctgtggctgcaatggaagctcctaagatgcctaatggcatgtatgatggcagtgccctaatcagagcatctgggaaattattgctgctgcagaaaatgctcaagaaccttaaggagggtgggcatcgtgtactcatcttttcccagatgaccaagatgctagacctgctagaggatttcttggaacatgaaggttataaatacgaacgcatcgatggtggaatcactgggaacatgcggcaagaggccattgaccgcttcaatgcaccgggtgctcagcagttctgcttcttgctttccactcgagctgggggccttggaatcaatctggccactgctgacacagttattatctatgactctgactggaacccccataatgacattcaggcctttagcagagctcaccggattgggcaaaataaaaaggtaatgatctaccggtttgtgacccgtgcgtcagtggaggagagaacagaggaacctatggagacagagcccaaaggtgctgctgatgtagagaaggtggaggaaaagtcagcaatagatctgacccctattgtggtagaagacaaagaagagaagaaagaagaagaagagaaaaaagaggtgatgcttcagaatggagagacccccaaggacctgaatgatgagaaacagaagaaaaatattaaacaacgtttcatgtttaacattgcagatggtggttttactgagttgcactccctttggcagaatgaagagcgggcagccacagttaccaagaagacttatgagatctggcatcgacggcatgactactggctgctagccggcattataaaccatggctatgcccggtggcaagacatccagaatgacccacgctatgccatcctcaatgagcctttcaagggtgaaatgaaccgtggcaatttcttagagatcaagaataaatttctagctcgaaggtttaagctcttagaacaagctctggtgattgaggaacagctgcgccgggctgcttacttgaacatgtcagaagacccttctcacccttccatggccctcaacacccgctttgctgaggtggagtgtttggcggaaagtcatcagcacctgtccaaggagtcaatggcaggaaacaagccagccaatgcagtcctgcacaaagttctgaaacagctggaagaactgctgagtgacatgaaagctgatgtgactcgactcccagctaccattgcccgaattcccccagttgctgtgaggttacagatgtcagagcgtaacattctcagccgcctggcaaaccgggcacccgaacctaccccacagcaggtagcccagcagcagtgaagatgcagactgataccacctccaccgctgagcagtgaccttcctcactttctcttgtcccagcttctcccctgggggcctgagagaccctcaccttccttctgcccatcttccatgttgtaaaggaacagccccagtgcactgggggaggggagggagtgaggggcagtggtgcccttcctgcagaagagacatgcagcagtagcgctggcgccatctgcaggagctggcgggctggccttctggaccctggcttctccccactgtaacgcctgttacacacaaactgttgtgggttcctgccaggcttgaagaaaatgatctgaattttttcctccttttggttttattttgttggtttattttgtgttttcttttctcctttttggggggtattcagagtgggctgggcccctgggcgagacacagctacctctgttggcatctttttaataccaggaacccagcggctctagccactgagcggctaaatgaaataaagtgga

SEQ ID NO: 359499 - DNA, 5780 bp, Homo sapiens
ccggccggtgtttcaggccctttaagaggcgacgctggagccggagccattttccccccttcggccgcggcgaggaggagccggagcgggagtgacaccgagccggacccagcgcgacctgcggcggctccgggtgactcgggccagtgtagaggtcctcaggccgccggcaggagcagctgggccaattccctggccgggagcggaaggggatggcgtcgggcctgggctccccgtccccctgctcggcgggcagtgaggaggaggatatggatgcacttttgaacaacagcctgcccccaccccacccagaaaatgaagaggacccagaagaggatttgtcagaaacagagactccaaagctcaagaagaagaaaaagcctaagaaacctcgggaccctaaaatccctaagagcaagcgccaaaaaaaggagcgtatgctcttatgccggcagctgggggacagctctggggaggggccagagtttgtggaggaggaggaagaggtggctctgcgctcagacagtgagggcagcgactatactcctggcaagaagaagaagaagaagcttggacctaagaaagagaagaagagcaaatccaagcggaaggaggaggaggaggaggaggatgatgatgatgattcaaaggagcctaaatcatctgctcagctcctggaagactggggcatggaagacattgaccacgtgttctcagaggaggattatcgaaccctcaccaactacaaggccttcagccagtttgtcagacccctcattgctgccaaaaatcccaagattgctgtctccaagatgatgatggttttgggtgcaaaatggcgggagttcagtaccaataaccccttcaaaggcagttctggggcatcagtggcagctgcggcagcagcagcggtagctgtggtggagagcatggtgacagccactgaggttgcaccaccacctccccctgtggaggtgcctatccgcaaggccaagaccaaggagggcaaaggtcccaatgctcggaggaagcccaagggcagccctcgtgtacctgatgccaagaagcctaaacccaagaaagtagctcccctgaaaatcaagctgggaggttttggttccaagcgtaagagatcctcgagtgaggatgatgacttagatgtggaatctgacttcgatgatgccagtatcaatagctattctgtttctgatggttccaccagccgtagtagccgcagccgcaagaaactccgaaccactaaaaagaaaaagaaaggcgaggaggaggtgactgctgtggatggttatgagacagaccaccaggactattgcgaggtgtgccagcaaggcggtgagatcatcctgtgtgatacctgtccccgtgcttaccacatggtctgcctggatcccgacatggagaaggctcccgagggcaagtggagctgcccacactgcgagaaggaaggcatccagtgggaagctaaagaggacaattcggagggtgaggagatcctggaagaggttgggggagacctcgaagaggaggatgaccaccatatggaattctgtcgggtctgcaaggatggtggggaactgctctgctgtgatacctgtccttcttcctaccacatccactgcctgaatcccccacttccagagatccccaacggtgaatggctctgtccccgttgtacgtgtccagctctgaagggcaaagtgcagaagatcctaatctggaagtggggtcagccaccatctcccacaccagtgcctcggcctccagatgctgatcccaacacgccctccccaaagcccttggaggggcggccagagcggcagttctttgtgaaatggcaaggcatgtcttactggcactgctcctgggtttctgaactgcagctggagctgcactgtcaggtgatgttccgaaactatcagcggaagaatgatatggatgagccaccttctggggactttggtggtgatgaagagaaaagccgaaagcgaaagaacaaggaccctaaatttgcagagatggaggaacgcttctatcgctatgggataaaacccgagtggatgatgatccaccgaatcctcaaccacagtgtggacaagaagggccacgtccactacttgatcaagtggcgggacttaccttacgatcaggcttcttgggagagtgaggatgtggagatccaggattacgacctgttcaagcagagctattggaatcacagggagttaatgaggggtgaggaaggccgaccaggcaagaagctcaagaaggtgaagcttcggaagttggagaggcctccagaaacgccaacagttgatccaacagtgaagtatgagcgacagccagagtacctggatgctacaggtggaaccctgcacccctatcaaatggagggcctgaattggttgcgcttctcctgggctcagggcactgacaccatcttggctgatgagatgggccttgggaaaactgtacagacagcagtcttcctgtattccctttacaaggagggtcattccaaaggccccttcctagtgagcgcccctctttctaccatcatcaactgggagcgggagtttgaaatgtgggctccagacatgtatgtcgtaacctatgtgggtgacaaggacagccgtgccatcatccgagagaatgagttctcctttgaagacaatgccattcgtggtggcaagaaggcctcccgcatgaagaaagaggcatctgtgaaattccatgtgctgctgacatcctatgaattgatcaccattgacatggctattttgggctctattgattgggcctgcctcatcgtggatgaagcccatcggctgaagaacaatcagtctaagttcttccgggtattgaatggttactcactccagcacaagctgttgctgactgggacaccattacaaaacaatctggaagagttgtttcatctgctcaactttctcacccccgagaggttccacaatttggaaggttttttggaggagtttgctgacattgccaaggaggaccagataaaaaaactgcatgacatgctggggccgcacatgttgcggcggctcaaagccgatgtgttcaagaacatgccctccaagacagaactaattgtgcgtgtggagctgagccctatgcagaagaaatactacaagtacatcctcactcgaaattttgaagcactcaatgcccgaggtggtggcaaccaggtgtctctgctgaatgtggtgatggatcttaagaagtgctgcaaccatccatacctcttccctgtggctgcaatggaagctcctaagatgcctaatggcatgtatgatggcagtgccctaatcagagcatctgggaaattattgctgctgcagaaaatgctcaagaaccttaaggagggtgggcatcgtgtactcatcttttcccagatgaccaagatgctagacctgctagaggatttcttggaacatgaaggttataaatacgaacgcatcgatggtggaatcactgggaacatgcggcaagaggccattgaccgcttcaatgcaccgggtgctcagcagttctgcttcttgctttccactcgagctgggggccttggaatcaatctggccactgctgacacagttattatctatgactctgactggaacccccataatgacattcaggcctttagcagagctcaccggattgggcaaaataaaaaggtaatgatctaccggtttgtgacccgtgcgtcagtggaggagcgcatcacgcaggtggcaaagaagaaaatgatgctgacgcatctagtggtgcggcctgggctgggctccaagactggatctatgtccaaacaggagcttgatgatatcctcaaatttggcactgaggaactattcaaggatgaagccactgatggaggaggagacaacaaagagggagaagatagcagtgttatccactacgatgataaggccattgaacggctgctagaccgtaaccaggatgagactgaagacacagaattgcagggcatgaatgaatatttgagctcattcaaagtggcccagtatgtggtacgggaagaagaaatgggggaggaagaggaggtagaacgggaaatcattaaacaggaagaaagtgtggatcctgactactgggagaaattgctgcggcaccattatgagcagcagcaagaagatctagcccgaaatctgggcaaaggaaaaagaatccgtaaacaggtcaactacaatgatggctcccaggaggaccgagattggcaggacgaccagtccgacaaccagtccgattactcagtggcttcagaggaaggtgatgaagactttgatgaacgttcagaagctccccgtaggcccagtcgtaagggcctgcggaatgataaagataagccattgcctcctctgttggcccgtgttggtgggaatattgaagtacttggttttaatgctcgtcagcgaaaagcctttcttaatgcaattatgcgatatggtatgccacctcaggatgcttttactacccagtggcttgtaagagacctgcgaggcaaatcagagaaagagttcaaggcatatgtctctcttttcatgcggcatttatgtgagccgggggcagatggggctgagacctttgctgatggtgtcccccgagaaggcctgtctcgccagcatgtccttactagaattggtgttatgtctttgattcgcaagaaggttcaggagtttgaacatgttaatgggcgctggagcatgcctgaactggctgaggtggaggaaaacaagaagatgtcccagccagggtcaccctccccaaaaactcctacaccctccactccaggggacacgcagcccaacactcctgcacctgtcccacctgctgaagatgggataaaaatagaggaaaatagcctcaaagaagaagagagcatagaaggagaaaaggaggttaaatctacagcccctgagactgccattgagtgtacacaggcccctgcccctgcctcagaggatgaaaaggtcgttgttgaaccccctgagggagaggagaaagtggaaaaggcagaggtgaaggagagaacagaggaacctatggagacagagcccaaaggtgctgctgatgtagagaaggtggaggaaaagtcagcaatagatctgacccctattgtggtagaagacaaagaagagaagaaagaagaagaagagaaaaaagaggtgatgcttcagaatggagagacccccaaggacctgaatgatgagaaacagaagaaaaatattaaacaacgtttcatgtttaacattgcagatggtggttttactgagttgcactccctttggcagaatgaagagcgggcagccacagttaccaagaagacttatgagatctggcatcgacggcatgactactggctgctagccggcattataaaccatggctatgcccggtggcaagacatccagaatgacccacgctatgccatcctcaatgagcctttcaagggtgaaatgaaccgtggcaatttcttagagatcaagaataaatttctagctcgaaggtttaaggtgagcggttggggaggaatatattgcttaagtgacaaacttgaaagtgcgtaacgtcctgcagctacttggcaggctgaggcaggagaatcgcttaaacccgggaggcagaggttgcagtgagctgagatcatggcattgcactccagcatgggcaacagagcaagaatctgtctcaaaataaataaataaataaataaataaaat

SEQ ID NO: 359500 - DNA, 1964 bp, Homo sapiens
aagaaaaaatatgaccagcaggatcaccatccccgaaaaactcctacaccctccactccaggtgacacgcagcccaacactcctgcacctgtcccacctgctgaagatgggataaaaatagaggaaaatagcctcaagcaagaagagacctttgctgatggtgtcccccgagaaggcctgtctcgccagcatgtccttactagaattggtgttatgtctttgattcgcaagaaggttcaggagtttgaacatgttaatgggcgctggagcatgcctgaactggctgaggtggaggaaaacaagaagatgtcccagccagggtcaccctccccaaaaactcctacaccctccactccaggggacacgcagcccaacactcctgcacctgtcccacctgctgaagatgggataaaaatagaggaaaatagcctcaaagaagaagagagcatagaaggagaaaaggaggttaaatctacagcccctgagactgccattgagtgtacacaggcccctgcccctgcctcagaggatgaaaaggtcgttgttgaaccccctgagggagaggagaaagtggaaaaggcagaggtgaaggagagaacagaggaacctatggagacagagcccaaaggtgctgctgatgtagagaaggtggaggaaaagtcagcaatagatctgacccctattgtggtagaagacaaagaagagaagaaagaagaagaagagaaaaaagaggtgatgcttcagaatggagagacccccaaggacctgaatgatgagaaacagaagaaaaatattaaacaacgtttcatgtttaacattgcagatggtggttttactgagttgcactccctttggcagaatgaagagcgggcagccacagttaccaagaagacttatgagatctggcatcgacggcatgactactggctgctagccggcattataaaccatggctatgcccggtggcaagacatccagaatgacccacgctatgccatcctcaatgagcctttcaagggtgaaatgaaccgtggcaatttcttagagatcaagaataaatttctagctcgaaggtttaagctcttagaacaagctctggtgattgaggaacagctgcgccgggctgcttacttgaacatgtcagaagacccttctcacccttccatggccctcaacacccgctttgctgaggtggagtgtttggcggaaagtcatcagcacctgtccaaggagtcaatggcaggaaacaagccagccaatgcagtcctgcacaaagttctgaaacagctggaagaactgctgagtgacatgaaagctgatgtgactcgactcccagctaccattgcccgaattcccccagttgctgtgaggttacagatgtcagagcgtaacattctcagccgcctggcaaaccgggcacccgaacctaccccacagcaggtagcccagcagcagtgaagatgcagactgataccacctccaccgctgagcagtgaccttcctcactttctcttgtcccagcttctcccctgggggcctgagagaccctcaccttccttctgcccatcttccatgttgtaaaggaacagccccagtgcactgggggaggggagggagtgaggggcagtggtgcccttcctgcagaagagacatgcagcagtagcgctggcgccatctgcaggagctggcgggctggccttctggaccctggcttctccccactgtaacgcctgttacacacaaactgttgtgggttcctgccaggcttgaagaaaatgatctgaattttttcctccttttggttttattttgttggtttattttgtgttttcttttctcctttttggggggtattcagagtgggctgggcccctgggcgagacacagctacctctgttggcatctttttaataccaggaacccagcggctctagccactgagcggctaaatgaaataaagtgga

SEQ ID NO: 359501 - DNA, 5380 bp, Homo sapiens
  misc_feature (5319)..(5319): n is a, c, g, or t
  misc_feature (5350)..(5350): n is a, c, g, or t
  misc_feature (5364)..(5364): n is a, c, g, or t
ccggccggtgtttcaggccctttaagaggcgacgctggagccggagccattttccccccttcggccgcggcgaggaggagccggagcgggagtgacaccgagccggacccagcgcgacctgcggcggctccgggtgactcgggccagtgtagaggtcctcaggccgccggcaggagcagctgggccaattccctggccgggagcggaaggggatggcgtcgggcctgggctccccgtccccctgctcggcgggcagtgaggaggaggatatggatgcacttttgaacaacagcctgcccccaccccacccagaaaatgaagaggacccagaagaggatttgtcagaaacagagactccaaagctcaagaagaagaaaaagcctaagaaacctcgggaccctaaaatccctaagagcaagcgccaaaaaaaggagcgtatgctcttatgccggcagctgggggacagctctggggaggggccagagtttgtggaggaggaggaagaggtggctctgcgctcagacagtgagggcagcgactatactcctggcaagaagaagaagaagaagcttggacctaagaaagagaagaagagcaaatccaagcggaaggaggaggaggaggaggaggatgatgatgatgattcaaaggagcctaaatcatctgctcagctcctggaagactggggcatggaagacattgaccacgtgttctcagaggaggattatcgaaccctcaccaactacaaggccttcagccagtttgtcagacccctcattgctgccaaaaatcccaagattgctgtctccaagatgatgatggttttgggtgcaaaatggcgggagttcagtaccaataaccccttcaaaggcagttctggggcatcagtggcagctgcggcagcagcagcggtagctgtggtggagagcatggtgacagccactgaggttgcaccaccacctccccctgtggaggtgcctatccgcaaggccaagaccaaggagggcaaaggtcccaatgctcggaggaagcccaagggcagccctcgtgtacctgatgccaagaagcctaaacccaagaaagtagctcccctgaaaatcaagctgggaggttttggttccaagcgtaagagatcctcgagtgaggatgatgacttagatgtggaatctgacttcgatgatgccagtatcaatagctattctgtttctgatggttccaccagccgtagtagccgcagccgcaagaaactccgaaccactaaaaagaaaaagaaaggcgaggaggaggtgactgctgtggatggttatgagacagaccaccaggactattgcgaggtgtgccagcaaggcggtgagatcatcctgtgtgatacctgtccccgtgcttaccacatggtctgcctggatcccgacatggagaaggctcccgagggcaagtggagctgcccacactgcgagaaggaaggcatccagtgggaagctaaagaggacaattcggagggtgaggagatcctggaagaggttgggggagacctcgaagaggaggatgaccaccatatggaattctgtcgggtctgcaaggatggtggggaactgctctgctgtgatacctgtccttcttcctaccacatccactgcctgaatcccccacttccagagatccccaacggtgaatggctctgtccccgttgtacgtgtccagctctgaagggcaaagtgcagaagatcctaatctggaagtggggtcagccaccatctcccacaccagtgcctcggcctccagatgctgatcccaacacgccctccccaaagcccttggaggggcggccagagcggcagttctttgtgaaatggcaaggcatgtcttactggcactgctcctgggtttctgaactgcagctggagctgcactgtcaggtgatgttccgaaactatcagcggaagaatgatatggatgagccaccttctggggactttggtggtgatgaagagaaaagccgaaagcgaaagaacaaggaccctaaatttgcagagatggaggaacgcttctatcgctatgggataaaacccgagtggatgatgatccaccgaatcctcaaccacagtgtggacaagaagggccacgtccactacttgatcaagtggcgggacttaccttacgatcaggcttcttgggagagtgaggatgtggagatccaggattacgacctgttcaagcagagctattggaatcacagggagttaatgaggggtgaggaaggccgaccaggcaagaagctcaagaaggtgaagcttcggaagttggagaggcctccagaaacgccaacagttgatccaacagtgaagtatgagcgacagccagagtacctggatgctacaggtggaaccctgcacccctatcaaatggagggcctgaattggttgcgcttctcctgggctcagggcactgacaccatcttggctgatgagatgggccttgggaaaactgtacagacagcagtcttcctgtattccctttacaaggagggtcattccaaaggccccttcctagtgagcgcccctctttctaccatcatcaactgggagcgggagtttgaaatgtgggctccagacatgtatgtcgtaacctatgtgggtgacaaggacagccgtgccatcatccgagagaatgagttctcctttgaagacaatgccattcgtggtggcaagaaggcctcccgcatgaagaaagaggcatctgtgaaattccatgtgctgctgacatcctatgaattgatcaccattgacatggctattttgggctctattgattgggcctgcctcatcgtggatgaagcccatcggctgaagaacaatcagtctaagttcttccgggtattgaatggttactcactccagcacaagctgttgctgactgggacaccattacaaaacaatctggaagagttgtttcatctgctcaactttctcacccccgagaggttccacaatttggaaggttttttggaggagtttgctgacattgccaaggaggaccagataaaaaaactgcatgacatgctggggccgcacatgttgcggcggctcaaagccgatgtgttcaagaacatgccctccaagacagaactaattgtgcgtgtggagctgagccctatgcagaagaaatactacaagtacatcctcactcgaaattttgaagcactcaatgcccgaggtggtggcaaccaggtgtctctgctgaatgtggtgatggatcttaagaagtgctgcaaccatccatacctcttccctgtggctgcaatggaagctcctaagatgcctaatggcatgtatgatggcagtgccctaatcagagcatctgggaaattattgctgctgcagaaaatgctcaagaaccttaaggagggtgggcatcgtgtactcatcttttcccagatgaccaagatgctagacctgctagaggatttcttggaacatgaaggttataaatacgaacgcatcgatggtggaatcactgggaacatgcggcaagaggccattgaccgcttcaatgcaccgggtgctcagcagttctgcttcttgctttccactcgagctgggggccttggaatcaatctggccactgctgacacagttattatctatgactctgactggaacccccataatgacattcaggcctttagcagagctcaccggattgggcaaaataaaaaggtaatgatctaccggtttgtgacccgtgcgtcagtggaggagcgcatcacgcaggtggcaaagaagaaaatgatgctgacgcatctagtggtgcggcctgggctgggctccaagactggatctatgtccaaacaggagcttgatgatatcctcaaatttggcactgaggaactattcaaggatgaagccactgatggaggaggagacaacaaagagggagaagatagcagtgttatccactacgatgataaggccattgaacggctgctagaccgtaaccaggatgagactgaagacacagaattgcagggcatgaatgaatatttgagctcattcaaagtggcccagtatgtggtacgggaagaagaaatgggggaggaagaggaggtagaacgggaaatcattaaacaggaagaaagtgtggatcctgactactgggagaaattgctgcggcaccattatgagcagcagcaagaagatctagcccgaaatctgggcaaaggaaaaagaatccgtaaacaggtcaactacaatgatggctcccaggaggaccgagattggcaggacgaccagtccgacaaccagtccgattactcagtggcttcagaggaaggtgatgaagactttgatgaacgttcagaagctccccgtaggcccagtcgtaagggcctgcggaatgataaagataagccattgcctcctctgttggcccgtgttggtgggaatattgaagtacttggttttaatgctcgtcagcgaaaagcctttcttaatgcaattatgcgatatggtatgccacctcaggatgcttttactacccagtggcttgtaagagacctgcgaggcaaatcagagaaagagttcaaggcatatgtctctcttttcatgcggcatttatgtgagccgggggcagatggggctgagacctttgctgatggtgtcccccgagaaggcctgtctcgccagcatgtccttactagaattggtgttatgtctttgattcgcaagaaggttcaggagtttgaacatgttaatgggcgctggagcatgcctgaactggctgaggtggaggaaaacaagaagatgtcccagccagggtcaccctccccaaaaactcctacaccctccactccaggggacacgcagcccaacactcctgcacctgtcccacctgctgaagatgggataaaaatagaggaaaatagcctcaaagaagaagagagcatagaaggagaaaaggaggttaaatctacagcccctgagactgccattgagtgtacacaggcccctgcccctgcctcagaggatgaaaaggtcgttgttgaaccccctgagggagaggagaaagtggaaaaggcagaggtgaaggagagaacagaggaacctatggagacagagcccaaaggtgctgctgatgtagagaaggtggaggaaaagtcagcatagatctgacccctattgtggtagaagacaaagaagagaagaaagaagaagaagagaaaaaagaggtgatgcttcagaatggagagacccccaaggacctgaatgatgagaaacagaagaaaaatattaaacccccaaaaaacccggggttttttttttncccaaaattttgggggttttttttttttttnaaaaaaaacccccnaattttttggggcccc

SEQ ID NO: 359502 - DNA, 5323 bp, Homo sapiens
ccggccggtgtttcaggccctttaagaggcgacgctggagccggagccattttccccccttcggccgcggcgaggaggagccggagcgggagtgacaccgagccggacccagcgcgacctgcggcggctccgggtgactcgggccagtgtagaggtcctcaggccgccggcaggagcagctgggccaattccctggccgggagcggaaggggatggcgtcgggcctgggctccccgtccccctgctcggcgggcagtgaggaggaggatatggatgcacttttgaacaacagcctgcccccaccccacccagaaaatgaagaggacccagaagaggatttgtcagaaacagagactccaaagctcaagaagaagaaaaagcctaagaaacctcgggaccctaaaatccctaagagcaagcgccaaaaaaaggagcgtatgctcttatgccggcagctgggggacagctctggggaggggccagagtttgtggaggaggaggaagaggtggctctgcgctcagacagtgagggcagcgactatactcctggcaagaagaagaagaagaagcttggacctaagaaagagaagaagagcaaatccaagcggaaggaggaggaggaggaggaggatgatgatgatgattcaaaggagcctaaatcatctgctcagctcctggaagactggggcatggaagacattgaccacgtgttctcagaggaggattatcgaaccctcaccaactacaaggccttcagccagtttgtcagacccctcattgctgccaaaaatcccaagattgctgtctccaagatgatgatggttttgggtgcaaaatggcgggagttcagtaccaataaccccttcaaaggcagttctggggcatcagtggcagctgcggcagcagcagcggtagctgtggtggagagcatggtgacagccactgaggttgcaccaccacctccccctgtggaggtgcctatccgcaaggccaagaccaaggagggcaaaggtcccaatgctcggaggaagcccaagggcagccctcgtgtacctgatgccaagaagcctaaacccaagaaagtagctcccctgaaaatcaagctgggaggttttggttccaagcgtaagagatcctcgagtgaggatgatgacttagatgtggaatctgacttcgatgatgccagtatcaatagctattctgtttctgatggttccaccagccgtagtagccgcagccgcaagaaactccgaaccactaaaaagaaaaagaaaggcgaggaggaggtgactgctgtggatggttatgagacagaccaccaggactattgcgaggtgtgccagcaaggcggtgagatcatcctgtgtgatacctgtccccgtgcttaccacatggtctgcctggatcccgacatggagaaggctcccgagggcaagtggagctgcccacactgcgagaaggaaggcatccagtgggaagctaaagaggacaattcggagggtgaggagatcctggaagaggttgggggagacctcgaagaggaggatgaccaccatatggaattctgtcgggtctgcaaggatggtggggaactgctctgctgtgatacctgtccttcttcctaccacatccactgcctgaatcccccacttccagagatccccaacggtgaatggctctgtccccgttgtacgtgtccagctctgaagggcaaagtgcagaagatcctaatctggaagtggggtcagccaccatctcccacaccagtgcctcggcctccagatgctgatcccaacacgccctccccaaagcccttggaggggcggccagagcggcagttctttgtgaaatggcaaggcatgtcttactggcactgctcctgggtttctgaactgcagctggagctgcactgtcaggtgatgttccgaaactatcagcggaagaatgatatggatgagccaccttctggggactttggtggtgatgaagagaaaagccgaaagcgaaagaacaaggaccctaaatttgcagagatggaggaacgcttctatcgctatgggataaaacccgagtggatgatgatccaccgaatcctcaaccacagtgtggacaagaagggccacgtccactacttgatcaagtggcgggacttaccttacgatcaggcttcttgggagagtgaggatgtggagatccaggattacgacctgttcaagcagagctattggaatcacagggagttaatgaggggtgaggaaggccgaccaggcaagaagctcaagaaggtgaagcttcggaagttggagaggcctccagaaacgccaacagttgatccaacagtgaagtatgagcgacagccagagtacctggatgctacaggtggaaccctgcacccctatcaaatggagggcctgaattggttgcgcttctcctgggctcagggcactgacaccatcttggctgatgagatgggccttgggaaaactgtacagacagcagtcttcctgtattccctttacaaggagggtcattccaaaggccccttcctagtgagcgcccctctttctaccatcatcaactgggagcgggagtttgaaatgtgggctccagacatgtatgtcgtaacctatgtgggtgacaaggacagccgtgccatcatccgagagaatgagttctcctttgaagacaatgccattcgtggtggcaagaaggcctcccgcatgaagaaagaggcatctgtgaaattccatgtgctgctgacatcctatgaattgatcaccattgacatggctattttgggctctattgattgggcctgcctcatcgtggatgaagcccatcggctgaagaacaatcagtctaagttcttccgggtattgaatggttactcactccagcacaagctgttgctgactgggacaccattacaaaacaatctggaagagttgtttcatctgctcaactttctcacccccgagaggttccacaatttggaaggttttttggaggagtttgctgacattgccaaggaggaccagataaaaaaactgcatgacatgctggggccgcacatgttgcggcggctcaaagccgatgtgttcaagaacatgccctccaagacagaactaattgtgcgtgtggagctgagccctatgcagaagaaatactacaagtacatcctcactcgaaattttgaagcactcaatgcccgaggtggtggcaaccaggtgtctctgctgaatgtggtgatggatcttaagaagtgctgcaaccatccatacctcttccctgtggctgcaatggaagctcctaagatgcctaatggcatgtatgatggcagtgccctaatcagagcatctgggaaattattgctgctgcagaaaatgctcaagaaccttaaggagggtgggcatcgtgtactcatcttttcccagatgaccaagatgctagacctgctagaggatttcttggaacatgaaggttataaatacgaacgcatcgatggtggaatcactgggaacatgcggcaagaggccattgaccgcttcaatgcaccgggtgctcagcagttctgcttcttgctttccactcgagctgggggccttggaatcaatctggccactgctgacacagttattatctatgactctgactggaacccccataatgacattcaggcctttagcagagctcaccggattgggcaaaataaaaaggtaatgatctaccggtttgtgacccgtgcgtcagtggaggagcgcatcacgcaggtggcaaagaagaaaatgatgctgacgcatctagtggtgcggcctgggctgggctccaagactggatctatgtccaaacaggagcttgatgatatcctcaaatttggcactgaggaactattcaaggatgaagccactgatggaggaggagacaacaaagagggagaagatagcagtgttatccactacgatgataaggccattgaacggctgctagaccgtaaccaggatgagactgaagacacagaattgcagggcatgaatgaatatttgagctcattcaaagtggcccagtatgtggtacgggaagaagaaatgggggaggaagaggaggtagaacgggaaatcattaaacaggaagaaagtgtggatcctgactactgggagaaattgctgcggcaccattatgagcagcagcaagaagatctagcccgaaatctgggcaaaggaaaaagaatccgtaaacaggtcaactacaatgatggctcccaggaggaccgagattggcaggacgaccagtccgacaaccagtccgattactcagtggcttcagaggaaggtgatgaagactttgatgaacgttcagaagctccccgtaggcccagtcgtaagggcctgcggaatgataaagataagccattgcctcctctgttggcccgtgttggtgggaatattgaagtacttggttttaatgctcgtcagcgaaaagcctttcttaatgcaattatgcgatatggtatgccacctcaggatgcttttactacccagtggcttgtaagagacctgcgaggcaaatcagagaaagagttcaaggcatatgtctctcttttcatgcggcatttatgtgagccgggggcagatggggctgagacctttgctgatggtgtcccccgagaaggcctgtctcgccagcatgtccttactagaattggtgttatgtctttgattcgcaagaaggttcaggagtttgaacatgttaatgggcgctggagcatgcctgaactggctgaggtggaggaaaacaagaagatgtcccagcagcagtgaagatgcagactgataccacctccaccgctgagcagtgaccttcctcactttctcttgtcccagcttctcccctgggggcctgagagaccctcaccttccttctgcccatcttccatgttgtaaaggaacagccccagtgcactgggggaggggagggagtgaggggcagtggtgcccttcctgcagaagagacatgcagcagtagcgctggcgccatctgcaggagctggcgggctggccttctggaccctggcttctccccactgtaacgcctgttacacacaaactgttgtgggttcctgccaggcttgaagaaaatgatctgaattttttcctccttttggttttattttgttggtttattttgtgttttcttttctcctttttggggggtattcagagtgggctgggcccctgggcgagacacagctacctctgttggcatctttttaataccaggaacccagcggctctagccactgagcggctaaatgaaataaagtgga

SEQ ID NO: 359503 - DNA, 5553 bp, Homo sapiens
ccggccggtgtttcaggccctttaagaggcgacgctggagccggagccattttccccccttcggccgcggcgaggaggagccggagcgggagtgacaccgagccggacccagcgcgacctgcggcggctccgggtgactcgggccagtgtagaggtcctcaggccgccggcaggagcagctgggccaattccctggccgggagcggaaggggatggcgtcgggcctgggctccccgtccccctgctcggcgggcagtgaggaggaggatatggatgcacttttgaacaacagcctgcccccaccccacccagaaaatgaagaggacccagaagaggatttgtcagaaacagagactccaaagctcaagaagaagaaaaagcctaagaaacctcgggaccctaaaatccctaagagcaagcgccaaaaaaaggagcgtatgctcttatgccggcagctgggggacagctctggggaggggccagagtttgtggaggaggaggaagaggtggctctgcgctcagacagtgagggcagcgactatactcctggcaagaagaagaagaagaagcttggacctaagaaagagaagaagagcaaatccaagcggaaggaggaggaggaggaggaggatgatgatgatgattcaaaggagcctaaatcatctgctcagctcctggaagactggggcatggaagacattgaccacgtgttctcagaggaggattatcgaaccctcaccaactacaaggccttcagccagtttgtcagacccctcattgctgccaaaaatcccaagattgctgtctccaagatgatgatggttttgggtgcaaaatggcgggagttcagtaccaataaccccttcaaaggcagttctggggcatcagtggcagctgcggcagcagcagcggtagctgtggtggagagcatggtgacagccactgaggttgcaccaccacctccccctgtggaggtgcctatccgcaaggccaagaccaaggagggcaaaggtcccaatgctcggaggaagcccaagggcagccctcgtgtacctgatgccaagaagcctaaacccaagaaagtagctcccctgaaaatcaagctgggaggttttggttccaagcgtaagagatcctcgagtgaggatgatgacttagatgtggaatctgacttcgatgatgccagtatcaatagctattctgtttctgatggttccaccagccgtagtagccgcagccgcaagaaactccgaaccactaaaaagaaaaagaaaggcgaggaggaggtgactgctgtggatggttatgagacagaccaccaggactattgcgaggtgtgccagcaaggcggtgagatcatcctgtgtgatacctgtccccgtgcttaccacatggtctgcctggatcccgacatggagaaggctcccgagggcaagtggagctgcccacactgcgagaaggaaggcatccagtgggaagctaaagaggacaattcggagggtgaggagatcctggaagaggttgggggagacctcgaagaggaggatgaccaccatatggaattctgtcgggtctgcaaggatggtggggaactgctctgctgtgatacctgtccttcttcctaccacatccactgcctgaatcccccacttccagagatccccaacggtgaatggctctgtccccgttgtacgtgtccagctctgaagggcaaagtgcagaagatcctaatctggaagtggggtcagccaccatctcccacaccagtgcctcggcctccagatgctgatcccaacacgccctccccaaagcccttggaggggcggccagagcggcagttctttgtgaaatggcaaggcatgtcttactggcactgctcctgggtttctgaactgcagctggagctgcactgtcaggtgatgttccgaaactatcagcggaagaatgatatggatgagccaccttctggggactttggtggtgatgaagagaaaagccgaaagcgaaagaacaaggaccctaaatttgcagagatggaggaacgcttctatcgctatgggataaaacccgagtggatgatgatccaccgaatcctcaaccacagtgtggacaagaagggccacgtccactacttgatcaagtggcgggacttaccttacgatcaggcttcttgggagagtgaggatgtggagatccaggattacgacctgttcaagcagagctattggaatcacagggagttaatgaggggtgaggaaggccgaccaggcaagaagctcaagaaggtgaagcttcggaagttggagaggcctccagaaacgccaacagttgatccaacagtgaagtatgagcgacagccagagtacctggatgctacaggtggaaccctgcacccctatcaaatggagggcctgaattggttgcgcttctcctgggctcagggcactgacaccatcttggctgatgagatgggccttgggaaaactgtacagacagcagtcttcctgtattccctttacaaggagggtcattccaaaggccccttcctagtgagcgcccctctttctaccatcatcaactgggagcgggagtttgaaatgtgggctccagacatgtatgtcgtaacctatgtgggtgacaaggacagccgtgccatcatccgagagaatgagttctcctttgaagacaatgccattcgtggtggcaagaaggcctcccgcatgaagaaagaggcatctgtgaaattccatgtgctgctgacatcctatgaattgatcaccattgacatggctattttgggctctattgattgggcctgcctcatcgtggatgaagcccatcggctgaagaacaatcagtctaagttcttccgggtattgaatggttactcactccagcacaagctgttgctgactgggacaccattacaaaacaatctggaagagttgtttcatctgctcaactttctcacccccgagaggttccacaatttggaaggttttttggaggagtttgctgacattgccaaggaggaccagataaaaaaactgcatgacatgctggggccgcacatgttgcggcggctcaaagccgatgtgttcaagaacatgccctccaagacagaactaattgtgcgtgtggagctgagccctatgcagaagaaatactacaagtacatcctcactcgaaattttgaagcactcaatgcccgaggtggtggcaaccaggtgtctctgctgaatgtggtgatggatcttaagaagtgctgcaaccatccatacctcttccctgtggctgcaatggaagctcctaagatgcctaatggcatgtatgatggcagtgccctaatcagagcatctgggaaattattgctgctgcagaaaatgctcaagaaccttaaggagggtgggcatcgtgtactcatcttttcccagatgaccaagatgctagacctgctagaggatttcttggaacatgaaggttataaatacgaacgcatcgatggtggaatcactgggaacatgcggcaagaggccattgaccgcttcaatgcaccgggtgctcagcagttctgcttcttgctttccactcgagctgggggccttggaatcaatctggccactgctgacacagttattatctatgactctgactggaacccccataatgacattcaggcctttagcagagctcaccggattgggcaaaataaaaaggtaatgatctaccggtttgtgacccgtgcgtcagtggaggagcgcatcacgcaggtggcaaagaagaaaatgatgctgacgcatctagtggtgcggcctgggctgggctccaagactggatctatgtccaaacaggagcttgatgatatcctcaaatttggcactgaggaactattcaaggatgaagccactgatggaggaggagacaacaaagagggagaagatagcagtgttatccactacgatgataaggccattgaacggctgctagaccgtaaccaggatgagactgaagacacagaattgcagggcatgaatgaatatttgagctcattcaaagtggcccagtatgtggtacgggaagaagaaatgggggaggaagaggaggtagaacgggaaatcattaaacaggaagaaagtgtggatcctgactactgggagaaattgctgcggcaccattatgagcagcagcaagaagatctagcccgaaatctgggcaaaggaaaaagaatccgtaaacaggtcaactacaatgatggctcccaggaggaccgagattggcaggacgaccagtccgacaaccagtccgattactcagtggcttcagaggaaggtgatgaagactttgatgaacgttcagaagctccccgtaggcccagtcgtaagggcctgcggaatgataaagataagccattgcctcctctgttggcccgtgttggtgggaatattgaagtacttggttttaatgctcgtcagcgaaaagcctttcttaatgcaattatgcgatatggtatgccacctcaggatgcttttactacccagtggcttgtaagagacctgcgaggcaaatcagagaaagagttcaaggcatatgtctctcttttcatgcggcatttatgtgagccgggggcagatggggctgagacctttgctgatggtgtcccccgagaaggcctgtctcgccagcatgtccttactagaattggtgttatgtctttgattcgcaagaaggttcaggagtttgaacatgttaatgggcgctggagcatgcctgaactggctgaggtggaggaaaacaagaagatgtcccagccagggtcaccctccccaaaaactcctacaccctccactccaggggacacgcagcccaacactcctgcacctgtcccacctgctgaagatgggataaaaatagaggaaaatagcctcaaagaagaagagagcatagaaggagaaaaggaggttaaatctacagcccctgagactgccattgagtgtacacaggcccctgcccctgcctcagaggatgaaaaggtcgttgttgaaccccctgagggagaggagaaagtggaaaaggcagaggtgaaacagaggaacctatggagacagagcccaaaggtgctgctgatgtagagaaggtggaggaaaagtcagcaatagatctgacccctattgtggtagaagacaaagaagagaagaaagaagaagaagagaaaaaagaggtgatgcttcagaatggagagacccccaaggacctgaatgatgagaaacagaagaaaaatattaaacaacgtttcatgtttaacattgcagatggtggttttactgagttgcactccctttggcagagtgaagagcgggcagccacagttaccaagaagacttatgagatctggcgtccgtagcggggattgaccttaactgggtgatagcccgggattcattaaaccatgggatatgccgcggtggcaagacattcagaattgaaccagatatgcccatcctcaattaagccttcaagggtgaaatgaccgggggaatgcttagagatcagatg

SEQ ID NO: 359504 - DNA, 1818 bp, Homo sapiens
  misc_feature (37)..(37): n is a, c, g, or t
tcataggttcgcaggatggcaggaaacaagccagccnatgcagtcctgcacaaagttctgaaacagctggaagaactgctgagtgacatgaaagctgatgtgactcgactcccagctaccattgcccgaattcccccagttgctgtgaggttacagatgtcagagcgtaacattctcagccgcctggcaaaccgggcacccgaacctaccccacagcaggcagcccagcagcagtgaagatgcagactgataccacctccaccgctgagcagtgaccttcctcactttctcttgtcccagcttctcccctgggggcctgagagaccctcaccttccttctgcccatcttccatgttgtaaaggaactgcccctgcctcagaggatgaaaaggtcgttgttgaaccccctgagggagaggagaaagtggaaaaggcagaggtgaaggagagaacagaggaacctatggagacagagcccaaaggtgctgctgatgtagagaaggtggaggaaaagtcagcaatagatctgacccctattgtggtagaagacaaagaagagaagaaagaagaagaagagaaaaaagaggtgatgcttcagaatggagagacccccaaggacctgaatgatgagaaacagaagaaaaatattaaacaacgtttcatgtttaacattgcagatggtggttttactgagttgcactccctttggcagaatgaagagcgggcagccacagttaccaagaagacttatgagatctggcatcgacggcatgactactggctgctagccggcattataaaccatggctatgcccggtggcaagacatccagaatgacccacgctatgccatcctcaatgagcctttcaagggtgaaatgaaccgtggcaatttcttagagatcaagaataaatttctagctcgaaggtttaagctcttagaacaagctctggtgattgaggaacagctgcgccgggctgcttacttgaacatgtcagaagacccttctcacccttccatggccctcaacacccgctttgctgaggtggagtgtttggcggaaagtcatcagcacctgtccaaggagtcaatggcaggaaacaagccagccaatgcagtcctgcacaaagttctgaaacagctggaagaactgctgagtgacatgaaagctgatgtgactcgactcccagctaccattgcccgaattcccccagttgctgtgaggttacagatgtcagagcgtaacattctcagccgcctggcaaaccgggcacccgaacctaccccacagcaggtagcccagcagcagtgaagatgcagactgataccacctccaccgctgagcagtgaccttcctcactttctcttgtcccagcttctcccctgggggcctgagagaccctcaccttccttctgcccatcttccatgttgtaaaggaacagccccagtgcactgggggaggggagggagtgaggggcagtggtgcccttcctgcagaagagacatgcagcagtagcgctggcgccatctgcaggagctggcgggctggccttctggaccctggcttctccccactgtaacgcctgttacacacaaactgttgtgggttcctgccaggcttgaagaaaatgatctgaattttttcctccttttggttttattttgttggtttattttgtgttttcttttctcctttttggggggtattcagagtgggctgggcccctgggcgagacacagctacctctgttggcatctttttaataccaggaacccagcggctctagccactgagcggctaaatgaaataaagtgga

SEQ ID NO: 359505 - DNA, 1501 bp, Homo sapiens
  misc_feature (8)..(8): n is a, c, g, or t
acaggccnccaagctcagaagcgcgaaaggtctgaggaagcacaagacacacacacacacacacacacacacacacacacacacacacacagaaagagagagagagagagagaggaaggacggggaaggagagaacagaggaacctatggagacagagcccaaaggtgctgctgatgtagagaaggtggaggaaaagtcagcaatagatctgacccctattgtggtagaagacaaagaagagaagaaagaagaagaagagaaaaaagaggtgatgcttcagaatggagagacccccaaggacctgaatgatgagaaacagaagaaaaatattaaacaacgtttcatgtttaacattgcagatggtggttttactgagttgcactccctttggcagaatgaagagcgggcagccacagttaccaagaagacttatgagatctggcatcgacggcatgactactggctgctagccggcattataaaccatggctatgcccggtggcaagacatccagaatgacccacgctatgccatcctcaatgagcctttcaagggtgaaatgaaccgtggcaatttcttagagatcaagaataaatttctagctcgaaggtttaagctcttagaacaagctctggtgattgaggaacagctgcgccgggctgcttacttgaacatgtcagaagacccttctcacccttccatggccctcaacacccgctttgctgaggtggagtgtttggcggaaagtcatcagcacctgtccaaggagtcaatggcaggaaacaagccagccaatgcagtcctgcacaaagttctgaaacagctggaagaactgctgagtgacatgaaagctgatgtgactcgactcccagctaccattgcccgaattcccccagttgctgtgaggttacagatgtcagagcgtaacattctcagccgcctggcaaaccgggcacccgaacctaccccacagcaggtagcccagcagcagtgaagatgcagactgataccacctccaccgctgagcagtgaccttcctcactttctcttgtcccagcttctcccctgggggcctgagagaccctcaccttccttctgcccatcttccatgttgtaaaggaacagccccagtgcactgggggaggggagggagtgaggggcagtggtgcccttcctgcagaagagacatgcagcagtagcgctggcgccatctgcaggagctggcgggctggccttctggaccctggcttctccccactgtaacgcctgttacacacaaactgttgtgggttcctgccaggcttgaagaaaatgatctgaattttttcctccttttggttttattttgttggtttattttgtgttttcttttctcctttttggggggtattcagagtgggctgggcccctgggcgagacacagctacctctgttggcatctttttaataccaggaacccagcggctctagccactgagcggctaaatgaaataaagtgga

SEQ ID NO: 359506 - DNA, 5154 bp, Homo sapiens
ccggccggtgtttcaggccctttaagaggcgacgctggagccggagccattttccccccttcggccgcggcgaggaggagccggagcgggagtgacaccgagccggacccagcgcgacctgcggcggctccgggtgactcgggccagtgtagaggtcctcaggccgccggcaggagcagctgggccaattccctggccgggagcggaaggggatggcgtcgggcctgggctccccgtccccctgctcggcgggcagtgaggaggaggatatggatgcacttttgaacaacagcctgcccccaccccacccagaaaatgaagaggacccagaagaggatttgtcagaaacagagactccaaagctcaagaagaagaaaaagcctaagaaacctcgggaccctaaaatccctaagagcaagcgccaaaaaaaggagcgtatgctcttatgccggcagctgggggacagctctggggaggggccagagtttgtggaggaggaggaagaggtggctctgcgctcagacagtgagggcagcgactatactcctggcaagaagaagaagaagaagcttggacctaagaaagagaagaagagcaaatccaagcggaaggaggaggaggaggaggaggatgatgatgatgattcaaaggagcctaaatcatctgctcagctcctggaagactggggcatggaagacattgaccacgtgttctcagaggaggattatcgaaccctcaccaactacaaggccttcagccagtttgtcagacccctcattgctgccaaaaatcccaagattgctgtctccaagatgatgatggttttgggtgcaaaatggcgggagttcagtaccaataaccccttcaaaggcagttctggggcatcagtggcagctgcggcagcagcagcggtagctgtggtggagagcatggtgacagccactgaggttgcaccaccacctccccctgtggaggtgcctatccgcaaggccaagaccaaggagggcaaaggtcccaatgctcggaggaagcccaagggcagccctcgtgtacctgatgccaagaagcctaaacccaagaaagtagctcccctgaaaatcaagctgggaggttttggttccaagcgtaagagatcctcgagtgaggatgatgacttagatgtggaatctgacttcgatgatgccagtatcaatagctattctgtttctgatggttccaccagccgtagtagccgcagccgcaagaaactccgaaccactaaaaagaaaaagaaaggcgaggaggaggtgactgctgtggatggttatgagacagaccaccaggactattgcgaggtgtgccagcaaggcggtgagatcatcctgtgtgatacctgtccccgtgcttaccacatggtctgcctggatcccgacatggagaaggctcccgagggcaagtggagctgcccacactgcgagaaggaaggcatccagtgggaagctaaagaggacaattcggagggtgaggagatcctggaagaggttgggggagacctcgaagaggaggatgaccaccatatggaattctgtcgggtctgcaaggatggtggggaactgctctgctgtgatacctgtccttcttcctaccacatccactgcctgaatcccccacttccagagatccccaacggtgaatggctctgtccccgttgtacgtgtccagctctgaagggcaaagtgcagaagatcctaatctggaagtggggtcagccaccatctcccacaccagtgcctcggcctccagatgctgatcccaacacgccctccccaaagcccttggaggggcggccagagcggcagttctttgtgaaatggcaaggcatgtcttactggcactgctcctgggtttctgaactgcagctggagctgcactgtcaggtgatgttccgaaactatcagcggaagaatgatatggatgagccaccttctggggactttggtggtgatgaagagaaaagccgaaagcgaaagaacaaggaccctaaatttgcagagatggaggaacgcttctatcgctatgggataaaacccgagtggatgatgatccaccgaatcctcaaccacagtgtggacaagaagggccacgtccactacttgatcaagtggcgggacttaccttacgatcaggcttcttgggagagtgaggatgtggagatccaggattacgacctgttcaagcagagctattggaatcacagggagttaatgaggggtgaggaaggccgaccaggcaagaagctcaagaaggtgaagcttcggaagttggagaggcctccagaaacgccaacagttgatccaacagtgaagtatgagcgacagccagagtacctggatgctacaggtggaaccctgcacccctatcaaatggagggcctgaattggttgcgcttctcctgggctcagggcactgacaccatcttggctgatgagatgggccttgggaaaactgtacagacagcagtcttcctgtattccctttacaaggagggtcattccaaaggccccttcctagtgagcgcccctctttctaccatcatcaactgggagcgggagtttgaaatgtgggctccagacatgtatgtcgtaacctatgtgggtgacaaggacagccgtgccatcatccgagagaatgagttctcctttgaagacaatgccattcgtggtggcaagaaggcctcccgcatgaagaaagaggcatctgtgaaattccatgtgctgctgacatcctatgaattgatcaccattgacatggctattttgggctctattgattgggcctgcctcatcgtggatgaagcccatcggctgaagaacaatcagtctaagttcttccgggtattgaatggttactcactccagcacaagctgttgctgactgggacaccattacaaaacaatctggaagagttgtttcatctgctcaactttctcacccccgagaggttccacaatttggaaggttttttggaggagtttgctgacattgccaaggaggaccagataaaaaaactgcatgacatgctggggccgcacatgttgcggcggctcaaagccgatgtgttcaagaacatgccctccaagacagaactaattgtgcgtgtggagctgagccctatgcagaagaaatactacaagtacatcctcactcgaaattttgaagcactcaatgcccgaggtggtggcaaccaggtgtctctgctgaatgtggtgatggatcttaagaagtgctgcaaccatccatacctcttccctgtggctgcaatggaagctcctaagatgcctaatggcatgtatgatggcagtgccctaatcagagcatctgggaaattattgctgctgcagaaaatgctcaagaaccttaaggagggtgggcatcgtgtactcatcttttcccagatgaccaagatgctagacctgctagaggatttcttggaacatgaaggttataaatacgaacgcatcgatggtggaatcactgggaacatgcggcaagaggccattgaccgcttcaatgcaccgggtgctcagcagttctgcttcttgctttccactcgagctgggggccttggaatcaatctggccactgctgacacagttattatctatgactctgactggaacccccataatgacattcaggcctttagcagagctcaccggattgggcaaaataaaaaggtaatgatctaccggtttgtgacccgtgcgtcagtggaggagcgcatcacgcaggtggcaaagaagaaaatgatgctgacgcatctagtggtgcggcctgggctgggctccaagactggatctatgtccaaacaggagcttgatgatatcctcaaatttggcactgaggaactattcaaggatgaagccactgatggaggaggagacaacaaagagggagaagatagcagtgttatccactacgatgataaggccattgaacggctgctagaccgtaaccaggatgagactgaagacacagaattgcagggcatgaatgaatatttgagctcattcaaagtggcccagtatgtggtacgggaagaagaaatgggggaggaagaggaggtagaacgggaaatcattaaacaggaagaaagtgtggatcctgactactgggagaaattgctgcggcaccattatgagcagcagcaagaagatctagcccgaaatctgggcaaaggaaaaagaatccgtaaacaggtcaactacaatgatggctcccaggaggaccgagattggcaggacgaccagtccgacaaccagtccgattactcagtggcttcagaggaaggtgatgaagactttgatgaacgttcagaagctccccgtaggcccagtcgtaagggcctgcggaatgataaagataagccattgcctcctctgttggcccgtgttggtgggaatattgaagtacttggttttaatgctcgtcagcgaaaagcctttcttaatgcaattatgcgatatggtatgccacctcaggatgcttttactacccagtggcttgtaagagacctgcgaggcaaatcagagaaagagttcaaggcatatgtctctcttttcatgcggcatttatgtgagccgggggcagatggggctgagacctttgctgatggtgtcccccgagaaggcctgtctcgccagcatgtccttactagaattggtgttatgtctttgattcgcaagaaggttcaggagtttgaacatgttaatgggcgctggagcatgcctgaactggctgaggtggaggaaaacaagaagatgtcccagcagcagtgaagatgcagactgataccacctccaccgctgagcagtgaccttcctcactttctcttgtcccagcttctcccctgggggcctgagagaccctcaccttccttctgcccatcttccatgttgtaaaggaacagccccagtgcactgggggaggggagggagtgaggggcagtggtgcccttcctgcagaagagacatgcagcagtagcgctggcgccatctgcaggagctggcgggctggccttctggaccctggcttctccccactgtaacgcctgttacacacaaactgttgtgggttcctgccaggctagtcgggggggtaccgaggctcgaatgc

SEQ ID NO: 359507 - DNA, 4330 bp, Homo sapiens
ccggccggtgtttcaggccctttaagaggcgacgctggagccggagccattttccccccttcggccgcggcgaggaggagccggagcgggagtgacaccgagccggacccagcgcgacctgcggcggctccgggtgactcgggccagtgtagaggtcctcaggccgccggcaggagcagctgggccaattccctggccgggagcggaaggggatggcgtcgggcctgggctccccgtccccctgctcggcgggcagtgaggaggaggatatggatgcacttttgaacaacagcctgcccccaccccacccagaaaatgaagaggacccagaagaggatttgtcagaaacagagactccaaagctcaagaagaagaaaaagcctaagaaacctcgggaccctaaaatccctaagagcaagcgccaaaaaaaggagcgtatgctcttatgccggcagctgggggacagctctggggaggggccagagtttgtggaggaggaggaagaggtggctctgcgctcagacagtgagggcagcgactatactcctggcaagaagaagaagaagaagcttggacctaagaaagagaagaagagcaaatccaagcggaaggaggaggaggaggaggaggatgatgatgatgattcaaaggagcctaaatcatctgctcagctcctggaagactggggcatggaagacattgaccacgtgttctcagaggaggattatcgaaccctcaccaactacaaggccttcagccagtttgtcagacccctcattgctgccaaaaatcccaagattgctgtctccaagatgatgatggttttgggtgcaaaatggcgggagttcagtaccaataaccccttcaaaggcagttctggggcatcagtggcagctgcggcagcagcagcggtagctgtggtggagagcatggtgacagccactgaggttgcaccaccacctccccctgtggaggtgcctatccgcaaggccaagaccaaggagggcaaaggtcccaatgctcggaggaagcccaagggcagccctcgtgtacctgatgccaagaagcctaaacccaagaaagtagctcccctgaaaatcaagctgggaggttttggttccaagcgtaagagatcctcgagtgaggatgatgacttagatgtggaatctgacttcgatgatgccagtatcaatagctattctgtttctgatggttccaccagccgtagtagccgcagccgcaagaaactccgaaccactaaaaagaaaaagaaaggcgaggaggaggtgactgctgtggatggttatgagacagaccaccaggactattgcgaggtgtgccagcaaggcggtgagatcatcctgtgtgatacctgtccccgtgcttaccacatggtctgcctggatcccgacatggagaaggctcccgagggcaagtggagctgcccacactgcgagaaggaaggcatccagtgggaagctaaagaggacaattcggagggtgaggagatcctggaagaggttgggggagacctcgaagaggaggatgaccaccatatggaattctgtcgggtctgcaaggatggtggggaactgctctgctgtgatacctgtccttcttcctaccacatccactgcctgaatcccccacttccagagatccccaacggtgaatggctctgtccccgttgtacgtgtccagctctgaagggcaaagtgcagaagatcctaatctggaagtggggtcagccaccatctcccacaccagtgcctcggcctccagatgctgatcccaacacgccctccccaaagcccttggaggggcggccagagcggcagttctttgtgaaatggcaaggcatgtcttactggcactgctcctgggtttctgaactgcagctggagctgcactgtcaggtgatgttccgaaactatcagcggaagaatgatatggatgagccaccttctggggactttggtggtgatgaagagaaaagccgaaagcgaaagaacaaggaccctaaatttgcagagatggaggaacgcttctatcgctatgggataaaacccgagtggatgatgatccaccgaatcctcaaccacagtgtggacaagaagggccacgtccactacttgatcaagtggcgggacttaccttacgatcaggcttcttgggagagtgaggatgtggagatccaggattacgacctgttcaagcagagctattggaatcacagggagttaatgaggggtgaggaaggccgaccaggcaagaagctcaagaaggtgaagcttcggaagttggagaggcctccagaaacgccaacagttgatccaacagtgaagtatgagcgacagccagagtacctggatgctacaggtggaaccctgcacccctatcaaatggagggcctgaattggttgcgcttctcctgggctcagggcactgacaccatcttggctgatgagatgggccttgggaaaactgtacagacagcagtcttcctgtattccctttacaaggagggtcattccaaaggccccttcctagtgagcgcccctctttctaccatcatcaactgggagcgggagtttgaaatgtgggctccagacatgtatgtcgtaacctatgtgggtgacaaggacagccgtgccatcatccgagagaatgagttctcctttgaagacaatgccattcgtggtggcaagaaggcctcccgcatgaagaaagaggcatctgtgaaattccatgtgctgctgacatcctatgaattgatcaccattgacatggctattttgggctctattgattgggcctgcctcatcgtggatgaagcccatcggctgaagaacaatcagtctaagttcttccgggtattgaatggttactcactccagcacaagctgttgctgactgggacaccattacaaaacaatctggaagagttgtttcatctgctcaactttctcacccccgagaggttccacaatttggaaggttttttggaggagtttgctgacattgccaaggaggaccagataaaaaaactgcatgacatgctggggccgcacatgttgcggcggctcaaagccgatgtgttcaagaacatgccctccaagacagaactaattgtgcgtgtggagctgagccctatgcagaagaaatactacaagtacatcctcactcgaaattttgaagcactcaatgcccgaggtggtggcaaccaggtgtctctgctgaatgtggtgatggatcttaagaagtgctgcaaccatccatacctcttccctgtggctgcaatggaagctcctaagatgcctaatggcatgtatgatggcagtgccctaatcagagcatctgggaaattattgctgctgcagaaaatgctcaagaaccttaaggagggtgggcatcgtgtactcatcttttcccagatgaccaagatgctagacctgctagaggatttcttggaacatgaaggttataaatacgaacgcatcgatggtggaatcactgggaacatgcggcaagaggccattgaccgcttcaatgcaccgggtgctcagcagttctgcttcttgctttccactcgagctgggggccttggaatcaatctggccactgctgacacagttattatctatgactctgactggaacccccataatgacattcaggcctttagcagagctcaccggattgggcaaaataaaaaggtaatgatctaccggtttgtgacccgtgcgtcagtggaggagcgcatcacgcaggtggcaaagaagaaaatgatgctgacgcatctagtggtgcggcctgggctgggctccaagactggatctatgtccaaacaggagcttgatgatatcctcaaatttggcactgaggaactattcaaggatgaagccactgatggaggaggagacaacaaagagggagaagatagcagtgttatccactacgatgataaggccattgaacggctgctagaccgtaaccaggatgagactgaagacacagaattgcagggcatgaatgaatatttgagctcattcaaagtggcccagtatgtggtacgggaagaagaaatgggggaggaagaggaggtagaacgggaaatcattaaacaggaagaaagtgtggatcctgactactgggagaaattgctgcggcaccattatgagcagcagcaagaagatctagcccgaaatctgggcaaaggaaaaagaatccgtaaacaggtcaactacaatgatggctcccaggaggaccgaggtgtgtgtggccggccccgccccccacccatgggccgttccactagagcagtgggccc

SEQ ID NO: 359508 - DNA, 3884 bp, Homo sapiens
ccggccggtgtttcaggccctttaagaggcgacgctggagccggagccattttccccccttcggccgcggcgaggaggagccggagcgggagtgacaccgagccggacccagcgcgacctgcggcggctccgggtgactcgggccagtgtagaggtcctcaggccgccggcaggagcagctgggccaattccctggccgggagcggaaggggatggcgtcgggcctgggctccccgtccccctgctcggcgggcagtgaggaggaggatatggatgcacttttgaacaacagcctgcccccaccccacccagaaaatgaagaggacccagaagaggatttgtcagaaacagagactccaaagctcaagaagaagaaaaagcctaagaaacctcgggaccctaaaatccctaagagcaagcgccaaaaaaaggagcgtatgctcttatgccggcagctgggggacagctctggggaggggccagagtttgtggaggaggaggaagaggtggctctgcgctcagacagtgagggcagcgactatactcctggcaagaagaagaagaagaagcttggacctaagaaagagaagaagagcaaatccaagcggaaggaggaggaggaggaggaggatgatgatgatgattcaaaggagcctaaatcatctgctcagctcctggaagactggggcatggaagacattgaccacgtgttctcagaggaggattatcgaaccctcaccaactacaaggccttcagccagtttgtcagacccctcattgctgccaaaaatcccaagattgctgtctccaagatgatgatggttttgggtgcaaaatggcgggagttcagtaccaataaccccttcaaaggcagttctggggcatcagtggcagctgcggcagcagcagcggtagctgtggtggagagcatggtgacagccactgaggttgcaccaccacctccccctgtggaggtgcctatccgcaaggccaagaccaaggagggcaaaggtcccaatgctcggaggaagcccaagggcagccctcgtgtacctgatgccaagaagcctaaacccaagaaagtagctcccctgaaaatcaagctgggaggttttggttccaagcgtaagagatcctcgagtgaggatgatgacttagatgtggaatctgacttcgatgatgccagtatcaatagctattctgtttctgatggttccaccagccgtagtagccgcagccgcaagaaactccgaaccactaaaaagaaaaagaaaggcgaggaggaggtgactgctgtggatggttatgagacagaccaccaggactattgcgaggtgtgccagcaaggcggtgagatcatcctgtgtgatacctgtccccgtgcttaccacatggtctgcctggatcccgacatggagaaggctcccgagggcaagtggagctgcccacactgcgagaaggaaggcatccagtgggaagctaaagaggacaattcggagggtgaggagatcctggaagaggttgggggagacctcgaagaggaggatgaccaccatatggaattctgtcgggtctgcaaggatggtggggaactgctctgctgtgatacctgtccttcttcctaccacatccactgcctgaatcccccacttccagagatccccaacggtgaatggctctgtccccgttgtacgtgtccagctctgaagggcaaagtgcagaagatcctaatctggaagtggggtcagccaccatctcccacaccagtgcctcggcctccagatgctgatcccaacacgccctccccaaagcccttggaggggcggccagagcggcagttctttgtgaaatggcaaggcatgtcttactggcactgctcctgggtttctgaactgcagctggagctgcactgtcaggtgatgttccgaaactatcagcggaagaatgatatggatgagccaccttctggggactttggtggtgatgaagagaaaagccgaaagcgaaagaacaaggaccctaaatttgcagagatggaggaacgcttctatcgctatgggataaaacccgagtggatgatgatccaccgaatcctcaaccacagtgtggacaagaagggccacgtccactacttgatcaagtggcgggacttaccttacgatcaggcttcttgggagagtgaggatgtggagatccaggattacgacctgttcaagcagagctattggaatcacagggagttaatgaggggtgaggaaggccgaccaggcaagaagctcaagaaggtgaagcttcggaagttggagaggcctccagaaacgccaacagttgatccaacagtgaagtatgagcgacagccagagtacctggatgctacaggtggaaccctgcacccctatcaaatggagggcctgaattggttgcgcttctcctgggctcagggcactgacaccatcttggctgatgagatgggccttgggaaaactgtacagacagcagtcttcctgtattccctttacaaggagggtcattccaaaggccccttcctagtgagcgcccctctttctaccatcatcaactgggagcgggagtttgaaatgtgggctccagacatgtatgtcgtaacctatgtgggtgacaaggacagccgtgccatcatccgagagaatgagttctcctttgaagacaatgccattcgtggtggcaagaaggcctcccgcatgaagaaagaggcatctgtgaaattccatgtgctgctgacatcctatgaattgatcaccattgacatggctattttgggctctattgattgggcctgcctcatcgtggatgaagcccatcggctgaagaacaatcagtctaagttcttccgggtattgaatggttactcactccagcacaagctgttgctgactgggacaccattacaaaacaatctggaagagttgtttcatctgctcaactttctcacccccgagaggttccacaatttggaaggttttttggaggagtttgctgacattgccaaggaggaccagataaaaaaactgcatgacatgctggggccgcacatgttgcggcggctcaaagccgatgtgttcaagaacatgccctccaagacagaactaattgtgcgtgtggagctgagccctatgcagaagaaatactacaagtacatcctcactcgaaattttgaagcactcaatgcccgaggtggtggcaaccaggtgtctctgctgaatgtggtgatggatcttaagaagtgctgcaaccatccatacctcttccctgtggctgcaatggaagctcctaagatgcctaatggcatgtatgatggcagtgccctaatcagagcatctgggaaattattgctgctgcagaaaatgctcaagaaccttaaggagggtgggcatcgtgtactcatcttttcccagatgaccaagatgctagacctgctagaggatttcttggaacatgaaggttataaatacgaacgcatcgatggtggaatcactgggaacatgcggcaagaggccattgaccgcttcaatgcaccgggtgctcagcagttctgcttcttgctttccactcgagctgggggccttggaatcaatctggccactgctgacacagttattatctatgactctgactggaacccccataatgacattcaggcctttagcagagctcaccggattgggcaaaataaaaaggtaatgatctaccggtttgtgacccgtgcgtcagtggaggagcgcatcacgcaggtggcaaagaagaaaatgatgctgacgcatctagggtggggccggggggcccagacggtcatgtccaacagagtgggaatccaatggccgggacatccggtgacccgggggggg

SEQ ID NO: 359509 - DNA, 3778 bp, Homo sapiens
ccggccggtgtttcaggccctttaagaggcgacgctggagccggagccattttccccccttcggccgcggcgaggaggagccggagcgggagtgacaccgagccggacccagcgcgacctgcggcggctccgggtgactcgggccagtgtagaggtcctcaggccgccggcaggagcagctgggccaattccctggccgggagcggaaggggatggcgtcgggcctgggctccccgtccccctgctcggcgggcagtgaggaggaggatatggatgcacttttgaacaacagcctgcccccaccccacccagaaaatgaagaggacccagaagaggatttgtcagaaacagagactccaaagctcaagaagaagaaaaagcctaagaaacctcgggaccctaaaatccctaagagcaagcgccaaaaaaaggagcgtatgctcttatgccggcagctgggggacagctctggggaggggccagagtttgtggaggaggaggaagaggtggctctgcgctcagacagtgagggcagcgactatactcctggcaagaagaagaagaagaagcttggacctaagaaagagaagaagagcaaatccaagcggaaggaggaggaggaggaggaggatgatgatgatgattcaaaggagcctaaatcatctgctcagctcctggaagactggggcatggaagacattgaccacgtgttctcagaggaggattatcgaaccctcaccaactacaaggccttcagccagtttgtcagacccctcattgctgccaaaaatcccaagattgctgtctccaagatgatgatggttttgggtgcaaaatggcgggagttcagtaccaataaccccttcaaaggcagttctggggcatcagtggcagctgcggcagcagcagcggtagctgtggtggagagcatggtgacagccactgaggttgcaccaccacctccccctgtggaggtgcctatccgcaaggccaagaccaaggagggcaaaggtcccaatgctcggaggaagcccaagggcagccctcgtgtacctgatgccaagaagcctaaacccaagaaagtagctcccctgaaaatcaagctgggaggttttggttccaagcgtaagagatcctcgagtgaggatgatgacttagatgtggaatctgacttcgatgatgccagtatcaatagctattctgtttctgatggttccaccagccgtagtagccgcagccgcaagaaactccgaaccactaaaaagaaaaagaaaggcgaggaggaggtgactgctgtggatggttatgagacagaccaccaggactattgcgaggtgtgccagcaaggcggtgagatcatcctgtgtgatacctgtccccgtgcttaccacatggtctgcctggatcccgacatggagaaggctcccgagggcaagtggagctgcccacactgcgagaaggaaggcatccagtgggaagctaaagaggacaattcggagggtgaggagatcctggaagaggttgggggagacctcgaagaggaggatgaccaccatatggaattctgtcgggtctgcaaggatggtggggaactgctctgctgtgatacctgtccttcttcctaccacatccactgcctgaatcccccacttccagagatccccaacggtgaatggctctgtccccgttgtacgtgtccagctctgaagggcaaagtgcagaagatcctaatctggaagtggggtcagccaccatctcccacaccagtgcctcggcctccagatgctgatcccaacacgccctccccaaagcccttggaggggcggccagagcggcagttctttgtgaaatggcaaggcatgtcttactggcactgctcctgggtttctgaactgcagctggagctgcactgtcaggtgatgttccgaaactatcagcggaagaatgatatggatgagccaccttctggggactttggtggtgatgaagagaaaagccgaaagcgaaagaacaaggaccctaaatttgcagagatggaggaacgcttctatcgctatgggataaaacccgagtggatgatgatccaccgaatcctcaaccacagtgtggacaagaagggccacgtccactacttgatcaagtggcgggacttaccttacgatcaggcttcttgggagagtgaggatgtggagatccaggattacgacctgttcaagcagagctattggaatcacagggagttaatgaggggtgaggaaggccgaccaggcaagaagctcaagaaggtgaagcttcggaagttggagaggcctccagaaacgccaacagttgatccaacagtgaagtatgagcgacagccagagtacctggatgctacaggtggaaccctgcacccctatcaaatggagggcctgaattggttgcgcttctcctgggctcagggcactgacaccatcttggctgatgagatgggccttgggaaaactgtacagacagcagtcttcctgtattccctttacaaggagggtcattccaaaggccccttcctagtgagcgcccctctttctaccatcatcaactgggagcgggagtttgaaatgtgggctccagacatgtatgtcgtaacctatgtgggtgacaaggacagccgtgccatcatccgagagaatgagttctcctttgaagacaatgccattcgtggtggcaagaaggcctcccgcatgaagaaagaggcatctgtgaaattccatgtgctgctgacatcctatgaattgatcaccattgacatggctattttgggctctattgattgggcctgcctcatcgtggatgaagcccatcggctgaagaacaatcagtctaagttcttccgggtattgaatggttactcactccagcacaagctgttgctgactgggacaccattacaaaacaatctggaagagttgtttcatctgctcaactttctcacccccgagaggttccacaatttggaaggttttttggaggagtttgctgacattgccaaggaggaccagataaaaaaactgcatgacatgctggggccgcacatgttgcggcggctcaaagccgatgtgttcaagaacatgccctccaagacagaactaattgtgcgtgtggagctgagccctatgcagaagaaatactacaagtacatcctcactcgaaattttgaagcactcaatgcccgaggtggtggcaaccaggtgtctctgctgaatgtggtgatggatcttaagaagtgctgcaaccatccatacctcttccctgtggctgcaatggaagctcctaagatgcctaatggcatgtatgatggcagtgccctaatcagagcatctgggaaattattgctgctgcagaaaatgctcaagaaccttaaggagggtgggcatcgtgtactcatcttttcccagatgaccaagatgctagacctgctagaggatttcttggaacatgaaggttataaatacgaacgcatcgatggtggaatcactgggaacatgcggcaagaggccattgaccgcttcaatggtgagagagaaggagttgtttagtttcaggaatcctcatttgcttatatctttggactgtaacttcttgtgcatctccttttctgtgtagttcttttgggactttgtcatttgagatggagtaaagcttttgaatgtctcaattggacgaatgtattggactattcctaggagattttttcttttggggtatttgttctttctgctagaaagaagaaagcattgta

SEQ ID NO: 359510 - DNA, 3128 bp, Homo sapiens
ccggccggtgtttcaggccctttaagaggcgacgctggagccggagccattttccccccttcggccgcggcgaggaggagccggagcgggagtgacaccgagccggacccagcgcgacctgcggcggctccgggtgactcgggccagtgtagaggtcctcaggccgccggcaggagcagctgggccaattccctggccgggagcggaaggggatggcgtcgggcctgggctccccgtccccctgctcggcgggcagtgaggaggaggatatggatgcacttttgaacaacagcctgcccccaccccacccagaaaatgaagaggacccagaagaggatttgtcagaaacagagactccaaagctcaagaagaagaaaaagcctaagaaacctcgggaccctaaaatccctaagagcaagcgccaaaaaaaggagcgtatgctcttatgccggcagctgggggacagctctggggaggggccagagtttgtggaggaggaggaagaggtggctctgcgctcagacagtgagggcagcgactatactcctggcaagaagaagaagaagaagcttggacctaagaaagagaagaagagcaaatccaagcggaaggaggaggaggaggaggaggatgatgatgatgattcaaaggagcctaaatcatctgctcagctcctggaagactggggcatggaagacattgaccacgtgttctcagaggaggattatcgaaccctcaccaactacaaggccttcagccagtttgtcagacccctcattgctgccaaaaatcccaagattgctgtctccaagatgatgatggttttgggtgcaaaatggcgggagttcagtaccaataaccccttcaaaggcagttctggggcatcagtggcagctgcggcagcagcagcggtagctgtggtggagagcatggtgacagccactgaggttgcaccaccacctccccctgtggaggtgcctatccgcaaggccaagaccaaggagggcaaaggtcccaatgctcggaggaagcccaagggcagccctcgtgtacctgatgccaagaagcctaaacccaagaaagtagctcccctgaaaatcaagctgggaggttttggttccaagcgtaagagatcctcgagtgaggatgatgacttagatgtggaatctgacttcgatgatgccagtatcaatagctattctgtttctgatggttccaccagccgtagtagccgcagccgcaagaaactccgaaccactaaaaagaaaaagaaaggcgaggaggaggtgactgctgtggatggttatgagacagaccaccaggactattgcgaggtgtgccagcaaggcggtgagatcatcctgtgtgatacctgtccccgtgcttaccacatggtctgcctggatcccgacatggagaaggctcccgagggcaagtggagctgcccacactgcgagaaggaaggcatccagtgggaagctaaagaggacaattcggagggtgaggagatcctggaagaggttgggggagacctcgaagaggaggatgaccaccatatggaattctgtcgggtctgcaaggatggtggggaactgctctgctgtgatacctgtccttcttcctaccacatccactgcctgaatcccccacttccagagatccccaacggtgaatggctctgtccccgttgtacgtgtccagctctgaagggcaaagtgcagaagatcctaatctggaagtggggtcagccaccatctcccacaccagtgcctcggcctccagatgctgatcccaacacgccctccccaaagcccttggaggggcggccagagcggcagttctttgtgaaatggcaaggcatgtcttactggcactgctcctgggtttctgaactgcagctggagctgcactgtcaggtgatgttccgaaactatcagcggaagaatgatatggatgagccaccttctggggactttggtggtgatgaagagaaaagccgaaagcgaaagaacaaggaccctaaatttgcagagatggaggaacgcttctatcgctatgggataaaacccgagtggatgatgatccaccgaatcctcaaccacagtgtggacaagaagggccacgtccactacttgatcaagtggcgggacttaccttacgatcaggcttcttgggagagtgaggatgtggagatccaggattacgacctgttcaagcagagctattggaatcacagggagttaatgaggggtgaggaaggccgaccaggcaagaagctcaagaaggtgaagcttcggaagttggagaggcctccagaaacgccaacagttgatccaacagtgaagtatgagcgacagccagagtacctggatgctacaggtggaaccctgcacccctatcaaatggagggcctgaattggttgcgcttctcctgggctcagggcactgacaccatcttggctgatgagatgggccttgggaaaactgtacagacagcagtcttcctgtattccctttacaaggagggtcattccaaaggccccttcctagtgagcgcccctctttctaccatcatcaactgggagcgggagtttgaaatgtgggctccagacatgtatgtcgtaacctatgtgggtgacaaggacagccgtgccatcatccgagagaatgagttctcctttgaagacaatgccattcgtggtggcaagaaggcctcccgcatgaagaaagaggcatctgtgaaattccatgtgctgctgacatcctatgaattgatcaccattgacatggctattttgggctctattgattgggcctgcctcatcgtggatgaagcccatcggctgaagaacaatcagtctaagttcttccgggtattgaatggttactcactccagcacaagctgttgctgactgggacaccattacaaaacaatctggaagagttgtttcatctgctcaactttctcacccccgagaggttccacaatttggaaggttttttggaggagtagcgtggtaagggcgatgagtgtggggaggaatggggtgggttcttgtatgttcaaactgtcattctatttatacgttgttagatatggggagtagtgtgagtcgagtcgagtaga

SEQ ID NO: 359511 - DNA, 2064 bp, Homo sapiens
ccggccggtgtttcaggccctttaagaggcgacgctggagccggagccattttccccccttcggccgcggcgaggaggagccggagcgggagtgacaccgagccggacccagcgcgacctgcggcggctccgggtgactcgggccagtgtagaggtcctcaggccgccggcaggagcagctgggccaattccctggccgggagcggaaggggatggcgtcgggcctgggctccccgtccccctgctcggcgggcagtgaggaggaggatatggatgcacttttgaacaacagcctgcccccaccccacccagaaaatgaagaggacccagaagaggatttgtcagaaacagagactccaaagctcaagaagaagaaaaagcctaagaaacctcgggaccctaaaatccctaagagcaagcgccaaaaaaaggagcgtatgctcttatgccggcagctgggggacagctctggggaggggccagagtttgtggaggaggaggaagaggtggctctgcgctcagacagtgagggcagcgactatactcctggcaagaagaagaagaagaagcttggacctaagaaagagaagaagagcaaatccaagcggaaggaggaggaggaggaggaggatgatgatgatgattcaaaggagcctaaatcatctgctcagctcctggaagactggggcatggaagacattgaccacgtgttctcagaggaggattatcgaaccctcaccaactacaaggccttcagccagtttgtcagacccctcattgctgccaaaaatcccaagattgctgtctccaagatgatgatggttttgggtgcaaaatggcgggagttcagtaccaataaccccttcaaaggcagttctggggcatcagtggcagctgcggcagcagcagcggtagctgtggtggagagcatggtgacagccactgaggttgcaccaccacctccccctgtggaggtgcctatccgcaaggccaagaccaaggagggcaaaggtcccaatgctcggaggaagcccaagggcagccctcgtgtacctgatgccaagaagcctaaacccaagaaagtagctcccctgaaaatcaagctgggaggttttggttccaagcgtaagagatcctcgagtgaggatgatgacttagatgtggaatctgacttcgatgatgccagtatcaatagctattctgtttctgatggttccaccagccgtagtagccgcagccgcaagaaactccgaaccactaaaaagaaaaagaaaggcgaggaggaggtgactgctgtggatggttatgagacagaccaccaggactattgcgaggtgtgccagcaaggcggtgagatcatcctgtgtgatacctgtccccgtgcttaccacatggtctgcctggatcccgacatggagaaggctcccgagggcaagtggagctgcccacactgcgagaaggaaggcatccagtgggaagctaaagaggacaattcggagggtgaggagatcctggaagaggttgggggagacctcgaagaggaggatgaccaccatatggaattctgtcgggtctgcaaggatggtggggaactgctctgctgtgatacctgtccttcttcctaccacatccactgcctgaatcccccacttccagagatccccaacggtgaatggctctgtccccgttgtacgtgtccagctctgaagggcaaagtgcagaagatcctaatctggaagtggggtcagccaccatctcccacaccagtgcctcggcctccagatgctgatcccaacacgccctccccaaagcccttggaggggcggccagagcggcagttctttgtgaaatggcaaggcatgtcttactggcactgctcctgggtttctgaactgcagctggagctgcactgtcaggtgatgttccgaaactatcagcggaagaatgatatggatgagccaccttctggggactttggtggtgatgaagagaaaagccgaaagcgaaagaacaaggaccctaaatttgcagagatggagggatgagcataaggagggatgagca

SEQ ID NO: 359512 - DNA, 202 bp, Homo sapiens
cagcagagggagtctgtccatccagcgcactgttctcactttcttcattctatggaaggctttgctcccaagtaacttacacattagggttgaagacacacagaattgaaagttaactaactgtacatgagctgtaggtgactatgtgtccaatcagtgacacactagtgcagaggggtttgtttggggaacactgcagatt

SEQ ID NO: 359513 - DNA, 472 bp, Homo sapiens
agggaggaatgagtctgggattttggagggaaatttgggaatctgaatgtggggaagcaagcttaggtggagaagattttattttccccatctttggtcttgtggtatatatttggatatatcctgattttaggtcccaatgctcggaggaagcccaagggcagccctcgtgtacctgatgccaagaagcctaaacccaagaaagtagctcccctgaaaatcaagctgggaggttttggttccaagcgtaagagatcctcggtgagagcccagcccatcgctttagggagggtgccatgtctaatagaaaggatgtgaccttctatcagaacctgtccttcatagtaggcacgtaagaatgtggggcgtttcccacagaacaagatgagactaggctccctgtataacggtgcttgctgggattctggtgtccccagtgagagagtactcccctctctgccactctgtcctt

SEQ ID NO: 359514 - DNA, 415 bp, Homo sapiens
ggttgggtcttctccatgtgggctttcttttaatacttttttctttgcatttgttctcaggaagctcctaagatgcctaatggcatgtatgatggcagtgccctaatcagagcatctgggaaattattgctgctgcagaaaatgctcaagaaccttaaggagggtgggcatcgtgtactcatcttttcccaggtatcatgtggactgggagctttagggaacagtcatagacaacccttagtgacctaaggaaagggattaccatctgactcttccataattaaaccgtgcttcttttgcagatgaccaagatgctagacctgctagaggatttcttggaacatgaaggttataaatacgaacgcatcgatggtggaatcactgggaacatgcggcaagaggccattgaccgctt

SEQ ID NO: 359515 - DNA, 824 bp, Homo sapiens
  misc_feature (20)..(20): n is a, c, g, or t
  misc_feature (24)..(24): n is a, c, g, or t
taacggctaggtacgaggcngggntaggcgaggaggaggtgactgctgtggatggttatgagacagaccaccaggactattgcgaggtgtgccagcaaggcggtgagatcatcctgtgtgatacctgtccccgtgcttaccacatggtctgcctggatcccgacatggagaaggctcccgagggcaagtggagctgcccacactgcgagaaggaaggcatccagtgggaagctaaagaggacaattcggagggtgaggagatcctggaagaggttgggggagacctcgaagaggaggatgaccaccatatggaattctgtcgggtctgcaaggatggtggggaactgctctgctgtgatacctgtccttcttcctaccacatccactgcctgaatcccccacttccagagatccccaacggtgaatggctctgtccccgttgtacgtgtccagctctgaagggcaaagtgcagaagatcctaatctggaagtggggtcagccaccatctcccacaccagtgcctcggcctccagatgctgatcccaacacgccctccccaaagcccttggaggggcggccagagcggcagttctttgtgaaatggcaaggcatgtcttactggcactgctcctgggtttctgaactgcagctggagctgcactgtcaggtgatgttccgaaactatcagcggaagaatgatatggatgagccaccttctggggactttggtggtgatgaagagaaaagccgaaagcgaaggacaggcccaatttgggagagggggaccgttatgcaggggtaaccccggtgtttcccggctctc

SEQ ID NO: 359516 - DNA, 6436 bp, Homo sapiens
ccggccggtgtttcaggccctttaagaggcgacgctggagccggagccattttccccccttcggccgcggcgaggaggagccggagcgggagtgacaccgagccggacccagcgcgacctgcggcggctccgggtgactcgggccagtgtagaggtcctcaggccgccggcaggagcagctgggccaattccctggccgggagcggaaggggatggcgtcgggcctgggctccccgtccccctgctcggcgggcagtgaggaggaggatatggatgcacttttgaacaacagcctgcccccaccccacccagaaaatgaagaggacccagaagaggatttgtcagaaacagagactccaaagctcaagaagaagaaaaagcctaagaaacctcgggaccctaaaatccctaagagcaagcgccaaaaaaaggagctgggggacagctctggggaggggccagagtttgtggaggaggaggaagaggtggctctgcgctcagacagtgagggcagcgactatactcctggcaagaagaagaagaagaagcttggacctaagaaagagaagaagagcaaatccaagcggaaggaggaggaggaggaggaggatgatgatgatgattcaaaggagcctaaatcatctgctcagctcctggaagactggggcatggaagacattgaccacgtgttctcagaggaggattatcgaaccctcaccaactacaaggccttcagccagtttgtcagacccctcattgctgccaaaaatcccaagattgctgtctccaagatgatgatggttttgggtgcaaaatggcgggagttcagtaccaataaccccttcaaaggcagttctggggcatcagtggcagctgcggcagcagcagcggtagctgtggtggagagcatggtgacagccactgaggttgcaccaccacctccccctgtggaggtgcctatccgcaaggccaagaccaaggagggcaaaggtcccaatgctcggaggaagcccaagggcagccctcgtgtacctgatgccaagaagcctaaacccaagaaagtagctcccctgaaaatcaagctgggaggttttggttccaagcgtaagagatcctcgagtgaggatgatgacttagatgtggaatctgacttcgatgatgccagtatcaatagctattctgtttctgatggttccaccagccgtagtagccgcagccgcaagaaactccgaaccactaaaaagaaaaagaaaggcgaggaggaggtgactgctgtggatggttatgagacagaccaccaggactattgcgaggtgtgccagcaaggcggtgagatcatcctgtgtgatacctgtccccgtgcttaccacatggtctgcctggatcccgacatggagaaggctcccgagggcaagtggagctgcccacactgcgagaaggaaggcatccagtgggaagctaaagaggacaattcggagggtgaggagatcctggaagaggttgggggagacctcgaagaggaggatgaccaccatatggaattctgtcgggtctgcaaggatggtggggaactgctctgctgtgatacctgtccttcttcctaccacatccactgcctgaatcccccacttccagagatccccaacggtgaatggctctgtccccgttgtacgtgtccagctctgaagggcaaagtgcagaagatcctaatctggaagtggggtcagccaccatctcccacaccagtgcctcggcctccagatgctgatcccaacacgccctccccaaagcccttggaggggcggccagagcggcagttctttgtgaaatggcaaggcatgtcttactggcactgctcctgggtttctgaactgcagctggagctgcactgtcaggtgatgttccgaaactatcagcggaagaatgatatggatgagccaccttctggggactttggtggtgatgaagagaaaagccgaaagcgaaagaacaaggaccctaaatttgcagagatggaggaacgcttctatcgctatgggataaaacccgagtggatgatgatccaccgaatcctcaaccacagtgtggacaagaagggccacgtccactacttgatcaagtggcgggacttaccttacgatcaggcttcttgggagagtgaggatgtggagatccaggattacgacctgttcaagcagagctattggaatcacagggagttaatgaggggtgaggaaggccgaccaggcaagaagctcaagaaggtgaagcttcggaagttggagaggcctccagaaacgccaacagttgatccaacagtgaagtatgagcgacagccagagtacctggatgctacaggtggaaccctgcacccctatcaaatggagggcctgaattggttgcgcttctcctgggctcagggcactgacaccatcttggctgatgagatgggccttgggaaaactgtacagacagcagtcttcctgtattccctttacaaggagggtcattccaaaggccccttcctagtgagcgcccctctttctaccatcatcaactgggagcgggagtttgaaatgtgggctccagacatgtatgtcgtaacctatgtgggtgacaaggacagccgtgccatcatccgagagaatgagttctcctttgaagacaatgccattcgtggtggcaagaaggcctcccgcatgaagaaagaggcatctgtgaaattccatgtgctgctgacatcctatgaattgatcaccattgacatggctattttgggctctattgattgggcctgcctcatcgtggatgaagcccatcggctgaagaacaatcagtctaagttcttccgggtattgaatggttactcactccagcacaagctgttgctgactgggacaccattacaaaacaatctggaagagttgtttcatctgctcaactttctcacccccgagaggttccacaatttggaaggttttttggaggagtttgctgacattgccaaggaggaccagataaaaaaactgcatgacatgctggggccgcacatgttgcggcggctcaaagccgatgtgttcaagaacatgccctccaagacagaactaattgtgcgtgtggagctgagccctatgcagaagaaatactacaagtacatcctcactcgaaattttgaagcactcaatgcccgaggtggtggcaaccaggtgtctctgctgaatgtggtgatggatcttaagaagtgctgcaaccatccatacctcttccctgtggctgcaatggaagctcctaagatgcctaatggcatgtatgatggcagtgccctaatcagagcatctgggaaattattgctgctgcagaaaatgctcaagaaccttaaggagggtgggcatcgtgtactcatcttttcccagatgaccaagatgctagacctgctagaggatttcttggaacatgaaggttataaatacgaacgcatcgatggtggaatcactgggaacatgcggcaagaggccattgaccgcttcaatgcaccgggtgctcagcagttctgcttcttgctttccactcgagctgggggccttggaatcaatctggccactgctgacacagttattatctatgactctgactggaacccccataatgacattcaggcctttagcagagctcaccggattgggcaaaataaaaaggtaatgatctaccggtttgtgacccgtgcgtcagtggaggagcgcatcacgcaggtggcaaagaagaaaatgatgctgacgcatctagtggtgcggcctgggctgggctccaagactggatctatgtccaaacaggagcttgatgatatcctcaaatttggcactgaggaactattcaaggatgaagccactgatggaggaggagacaacaaagagggagaagatagcagtgttatccactacgatgataaggccattgaacggctgctagaccgtaaccaggatgagactgaagacacagaattgcagggcatgaatgaatatttgagctcattcaaagtggcccagtatgtggtacgggaagaagaaatgggggaggaagaggaggtagaacgggaaatcattaaacaggaagaaagtgtggatcctgactactgggagaaattgctgcggcaccattatgagcagcagcaagaagatctagcccgaaatctgggcaaaggaaaaagaatccgtaaacaggtcaactacaatgatggctcccaggaggaccgagattggcaggacgaccagtccgacaaccagtccgattactcagtggcttcagaggaaggtgatgaagactttgatgaacgttcagaagctccccgtaggcccagtcgtaagggcctgcggaatgataaagataagccattgcctcctctgttggcccgtgttggtgggaatattgaagtacttggttttaatgctcgtcagcgaaaagcctttcttaatgcaattatgcgatatggtatgccacctcaggatgcttttactacccagtggcttgtaagagacctgcgaggcaaatcagagaaagagttcaaggcatatgtctctcttttcatgcggcatttatgtgagccgggggcagatggggctgagacctttgctgatggtgtcccccgagaaggcctgtctcgccagcatgtccttactagaattggtgttatgtctttgattcgcaagaaggttcaggagtttgaacatgttaatgggcgctggagcatgcctgaactggctgaggtggaggaaaacaagaagatgtcccagccagggtcaccctccccaaaaactcctacaccctccactccaggggacacgcagcccaacactcctgcacctgtcccacctgctgaagatgggataaaaatagaggaaaatagcctcaaagaagaagagagcatagaaggagaaaaggaggttaaatctacagcccctgagactgccattgagtgtacacaggcccctgcccctgcctcagaggatgaaaaggtcgttgttgaaccccctgagggagaggagaaagtggaaaaggcagaggtgaaggagagaacagaggaacctatggagacagagcccaaaggtgctgctgatgtagagaaggtggaggaaaagtcagcaatagatctgacccctattgtggtagaagacaaagaagagaagaaagaagaagaagagaaaaaagaggtgatgcttcagaatggagagacccccaaggacctgaatgatgagaaacagaagaaaaatattaaacaacgtttcatgtttaacattgcagatggtggttttactgagttgcactccctttggcagaatgaagagcgggcagccacagttaccaagaagacttatgagatctggcatcgacggcatgactactggctgctagccggcattataaaccatggctatgcccggtggcaagacatccagaatgacccacgctatgccatcctcaatgagcctttcaagggtgaaatgaaccgtggcaatttcttagagatcaagaataaatttctagctcgaaggtttaagctcttagaacaagctctggtgattgaggaacagctgcgccgggctgcttacttgaacatgtcagaagacccttctcacccttccatggccctcaacacccgctttgctgaggtggagtgtttggcggaaagtcatcagcacctgtccaaggagtcaatggcaggaaacaagccagccaatgcagtcctgcacaaagttctgaaacagctggaagaactgctgagtgacatgaaagctgatgtgactcgactcccagctaccattgcccgaattcccccagttgctgtgaggttacagatgtcagagcgtaacattctcagccgcctggcaaaccgggcacccgaacctaccccacagcaggtagcccagcagcagtgaagatgcagactgataccacctccaccgctgagcagtgaccttcctcactttctcttgtcccagcttctcccctgggggcctgagagaccctcaccttccttctgcccatcttccatgttgtaaaggaacagccccagtgcactgggggaggggagggagtgaggggcagtggtgcccttcctgcagaagagacatgcagcagtagcgctggcgccatctgcaggagctggcgggctggccttctggaccctggcttctccccactgtaacgcctgttacacacaaactgttgtgggttcctgccaggcttgaagaaaatgatctgaattttttcctccttttggttttattttgttggtttattttgtgttttcttttctcctttttggggggtattcagagtgggctgggcccctgggcgagacacagctacctctgttggcatctttttaataccaggaacccagcggctctagccactgagcggctaaatgaaataaagtgga

SEQ ID NO: 359517 - DNA, 5564 bp, Homo sapiens
tgggattttggagggaaatttgggaatctgaatgtggggaagcaagcttaggtggagaagattttattttccccatctttggtcttgtggtatatatttggatatatcctgattttaggtcccaatgctcggaggaagcccaagggcagccctcgtgtacctgatgccaagaagcctaaacccaagaaagtagctcccctgaaaatcaagctgggaggttttggttccaagcgtaagagatcctcgagtgaggatgatgacttagatgtggaatctgacttcgatgatgccagtatcaatagctattctgtttctgatggttccaccagccgtagtagccgcagccgcaagaaactccgaaccactaaaaagaaaaagaaaggcgaggaggaggtgactgctgtggatggttatgagacagaccaccaggactattgcgaggtgtgccagcaaggcggtgagatcatcctgtgtgatacctgtccccgtgcttaccacatggtctgcctggatcccgacatggagaaggctcccgagggcaagtggagctgcccacactgcgagaaggaaggcatccagtgggaagctaaagaggacaattcggagggtgaggagatcctggaagaggttgggggagacctcgaagaggaggatgaccaccatatggaattctgtcgggtctgcaaggatggtggggaactgctctgctgtgatacctgtccttcttcctaccacatccactgcctgaatcccccacttccagagatccccaacggtgaatggctctgtccccgttgtacgtgtccagctctgaagggcaaagtgcagaagatcctaatctggaagtggggtcagccaccatctcccacaccagtgcctcggcctccagatgctgatcccaacacgccctccccaaagcccttggaggggcggccagagcggcagttctttgtgaaatggcaaggcatgtcttactggcactgctcctgggtttctgaactgcagctggagctgcactgtcaggtgatgttccgaaactatcagcggaagaatgatatggatgagccaccttctggggactttggtggtgatgaagagaaaagccgaaagcgaaagaacaaggaccctaaatttgcagagatggaggaacgcttctatcgctatgggataaaacccgagtggatgatgatccaccgaatcctcaaccacagtgtggacaagaagggccacgtccactacttgatcaagtggcgggacttaccttacgatcaggcttcttgggagagtgaggatgtggagatccaggattacgacctgttcaagcagagctattggaatcacagggagttaatgaggggtgaggaaggccgaccaggcaagaagctcaagaaggtgaagcttcggaagttggagaggcctccagaaacgccaacagttgatccaacagtgaagtatgagcgacagccagagtacctggatgctacaggtggaaccctgcacccctatcaaatggagggcctgaattggttgcgcttctcctgggctcagggcactgacaccatcttggctgatgagatgggccttgggaaaactgtacagacagcagtcttcctgtattccctttacaaggagggtcattccaaaggccccttcctagtgagcgcccctctttctaccatcatcaactgggagcgggagtttgaaatgtgggctccagacatgtatgtcgtaacctatgtgggtgacaaggacagccgtgccatcatccgagagaatgagttctcctttgaagacaatgccattcgtggtggcaagaaggcctcccgcatgaagaaagaggcatctgtgaaattccatgtgctgctgacatcctatgaattgatcaccattgacatggctattttgggctctattgattgggcctgcctcatcgtggatgaagcccatcggctgaagaacaatcagtctaagttcttccgggtattgaatggttactcactccagcacaagctgttgctgactgggacaccattacaaaacaatctggaagagttgtttcatctgctcaactttctcacccccgagaggttccacaatttggaaggttttttggaggagtttgctgacattgccaaggaggaccagataaaaaaactgcatgacatgctggggccgcacatgttgcggcggctcaaagccgatgtgttcaagaacatgccctccaagacagaactaattgtgcgtgtggagctgagccctatgcagaagaaatactacaagtacatcctcactcgaaattttgaagcactcaatgcccgaggtggtggcaaccaggtgtctctgctgaatgtggtgatggatcttaagaagtgctgcaaccatccatacctcttccctgtggctgcaatggaagctcctaagatgcctaatggcatgtatgatggcagtgccctaatcagagcatctgggaaattattgctgctgcagaaaatgctcaagaaccttaaggagggtgggcatcgtgtactcatcttttcccagatgaccaagatgctagacctgctagaggatttcttggaacatgaaggttataaatacgaacgcatcgatggtggaatcactgggaacatgcggcaagaggccattgaccgcttcaatgcaccgggtgctcagcagttctgcttcttgctttccactcgagctgggggccttggaatcaatctggccactgctgacacagttattatctatgactctgactggaacccccataatgacattcaggcctttagcagagctcaccggattgggcaaaataaaaaggtaatgatctaccggtttgtgacccgtgcgtcagtggaggagcgcatcacgcaggtggcaaagaagaaaatgatgctgacgcatctagtggtgcggcctgggctgggctccaagactggatctatgtccaaacaggagcttgatgatatcctcaaatttggcactgaggaactattcaaggatgaagccactgatggaggaggagacaacaaagagggagaagatagcagtgttatccactacgatgataaggccattgaacggctgctagaccgtaaccaggatgagactgaagacacagaattgcagggcatgaatgaatatttgagctcattcaaagtggcccagtatgtggtacgggaagaagaaatgggggaggaagaggaggtagaacgggaaatcattaaacaggaagaaagtgtggatcctgactactgggagaaattgctgcggcaccattatgagcagcagcaagaagatctagcccgaaatctgggcaaaggaaaaagaatccgtaaacaggtcaactacaatgatggctcccaggaggaccgagattggcaggacgaccagtccgacaaccagtccgattactcagtggcttcagaggaaggtgatgaagactttgatgaacgttcagaagctccccgtaggcccagtcgtaagggcctgcggaatgataaagataagccattgcctcctctgttggcccgtgttggtgggaatattgaagtacttggttttaatgctcgtcagcgaaaagcctttcttaatgcaattatgcgatatggtatgccacctcaggatgcttttactacccagtggcttgtaagagacctgcgaggcaaatcagagaaagagttcaaggcatatgtctctcttttcatgcggcatttatgtgagccgggggcagatggggctgagacctttgctgatggtgtcccccgagaaggcctgtctcgccagcatgtccttactagaattggtgttatgtctttgattcgcaagaaggttcaggagtttgaacatgttaatgggcgctggagcatgcctgaactggctgaggtggaggaaaacaagaagatgtcccagccagggtcaccctccccaaaaactcctacaccctccactccaggggacacgcagcccaacactcctgcacctgtcccacctgctgaagatgggataaaaatagaggaaaatagcctcaaagaagaagagagcatagaaggagaaaaggaggttaaatctacagcccctgagactgccattgagtgtacacaggcccctgcccctgcctcagaggatgaaaaggtcgttgttgaaccccctgagggagaggagaaagtggaaaaggcagaggtgaaggagagaacagaggaacctatggagacagagcccaaaggtgctgctgatgtagagaaggtggaggaaaagtcagcaatagatctgacccctattgtggtagaagacaaagaagagaagaaagaagaagaagagaaaaaagaggtgatgcttcagaatggagagacccccaaggacctgaatgatgagaaacagaagaaaaatattaaacaacgtttcatgtttaacattgcagatggtggttttactgagttgcactccctttggcagaatgaagagcgggcagccacagttaccaagaagacttatgagatctggcatcgacggcatgactactggctgctagccggcattataaaccatggctatgcccggtggcaagacatccagaatgacccacgctatgccatcctcaatgagcctttcaagggtgaaatgaaccgtggcaatttcttagagatcaagaataaatttctagctcgaaggtttaagctcttagaacaagctctggtgattgaggaacagctgcgccgggctgcttacttgaacatgtcagaagacccttctcacccttccatggccctcaacacccgctttgctgaggtggagtgtttggcggaaagtcatcagcacctgtccaaggagtcaatggcaggaaacaagccagccaatgcagtcctgcacaaagttctgaaacagctggaagaactgctgagtgacatgaaagctgatgtgactcgactcccagctaccattgcccgaattcccccagttgctgtgaggttacagatgtcagagcgtaacattctcagccgcctggcaaaccgggcacccgaacctaccccacagcaggtagcccagcagcagtgaagatgcagactgataccacctccaccgctgagcagtgaccttcctcactttctcttgtcccagcttctcccctgggggcctgagagaccctcaccttccttctgcccatcttccatgttgtaaaggaacagccccagtgcactgggggaggggagggagtgaggggcagtggtgcccttcctgcagaagagacatgcagcagtagcgctggcgccatctgcaggagctggcgggctggccttctggaccctggcttctccccactgtaacgcctgttacacacaaactgttgtgggttcctgccaggcttgaagaaaatgatctgaattttttcctccttttggttttattttgttggtttattttgtgttttcttttctcctttttggggggtattcagagtgggctgggcccctgggcgagacacagctacctctgttggcatctttttaataccaggaacccagcggctctagccactgagcggctaaatgaaataaagtgga

SEQ ID NO: 359518 - DNA, 6543 bp, Homo sapiens
ccggccggtgtttcaggccctttaagaggcgacgctggagccggagccattttccccccttcggccgcggcgaggaggagccggagcgggagtgacaccgagccggacccagcgcgacctgcggcggctccgggtgactcgggccagtgtagaggtcctcaggccgccggcaggagcagctgggccaattccctggccgggagcggaaggggatggcgtcgggcctgggctccccgtccccctgctcggcgggcagtgaggaggaggatatggatgcacttttgaacaacagcctgcccccaccccacccagaaaatgaagaggacccagaagaggatttgtcagaaacagagactccaaagctcaagaagaagaaaaagcctaagaaacctcgggaccctaaaatccctaagagcaagcgccaaaaaaaggagcgtatgctcttatgccggcagctgggggacagctctggggaggggccagagtttgtggaggaggaggaagaggtggctctgcgctcagacagtgagggcagcgactatactcctggcaagaagaagaagaagaagcttggacctaagaaagagaagaagagcaaatccaagcggaaggaggaggaggaggaggaggatgatgatgatgattcaaaggagcctaaatcatctgctcagctcctggaagactggggcatggaagacattgaccacgtgttctcagaggaggattatcgaaccctcaccaactacaaggccttcagccagtttgtcagacccctcattgctgccaaaaatcccaagattgctgtctccaagatgatgatggttttgggtgcaaaatggcgggagttcagtaccaataaccccttcaaaggcagttctggggcatcagtggcagctgcggcagcagcagcggtagctgtggtggagagcatggtgacagccactgaggttgcaccaccacctccccctgtggaggtgcctatccgcaaggccaagaccaaggagggcaaaggtcccaatgctcggaggaagcccaagggcagccctcgtgtacctgatgccaagaagcctaaacccaagaaagtagctcccctgaaaatcaagctgggaggttttggttccaagcgtaagagatcctcgagtgaggatgatgacttagatgtggaatctgacttcgatgatgccagtatcaatagctattctgtttctgatggttccaccagccgtagtagccgcagccgcaagaaactccgaaccactaaaaagaaaaagaaaggcgaggaggaggtgactgctgtggatggttatgagacagaccaccaggactattgcgaggtgtgccagcaaggcggtgagatcatcctgtgtgatacctgtccccgtgcttaccacatggtctgcctggatcccgacatggagaaggctcccgagggcaagtggagctgcccacactgcgagaaggaaggcatccagtgggaagctaaagaggacaattcggagggtgaggagatcctggaagaggttgggggagacctcgaagaggaggatgaccaccatatggaattctgtcgggtctgcaaggatggtggggaactgctctgctgtgatacctgtccttcttcctaccacatccactgcctgaatcccccacttccagagatccccaacggtgaatggctctgtccccgttgtacgtgtccagctctgaagggcaaagtgcagaagatcctaatctggaagtggggtcagccaccatctcccacaccagtgcctcggcctccagatgctgatcccaacacgccctccccaaagcccttggaggggcggccagagcggcagttctttgtgaaatggcaaggcatgtcttactggcactgctcctgggtttctgaactgcagctggagctgcactgtcaggtgatgttccgaaactatcagcggaagaatgatatggatgagccaccttctggggactttggtggtgatgaagagaaaagccgaaagcgaaagaacaaggaccctaaatttgcagagatggaggaacgcttctatcgctatgggataaaacccgagtggatgatgatccaccgaatcctcaaccacagtgtggacaagaagggccacgtccactacttgatcaagtggcgggacttaccttacgatcaggcttcttgggagagtgaggatgtggagatccaggattacgacctgttcaagcagagctattggaatcacagggagttaatgaggggtgaggaaggccgaccaggcaagaagctcaagaaggtgaagcttcggaagttggagaggcctccagaaacgccaacagttgatccaacagtgaagtatgagcgacagccagagtacctggatgctacaggtggaaccctgcacccctatcaaatggagggcctgaattggttgcgcttctcctgggctcagggcactgacaccatcttggctgatgagatgggccttgggaaaactgtacagacagcagtcttcctgtattccctttacaaggagggtcattccaaaggccccttcctagtgagcgcccctctttctaccatcatcaactgggagcgggagtttgaaatgtgggctccagacatgtatgtcgtaacctatgtgggtgacaaggacagccgtgccatcatccgagagaatgagttctcctttgaagacaatgccattcgtggtggcaagaaggcctcccgcatgaagaaagaggcatctgtgaaattccatgtgctgctgacatcctatgaattgatcaccattgacatggctattttgggctctattgattgggcctgcctcatcgtggatgaagcccatcggctgaagaacaatcagtctaagttcttccgggtattgaatggttactcactccagcacaagctgttgctgactgggacaccattacaaaacaatctggaagagttgtttcatctgctcaactttctcacccccgagaggttccacaatttggaaggttttttggaggagtttgctgacattgccaaggaggaccagataaaaaaactgcatgacatgctggggccgcacatgttgcggcggctcaaagccgatgtgttcaagaacatgccctccaagacagaactaattgtgcgtgtggagctgagccctatgcagaagaaatactacaagtacatcctcactcgaaattttgaagcactcaatgcccgaggtggtggcaaccaggtgtctctgctgaatgtggtgatggatcttaagaagtgctgcaaccatccatacctcttccctgtggctgcaatggaagctcctaagatgcctaatggcatgtatgatggcagtgccctaatcagagcatctgggaaattattgctgctgcagaaaatgctcaagaaccttaaggagggtgggcatcgtgtactcatcttttcccagatgaccaagatgctagacctgctagaggatttcttggaacatgaaggttataaatacgaacgcatcgatggtggaatcactgggaacatgcggcaagaggccattgaccgcttcaatgcaccgggtgctcagcagttctgcttcttgctttccactcgagctgggggccttggaatcaatctggccactgctgacacagttattatctatgactctgactggaacccccataatgacattcaggcctttagcagagctcaccggattgggcaaaataaaaaggtaatgatctaccggtttgtgacccgtgcgtcagtggaggagcgcatcacgcaggtggcaaagaagaaaatgatgctgacgcatctagtggtgcggcctgggctgggctccaagactggatctatgtccaaacaggagcttgatgatatcctcaaatttggcactgaggaactattcaaggatgaagccactgatggaggaggagacaacaaagagggagaagatagcagtgttatccactacgatgataaggccattgaacggctgctagaccgtaaccaggatgagactgaagacacagaattgcagggcatgaatgaatatttgagctcattcaaagtggcccagtatgtggtacgggaagaagaaatgggggaggaagaggaggtagaacgggaaatcattaaacaggaagaaagtgtggatcctgactactgggagaaattgctgcggcaccattatgagcagcagcaagaagatctagcccgaaatctgggcaaaggaaaaagaatccgtaaacaggtcaactacaatgatggctcccaggaggaccgagattggcaggacgaccagtccgacaaccagtccgattactcagtggcttcagaggaaggtgatgaagactttgatgaacgttcagaagctccccgtaggcccagtcgtaagggcctgcggaatgataaagataagccattgcctcctctgttggcccgtgttggtgggaatattgaagtacttggttttaatgctcgtcagcgaaaagcctttcttaatgcaattatgcgatatggtatgccacctcaggatgcttttactacccagtggcttgtaagagacctgcgaggcaaatcagagaaagagttcaaggcatatgtctctcttttcatgcggcatttatgtgagccgggggcagatggggctgagacctttgctgatggtgtcccccgagaaggcctgtctcgccagcatgtccttactagaattggtgttatgtctttgattcgcaagaaggttcaggagtttgaacatgttaatgggcgctggagcatgcctgaactggctgaggtggaggaaaacaagaagatgtcccagccagggtcaccctccccaaaaactcctacaccctccactccaggggacacgcagcccaacactcctgcacctgtcccacctgctgaagatgggataaaaatagaggaaaatagcctcaaagaagaagagagcatagaaggagaaaaggaggttaaatctacagcccctgagactgccattgagtgtacacaggcccctgcccctgcctcagaggatgaaaaggtcgttgttgaaccccctgagggagaggagaaagtggaaaaggcagaggtgaaggagagaacagaggaacctatggagacagagcccaaaggtgctgctgatgtagagaaggtggaggaaaagtcagcaatagatctgacccctattgtggtagaagacaaagaagagaagaaagaagaagaagagaaaaaagaggtgatgcttcagaatggagagacccccaaggacctgaatgatgagaaacagaagaaaaatattaaacaacgtttcatgtttaacattgcagatggtggttttactgagttgcactccctttggcagaatgaagagcgggcagccacagttaccaagaagacttatgagatctggcatcgacggcatgactactggctgctagccggcattataaaccatggctatgcccggtggcaagacatccagaatgacccacgctatgccatcctcaatgagcctttcaagggtgaaatgaaccgtggcaatttcttagagatcaagaataaatttctagctcgaaggtttaagctcttagaacaagctctggtgattgaggaacagctgcgccgggctgcttacttgaacatgtcagaagacccttctcacccttccatggccctcaacacccgctttgctgaggtggagtgtttggcggaaagtcatcagcacctgtccaaggagtcaatggcaggaaacaagccagccaatgcagtcctgcacaaagttctgaaacagctggaagaactgctgagtgacatgaaagctgatgtgactcgactcccagctaccattgcccgaattcccccagttgctgtgaggttacagatgtcagagcgtaacattctcagccgcctggcaaaccgggcacccgaacctaccccacagcaggtagcccagcagcagtgaagatgcagactgataccacctccaccgctgagcagtgaccttcctcactttctcttgtcccagcttctcccctgggggcctgagagaccctcaccttccttctgcccatcttccatgttgtaaaggaacagccccagtgcactgggggaggggagggagtgaggggcagtggtgcccttcctgcagaagagacatgcagcagtagcgctggcgccatctgcaggagctggcgggctggccttctggaccctggcttctccccactgtaacgcctgttacacacaaactgttgtgggttcctgccaggcttgaagaaaatgatctgaattttttcctccttttggttttattttgttggtttattttgtgttttcttttctcctttttggggggtattcagagtgggctgggcccctgggcgagacacagctacctctgttggcatctttttaataccaggaacccagcggctctagccactgagcggctaaatgaaataaagtggaaaaaaaaaaaaggaaaaaaccaaaagcataaaaaaccacagcaaatttcttgatgaaaattgaaaataaaagtttccttgtatttt

SEQ ID NO: 359519 - DNA, 6384 bp, Homo sapiens
ccggccggtgtttcaggccctttaagaggcgacgctggagccggagccattttccccccttcggccgcggcgaggaggagccggagcgggagtgacaccgagccggacccagcgcgacctgcggcggctccgggtgactcgggccagtgtagaggtcctcaggccgccggcaggagcagctgggccaattccctggccgggagcggaaggggatggcgtcgggcctgggctccccgtccccctgctcggcgggcagtgaggaggaggatatggatgcacttttgaacaacagcctgcccccaccccacccagaaaatgaagaggacccagaagaggatttgtcagaaacagagactccaaagctcaagaagaagaaaaagcctaagaaacctcgggaccctaaaatccctaagagcaagcgccaaaaaaaggagcgtatgctcttatgccggcagctgggggacagctctggggaggggccagagtttgtggaggaggaggaagaggtggctctgcgctcagacagtgagggcagcgactatactcctggcaagaagaagaagaagaagcttggacctaagaaagagaagaagagcaaatccaagcggaaggaggaggaggaggaggaggatgatgatgatgattcaaaggagcctaaatcatctgctcagctcctggaagactggggcatggaagacattgaccacgtgttctcagaggaggattatcgaaccctcaccaactacaaggccttcagccagtttgtcagacccctcattgctgccaaaaatcccaagattgctgtctccaagatgatgatggttttgggtgcaaaatggcgggagttcagtaccaataaccccttcaaaggcagttctggggcatcagtggcagctgcggcagcagcagcggtagctgtggtggagagcatggtgacagccactgaggttgcaccaccacctccccctgtggaggtgcctatccgcaaggccaagaccaaggagggcaaaggtcccaatgctcggaggaagcccaagggcagccctcgtgtacctgatgccaagaagcctaaacccaagaaagtagctcccctgaaaatcaagctgggaggttttggttccaagcgtaagagatcctcgagtgaggatgatgacttagatgtggaatctgacttcgatgatgccagtatcaatagctattctgtttctgatggttccaccagccgtagtagccgcagccgcaagaaactccgaaccactaaaaagaaaaagaaaggcgaggaggaggtgactgctgtggatggttatgagacagaccaccaggactattgcgaggtgtgccagcaaggcggtgagatcatcctgtgtgatacctgtccccgtgcttaccacatggtctgcctggatcccgacatggagaaggctcccgagggcaagtggagctgcccacactgcgagaaggaaggcatccagtgggaagctaaagaggacaattcggagggtgaggagatcctggaagaggttgggggagacctcgaagaggaggatgaccaccatatggaattctgtcgggtctgcaaggatggtggggaactgctctgctgtgatacctgtccttcttcctaccacatccactgcctgaatcccccacttccagagatccccaacggtgaatggctctgtccccgttgtacgtgtccagctctgaagggcaaagtgcagaagatcctaatctggaagtggggtcagccaccatctcccacaccagtgcctcggcctccagatgctgatcccaacacgccctccccaaagcccttggaggggcggccagagcggcagttctttgtgaaatggcaaggcatgtcttactggcactgctcctgggtttctgaactgcagctggagctgcactgtcaggtgatgttccgaaactatcagcggaagaatgatatggatgagccaccttctggggactttggtggtgatgaagagaaaagccgaaagcgaaagaacaaggaccctaaatttgcagagatggaggaacgcttctatcgctatgggataaaacccgagtggatgatgatccaccgaatcctcaaccacagtgtggacaagaagggccacgtccactacttgatcaagtggcgggacttaccttacgatcaggcttcttgggagagtgaggatgtggagatccaggattacgacctgttcaagcagagctattggaatcacagggagttaatgaggggtgaggaaggccgaccaggcaagaagctcaagaaggtgaagcttcggaagttggagaggcctccagaaacgccaacagttgatccaacagtgaagtatgagcgacagccagagtacctggatgctacaggtggaaccctgcacccctatcaaatggagggcctgaattggttgcgcttctcctgggctcagggcactgacaccatcttggctgatgagatgggccttgggaaaactgtacagacagcagtcttcctgtattccctttacaaggagggtcattccaaaggccccttcctagtgagcgcccctctttctaccatcatcaactgggagcgggagtttgaaatgtgggctccagacatgtatgtcgtaacctatgtgggtgacaaggacagccgtgccatcatccgagagaatgagttctcctttgaagacaatgccattcgtggtggcaagaaggcctcccgcatgaagaaagaggcatctgtgaaattccatgtgctgctgacatcctatgaattgatcaccattgacatggctattttgggctctattgattgggcctgcctcatcgtggatgaagcccatcggctgaagaacaatcagtctaagttcttccgggtattgaatggttactcactccagcacaagctgttgctgactgggacaccattacaaaacaatctggaagagttgtttcatctgctcaactttctcacccccgagaggttccacaatttggaaggttttttggaggagtttgctgacattgccaaggaggaccagataaaaaaactgcatgacatgctggggccgcacatgttgcggcggctcaaagccgatgtgttcaagaacatgccctccaagacagaactaattgtgcgtgtggagctgagccctatgcagaagaaatactacaagtacatcctcactcgaaattttgaagcactcaatgcccgaggtggtggcaaccaggtgtctctgctgaatgtggtgatggatcttaagaagtgctgcaaccatccatacctcttccctgtggctgcaatggaagctcctaagatgcctaatggcatgtatgatggcagtgccctaatcagagcatctgggaaattattgctgctgcagaaaatgctcaagaaccttaaggagggtgggcatcgtgtactcatcttttcccagatgaccaagatgctagacctgctagaggatttcttggaacatgaaggttataaatacgaacgcatcgatggtggaatcactgggaacatgcggcaagaggccattgaccgcttcaatgcaccgggtgctcagcagttctgcttcttgctttccactcgagctgggggccttggaatcaatctggccactgctgacacagttattatctatgactctgactggaacccccataatgacattcaggcctttagcagagctcaccggattgggcaaaataaaaaggtaatgatctaccggtttgtgacccgtgcgtcagtggaggagcgcatcacgcaggtggcaaagaagaaaatgatgctgacgcatctagtggtgcggcctgggctgggctccaagactggatctatgtccaaacaggagcttgatgatatcctcaaatttggcactgaggaactattcaaggatgaagccactgatggaggaggagacaacaaagagggagaagatagcagtgttatccactacgatgataaggccattgaacggctgctagaccgtaaccaggatgagactgaagacacagaattgcagggcatgaatgaatatttgagctcattcaaagtggcccagtatgtggtacgggaagaagaaatgggggaggaagaggaggtagaacgggaaatcattaaacaggaagaaagtgtggatcctgactactgggagaaattgctgcggcaccattatgagcagcagcaagaagatctagcccgaaatctgggcaaaggaaaaagaatccgtaaacaggtcaactacaatgatggctcccaggaggaccgagattggcaggacgaccagtccgacaaccagtccgattactcagtggcttcagaggaaggtgatgaagactttgatgaacgttcagaagctccccgtaggcccagtcgtaagggcctgcggaatgataaagataagccattgcctcctctgttggcccgtgttggtgggaatattgaagtacttggttttaatgctcgtcagcgaaaagcctttcttaatgcaattatgcgatatggtatgccacctcaggatgcttttactacccagtggcttgtaagagacctgcgaggcaaatcagagaaagagttcaaggcatatgtctctcttttcatgcggcatttatgtgagccgggggcagatggggctgagacctttgctgatggtgtcccccgagaaggcctgtctcgccagcatgtccttactagaattggtgttatgtctttgattcgcaagaaggttcaggagtttgaacatgttaatgggcgctggagcatgcctgaactggctgaggtggaggaaaacaagaagatgtcccagccagggtcaccctccccaaaaactcctacaccctccactccaggggacacgcagcccaacactcctgcacctgtcccacctgctgaagatgggataaaaatagaggaaaatagcctcaaagaagaagagagcatagaaggagaaaaggaggttaaatctacagcccctgagactgccattgagtgtacacaggcccctgcccctgcctcagaggatgaaaaggtcgttgttgaaccccctgagggagaggagaaagtggaaaaggcagaggtgaaggagagaacagaggaacctatggagacagagcccaaaggtgctgctgatgtagagaaggtggaggaaaagtcagcaatagatctgacccctattgtggtagaagacaagatgagaaacagaagaaaaatattaaacaacgtttcatgtttaacattgcagatggtggttttactgagttgcactccctttggcagaatgaagagcgggcagccacagttaccaagaagacttatgagatctggcatcgacggcatgactactggctgctagccggcattataaaccatggctatgcccggtggcaagacatccagaatgacccacgctatgccatcctcaatgagcctttcaagggtgaaatgaaccgtggcaatttcttagagatcaagaataaatttctagctcgaaggtttaagctcttagaacaagctctggtgattgaggaacagctgcgccgggctgcttacttgaacatgtcagaagacccttctcacccttccatggccctcaacacccgctttgctgaggtggagtgtttggcggaaagtcatcagcacctgtccaaggagtcaatggcaggaaacaagccagccaatgcagtcctgcacaaagttctgaaacagctggaagaactgctgagtgacatgaaagctgatgtgactcgactcccagctaccattgcccgaattcccccagttgctgtgaggttacagatgtcagagcgtaacattctcagccgcctggcaaaccgggcacccgaacctaccccacagcaggtagcccagcagcagtgaagatgcagactgataccacctccaccgctgagcagtgaccttcctcactttctcttgtcccagcttctcccctgggggcctgagagaccctcaccttccttctgcccatcttccatgttgtaaaggaacagccccagtgcactgggggaggggagggagtgaggggcagtggtgcccttcctgcagaagagacatgcagcagtagcgctggcgccatctgcaggagctggcgggctggccttctggaccctggcttctccccactgtaacgcctgttacacacaaactgttgtgggttcctgccaggcttgaagaaaatgatctgaattttttcctccttttggttttattttgttggtttattttgtgttttcttttctcctttttggggggtattcagagtgggctgggcccctgggcgagacacagctacctctgttggcatctttttaataccaggaacccagcggctctagccactgagcggctaaatgaaataaagtgga

SEQ ID NO: 359520 - DNA, 6619 bp, Homo sapiens
ccggccggtgtttcaggccctttaagaggcgacgctggagccggagccattttccccccttcggccgcggcgaggaggagccggagcgggagtgacaccgagccggacccagcgcgacctgcggcggctccgggtgactcgggccagtgtagaggtcctcaggccgccggcaggagcagctgggccaattccctggccgggagcggaaggggatggcgtcgggcctgggctccccgtccccctgctcggcgggcagtgaggaggaggatatggatgcacttttgaacaacagcctgcccccaccccacccagaaaatgaagaggacccagaagaggatttgtcagaaacagagactccaaagctcaagaagaagaaaaagcctaagaaacctcgggaccctaaaatccctaagagcaagcgccaaaaaaaggagcgtatgctcttatgccggcagctgggggacagctctggggaggggccagagtttgtggaggaggaggaagaggtggctctgcgctcagacagtgagggcagcgactatactcctggcaagaagaagaagaagaagcttggacctaagaaagagaagaagagcaaatccaagcggaaggaggaggaggaggaggaggatgatgatgatgattcaaaggagcctaaatcatctgctcagctcctggaagactggggcatggaagacattgaccacgtgttctcagaggaggattatcgaaccctcaccaactacaaggccttcagccagtttgtcagacccctcattgctgccaaaaatcccaagattgctgtctccaagatgatgatggttttgggtgcaaaatggcgggagttcagtaccaataaccccttcaaaggcagttctggggcatcagtggcagctgcggcagcagcagcggtagctgtggtggagagcatggtgacagccactgaggttgcaccaccacctccccctgtggaggtgcctatccgcaaggccaagaccaaggagggcaaaggtcccaatgctcggaggaagcccaagggcagccctcgtgtacctgatgccaagaagcctaaacccaagaaagtagctcccctgaaaatcaagctgggaggttttggttccaagcgtaagagatcctcgagtgaggatgatgacttagatgtggaatctgacttcgatgatgccagtatcaatagctattctgtttctgatggttccaccagccgtagtagccgcagccgcaagaaactccgaaccactaaaaagaaaaagaaaggcgaggaggaggtgactgctgtggatggttatgagacagaccaccaggactattgcgaggtgtgccagcaaggcggtgagatcatcctgtgtgatacctgtccccgtgcttaccacatggtctgcctggatcccgacatggagaaggctcccgagggcaagtggagctgcccacactgcgagaaggaaggcatccagtgggaagctaaagaggacaattcggagggtgaggagatcctggaagaggttgggggagacctcgaagaggaggatgaccaccatatggaattctgtcgggtctgcaaggatggtggggaactgctctgctgtgatacctgtccttcttcctaccacatccactgcctgaatcccccacttccagagatccccaacggtgaatggctctgtccccgttgtacgtgtccagctctgaagggcaaagtgcagaagatcctaatctggaagtggggtcagccaccatctcccacaccagtgcctcggcctccagatgctgatcccaacacgccctccccaaagcccttggaggggcggccagagcggcagttctttgtgaaatggcaaggcatgtcttactggcactgctcctgggtttctgaactgcagctggagctgcactgtcaggtgatgttccgaaactatcagcggaagaatgatatggatgagccaccttctggggactttggtggtgatgaagagaaaagccgaaagcgaaagaacaaggaccctaaatttgcagagatggaggaacgcttctatcgctatgggataaaacccgagtggatgatgatccaccgaatcctcaaccacagtgtggacaagaagggccacgtccactacttgatcaagtggcgggacttaccttacgatcaggcttcttgggagagtgaggatgtggagatccaggattacgacctgttcaagcagagctattggaatcacagggagttaatgaggggtgaggaaggccgaccaggcaagaagctcaagaaggtgaagcttcggaagttggagaggcctccagaaacgccaacagttgatccaacagtgaagtatgagcgacagccagagtacctggatgctacaggtggaaccctgcacccctatcaaatggagggcctgaattggttgcgcttctcctgggctcagggcactgacaccatcttggctgatgagatgggccttgggaaaactgtacagacagcagtcttcctgtattccctttacaaggagggtcattccaaaggccccttcctagtgagcgcccctctttctaccatcatcaactgggagcgggagtttgaaatgtgggctccagacatgtatgtcgtaacctatgtgggtgacaaggacagccgtgccatcatccgagagaatgagttctcctttgaagacaatgccattcgtggtggcaagaaggcctcccgcatgaagaaagaggcatctgtgaaattccatgtgctgctgacatcctatgaattgatcaccattgacatggctattttgggctctattgattgggcctgcctcatcgtggatgaagcccatcggctgaagaacaatcagtctaagttcttccgggtattgaatggttactcactccagcacaagctgttgctgactgggacaccattacaaaacaatctggaagagttgtttcatctgctcaactttctcacccccgagaggttccacaatttggaaggttttttggaggagtttgctgacattgccaaggaggaccagataaaaaaactgcatgacatgctggggccgcacatgttgcggcggctcaaagccgatgtgttcaagaacatgccctccaagacagaactaattgtgcgtgtggagctgagccctatgcagaagaaatactacaagtacatcctcactcgaaattttgaagcactcaatgcccgaggtggtggcaaccaggtgtctctgctgaatgtggtgatggatcttaagaagtgctgcaaccatccatacctcttccctgtggctgcaatggaagctcctaagatgcctaatggcatgtatgatggcagtgccctaatcagagcatctgggaaattattgctgctgcagaaaatgctcaagaaccttaaggagggtgggcatcgtgtactcatcttttcccagatgaccaagatgctagacctgctagaggatttcttggaacatgaaggttataaatacgaacgcatcgatggtggaatcactgggaacatgcggcaagaggccattgaccgcttcaatgcaccgggtgctcagcagttctgcttcttgctttccactcgagctgggggccttggaatcaatctggccactgctgacacagttattatctatgactctgactggaacccccataatgacattcaggcctttagcagagctcaccggattgggcaaaataaaaaggtaatgatctaccggtttgtgacccgtgcgtcagtggaggagcgcatcacgcaggtggcaaagaagaaaatgatgctgacgcatctagtggtgcggcctgggctgggctccaagactggatctatgtccaaacaggagcttgatgatatcctcaaatttggcactgaggaactattcaaggatgaagccactgatggaggaggagacaacaaagagggagaagatagcagtgttatccactacgatgataaggccattgaacggctgctagaccgtaaccaggatgagactgaagacacagaattgcagggcatgaatgaatatttgagctcattcaaagtggcccagtatgtggtacgggaagaagaaatgggggaggaagaggaggtagaacgggaaatcattaaacaggaagaaagtgtggatcctgactactgggagaaattgctgcggcaccattatgagcagcagcaagaagatctagcccgaaatctgggcaaaggaaaaagaatccgtaaacaggtcaactacaatgatggctcccaggaggaccgagattggcaggacgaccagtccgacaaccagtccgattactcagtggcttcagaggaaggtgatgaagactttgatgaacgttcagaagctccccgtaggcccagtcgtaagggcctgcggaatgataaagataagccattgcctcctctgttggcccgtgttggtgggaatattgaagtacttggttttaatgctcgtcagcgaaaagcctttcttaatgcaattatgcgatatggtatgccacctcaggatgcttttactacccagtggcttgtaagagacctgcgaggcaaatcagagaaagagttcaaggcatatgtctctcttttcatgcggcatttatgtgagccgggggcagatggggctgagacctttgctgatggtgtcccccgagaaggcctgtctcgccagcatgtccttactagaattggtgttatgtctttgattcgcaagaaggttcaggagtttgaacatgttaatgggcgctggagcatgcctgaactggctgaggtggaggaaaacaagaagatgtcccagccagggtcaccctccccaaaaactcctacaccctccactccaggggacacgcagcccaacactcctgcacctgtcccacctgctgaagatgggataaaaatagaggaaaatagcctcaaagaagaagagagcatagaaggagaaaaggaggttaaatctacagcccctgagactgccattgagtgtacacaggcccctgcccctgcctcagaggatgaaaaggtcgttgttgaaccccctgagggagaggagaaagtggaaaaggcagaggtgaaggagagaacagaggaacctatggagacagagcccaaaggttcctctgttctctccttcagtccctgaccctgcctcagaggatgagaaggtcgttgtggaaccccctgagggagaggagaaagtggaaaaaggcagagggtgagggtagaagatacaggagagaagagctatggagcacaggagccctaaaggttgttgctgatgataggaaaaggtgttaggaaaaagtctagcataatagatctgacccctattgtggtagaagacaaagaagagaagaaagaagaagaagagaaaaaagaggtgatgcttcagaatggagagacccccaaggacctgaatgatgagaaacagaagaaaaatattaaacaacgtttcatgtttaacattgcagatggtggttttactgagttgcactccctttggcagaatgaagagcgggcagccacagttaccaagaagacttatgagatctggcatcgacggcatgactactggctgctagccggcattataaaccatggctatgcccggtggcaagacatccagaatgacccacgctatgccatcctcaatgagcctttcaagggtgaaatgaaccgtggcaatttcttagagatcaagaataaatttctagctcgaaggtttaagctcttagaacaagctctggtgattgaggaacagctgcgccgggctgcttacttgaacatgtcagaagacccttctcacccttccatggccctcaacacccgctttgctgaggtggagtgtttggcggaaagtcatcagcacctgtccaaggagtcaatggcaggaaacaagccagccaatgcagtcctgcacaaagttctgaaacagctggaagaactgctgagtgacatgaaagctgatgtgactcgactcccagctaccattgcccgaattcccccagttgctgtgaggttacagatgtcagagcgtaacattctcagccgcctggcaaaccgggcacccgaacctaccccacagcaggtagcccagcagcagtgaagatgcagactgataccacctccaccgctgagcagtgaccttcctcactttctcttgtcccagcttctcccctgggggcctgagagaccctcaccttccttctgcccatcttccatgttgtaaaggaacagccccagtgcactgggggaggggagggagtgaggggcagtggtgcccttcctgcagaagagacatgcagcagtagcgctggcgccatctgcaggagctggcgggctggccttctggaccctggcttctccccactgtaacgcctgttacacacaaactgttgtgggttcctgccaggcttgaagaaaatgatctgaattttttcctccttttggttttattttgttggtttattttgtgttttcttttctcctttttggggggtattcagagtgggctgggcccctgggcgagacacagctacctctgttggcatctttttaataccaggaacccagcggctctagccactgagcggctaaatgaaataaagtgga

SEQ ID NO: 359521 - DNA, 6074 bp, Homo sapiens
ccggccggtgtttcaggccctttaagaggcgacgctggagccggagccattttccccccttcggccgcggcgaggaggagccggagcgggagtgacaccgagccggacccagcgcgacctgcggcggctccgggtgactcgggccagtgtagaggtcctcaggccgccggcaggagcagctgggccaattccctggccgggagcggaaggggatggcgtcgggcctgggctccccgtccccctgctcggcgggcagtgaggaggaggatatggatgcacttttgaacaacagcctgcccccaccccacccagaaaatgaagaggacccagaagaggatttgtcagaaacagagactccaaagctcaagaagaagaaaaagcctaagaaacctcgggaccctaaaatccctaagagcaagcgccaaaaaaaggagcgtatgctcttatgccggcagctgggggacagctctggggaggggccagagtttgtggaggaggaggaagaggtggctctgcgctcagacagtgagggcagcgactatactcctggcaagaagaagaagaagaagcttggacctaagaaagagaagaagagcaaatccaagcggaaggaggaggaggaggaggaggatgatgatgatgattcaaaggagcctaaatcatctgctcagctcctggaagactggggcatggaagacattgaccacgtgttctcagaggaggattatcgaaccctcaccaactacaaggccttcagccagtttgtcagacccctcattgctgccaaaaatcccaagattgctgtctccaagatgatgatggttttgggtgcaaaatggcgggagttcagtaccaataaccccttcaaaggcagttctggggcatcagtggcagctgcggcagcagcagcggtagctgtggtggagagcatggtgacagccactgaggttgcaccaccacctccccctgtggaggtgcctatccgcaaggccaagaccaaggagggcaaaggtcccaatgctcggaggaagcccaagggcagccctcgtgtacctgatgccaagaagcctaaacccaagaaagtagctcccctgaaaatcaagctgggaggttttggttccaagcgtaagagatcctcgagtgaggatgatgacttagatgtggaatctgacttcgatgatgccagtatcaatagctattctgtttctgatggttccaccagccgtagtagccgcagccgcaagaaactccgaaccactaaaaagaaaaagaaaggcgaggaggaggtgactgctgtggatggttatgagacagaccaccaggactattgcgaggtgtgccagcaaggcggtgagatcatcctgtgtgatacctgtccccgtgcttaccacatggtctgcctggatcccgacatggagaaggctcccgagggcaagtggagctgcccacactgcgagaaggaaggcatccagtgggaagctaaagaggacaattcggagggtgaggagatcctggaagaggttgggggagacctcgaagaggaggatgaccaccatatggaattctgtcgggtctgcaaggatggtggggaactgctctgctgtgatacctgtccttcttcctaccacatccactgcctgaatcccccacttccagagatccccaacggtgaatggctctgtccccgttgtacgtgtccagctctgaagggcaaagtgcagaagatcctaatctggaagtggggtcagccaccatctcccacaccagtgcctcggcctccagatgctgatcccaacacgccctccccaaagcccttggaggggcggccagagcggcagttctttgtgaaatggcaaggcatgtcttactggcactgctcctgggtttctgaactgcagctggagctgcactgtcaggtgatgttccgaaactatcagcggaagaatgatatggatgagccaccttctggggactttggtggtgatgaagagaaaagccgaaagcgaaagaacaaggaccctaaatttgcagagatggaggaacgcttctatcgctatgggataaaacccgagtggatgatgatccaccgaatcctcaaccacagtgtggacaagaagggccacgtccactacttgatcaagtggcgggacttaccttacgatcaggcttcttgggagagtgaggatgtggagatccaggattacgacctgttcaagcagagctattggaatcacagggagttaatgaggggtgaggaaggccgaccaggcaagaagctcaagaaggtgaagcttcggaagttggagaggcctccagaaacgccaacagttgatccaacagtgaagtatgagcgacagccagagtacctggatgctacaggtggaaccctgcacccctatcaaatggagggcctgaattggttgcgcttctcctgggctcagggcactgacaccatcttggctgatgagatgggccttgggaaaactgtacagacagcagtcttcctgtattccctttacaaggagggtcattccaaaggccccttcctagtgagcgcccctctttctaccatcatcaactgggagcgggagtttgaaatgtgggctccagacatgtatgtcgtaacctatgtgggtgacaaggacagccgtgccatcatccgagagaatgagttctcctttgaagacaatgccattcgtggtggcaagaaggcctcccgcatgaagaaagaggcatctgtgaaattccatgtgctgctgacatcctatgaattgatcaccattgacatggctattttgggctctattgattgggcctgcctcatcgtggatgaagcccatcggctgaagaacaatcagtctaagttcttccgggtattgaatggttactcactccagcacaagctgttgctgactgggacaccattacaaaacaatctggaagagttgtttcatctgctcaactttctcacccccgagaggttccacaatttggaaggttttttggaggagtttgctgacattgccaaggaggaccagataaaaaaactgcatgacatgctggggccgcacatgttgcggcggctcaaagccgatgtgttcaagaacatgccctccaagacagaactaattgtgcgtgtggagctgagccctatgcagaagaaatactacaagtacatcctcactcgaaattttgaagcactcaatgcccgaggtggtggcaaccaggtgtctctgctgaatgtggtgatggatcttaagaagtgctgcaaccatccatacctcttccctgtggctgcaatggaagctcctaagatgcctaatggcatgtatgatggcagtgccctaatcagagcatctgggaaattattgctgctgcagaaaatgctcaagaaccttaaggagggtgggcatcgtgtactcatcttttcccagatgaccaagatgctagacctgctagaggatttcttggaacatgaaggttataaatacgaacgcatcgatggtggaatcactgggaacatgcggcaagaggccattgaccgcttcaatgcaccgggtgctcagcagttctgcttcttgctttccactcgagctgggggccttggaatcaatctggccactgctgacacagttattatctatgactctgactggaacccccataatgacattcaggcctttagcagagctcaccggattgggcaaaataaaaaggtaatgatctaccggtttgtgacccgtgcgtcagtggaggagcgcatcacgcaggtggcaaagaagaaaatgatgctgacgcatctagtggtgcggcctgggctgggctccaagactggatctatgtccaaacaggagcttgatgatatcctcaaatttggcactgaggaactattcaaggatgaagccactgatggaggaggagacaacaaagagggagaagatagcagtgttatccactacgatgataaggccattgaacggctgctagaccgtaaccaggatgagactgaagacacagaattgcagggcatgaatgaatatttgagctcattcaaagtggcccagtatgtggtacgggaagaagaaatgggggaggaagaggaggtagaacgggaaatcattaaacaggaagaaagtgtggatcctgactactgggagaaattgctgcggcaccattatgagcagcagcaagaagatctagcccgaaatctgggcaaaggaaaaagaatccgtaaacaggtcaactacaatgatggctcccaggaggaccgagattggcaggacgaccagtccgacaaccagtccgattactcagtggcttcagaggaaggtgatgaagactttgatgaacgttcagaagctccccgtaggcccagtcgtaagggcctgcggaatgataaagataagccattgcctcctctgttggcccgtgttggtgggaatattgaagtacttggttttaatgctcgtcagcgaaaagcctttcttaatgcaattatgcgatatggtatgccacctcaggatgcttttactacccagtggcttgtaagagacctgcgaggcaaatcagagaaagagttcaaggcatatgtctctcttttcatgcggcatttatgtgagccgggggcagatggggctgagacctttgctgatggtgtcccccgagaaggcctgtctcgccagcatgtccttactagaattggtgttatgtctttgattcgcaagaaggttcaggagtttgaacatgttaatgggcgctggagcatgcctgaactggctgaggtggaggaaaacaagaagatgtcccagccagggtcaccctccccaaaaactcctacaccctccactccaggggacacgcagcccaacactcctgcacctgtcccacctgctgaagatgggataaaaatagaggaaaatagcctcaaagaagaagagagcatagaaggagaaaaggaggttaaatctacagcccctgagactgccattgagtgtacacaggcccctgcccctgcctcagaggatgaaaaggtcgttgttgaaccccctgagggagaggagaaagtggaaaaggcagaggtgaaggagagaacagaggaacctatggagacagagcccaaaggtgctgctgatgtagagaaggtggaggaaaagtcagcaatagatctgacccctattgtggtagaagacaaagaagagaagaaagaagaagaagagaaaaaagaggtgatgcttcagaatggagagacccccaaggacctgaatgatgagaaacagaagaaaaatattaaacaacgtttcatgtttaacattgcagatggtggttttactgagttgcactccctttggcagaatgaagagcgggcagccacagttaccaagaagacttatgagatctggcatcgacggcatgactactggctgctagccggcattataaaccatggctatgcccggtggcaagacatccagaatgacccacgctatgccatcctcaatgagcctttcaagggtgaaatgaaccgtggcaatttcttagagatcaagaataaatttctagctcgaaggtttaagctcttagaacaagctctggtgattgaggaacagctgcgccgggctgcttacttgaacatgtcagaagacccttctcacccttccatggccctcaacacccgctttgctgaggtggagtgtttggcggaaagtcatcagcacctgtccaaggagtcaatggcaggaaacaagccagccaatgcagtcctgcacaaagttctgaaacagctggaagaactgctgagtgacatgaaagctgatgtgactcgactcccagctaccattgcccgaattcccccagttgctgtgaggttacagatgtcagagcgtaacattctcagccgcctggcaaaccgggcacccgaacctaccccacagcaggtagcccagcagcaggaaaagcgaggtccactcacgtgaacgacttccatacctggccagtccccgggccgccactcttgcactccggcagaaccagacgggaaggagggaggcccctaagagactagaagagcaataccg

SEQ ID NO: 359522 - DNA, 5764 bp, Homo sapiens
ccggccggtgtttcaggccctttaagaggcgacgctggagccggagccattttccccccttcggccgcggcgaggaggagccggagcgggagtgacaccgagccggacccagcgcgacctgcggcggctccgggtgactcgggccagtgtagaggtcctcaggccgccggcaggagcagctgggccaattccctggccgggagcggaaggggatggcgtcgggcctgggctccccgtccccctgctcggcgggcagtgaggaggaggatatggatgcacttttgaacaacagcctgcccccaccccacccagaaaatgaagaggacccagaagaggatttgtcagaaacagagactccaaagctcaagaagaagaaaaagcctaagaaacctcgggaccctaaaatccctaagagcaagcgccaaaaaaaggagcgtatgctcttatgccggcagctgggggacagctctggggaggggccagagtttgtggaggaggaggaagaggtggctctgcgctcagacagtgagggcagcgactatactcctggcaagaagaagaagaagaagcttggacctaagaaagagaagaagagcaaatccaagcggaaggaggaggaggaggaggaggatgatgatgatgattcaaaggagcctaaatcatctgctcagctcctggaagactggggcatggaagacattgaccacgtgttctcagaggaggattatcgaaccctcaccaactacaaggccttcagccagtttgtcagacccctcattgctgccaaaaatcccaagattgctgtctccaagatgatgatggttttgggtgcaaaatggcgggagttcagtaccaataaccccttcaaaggcagttctggggcatcagtggcagctgcggcagcagcagcggtagctgtggtggagagcatggtgacagccactgaggttgcaccaccacctccccctgtggaggtgcctatccgcaaggccaagaccaaggagggcaaaggtcccaatgctcggaggaagcccaagggcagccctcgtgtacctgatgccaagaagcctaaacccaagaaagtagctcccctgaaaatcaagctgggaggttttggttccaagcgtaagagatcctcgagtgaggatgatgacttagatgtggaatctgacttcgatgatgccagtatcaatagctattctgtttctgatggttccaccagccgtagtagccgcagccgcaagaaactccgaaccactaaaaagaaaaagaaaggcgaggaggaggtgactgctgtggatggttatgagacagaccaccaggactattgcgaggtgtgccagcaaggcggtgagatcatcctgtgtgatacctgtccccgtgcttaccacatggtctgcctggatcccgacatggagaaggctcccgagggcaagtggagctgcccacactgcgagaaggaaggcatccagtgggaagctaaagaggacaattcggagggtgaggagatcctggaagaggttgggggagacctcgaagaggaggatgaccaccatatggaattctgtcgggtctgcaaggatggtggggaactgctctgctgtgatacctgtccttcttcctaccacatccactgcctgaatcccccacttccagagatccccaacggtgaatggctctgtccccgttgtacgtgtccagctctgaagggcaaagtgcagaagatcctaatctggaagtggggtcagccaccatctcccacaccagtgcctcggcctccagatgctgatcccaacacgccctccccaaagcccttggaggggcggccagagcggcagttctttgtgaaatggcaaggcatgtcttactggcactgctcctgggtttctgaactgcagctggagctgcactgtcaggtgatgttccgaaactatcagcggaagaatgatatggatgagccaccttctggggactttggtggtgatgaagagaaaagccgaaagcgaaagaacaaggaccctaaatttgcagagatggaggaacgcttctatcgctatgggataaaacccgagtggatgatgatccaccgaatcctcaaccacagtgtggacaagaagggccacgtccactacttgatcaagtggcgggacttaccttacgatcaggcttcttgggagagtgaggatgtggagatccaggattacgacctgttcaagcagagctattggaatcacagggagttaatgaggggtgaggaaggccgaccaggcaagaagctcaagaaggtgaagcttcggaagttggagaggcctccagaaacgccaacagttgatccaacagtgaagtatgagcgacagccagagtacctggatgctacaggtggaaccctgcacccctatcaaatggagggcctgaattggttgcgcttctcctgggctcagggcactgacaccatcttggctgatgagatgggccttgggaaaactgtacagacagcagtcttcctgtattccctttacaaggagggtcattccaaaggccccttcctagtgagcgcccctctttctaccatcatcaactgggagcgggagtttgaaatgtgggctccagacatgtatgtcgtaacctatgtgggtgacaaggacagccgtgccatcatccgagagaatgagttctcctttgaagacaatgccattcgtggtggcaagaaggcctcccgcatgaagaaagaggcatctgtgaaattccatgtgctgctgacatcctatgaattgatcaccattgacatggctattttgggctctattgattgggcctgcctcatcgtggatgaagcccatcggctgaagaacaatcagtctaagttcttccgggtattgaatggttactcactccagcacaagctgttgctgactgggacaccattacaaaacaatctggaagagttgtttcatctgctcaactttctcacccccgagaggttccacaatttggaaggttttttggaggagtttgctgacattgccaaggaggaccagataaaaaaactgcatgacatgctggggccgcacatgttgcggcggctcaaagccgatgtgttcaagaacatgccctccaagacagaactaattgtgcgtgtggagctgagccctatgcagaagaaatactacaagtacatcctcactcgaaattttgaagcactcaatgcccgaggtggtggcaaccaggtgtctctgctgaatgtggtgatggatcttaagaagtgctgcaaccatccatacctcttccctgtggctgcaatggaagctcctaagatgcctaatggcatgtatgatggcagtgccctaatcagagcatctgggaaattattgctgctgcagaaaatgctcaagaaccttaaggagggtgggcatcgtgtactcatcttttcccagatgaccaagatgctagacctgctagaggatttcttggaacatgaaggttataaatacgaacgcatcgatggtggaatcactgggaacatgcggcaagaggccattgaccgcttcaatgcaccgggtgctcagcagttctgcttcttgctttccactcgagctgggggccttggaatcaatctggccactgctgacacagttattatctatgactctgactggaacccccataatgacattcaggcctttagcagagctcaccggattgggcaaaataaaaaggtaatgatctaccggtttgtgacccgtgcgtcagtggaggagcgcatcacgcaggtggcaaagaagaaaatgatgctgacgcatctagtggtgcggcctgggctgggctccaagactggatctatgtccaaacaggagcttgatgatatcctcaaatttggcactgaggaactattcaaggatgaagccactgatggaggaggagacaacaaagagggagaagatagcagtgttatccactacgatgataaggccattgaacggctgctagaccgtaaccaggatgagactgaagacacagaattgcagggcatgaatgaatatttgagctcattcaaagtggcccagtatgtggtacgggaagaagaaatgggggaggaagaggaggtagaacgggaaatcattaaacaggaagaaagtgtggatcctgactactgggagaaattgctgcggcaccattatgagcagcagcaagaagatctagcccgaaatctgggcaaaggaaaaagaatccgtaaacaggtcaactacaatgatggctcccaggaggaccgagattggcaggacgaccagtccgacaaccagtccgattactcagtggcttcagaggaaggtgatgaagactttgatgaacgttcagaagctccccgtaggcccagtcgtaagggcctgcggaatgataaagataagccattgcctcctctgttggcccgtgttggtgggaatattgaagtacttggttttaatgctcgtcagcgaaaagcctttcttaatgcaattatgcgatatggtatgccacctcaggatgcttttactacccagtggcttgtaagagacctgcgaggcaaatcagagaaagagttcaaggcatatgtctctcttttcatgcggcatttatgtgagccgggggcagatggggctgagacctttgctgatggtgtcccccgagaaggcctgtctcgccagcatgtccttactagaattggtgttatgtctttgattcgcaagaaggttcaggagtttgaacatgttaatgggcgctggagcatgcctgaactggctgaggtggaggaaaacaagaagatgtcccagccagggtcaccctccccaaaaactcctacaccctccactccaggggacacgcagcccaacactcctgcacctgtcccacctgctgaagatgggataaaaatagaggaaaatagcctcaaagaagaagagagcatagaaggagaaaaggaggttaaatctacagcccctgagactgccattgagtgtacacaggcccctgcccctgcctcagaggatgaaaaggtcgttgttgaaccccctgagggagaggagaaagtggaaaaggcagaggtgaaggagagaacagaggaacctatggagacagagcccaaaggtgctgctgatgtagagaaggtggaggaaaagtcagcaatagatctgacccctattgtggtagaagacaaagaagagaagaaagaagaagaagagaaaaaagaggtgatgcttcagaatggagagacccccaaggacctgaatgatgagaaacagaagaaaaatattaaacaacgtttcatgtttaacattgcagatggtggttttactgagttgcactccctttggcagaatgaagagcgggcagccacagttaccaagaagacttatgagatctggcatcgacggcatgactactggctgctagccggcattataaaccatggctatgcccggtggcaagacatccagaatgacccacgctatgccatcctcaatgagcctttcaagggtgaaatgaaccgtggcaatttcttagagatcaagaataaatttctagctcgaaggtttaagctcttagaacaagctctggtgattgaggaacagctgcgccgggctgcttacttgaacatgtcagaagacccttctcacccttccatggccctcaacacccgctttgctgaggtggagtgtttggcggaaagtttgaacagatgagaacttgttgtgcatgaagctgatggactcgattcagtaccaatgca

SEQ ID NO: 359523 - DNA, 5485 bp, Homo sapiens
ccggccggtgtttcaggccctttaagaggcgacgctggagccggagccattttccccccttcggccgcggcgaggaggagccggagcgggagtgacaccgagccggacccagcgcgacctgcggcggctccgggtgactcgggccagtgtagaggtcctcaggccgccggcaggagcagctgggccaattccctggccgggagcggaaggggatggcgtcgggcctgggctccccgtccccctgctcggcgggcagtgaggaggaggatatggatgcacttttgaacaacagcctgcccccaccccacccagaaaatgaagaggacccagaagaggatttgtcagaaacagagactccaaagctcaagaagaagaaaaagcctaagaaacctcgggaccctaaaatccctaagagcaagcgccaaaaaaaggagcgtatgctcttatgccggcagctgggggacagctctggggaggggccagagtttgtggaggaggaggaagaggtggctctgcgctcagacagtgagggcagcgactatactcctggcaagaagaagaagaagaagcttggacctaagaaagagaagaagagcaaatccaagcggaaggaggaggaggaggaggaggatgatgatgatgattcaaaggagcctaaatcatctgctcagctcctggaagactggggcatggaagacattgaccacgtgttctcagaggaggattatcgaaccctcaccaactacaaggccttcagccagtttgtcagacccctcattgctgccaaaaatcccaagattgctgtctccaagatgatgatggttttgggtgcaaaatggcgggagttcagtaccaataaccccttcaaaggcagttctggggcatcagtggcagctgcggcagcagcagcggtagctgtggtggagagcatggtgacagccactgaggttgcaccaccacctccccctgtggaggtgcctatccgcaaggccaagaccaaggagggcaaaggtcccaatgctcggaggaagcccaagggcagccctcgtgtacctgatgccaagaagcctaaacccaagaaagtagctcccctgaaaatcaagctgggaggttttggttccaagcgtaagagatcctcgagtgaggatgatgacttagatgtggaatctgacttcgatgatgccagtatcaatagctattctgtttctgatggttccaccagccgtagtagccgcagccgcaagaaactccgaaccactaaaaagaaaaagaaaggcgaggaggaggtgactgctgtggatggttatgagacagaccaccaggactattgcgaggtgtgccagcaaggcggtgagatcatcctgtgtgatacctgtccccgtgcttaccacatggtctgcctggatcccgacatggagaaggctcccgagggcaagtggagctgcccacactgcgagaaggaaggcatccagtgggaagctaaagaggacaattcggagggtgaggagatcctggaagaggttgggggagacctcgaagaggaggatgaccaccatatggaattctgtcgggtctgcaaggatggtggggaactgctctgctgtgatacctgtccttcttcctaccacatccactgcctgaatcccccacttccagagatccccaacggtgaatggctctgtccccgttgtacgtgtccagctctgaagggcaaagtgcagaagatcctaatctggaagtggggtcagccaccatctcccacaccagtgcctcggcctccagatgctgatcccaacacgccctccccaaagcccttggaggggcggccagagcggcagttctttgtgaaatggcaaggcatgtcttactggcactgctcctgggtttctgaactgcagctggagctgcactgtcaggtgatgttccgaaactatcagcggaagaatgatatggatgagccaccttctggggactttggtggtgatgaagagaaaagccgaaagcgaaagaacaaggaccctaaatttgcagagatggaggaacgcttctatcgctatgggataaaacccgagtggatgatgatccaccgaatcctcaaccacagtgtggacaagaagggccacgtccactacttgatcaagtggcgggacttaccttacgatcaggcttcttgggagagtgaggatgtggagatccaggattacgacctgttcaagcagagctattggaatcacagggagttaatgaggggtgaggaaggccgaccaggcaagaagctcaagaaggtgaagcttcggaagttggagaggcctccagaaacgccaacagttgatccaacagtgaagtatgagcgacagccagagtacctggatgctacaggtggaaccctgcacccctatcaaatggagggcctgaattggttgcgcttctcctgggctcagggcactgacaccatcttggctgatgagatgggccttgggaaaactgtacagacagcagtcttcctgtattccctttacaaggagggtcattccaaaggccccttcctagtgagcgcccctctttctaccatcatcaactgggagcgggagtttgaaatgtgggctccagacatgtatgtcgtaacctatgtgggtgacaaggacagccgtgccatcatccgagagaatgagttctcctttgaagacaatgccattcgtggtggcaagaaggcctcccgcatgaagaaagaggcatctgtgaaattccatgtgctgctgacatcctatgaattgatcaccattgacatggctattttgggctctattgattgggcctgcctcatcgtggatgaagcccatcggctgaagaacaatcagtctaagttcttccgggtattgaatggttactcactccagcacaagctgttgctgactgggacaccattacaaaacaatctggaagagttgtttcatctgctcaactttctcacccccgagaggttccacaatttggaaggttttttggaggagtttgctgacattgccaaggaggaccagataaaaaaactgcatgacatgctggggccgcacatgttgcggcggctcaaagccgatgtgttcaagaacatgccctccaagacagaactaattgtgcgtgtggagctgagccctatgcagaagaaatactacaagtacatcctcactcgaaattttgaagcactcaatgcccgaggtggtggcaaccaggtgtctctgctgaatgtggtgatggatcttaagaagtgctgcaaccatccatacctcttccctgtggctgcaatggaagctcctaagatgcctaatggcatgtatgatggcagtgccctaatcagagcatctgggaaattattgctgctgcagaaaatgctcaagaaccttaaggagggtgggcatcgtgtactcatcttttcccagatgaccaagatgctagacctgctagaggatttcttggaacatgaaggttataaatacgaacgcatcgatggtggaatcactgggaacatgcggcaagaggccattgaccgcttcaatgcaccgggtgctcagcagttctgcttcttgctttccactcgagctgggggccttggaatcaatctggccactgctgacacagttattatctatgactctgactggaacccccataatgacattcaggcctttagcagagctcaccggattgggcaaaataaaaaggtaatgatctaccggtttgtgacccgtgcgtcagtggaggagcgcatcacgcaggtggcaaagaagaaaatgatgctgacgcatctagtggtgcggcctgggctgggctccaagactggatctatgtccaaacaggagcttgatgatatcctcaaatttggcactgaggaactattcaaggatgaagccactgatggaggaggagacaacaaagagggagaagatagcagtgttatccactacgatgataaggccattgaacggctgctagaccgtaaccaggatgagactgaagacacagaattgcagggcatgaatgaatatttgagctcattcaaagtggcccagtatgtggtacgggaagaagaaatgggggaggaagaggaggtagaacgggaaatcattaaacaggaagaaagtgtggatcctgactactgggagaaattgctgcggcaccattatgagcagcagcaagaagatctagcccgaaatctgggcaaaggaaaaagaatccgtaaacaggtcaactacaatgatggctcccaggaggaccgagattggcaggacgaccagtccgacaaccagtccgattactcagtggcttcagaggaaggtgatgaagactttgatgaacgttcagaagctccccgtaggcccagtcgtaagggcctgcggaatgataaagataagccattgcctcctctgttggcccgtgttggtgggaatattgaagtacttggttttaatgctcgtcagcgaaaagcctttcttaatgcaattatgcgatatggtatgccacctcaggatgcttttactacccagtggcttgtaagagacctgcgaggcaaatcagagaaagagttcaaggcatatgtctctcttttcatgcggcatttatgtgagccgggggcagatggggctgagacctttgctgatggtgtcccccgagaaggcctgtctcgccagcatgtccttactagaattggtgttatgtctttgattcgcaagaaggttcaggagtttgaacatgttaatgggcgctggagcatgcctgaactggctgaggtggaggaaaacaagaagatgtcccagccagggtcaccctccccaaaaactcctacaccctccactccaggggacacgcagcccaacactcctgcacctgtcccacctgctgaagatgggataaaaatagaggaaaatagcctcaaagaagaagagagcatagaaggagaaaaggaggttaaatctacagcccctgagactgccattgagtgtacacaggcccctgcccctgcctcagaggatgaaaaggtcgttgttgaaccccctgagggagaggagaaagtggaaaaggcagaggtgaaggagagaacagaggaacctatggagacagagcccaaaggtgctgctgatgtagagaaggtggaggaaaagtcagcaatagatctgacccctattgtggtagaagacaaagaagagaagaaagaagaagaagagaaaaaagaggtgatgcttcagaatggagagacccccaaggacctgaatgatgagaaacagaagaaaaatattaaacaacgtttcatgtttaacattgcagatggtggttttactgagttgcactccctttggcagaatgaagagcgggcagccacagttaccaagaagacttatgagatctggcatcgacggcatgactactggctgctagccggcattataaaccatggctatgcccggtggcaacatcccaattcctcatcctggga

SEQ ID NO: 359524 - DNA, 5103 bp, Homo sapiens
ccggccggtgtttcaggccctttaagaggcgacgctggagccggagccattttccccccttcggccgcggcgaggaggagccggagcgggagtgacaccgagccggacccagcgcgacctgcggcggctccgggtgactcgggccagtgtagaggtcctcaggccgccggcaggagcagctgggccaattccctggccgggagcggaaggggatggcgtcgggcctgggctccccgtccccctgctcggcgggcagtgaggaggaggatatggatgcacttttgaacaacagcctgcccccaccccacccagaaaatgaagaggacccagaagaggatttgtcagaaacagagactccaaagctcaagaagaagaaaaagcctaagaaacctcgggaccctaaaatccctaagagcaagcgccaaaaaaaggagcgtatgctcttatgccggcagctgggggacagctctggggaggggccagagtttgtggaggaggaggaagaggtggctctgcgctcagacagtgagggcagcgactatactcctggcaagaagaagaagaagaagcttggacctaagaaagagaagaagagcaaatccaagcggaaggaggaggaggaggaggaggatgatgatgatgattcaaaggagcctaaatcatctgctcagctcctggaagactggggcatggaagacattgaccacgtgttctcagaggaggattatcgaaccctcaccaactacaaggccttcagccagtttgtcagacccctcattgctgccaaaaatcccaagattgctgtctccaagatgatgatggttttgggtgcaaaatggcgggagttcagtaccaataaccccttcaaaggcagttctggggcatcagtggcagctgcggcagcagcagcggtagctgtggtggagagcatggtgacagccactgaggttgcaccaccacctccccctgtggaggtgcctatccgcaaggccaagaccaaggagggcaaaggtcccaatgctcggaggaagcccaagggcagccctcgtgtacctgatgccaagaagcctaaacccaagaaagtagctcccctgaaaatcaagctgggaggttttggttccaagcgtaagagatcctcgagtgaggatgatgacttagatgtggaatctgacttcgatgatgccagtatcaatagctattctgtttctgatggttccaccagccgtagtagccgcagccgcaagaaactccgaaccactaaaaagaaaaagaaaggcgaggaggaggtgactgctgtggatggttatgagacagaccaccaggactattgcgaggtgtgccagcaaggcggtgagatcatcctgtgtgatacctgtccccgtgcttaccacatggtctgcctggatcccgacatggagaaggctcccgagggcaagtggagctgcccacactgcgagaaggaaggcatccagtgggaagctaaagaggacaattcggagggtgaggagatcctggaagaggttgggggagacctcgaagaggaggatgaccaccatatggaattctgtcgggtctgcaaggatggtggggaactgctctgctgtgatacctgtccttcttcctaccacatccactgcctgaatcccccacttccagagatccccaacggtgaatggctctgtccccgttgtacgtgtccagctctgaagggcaaagtgcagaagatcctaatctggaagtggggtcagccaccatctcccacaccagtgcctcggcctccagatgctgatcccaacacgccctccccaaagcccttggaggggcggccagagcggcagttctttgtgaaatggcaaggcatgtcttactggcactgctcctgggtttctgaactgcagctggagctgcactgtcaggtgatgttccgaaactatcagcggaagaatgatatggatgagccaccttctggggactttggtggtgatgaagagaaaagccgaaagcgaaagaacaaggaccctaaatttgcagagatggaggaacgcttctatcgctatgggataaaacccgagtggatgatgatccaccgaatcctcaaccacagtgtggacaagaagggccacgtccactacttgatcaagtggcgggacttaccttacgatcaggcttcttgggagagtgaggatgtggagatccaggattacgacctgttcaagcagagctattggaatcacagggagttaatgaggggtgaggaaggccgaccaggcaagaagctcaagaaggtgaagcttcggaagttggagaggcctccagaaacgccaacagttgatccaacagtgaagtatgagcgacagccagagtacctggatgctacaggtggaaccctgcacccctatcaaatggagggcctgaattggttgcgcttctcctgggctcagggcactgacaccatcttggctgatgagatgggccttgggaaaactgtacagacagcagtcttcctgtattccctttacaaggagggtcattccaaaggccccttcctagtgagcgcccctctttctaccatcatcaactgggagcgggagtttgaaatgtgggctccagacatgtatgtcgtaacctatgtgggtgacaaggacagccgtgccatcatccgagagaatgagttctcctttgaagacaatgccattcgtggtggcaagaaggcctcccgcatgaagaaagaggcatctgtgaaattccatgtgctgctgacatcctatgaattgatcaccattgacatggctattttgggctctattgattgggcctgcctcatcgtggatgaagcccatcggctgaagaacaatcagtctaagttcttccgggtattgaatggttactcactccagcacaagctgttgctgactgggacaccattacaaaacaatctggaagagttgtttcatctgctcaactttctcacccccgagaggttccacaatttggaaggttttttggaggagtttgctgacattgccaaggaggaccagataaaaaaactgcatgacatgctggggccgcacatgttgcggcggctcaaagccgatgtgttcaagaacatgccctccaagacagaactaattgtgcgtgtggagctgagccctatgcagaagaaatactacaagtacatcctcactcgaaattttgaagcactcaatgcccgaggtggtggcaaccaggtgtctctgctgaatgtggtgatggatcttaagaagtgctgcaaccatccatacctcttccctgtggctgcaatggaagctcctaagatgcctaatggcatgtatgatggcagtgccctaatcagagcatctgggaaattattgctgctgcagaaaatgctcaagaaccttaaggagggtgggcatcgtgtactcatcttttcccagatgaccaagatgctagacctgctagaggatttcttggaacatgaaggttataaatacgaacgcatcgatggtggaatcactgggaacatgcggcaagaggccattgaccgcttcaatgcaccgggtgctcagcagttctgcttcttgctttccactcgagctgggggccttggaatcaatctggccactgctgacacagttattatctatgactctgactggaacccccataatgacattcaggcctttagcagagctcaccggattgggcaaaataaaaaggtaatgatctaccggtttgtgacccgtgcgtcagtggaggagcgcatcacgcaggtggcaaagaagaaaatgatgctgacgcatctagtggtgcggcctgggctgggctccaagactggatctatgtccaaacaggagcttgatgatatcctcaaatttggcactgaggaactattcaaggatgaagccactgatggaggaggagacaacaaagagggagaagatagcagtgttatccactacgatgataaggccattgaacggctgctagaccgtaaccaggatgagactgaagacacagaattgcagggcatgaatgaatatttgagctcattcaaagtggcccagtatgtggtacgggaagaagaaatgggggaggaagaggaggtagaacgggaaatcattaaacaggaagaaagtgtggatcctgactactgggagaaattgctgcggcaccattatgagcagcagcaagaagatctagcccgaaatctgggcaaaggaaaaagaatccgtaaacaggtcaactacaatgatggctcccaggaggaccgagattggcaggacgaccagtccgacaaccagtccgattactcagtggcttcagaggaaggtgatgaagactttgatgaacgttcagaagctccccgtaggcccagtcgtaagggcctgcggaatgataaagataagccattgcctcctctgttggcccgtgttggtgggaatattgaagtacttggttttaatgctcgtcagcgaaaagcctttcttaatgcaattatgcgatatggtatgccacctcaggatgcttttactacccagtggcttgtaagagacctgcgaggcaaatcagagaaagagttcaaggcatatgtctctcttttcatgcggcatttatgtgagccgggggcagatggggctgagacctttgctgatggtgtcccccgagaaggcctgtctcgccagcatgtccttactagaattggtgttatgtctttgattcgcaagaaggttcaggagtttgaacatgttaatgggcgctggagcatgcctgaactggctgaggtggaggaaaacaagaagatgtcccagccagggtcaccctccccaaaaactcctacaccctccactccaggggacacgcagcccaacactcctgcacctgtcccacctgctgaagatgggataaaaatagaggaaaatagcctcaaagaagaagagagcatagaaggagaaaaggaggttaaatctacagcccctgagactgccattgagtgtacacaggcccagctcctgccagggctgttaccgttgttttcttgaatcactcacaatgagaaactaacattttgctttttgtaataaagttaatttatattcagttccc

SEQ ID NO: 359525 - DNA, 1740 bp, Homo sapiens
tgagccaccacgcctggctaatttttgtacttttagtagagacagggtttcaccatgttggccaggctggtttctaactcctcacctcaggtgatccacccaccttggcctccccaagtgctgggattacaggcatgagccaccgcacccagctaatttttgtatttttaatagagattggggttcaccttgttggccaggctggtcttgaactcctgacctcaagtgatctgcctgctgctgtctcccaagatgctgggattacaggcatgagccaccatgcccagctgacattactgtaattgcagacatttagatgtgggtctatccaattggataatagtgtgcaacagaggagaatgttcttcctttaggtatagtctcaataacatttcttcccctaggtgctgctgatgtagagaaggtggaggaaaagtcagcaatagatctgacccctattgtggtagaagacaaagaagagaagaaagaagaagaagagaaaaaagaggtgatgcttcagaatggagagacccccaaggacctgaatgatgagaaacagaagaaaaatattaaacaacgtttcatgtttaacattgcagatggtggttttactgagttgcactccctttggcagaatgaagagcgggcagccacagttaccaagaagacttatgagatctggcatcgacggcatgactactggctgctagccggcattataaaccatggctatgcccggtggcaagacatccagaatgacccacgctatgccatcctcaatgagcctttcaagggtgaaatgaaccgtggcaatttcttagagatcaagaataaatttctagctcgaaggtttaagctcttagaacaagctctggtgattgaggaacagctgcgccgggctgcttacttgaacatgtcagaagacccttctcacccttccatggccctcaacacccgctttgctgaggtggagtgtttggcggaaagtcatcagcacctgtccaaggagtcaatggcaggaaacaagccagccaatgcagtcctgcacaaagttctgaaacagctggaagaactgctgagtgacatgaaagctgatgtgactcgactcccagctaccattgcccgaattcccccagttgctgtgaggttacagatgtcagagcgtaacattctcagccgcctggcaaaccgggcacccgaacctaccccacagcaggtagcccagcagcagtgaagatgcagactgataccacctccaccgctgagcagtgaccttcctcactttctcttgtcccagcttctcccctgggggcctgagagaccctcaccttccttctgcccatcttccatgttgtaaaggaacagccccagtgcactgggggaggggagggagtgaggggcagtggtgcccttcctgcagaagagacatgcagcagtagcgctggcgccatctgcaggagctggcgggctggccttctggaccctggcttctccccactgtaacgcctgttacacacaaactgttgtgggttcctgccaggcttgaagaaaatgatctgaattttttcctccttttggttttattttgttggtttattttgtgttttcttttctcctttttggggggtattcagagtgggctgggcccctgggcgagacacagctacctctgttggcatctttttaataccaggaacccagcggctctagccactgagcggctaaatgaaataaagtgga

SEQ ID NO: 359526 - DNA, 4813 bp, Homo sapiens
ccggccggtgtttcaggccctttaagaggcgacgctggagccggagccattttccccccttcggccgcggcgaggaggagccggagcgggagtgacaccgagccggacccagcgcgacctgcggcggctccgggtgactcgggccagtgtagaggtcctcaggccgccggcaggagcagctgggccaattccctggccgggagcggaaggggatggcgtcgggcctgggctccccgtccccctgctcggcgggcagtgaggaggaggatatggatgcacttttgaacaacagcctgcccccaccccacccagaaaatgaagaggacccagaagaggatttgtcagaaacagagactccaaagctcaagaagaagaaaaagcctaagaaacctcgggaccctaaaatccctaagagcaagcgccaaaaaaaggagcgtatgctcttatgccggcagctgggggacagctctggggaggggccagagtttgtggaggaggaggaagaggtggctctgcgctcagacagtgagggcagcgactatactcctggcaagaagaagaagaagaagcttggacctaagaaagagaagaagagcaaatccaagcggaaggaggaggaggaggaggaggatgatgatgatgattcaaaggagcctaaatcatctgctcagctcctggaagactggggcatggaagacattgaccacgtgttctcagaggaggattatcgaaccctcaccaactacaaggccttcagccagtttgtcagacccctcattgctgccaaaaatcccaagattgctgtctccaagatgatgatggttttgggtgcaaaatggcgggagttcagtaccaataaccccttcaaaggcagttctggggcatcagtggcagctgcggcagcagcagcggtagctgtggtggagagcatggtgacagccactgaggttgcaccaccacctccccctgtggaggtgcctatccgcaaggccaagaccaaggagggcaaaggtcccaatgctcggaggaagcccaagggcagccctcgtgtacctgatgccaagaagcctaaacccaagaaagtagctcccctgaaaatcaagctgggaggttttggttccaagcgtaagagatcctcgagtgaggatgatgacttagatgtggaatctgacttcgatgatgccagtatcaatagctattctgtttctgatggttccaccagccgtagtagccgcagccgcaagaaactccgaaccactaaaaagaaaaagaaaggcgaggaggaggtgactgctgtggatggttatgagacagaccaccaggactattgcgaggtgtgccagcaaggcggtgagatcatcctgtgtgatacctgtccccgtgcttaccacatggtctgcctggatcccgacatggagaaggctcccgagggcaagtggagctgcccacactgcgagaaggaaggcatccagtgggaagctaaagaggacaattcggagggtgaggagatcctggaagaggttgggggagacctcgaagaggaggatgaccaccatatggaattctgtcgggtctgcaaggatggtggggaactgctctgctgtgatacctgtccttcttcctaccacatccactgcctgaatcccccacttccagagatccccaacggtgaatggctctgtccccgttgtacgtgtccagctctgaagggcaaagtgcagaagatcctaatctggaagtggggtcagccaccatctcccacaccagtgcctcggcctccagatgctgatcccaacacgccctccccaaagcccttggaggggcggccagagcggcagttctttgtgaaatggcaaggcatgtcttactggcactgctcctgggtttctgaactgcagctggagctgcactgtcaggtgatgttccgaaactatcagcggaagaatgatatggatgagccaccttctggggactttggtggtgatgaagagaaaagccgaaagcgaaagaacaaggaccctaaatttgcagagatggaggaacgcttctatcgctatgggataaaacccgagtggatgatgatccaccgaatcctcaaccacagtgtggacaagaagggccacgtccactacttgatcaagtggcgggacttaccttacgatcaggcttcttgggagagtgaggatgtggagatccaggattacgacctgttcaagcagagctattggaatcacagggagttaatgaggggtgaggaaggccgaccaggcaagaagctcaagaaggtgaagcttcggaagttggagaggcctccagaaacgccaacagttgatccaacagtgaagtatgagcgacagccagagtacctggatgctacaggtggaaccctgcacccctatcaaatggagggcctgaattggttgcgcttctcctgggctcagggcactgacaccatcttggctgatgagatgggccttgggaaaactgtacagacagcagtcttcctgtattccctttacaaggagggtcattccaaaggccccttcctagtgagcgcccctctttctaccatcatcaactgggagcgggagtttgaaatgtgggctccagacatgtatgtcgtaacctatgtgggtgacaaggacagccgtgccatcatccgagagaatgagttctcctttgaagacaatgccattcgtggtggcaagaaggcctcccgcatgaagaaagaggcatctgtgaaattccatgtgctgctgacatcctatgaattgatcaccattgacatggctattttgggctctattgattgggcctgcctcatcgtggatgaagcccatcggctgaagaacaatcagtctaagttcttccgggtattgaatggttactcactccagcacaagctgttgctgactgggacaccattacaaaacaatctggaagagttgtttcatctgctcaactttctcacccccgagaggttccacaatttggaaggttttttggaggagtttgctgacattgccaaggaggaccagataaaaaaactgcatgacatgctggggccgcacatgttgcggcggctcaaagccgatgtgttcaagaacatgccctccaagacagaactaattgtgcgtgtggagctgagccctatgcagaagaaatactacaagtacatcctcactcgaaattttgaagcactcaatgcccgaggtggtggcaaccaggtgtctctgctgaatgtggtgatggatcttaagaagtgctgcaaccatccatacctcttccctgtggctgcaatggaagctcctaagatgcctaatggcatgtatgatggcagtgccctaatcagagcatctgggaaattattgctgctgcagaaaatgctcaagaaccttaaggagggtgggcatcgtgtactcatcttttcccagatgaccaagatgctagacctgctagaggatttcttggaacatgaaggttataaatacgaacgcatcgatggtggaatcactgggaacatgcggcaagaggccattgaccgcttcaatgcaccgggtgctcagcagttctgcttcttgctttccactcgagctgggggccttggaatcaatctggccactgctgacacagttattatctatgactctgactggaacccccataatgacattcaggcctttagcagagctcaccggattgggcaaaataaaaaggtaatgatctaccggtttgtgacccgtgcgtcagtggaggagcgcatcacgcaggtggcaaagaagaaaatgatgctgacgcatctagtggtgcggcctgggctgggctccaagactggatctatgtccaaacaggagcttgatgatatcctcaaatttggcactgaggaactattcaaggatgaagccactgatggaggaggagacaacaaagagggagaagatagcagtgttatccactacgatgataaggccattgaacggctgctagaccgtaaccaggatgagactgaagacacagaattgcagggcatgaatgaatatttgagctcattcaaagtggcccagtatgtggtacgggaagaagaaatgggggaggaagaggaggtagaacgggaaatcattaaacaggaagaaagtgtggatcctgactactgggagaaattgctgcggcaccattatgagcagcagcaagaagatctagcccgaaatctgggcaaaggaaaaagaatccgtaaacaggtcaactacaatgatggctcccaggaggaccgagattggcaggacgaccagtccgacaaccagtccgattactcagtggcttcagaggaaggtgatgaagactttgatgaacgttcagaagctccccgtaggcccagtcgtaagggcctgcggaatgataaagataagccattgcctcctctgttggcccgtgttggtgggaatattgaagtacttggttttaatgctcgtcagcgaaaagcctttcttaatgcaattatgcgatatggtatgccacctcaggatgcttttactacccagtggcttgtaagagacctgcgaggcaaatcagagaaagagttcaaggcatatgtctctcttttcatgcggcatttatgtgagccgggggcagatggggctgagacctttgctgatggtgtcccccgagaaggcctgtctcgccagcatgtccttactagaattggtgttatgtctttgattcgcaagaaggttcaggagtttgaacatgttaatgggcgctggagcatgcctgaactggactgttgtggagtaagcactctctgtgtggagaagca

SEQ ID NO: 359527 - DNA, 4025 bp, Homo sapiens
ccggccggtgtttcaggccctttaagaggcgacgctggagccggagccattttccccccttcggccgcggcgaggaggagccggagcgggagtgacaccgagccggacccagcgcgacctgcggcggctccgggtgactcgggccagtgtagaggtcctcaggccgccggcaggagcagctgggccaattccctggccgggagcggaaggggatggcgtcgggcctgggctccccgtccccctgctcggcgggcagtgaggaggaggatatggatgcacttttgaacaacagcctgcccccaccccacccagaaaatgaagaggacccagaagaggatttgtcagaaacagagactccaaagctcaagaagaagaaaaagcctaagaaacctcgggaccctaaaatccctaagagcaagcgccaaaaaaaggagcgtatgctcttatgccggcagctgggggacagctctggggaggggccagagtttgtggaggaggaggaagaggtggctctgcgctcagacagtgagggcagcgactatactcctggcaagaagaagaagaagaagcttggacctaagaaagagaagaagagcaaatccaagcggaaggaggaggaggaggaggaggatgatgatgatgattcaaaggagcctaaatcatctgctcagctcctggaagactggggcatggaagacattgaccacgtgttctcagaggaggattatcgaaccctcaccaactacaaggccttcagccagtttgtcagacccctcattgctgccaaaaatcccaagattgctgtctccaagatgatgatggttttgggtgcaaaatggcgggagttcagtaccaataaccccttcaaaggcagttctggggcatcagtggcagctgcggcagcagcagcggtagctgtggtggagagcatggtgacagccactgaggttgcaccaccacctccccctgtggaggtgcctatccgcaaggccaagaccaaggagggcaaaggtcccaatgctcggaggaagcccaagggcagccctcgtgtacctgatgccaagaagcctaaacccaagaaagtagctcccctgaaaatcaagctgggaggttttggttccaagcgtaagagatcctcgagtgaggatgatgacttagatgtggaatctgacttcgatgatgccagtatcaatagctattctgtttctgatggttccaccagccgtagtagccgcagccgcaagaaactccgaaccactaaaaagaaaaagaaaggcgaggaggaggtgactgctgtggatggttatgagacagaccaccaggactattgcgaggtgtgccagcaaggcggtgagatcatcctgtgtgatacctgtccccgtgcttaccacatggtctgcctggatcccgacatggagaaggctcccgagggcaagtggagctgcccacactgcgagaaggaaggcatccagtgggaagctaaagaggacaattcggagggtgaggagatcctggaagaggttgggggagacctcgaagaggaggatgaccaccatatggaattctgtcgggtctgcaaggatggtggggaactgctctgctgtgatacctgtccttcttcctaccacatccactgcctgaatcccccacttccagagatccccaacggtgaatggctctgtccccgttgtacgtgtccagctctgaagggcaaagtgcagaagatcctaatctggaagtggggtcagccaccatctcccacaccagtgcctcggcctccagatgctgatcccaacacgccctccccaaagcccttggaggggcggccagagcggcagttctttgtgaaatggcaaggcatgtcttactggcactgctcctgggtttctgaactgcagctggagctgcactgtcaggtgatgttccgaaactatcagcggaagaatgatatggatgagccaccttctggggactttggtggtgatgaagagaaaagccgaaagcgaaagaacaaggaccctaaatttgcagagatggaggaacgcttctatcgctatgggataaaacccgagtggatgatgatccaccgaatcctcaaccacagtgtggacaagaagggccacgtccactacttgatcaagtggcgggacttaccttacgatcaggcttcttgggagagtgaggatgtggagatccaggattacgacctgttcaagcagagctattggaatcacagggagttaatgaggggtgaggaaggccgaccaggcaagaagctcaagaaggtgaagcttcggaagttggagaggcctccagaaacgccaacagttgatccaacagtgaagtatgagcgacagccagagtacctggatgctacaggtggaaccctgcacccctatcaaatggagggcctgaattggttgcgcttctcctgggctcagggcactgacaccatcttggctgatgagatgggccttgggaaaactgtacagacagcagtcttcctgtattccctttacaaggagggtcattccaaaggccccttcctagtgagcgcccctctttctaccatcatcaactgggagcgggagtttgaaatgtgggctccagacatgtatgtcgtaacctatgtgggtgacaaggacagccgtgccatcatccgagagaatgagttctcctttgaagacaatgccattcgtggtggcaagaaggcctcccgcatgaagaaagaggcatctgtgaaattccatgtgctgctgacatcctatgaattgatcaccattgacatggctattttgggctctattgattgggcctgcctcatcgtggatgaagcccatcggctgaagaacaatcagtctaagttcttccgggtattgaatggttactcactccagcacaagctgttgctgactgggacaccattacaaaacaatctggaagagttgtttcatctgctcaactttctcacccccgagaggttccacaatttggaaggttttttggaggagtttgctgacattgccaaggaggaccagataaaaaaactgcatgacatgctggggccgcacatgttgcggcggctcaaagccgatgtgttcaagaacatgccctccaagacagaactaattgtgcgtgtggagctgagccctatgcagaagaaatactacaagtacatcctcactcgaaattttgaagcactcaatgcccgaggtggtggcaaccaggtgtctctgctgaatgtggtgatggatcttaagaagtgctgcaaccatccatacctcttccctgtggctgcaatggaagctcctaagatgcctaatggcatgtatgatggcagtgccctaatcagagcatctgggaaattattgctgctgcagaaaatgctcaagaaccttaaggagggtgggcatcgtgtactcatcttttcccagatgaccaagatgctagacctgctagaggatttcttggaacatgaaggttataaatacgaacgcatcgatggtggaatcactgggaacatgcggcaagaggccattgaccgcttcaatgcaccgggtgctcagcagttctgcttcttgctttccactcgagctgggggccttggaatcaatctggccactgctgacacagttattatctatgactctgactggaacccccataatgacattcaggcctttagcagagctcaccggattgggcaaaataaaaaggtaatgatctaccggtttgtgacccgtgcgtcagtggaggagcgcatcacgcaggtggcaaagaagaaaatgatgctgacgcatctagtggtgcggcctgggctgggctccaagactggatctatgtccaaacaggagcttgatgatatcctcaaatttggcactgaggaactattcaaggatgaagccactgatggatcgtagagtggcacatgcttacagggcattggtgccaagtccagtggatgagaatccagcccctcacaagctgtgggatggggcttgggagttgcggtggacccctcttct

SEQ ID NO: 359528 - DNA, 3412 bp, Homo sapiens
ccggccggtgtttcaggccctttaagaggcgacgctggagccggagccattttccccccttcggccgcggcgaggaggagccggagcgggagtgacaccgagccggacccagcgcgacctgcggcggctccgggtgactcgggccagtgtagaggtcctcaggccgccggcaggagcagctgggccaattccctggccgggagcggaaggggatggcgtcgggcctgggctccccgtccccctgctcggcgggcagtgaggaggaggatatggatgcacttttgaacaacagcctgcccccaccccacccagaaaatgaagaggacccagaagaggatttgtcagaaacagagactccaaagctcaagaagaagaaaaagcctaagaaacctcgggaccctaaaatccctaagagcaagcgccaaaaaaaggagcgtatgctcttatgccggcagctgggggacagctctggggaggggccagagtttgtggaggaggaggaagaggtggctctgcgctcagacagtgagggcagcgactatactcctggcaagaagaagaagaagaagcttggacctaagaaagagaagaagagcaaatccaagcggaaggaggaggaggaggaggaggatgatgatgatgattcaaaggagcctaaatcatctgctcagctcctggaagactggggcatggaagacattgaccacgtgttctcagaggaggattatcgaaccctcaccaactacaaggccttcagccagtttgtcagacccctcattgctgccaaaaatcccaagattgctgtctccaagatgatgatggttttgggtgcaaaatggcgggagttcagtaccaataaccccttcaaaggcagttctggggcatcagtggcagctgcggcagcagcagcggtagctgtggtggagagcatggtgacagccactgaggttgcaccaccacctccccctgtggaggtgcctatccgcaaggccaagaccaaggagggcaaaggtcccaatgctcggaggaagcccaagggcagccctcgtgtacctgatgccaagaagcctaaacccaagaaagtagctcccctgaaaatcaagctgggaggttttggttccaagcgtaagagatcctcgagtgaggatgatgacttagatgtggaatctgacttcgatgatgccagtatcaatagctattctgtttctgatggttccaccagccgtagtagccgcagccgcaagaaactccgaaccactaaaaagaaaaagaaaggcgaggaggaggtgactgctgtggatggttatgagacagaccaccaggactattgcgaggtgtgccagcaaggcggtgagatcatcctgtgtgatacctgtccccgtgcttaccacatggtctgcctggatcccgacatggagaaggctcccgagggcaagtggagctgcccacactgcgagaaggaaggcatccagtgggaagctaaagaggacaattcggagggtgaggagatcctggaagaggttgggggagacctcgaagaggaggatgaccaccatatggaattctgtcgggtctgcaaggatggtggggaactgctctgctgtgatacctgtccttcttcctaccacatccactgcctgaatcccccacttccagagatccccaacggtgaatggctctgtccccgttgtacgtgtccagctctgaagggcaaagtgcagaagatcctaatctggaagtggggtcagccaccatctcccacaccagtgcctcggcctccagatgctgatcccaacacgccctccccaaagcccttggaggggcggccagagcggcagttctttgtgaaatggcaaggcatgtcttactggcactgctcctgggtttctgaactgcagctggagctgcactgtcaggtgatgttccgaaactatcagcggaagaatgatatggatgagccaccttctggggactttggtggtgatgaagagaaaagccgaaagcgaaagaacaaggaccctaaatttgcagagatggaggaacgcttctatcgctatgggataaaacccgagtggatgatgatccaccgaatcctcaaccacagtgtggacaagaagggccacgtccactacttgatcaagtggcgggacttaccttacgatcaggcttcttgggagagtgaggatgtggagatccaggattacgacctgttcaagcagagctattggaatcacagggagttaatgaggggtgaggaaggccgaccaggcaagaagctcaagaaggtgaagcttcggaagttggagaggcctccagaaacgccaacagttgatccaacagtgaagtatgagcgacagccagagtacctggatgctacaggtggaaccctgcacccctatcaaatggagggcctgaattggttgcgcttctcctgggctcagggcactgacaccatcttggctgatgagatgggccttgggaaaactgtacagacagcagtcttcctgtattccctttacaaggagggtcattccaaaggccccttcctagtgagcgcccctctttctaccatcatcaactgggagcgggagtttgaaatgtgggctccagacatgtatgtcgtaacctatgtgggtgacaaggacagccgtgccatcatccgagagaatgagttctcctttgaagacaatgccattcgtggtggcaagaaggcctcccgcatgaagaaagaggcatctgtgaaattccatgtgctgctgacatcctatgaattgatcaccattgacatggctattttgggctctattgattgggcctgcctcatcgtggatgaagcccatcggctgaagaacaatcagtctaagttcttccgggtattgaatggttactcactccagcacaagctgttgctgactgggacaccattacaaaacaatctggaagagttgtttcatctgctcaactttctcacccccgagaggttccacaatttggaaggttttttggaggagtttgctgacattgccaaggaggaccagataaaaaaactgcatgacatgctggggccgcacatgttgcggcggctcaaagccgatgtgttcaagaacatgccctccaagacagaactaattgtgcgtgtggagctgagccctatgcagaagaaatactacaagtacatcctcactcgaaattttgaagcactcaatgcccgaggtggtggcaaccaggtgtctctgctgaatgtggtgatggatcttaagaagtgctgcaaccatccatacctcttccctgtggctgcaatggaagctcctaagatgcctaatggcatgtatgatggcagtgccctaatcagagcatctgggaaattattgctgctgcagaaactcctaattgtgaacgggatcatctagat

SEQ ID NO: 359529 - DNA, 3171 bp, Homo sapiens
ccggccggtgtttcaggccctttaagaggcgacgctggagccggagccattttccccccttcggccgcggcgaggaggagccggagcgggagtgacaccgagccggacccagcgcgacctgcggcggctccgggtgactcgggccagtgtagaggtcctcaggccgccggcaggagcagctgggccaattccctggccgggagcggaaggggatggcgtcgggcctgggctccccgtccccctgctcggcgggcagtgaggaggaggatatggatgcacttttgaacaacagcctgcccccaccccacccagaaaatgaagaggacccagaagaggatttgtcagaaacagagactccaaagctcaagaagaagaaaaagcctaagaaacctcgggaccctaaaatccctaagagcaagcgccaaaaaaaggagcgtatgctcttatgccggcagctgggggacagctctggggaggggccagagtttgtggaggaggaggaagaggtggctctgcgctcagacagtgagggcagcgactatactcctggcaagaagaagaagaagaagcttggacctaagaaagagaagaagagcaaatccaagcggaaggaggaggaggaggaggaggatgatgatgatgattcaaaggagcctaaatcatctgctcagctcctggaagactggggcatggaagacattgaccacgtgttctcagaggaggattatcgaaccctcaccaactacaaggccttcagccagtttgtcagacccctcattgctgccaaaaatcccaagattgctgtctccaagatgatgatggttttgggtgcaaaatggcgggagttcagtaccaataaccccttcaaaggcagttctggggcatcagtggcagctgcggcagcagcagcggtagctgtggtggagagcatggtgacagccactgaggttgcaccaccacctccccctgtggaggtgcctatccgcaaggccaagaccaaggagggcaaaggtcccaatgctcggaggaagcccaagggcagccctcgtgtacctgatgccaagaagcctaaacccaagaaagtagctcccctgaaaatcaagctgggaggttttggttccaagcgtaagagatcctcgagtgaggatgatgacttagatgtggaatctgacttcgatgatgccagtatcaatagctattctgtttctgatggttccaccagccgtagtagccgcagccgcaagaaactccgaaccactaaaaagaaaaagaaaggcgaggaggaggtgactgctgtggatggttatgagacagaccaccaggactattgcgaggtgtgccagcaaggcggtgagatcatcctgtgtgatacctgtccccgtgcttaccacatggtctgcctggatcccgacatggagaaggctcccgagggcaagtggagctgcccacactgcgagaaggaaggcatccagtgggaagctaaagaggacaattcggagggtgaggagatcctggaagaggttgggggagacctcgaagaggaggatgaccaccatatggaattctgtcgggtctgcaaggatggtggggaactgctctgctgtgatacctgtccttcttcctaccacatccactgcctgaatcccccacttccagagatccccaacggtgaatggctctgtccccgttgtacgtgtccagctctgaagggcaaagtgcagaagatcctaatctggaagtggggtcagccaccatctcccacaccagtgcctcggcctccagatgctgatcccaacacgccctccccaaagcccttggaggggcggccagagcggcagttctttgtgaaatggcaaggcatgtcttactggcactgctcctgggtttctgaactgcagctggagctgcactgtcaggtgatgttccgaaactatcagcggaagaatgatatggatgagccaccttctggggactttggtggtgatgaagagaaaagccgaaagcgaaagaacaaggaccctaaatttgcagagatggaggaacgcttctatcgctatgggataaaacccgagtggatgatgatccaccgaatcctcaaccacagtgtggacaagaagggccacgtccactacttgatcaagtggcgggacttaccttacgatcaggcttcttgggagagtgaggatgtggagatccaggattacgacctgttcaagcagagctattggaatcacagggagttaatgaggggtgaggaaggccgaccaggcaagaagctcaagaaggtgaagcttcggaagttggagaggcctccagaaacgccaacagttgatccaacagtgaagtatgagcgacagccagagtacctggatgctacaggtggaaccctgcacccctatcaaatggagggcctgaattggttgcgcttctcctgggctcagggcactgacaccatcttggctgatgagatgggccttgggaaaactgtacagacagcagtcttcctgtattccctttacaaggagggtcattccaaaggccccttcctagtgagcgcccctctttctaccatcatcaactgggagcgggagtttgaaatgtgggctccagacatgtatgtcgtaacctatgtgggtgacaaggacagccgtgccatcatccgagagaatgagttctcctttgaagacaatgccattcgtggtggcaagaaggcctcccgcatgaagaaagaggcatctgtgaaattccatgtgctgctgacatcctatgaattgatcaccattgacatggctattttgggctctattgattgggcctgcctcatcgtggatgaagcccatcggctgaagaacaatcagtctaagttcttccgggtattgaatggttactcactccagcacaagctgttgctgactgggacaccattacaaaacaatctggaagagttgtttcatctgctcaactttctcacccccgagaggttccacaattaggaaggtttacgggaggagttagctgacattgccaaggaggaccagataaaaaaactgcacgacatatacctaggctaggtatatgtcgtgcgaggctgaccttctcactcagcatcatggatccaagcctgttgagagaaagggagctgttcaaaaaacgagctcattccactcctgt

SEQ ID NO: 359530 - DNA, 1296 bp, Homo sapiens
ccggccggtgtttcaggccctttaagaggcgacgctggagccggagccattttccccccttcggccgcggcgaggaggagccggagcgggagtgacaccgagccggacccagcgcgacctgcggcggctccgggtgactcgggccagtgtagaggtcctcaggccgccggcaggagcagctgggccaattccctggccgggagcggaaggggatggcgtcgggcctgggctccccgtccccctgctcggcgggcagtgaggaggaggatatggatgcacttttgaacaacagcctgcccccaccccacccagaaaatgaagaggacccagaagaggatttgtcagaaacagagactccaaagctcaagaagaagaaaaagcctaagaaacctcgggaccctaaaatccctaagagcaagcgccaaaaaaaggagcgtatgctcttatgccggcagctgggggacagctctggggaggggccagagtttgtggaggaggaggaagaggtggctctgcgctcagacagtgagggcagcgactatactcctggcaagaagaagaagaagaagcttggacctaagaaagagaagaagagcaaatccaagcggaaggaggaggaggaggaggaggatgatgatgatgattcaaaggagcctaaatcatctgctcagctcctggaagactggggcatggaagacattgaccacgtgttctcagaggaggattatcgaaccctcaccaactacaaggccttcagccagtttgtcagacccctcattgctgccaaaaatcccaagattgctgtctccaagatgatgatggttttgggtgcaaaatggcgggagttcagtaccaataaccccttcaaaggcagttctggggcatcagtggcagctgcggcagcagcagcggtagctgtggtggagagcatggtgacagccactgaggttgcaccaccacctccccctgtggaggtgcctatccgcaaggccaagaccaaggagggcaaaggtcccaatgctcggaggaagcccaagggcagccctcgtgtacctgatgccaagaagcctaaacccaagaaagtagctcccctgaaaatcaagctgggaggttttggttccaagcgtaagagatcctcgagtgaggatgatgacttagatgtggaatctgacttcgatgatgccagtatcaatagctattctgtttctgatggttccaccagccgtagtagccgcagccgcaagaaactccgaaccactaaaaagaaaaagaatcgtgcggtaccgagctgattta

SEQ ID NO: 359531 - DNA, 433 bp, Homo sapiens
taccccgcgtcaaagtaacttaaatttttttattgatgttttaaaatagctttggcttggaacgtcagaagataggaaattttcgttattttatttattctttttttttttttttttttttttagggccaagaaaaaagaaaagaaacttaaatgattccagcctatttgtatctgctgaagaggtaaggctaatgtactgttttaacaagctagctattctacattatttttagttttctaataaatttatcgtttttgtttaaaagtttggccatctattggatgaaaatatgggatccaagtttgataacattggcatgaatgccatggctaacaaagataatgcaagtaagtaacttaaatttttttattgatgttttaaaaatagctttggcttggaacttcagaagataggaaattttcgttacttt

SEQ ID NO: 359532 - DNA, 1759 bp, Homo sapiens
agcggaggctgagtttcacgcgcgtatgctttgcccgccatggccgcagtcaaggagcctttggagttccatgccaagcggccttggcgccccgaggaggcagtagaagatccggacgaggaggatgaggataatactagtgaagccgagaatgggttctccctggaggaagtgttacggctcggaggcaccaagcaagattaccttatgctggctacttctcctatctctcccagtcctagctgctggcatcactatactactaacagaccgcaacctcaacaccaccttcttcgaccccgccggaggaggagaccccattctataccaacacctattctgatttttcggtcaccctgaagtttatattcttatcctaccaggcttcggaataatctcccatattgtaacttactactccggaaaaaaagaaccatttggatacataggtatggtctgagctatgatatcaatgtggcttcctagggtttatcgtgtgagcacaccatatattacagtaggaatagacgtagacacaccgagcatatttcaccctccgcttacataatcaatcgctaatccccaacggggtcaagtatttaagctgatccgccacactccacggagcactttggaatgatcctgctgaggctcttagccaggatcatcttcttcccggagagggccggacgggcttgtttacaactcaccttaaaccgcacacagacagccaggtggggcaaccatgcataagaggctgcccaacgggactaagcacatcgtacggccaacgacgcatcatcggcttcccctcaaccgcctcaactacaaaatactctagccagtcccccaccgacacagacgacacacagcacgaagacggcagcgaaagagcaggcaccagacgaaaaagagcaccacgaccaccaaccacaccagaacacagcagacagagagagcgaagaagagacaaggcaggagaaagtacagcaaagctgtcgaaacgcaaggacaaacgagccagacagacagcgagagagacagggagaggaagaagagaacaggccagcgacaggaacgcaggcacagaacagagcaacaacacagacgcagaagaaacgacagcaaaacagaagaagcacgaccgaagggaacagaggcgcgagcagagagaggagagcagccaagaagggaagaaaacacacaaaacagagaaccagacgggaacagacacagaaaaccgagaacagggcacagcgcaggcgcggaagagcggacgacgaaacagcaggacgagcgcgccgaaagacacaacaagacagagaaccataagacatcgacggcaagcaggaggcacggacacgccacagcggcgagcaaccaaaccaggagaaagagacagcaagcggagagaaggaaacacaggacgtagacagagacagagagacagcacacgaagcagaggtgacagaagctcgaacgagaggcagaggaggggaagagaggaagagcagagagcggaggcgcggcaagaggagaagagcagacgacagaaacaggaagacgaacagacacgagaaagacacgcacacacgcgacaagcgcaggacggcagcagcagcagaagagagagcagcaagagagagcgcgcgctggagaaagaacgcaacggcaacagaggagcaagtgaggaggtgcaggagcaggctggggggaaggaggagaggcgagaagtagacacgacgcgcacccgcagggc

SEQ ID NO: 359533 - DNA, 902 bp, Homo sapiens
ttggtcctctcttttgtttttgctctttgttcttttttttttttgtgttctctctttcttttttgtcttttctttctttttcgctttttttcggttgtctttgatccgttacgctgtcgttctgctttggcgctctgtctttcttcgtgttgtgccccattttgcagtttcgtctttcatgctgtcttgtgctgtatggttcgcctccgtttcggcgtctagcattcggtctgttaccgttcagtcccttcgttcttctacctttattgctattgtatttccgtaaggtgtcttttagggtctgggttgtaccataagggacatgagttgtatcatgtcctggaccgtccaggtagttcattaaagagttctgtgatattgattcattgttaagttaattaagagatctgcttgggtgcagttagtctcttacatgtgtaagtttccaagggttcttgtagacacgtttttacttgtttcgtatcagctacccaacggttcctgtgtactttcgcagaagatgcagacctgcaacattcgacaagcattcctgaagaatcgactgtgttcccacacactgctgagagtgtgggtttcctcagagaagaaaggattctgaaatggtgaatgtgtataatcccacaggttggttctaattaagtctctgcacacagataaactgcaagacgtttctttcggactatatcccacaggtttttgttttttttttgagagggatttttgctcttgttgcccaggctggagtgcagtggcacgatctcactctctgattccatacattccagacttctcagtggatttgtaataaacttccaagatgaagggatatttcttgctcattgtttgcctgaaatctgaggtgcgttcaagggggactgcgc

SEQ ID NO: 359534 - DNA, 3356 bp, Homo sapiens
agcggaggctgagtttcacgcgcgtatgctttgcccgccatggccgcagtcaaggagcctttggagttccatgccaagcggccttggcgccccgaggaggcagtagaagatccggacgaggaggatgaggataatactagtgaagccgagaatgggttctccctggaggaagtgttacggctcggaggcaccaagcaagattaccttatgctggctactttggatgagaatgaggaagtgatagatggaggcaaaaaaggagcaatcgatgaccttcagcaaggtgaattggaagcatttattcaaaatcttaatttggcgaagtatacaaaagcttccttaattgaagaagatgaaccagctgaaaaagaaaattccagcaaaaaagaagtaaaaatacctaaaataaataataaaaatacagcagaaagtcaaaggacatcagttaataaggtgaaaaataagaataggccagaaccacattctgatgagaatggcagtaccacaccgaaagtaaagaaagataaacagaacatctttgaattttttgagagacagactttgttacttaggcctggaggcaaatggtatgatctggagtacagcaatgaatattctttgaaaccccagcctcaggatgttgtatctaagtacaaaacccttgctcagaagctgtatcagcatgaaatcaacttattcaaaagtaagacgaatagtcaaaagggagcctcttctacctggatgaaggcaattgtgtcatcggggacactaggtgacaggatggcagccatgattcttcttattcaggatgatgccgttcacacacttcagtttgtagaaactcttgtgaaccttgttaaaaagaagggcagcaaacagcagtgccttatggccttggatactttcaaagagttgcttatcacagaccttttgccagacaatcggaagctgaggattttcagccagcgtccttttgacaaactggaacagttgtccagtggcaacaaggactcaagagatagaagactgatattatggtattttgaacaccagctgaaacacttagtggctgaatttgtgcaggtcttagaaactttaagtcatgatacattagtaaccactaaaactcgagcccttaccgtggctcatgagctgctttgtaacaagcctgaggaagaaaaggctcttcttgtgcaagtggtaaataaactgggagatcctcagaacagaattgccacaaaagcatcccatctgttagagacattactttgtaaacatcccaatatgaaaggagttgtgtctggtgaagtagaaaggctactcttccgctcaaatatcagctccaaagctcaatattatgcaatttgctttttaaatcaaatggctctgtcccatgaagaaagtgaattggctaacaaattaataactgtttacttttgcttttttcggacttgtgtcaaaaaaaaagatgttgaatcaaaaatgcttagcgcccttttaacaggtgtgaatagggcatacccttattcccagactggtgatgacaaagtaagggagcagattgacacactgtttaaagtgttgcatattgtgaattttaataccagtgtccaggctttaatgttgcttttccaagtaatgaattctcagcagacaatatcggatcgatattacacagcattatacaggaagatgttggatccagggttgatgacgtgttccaagcaagctatgtttcttaaccttgtctacaaatctctgaaagctgacattgtgttgcgccgggtgaaggcttttgtgaagaggttacttcaagttacttgtcaacagatgccaccatttatatgtggagctttatatcttgtgtctgagatccttaaagcaaaaccaggtttaagaagccaactagatgatcatccggagtctgatgatgaagaaaattttattgatgcaaatgatgatgaagacatggaaaaattcactgatgcagacaaagaaacagagatagtgaaaaaacttgagacagaggaaacagttcctgaaactgatgtagaaaccaaaaaaccagaggttgcttcctgggtgcactttgataatttgaaaggtgggaaacagttaaataaatacgatccattcagtagaaaccctctgttctgtggagctgaaaatacaagtctttgggaactcaaaaagttatctgtgcattttcatccctccgtggccctttttgcaaagaccatccttcagggaaactatattcagtattcaggggacccactgcaggatttcactctaatgagatttttggatcgatttgtataccgaaatccaaagccccataaaggcaaagaaaacacagatagtgttgtgatgcagccgaaaagaaaacattttattaaggatattcgtcatcttcctgtgaacagtaaggagttccttgcaaaagaagaaagccaaataccagtggatgaagtgtttttccacaggtattataaaaaagttgctgttaaagagaaacaaaaacgggatgcagatgaagaaagtatagaagacgtggatgatgaagaatttgaagagctgattgacacatttgaagatgataactgtttcagctctggaaaggatgatatggattttgctggaaacgtgaaaaagagaacaaaaggagctaaggataacacattagatgaagattcagaaggtagtgatgatgaacttggtaacctggatgacgatgaagtttctttaggaagtatggatgatgaagaatttgctgaagttgatgaagatggaggaacattcatggatgtgttagatgatgaaagtgagagcgttccagaacttgaagtccactccaaagtcagtactaagaaaagcaagagaaaaggtacagatgattttgactttgctggctcatttcaagggccaagaaaaaagaaaagaaacttaaatgattccagcctatttgtatctgctgaagagtttggccatctattggatgaaaatatgggatccaagtttgataacattggcatgaatgccatggctaacaaagataatgcaagtctcaaacagcttagatgggaggctgaacgtgatgactggctacacaacagagatgcaaaaagtatcatcaagaaaaagaaacattttaaaaagaagaggattaaaaccactcaaaaaactaaaaaacaaaggaaatgagttattaatgtaaattatagattaaaattctacttacatctaatttttgctgttcaaccatgttttttgatctagctctctgattccatacattccagacttctcagtggatttgtaataaactataaataaaaatagctctcatttataaa

SEQ ID NO: 359535 - DNA, 3304 bp, Homo sapiens
agcggaggctgagtttcacgcgcgtatgctttgcccgccatggccgcagtcaaggagcctttggagttccatgccaagcggccttggcgccccgaggaggcagtagaagatccggacgaggaggatgaggataatactagtgaagccgagaatgggttctccctggaggaagtgttacggctcggaggcaccaagcaagattaccttatgctggctactttggatgagaatgaggaagtgatagatggaggcaaaaaaggagcaatcgatgaccttcagcaaggtgaattggaagcatttattcaaaatcttaatttggcgaagtatacaaaagcttccttaattgaagaagatgaaccagctgaaaaagaaaattccagcaaaaaagaagtaaaaatacctaaaataaataataaaaatacagcagaaagtcaaaggacatcagttaataaggtgaaaaataagaataggccagaaccacattctgatgagaatggcagtaccacaccgaaagtaaagaaagataaacagaacatctttgaattttttgagagacagactttgttacttaggcctggaggcaaatggtatgatctggagtacagcaatgaatattctttgaaaccccagcctcaggatgttgtatctaagtacaaaacccttgctcagaagctgtatcagcatgaaatcaacttattcaaaagtaagacgaatagtcaaaagggagcctcttctacctggatgaaggcaattgtgtcatcggggacactaggtgacaggatggcagccatgattcttcttattcaggatgatgccgttcacacacttcagtttgtagaaactcttgtgaaccttgttaaaaagaagggcagcaaacagcagtgccttatggccttggatactttcaaagagttgcttatcacagaccttttgccagacaatcggaagctgaggattttcagccagcgtccttttgacaaactggaacagttgtccagtggcaacaaggactcaagagatagaagactgatattatggtattttgaacaccagctgaaacacttagtggctgaatttgtgcaggtcttagaaactttaagtcatgatacattagtaaccactaaaactcgagcccttaccgtggctcatgagctgctttgtaacaagcctgaggaagaaaaggctcttcttgtgcaagtggtaaataaactgggagatcctcagaacagaattgccacaaaagcatcccatctgttagagacattactttgtaaacatcccaatatgaaaggagttgtgtctggtgaagtagaaaggctactcttccgctcaaatatcagctccaaagctcaatattatgcaatttgctttttaaatcaaatggctctgtcccatgaagaaagtgaattggctaacaaattaataactgtttacttttgcttttttcggacttgtgtcaaaaaaaaagatgttgaatcaaaaatgcttagcgcccttttaacaggtgtgaatagggcatacccttattcccagactggtgatgacaaagtaagggagcagattgacacactgtttaaagtgttgcatattgtgaattttaataccagtgtccaggctttaatgttgcttttccaagtaatgaattctcagcagacaatatcggatcgatattacacagcattatacaggaagatgttggatccagggttgatgacgtgttccaagcaagctatgtttcttaaccttgtctacaaatctctgaaagctgacattgtgttgcgccgggtgaaggcttttgtgaagaggttacttcaagttacttgtcaacagatgccaccatttatatgtggagctttatatcttgtgtctgagatccttaaagcaaaaccaggtttaagaagccaactagatgatcatccggagtctgatgatgaagaaaattttattgatgcaaatgatgatgaagacatggaaaaattcactgatgcagacaaagaaacagagatagtgaaaaaacttgagacagaggaaacagttcctgaaactgatgtagaaaccaaaaaaccagaggttgcttcctgggtgcactttgataatttgaaaggtgggaaacagttaaataaatacgatccattcagtagaaaccctctgttctgtggagctgaaaatacaagtctttgggaactcaaaaagttatctgtgcattttcatccctccgtggccctttttgcaaagaccatccttcagggaaactatattcagtattcaggggacccactgcaggatttcactctaatgagatttttggatcgatttgtataccgaaatccaaagccccataaaggcaaagaaaacacagatagtgttgtgatgcagccgaaaagaaaacattttattaaggatattcgtcatcttcctgtgaacagtaaggagttccttgcaaaagaagaaagccaaataccagtggatgaagtgtttttccacaggtattataaaaaagttgctgttaaagagaaacaaaaacgggatgcagatgaagaaagtatagaagacgtggatgatgaagaatttgaagagctgattgacacatttgaagatgataactgtttcagctctggaaaggatgatatggattttgctggaaacgtgaaaaagagaacaaaaggagctaaggataacacattagatgaagattcagaaggtagtgatgatgaacttggtaacctggatgacgatgaagtttctttaggaagtatggatgatgaagaatttgctgaagttgatgaagatggaggaacattcatggatgtgttagatgatgaaagtgagagcgttccagaacttgaagtccactccaaagtcagtactaagaaaagcaagagaaaaggtacagatgattttgactttgctggctcatttcaagggccaagaaaaaagaaaagaaacttaaatgattccagcctatttgtatctgctgaagaggtaaggctaatgtactgttttaacaagctagtctcaaacagcttagatgggaggctgaacgtgatgactggctacacaacagagatgcaaaaagtatcatcaagaaaaagaaacattttaaaaagaagaggattaaaaccactcaaaaaactaaaaaacaaaggaaatgagttattaatgtaaattatagattaaaattctacttacatctaatttttgctgttcaaccatgttttttgatctagctctctgattccatacattccagacttctcagtggatttgtaataaactataaataaaaatagctctcatttataaa

SEQ ID NO: 359536 - DNA, 3231 bp, Homo sapiens
agcggaggctgagtttcacgcgcgtatgctttgcccgccatggccgcagtcaaggagcctttggagttccatgccaagcggccttggcgccccgaggaggcagtagaagatccggacgaggaggatgaggataatactagtgaagccgagaatgggttctccctggaggaagtgttacggctcggaggcaccaagcaagattaccttatgctggctactttggatgagaatgaggaagtgatagatggaggcaaaaaaggagcaatcgatgaccttcagcaaggtgaattggaagcatttattcaaaatcttaatttggcgaagtatacaaaagcttccttaattgaagaagatgaaccagctgaaaaagaaaattccagcaaaaaagaagtaaaaatacctaaaataaataataaaaatacagcagaaagtcaaaggacatcagttaataaggtgaaaaataagaataggccagaaccacattctgatgagaatggcagtaccacaccgaaagtaaagaaagataaacagaacatctttgaattttttgagagacagactttgttacttaggcctggaggcaaatggtatgatctggagtacagcaatgaatattctttgaaaccccagcctcaggatgttgtatctaagtacaaaacccttgctcagaagctgtatcagcatgaaatcaacttattcaaaagtaagacgaatagtcaaaagggagcctcttctacctggatgaaggcaattgtgtcatcggggacactaggtgacaggatggcagccatgattcttcttattcaggatgatgccgttcacacacttcagtttgtagaaactcttgtgaaccttgttaaaaagaagggcagcaaacagcagtgccttatggccttggatactttcaaagagttgcttatcacagaccttttgccagacaatcggaagctgaggattttcagccagcgtccttttgacaaactggaacagttgtccagtggcaacaaggactcaagagatagaagactgatattatggtattttgaacaccagctgaaacacttagtggctgaatttgtgcaggtcttagaaactttaagtcatgatacattagtaaccactaaaactcgagcccttaccgtggctcatgagctgctttgtaacaagcctgaggaagaaaaggctcttcttgtgcaagtggtaaataaactgggagatcctcagaacagaattgccacaaaagcatcccatctgttagagacattactttgtaaacatcccaatatgaaaggagttgtgtctggtgaagtagaaaggctactcttccgctcaaatatcagctccaaagctcaatattatgcaatttgctttttaaatcaaatggctctgtcccatgaagaaagtgaattggctaacaaattaataactgtttacttttgcttttttcggacttgtgtcaaaaaaaaagatgttgaatcaaaaatgcttagcgcccttttaacaggtgtgaatagggcatacccttattcccagactggtgatgacaaagtaagggagcagattgacacactgtttaaagtgttgcatattgtgaattttaataccagtgtccaggctttaatgttgcttttccaagtaatgaattctcagcagacaatatcggatcgatattacacagcattatacaggaagatgttggatccagggttgatgacgtgttccaagcaagctatgtttcttaaccttgtctacaaatctctgaaagctgacattgtgttgcgccgggtgaaggcttttgtgaagaggttacttcaagttacttgtcaacagatgccaccatttatatgtggagctttatatcttgtgtctgagatccttaaagcaaaaccaggtttaagaagccaactagatgatcatccggagtctgatgatgaagaaaattttattgatgcaaatgatgatgaagacatggaaaaattcactgatgcagacaaagaaacagagatagtgaaaaaacttgagacagaggaaacagttcctgaaactgatgtagaaaccaaaaaaccagaggttgcttcctgggtgcactttgataatttgaaaggtgggaaacagttaaataaatacgatccattcagtagaaaccctctgttctgtggagctgaaaatacaagtctttgggaactcaaaaagttatctgtgcattttcatccctccgtggccctttttgcaaagaccatccttcagggaaactatattcagtattcaggggacccactgcaggatttcactctaatgagatttttggatcgatttgtataccgaaatccaaagccccataaaggcaaagaaaacacagatagtgttgtgatgcagccgaaaagaaaacattttattaaggatattcgtcatcttcctgtgaacagtaaggagttccttgcaaaagaagaaagccaaataccagtggatgaagtgtttttccacaggtattataaaaaagttgctgttaaagagaaacaaaaacgggatgcagatgaagaaagtatagaagacgtggatgatgaagaatttgaagagctgattgacacatttgaagatgataactgtttcagctctggaaaggatgatatggattttgctggaaacgtgaaaaagagaacaaaaggagctaaggataacacattagatgaagattcagaaggtagtgatgatgaacttggtaacctggatgacgatgaagtttctttaggaagtatggatgatgaagaatttgctgaagttgatgaagatggaggaacattcatggatgtgttagatgatgaaagtgagagcgttccagaacttgaagtccactccaaagtcagtactaagaaaagcaagagaaaaggtacagatgattttgactttgctggctcatttcaagggccaagaaaaaagaaaagaaacttaaatgattccagcctatttgtatctgctgaagaggtaaggctaatgtactgttttaacaagctagctattctacattatttttagttttctaataaatttatcgtttttgtttaaaagtttggccatctattggatgaaaatatgggatccaagtttgataacattggcatgaatgccatggctaacaaagataatgcaagtaagtaacttaaatttttttattgatgttttaaaaatagctttggcttggaacttcagaagataggaaattttcgttacttt

SEQ ID NO: 359537 - DNA, 2694 bp, Homo sapiens
agcggaggctgagtttcacgcgcgtatgctttgcccgccatggccgcagtcaaggagcctttggagttccatgccaagcggccttggcgccccgaggaggcagtagaagatccggacgaggaggatgaggataatactagtgaagccgagaatgggttctccctggaggaagtgttacggctcggaggcaccaagcaagattaccttatgctggctactttggatgagaatgaggaagtgatagatggaggcaaaaaaggagcaatcgatgaccttcagcaaggtgaattggaagcatttattcaaaatcttaatttggcgaagtatacaaaagcttccttaattgaagaagatgaaccagctgaaaaagaaaattccagcaaaaaagaagtaaaaatacctaaaataaataataaaaatacagcagaaagtcaaaggacatcagttaataaggtgaaaaataagaataggccagaaccacattctgatgagaatggcagtaccacaccgaaagtaaagaaagataaacagaacatctttgaattttttgagagacagactttgttacttaggcctggaggcaaatggtatgatctggagtacagcaatgaatattctttgaaaccccagcctcaggatgttgtatctaagtacaaaacccttgctcagaagctgtatcagcatgaaatcaacttattcaaaagtaagacgaatagtcaaaagggagcctcttctacctggatgaaggcaattgtgtcatcggggacactaggtgacaggatggcagccatgattcttcttattcaggatgatgccgttcacacacttcagtttgtagaaactcttgtgaaccttgttaaaaagaagggcagcaaacagcagtgccttatggccttggatactttcaaagagttgcttatcacagaccttttgccagacaatcggaagctgaggattttcagccagcgtccttttgacaaactggaacagttgtccagtggcaacaaggactcaagagatagaagactgatattatggtattttgaacaccagctgaaacacttagtggctgaatttgtgcaggtcttagaaactttaagtcatgatacattagtaaccactaaaactcgagcccttaccgtggctcatgagctgctttgtaacaagcctgaggaagaaaaggctcttcttgtgcaagtggtaaataaactgggagatcctcagaacagaattgccacaaaagcatcccatctgttagagacattactttgtaaacatcccaatatgaaaggagttgtgtctggtgaagtagaaaggctactcttccgctcaaatatcagctccaaagctcaatattatgcaatttgctttttaaatcaaatggctctgtcccatgaagaaagtgaattggctaacaaattaataactgtttacttttgcttttttcggacttgtgtcaaaaaaaaagatgttgaatcaaaaatgcttagcgcccttttaacaggtgtgaatagggcatacccttattcccagactggtgatgacaaagtaagggagcagattgacacactgtttaaagtgttgcatattgtgaattttaataccagtgtccaggctttaatgttgcttttccaagtaatgaattctcagcagacaatatcggatcgatattacacagcattatacaggaagatgttggatccagggttgatgacgtgttccaagcaagctatgtttcttaaccttgtctacaaatctctgaaagctgacattgtgttgcgccgggtgaaggcttttgtgaagaggttacttcaagttacttgtcaacagatgccaccatttatatgtggagctttatatcttgtgtctgagatccttaaagcaaaaccaggtttaagaagccaactagatgatcatccggagtctgatgatgaagaaaattttattgatgcaaatgatgatgaagacatggaaaaattcactgatgcagacaaagaaacagagatagtgaaaaaacttgagacagaggaaacagttcctgaaactgatgtagaaaccaaaaaaccagaggttgcttcctgggtgcactttgataatttgaaaggtgggaaacagttaaataaatacgatccattcagtagaaaccctctgttctgtggagctgaaaatacaagtctttgggaactcaaaaagttatctgtgcattttcatccctccgtggccctttttgcaaagaccatccttcagggaaactatattcagtattcaggggacccactgcaggatttcactctaatgagatttttggatcgatttgtataccgaaatccaaagccccataaaggcaaagaaaacacagatagtgttgtgatgcagccgaaaagaaaacattttattaaggatattcgtcatcttcctggtaagtataaaccttagacagttgaaactgaaaagacaatataagacaaagatgcataaattgtattattctttgttctaatttatcagaataaaacctgagcatcaaagacattatccatcttttttcccaagaataggtattcttaaatctactgtatctgactgggcctttttttttttttttttaactttattacagcaaatttgaaacatatccaaaataaacaaaatagtatgatgaaccccctccccattaccatcacccagctttga

SEQ ID NO: 359538 - DNA, 737 bp, Homo sapiens
caaagttcatcacggttctccgcatacgtcagaaactgaccgcagtacttaagcactaccacattagatgaagattcagaaggtagtgatgatgaacttggtaacctggatgacgatgaagtttctttaggaagtatggatgatgaagaatttgctgaagttgatgaagatggaggaacattcatggatgtgttagatgatgaaagtgagagcgttccagaacttgaagtccactccaaagtcagtactaagaaaagcaagagaaaaggtacagatgattttgactttgctggctcatttcaagggccaagaaaaaagaaaagaaacttaaatgattccagcctatttgtatctgctgaagagtttggccatctattggatgaaaatatgggatccaagtttgataacattggcatgaatgccatggctaacaaagataatgcaagtctcaaacagcttagatgggaggctgaacgtgatgactggctacacaacagagatgcaaaaagtatcatcaagaaaaagaaacattttaaaaagaagaggattaaaaccactcaaaaaactaaaaaacaaaggaaatgagttattaatgtaaattatagattaaaattctacttacatctaatttttgctgttcaaccatgttttttgatctagctctctgattccatacattccagacttctcagtggatttgtaataaactataaataaaaatagctctcatttataaa

SEQ ID NO: 359539 - DNA, 650 bp, Homo sapiens
tcatctgaacagttctattaggatgttgttagctttttgaaaatattatatactaactcttaaattatatttaaatgccagctacccaatggtgccagaagattattgcaattgtttttacccaagtataatttttaaaataaaatcatgttgcattgcatttttctaaaatcattagatttataattgaataatgtagacttacaattttttttagggccaagaaaaaagaaaagaaacttaaatgattccagcctatttgtatctgctgaagagtttggccatctattggatgaaaatatgggatccaagtttgataacattggcatgaatgccatggctaacaaagataatgcaagtctcaaacagcttagatgggaggctgaacgtgatgactggctacacaacagagatgcaaaaagtatcatcaagaaaaagaaacattttaaaaagaagaggattaaaaccactcaaaaaactaaaaaacaaaggaaatgagttattaatgtaaattatagattaaaattctacttacatctaatttttgctgttcaaccatgttttttgatctagctctctgattccatacattccagacttctcagtggatttgtaataaactataaataaaaatagctctcatttataaa

SEQ ID NO: 359540 - DNA, 484 bp, Homo sapiens
tacttggattcatagacataatttgaattaagtttttaaatccccgctccacttttcagggaaactatattcagtattcaggggacccactgcaggatttcactctaatgagatttttggatcgatttgtataccgaaatccaaagccccataaaggcaaaggtatgcttctatttagtgaattatttggctttcatttttaatacataataaacaatatgagcttataactaggttttgcattatactgtcataattttacatttcagaaaacacagatagtgttgtgatgcagccgaaaagaaaacattttattaaggatattcgtcatcttcctggtaagtataaaccttagacagttgaaactgaaaagacaatataagacaaagatgcataaattgtattattctttgttctaatttatcagaataaaacctgagcatcaaagacattatccatcttttttcccaagaataggtattct

SEQ ID NO: 359541 - DNA, 3628 bp, Homo sapiens
agcggaggctgagtttcacgcgcgtatgctttgcccgccatggccgcagtcaaggagcctttggagttccatgccaagcggccttggcgccccgaggaggcagtagaagatccggacgaggaggatgaggataatactagtgaagccgagaatgggttctccctggaggaagtgttacggctcggaggcaccaagcaagattaccttatgctggctactttggatgagaatgaggaagtgatagatggaggcaaaaaaggagcaatcgatgaccttcagcaaggtgaattggaagcatttattcaaaatcttaatttggcgaagtatacaaaagcttccttaattgaagaagatgaaccagctgaaaaagaaaattccagcaaaaaagaagtaaaaatacctaaaataaataataaaaatacagcagaaagtcaaaggacatcagttaataaggtgaaaaataagaataggccagaaccacattctgatgagaatggcagtaccacaccgaaagtaaagaaagataaacagaacatctttgaattttttgagagacagactttgttacttaggcctggaggcaaatggtatgatctggagtacagcaatgaatattctttgaaaccccagcctcaggatgttgtatctaagtacaaaacccttgctcagaagctgtatcagcatgaaatcaacttattcaaaagtaagacgaatagtcaaaagggagcctcttctacctggatgaaggcaattgtgtcatcggggacactaggtgacaggatggcagccatgattcttcttattcaggatgatgccgttcacacacttcagtttgtagaaactcttgtgaaccttgttaaaaagaagggcagcaaacagcagtgccttatggccttggatactttcaaagagttgcttatcacagaccttttgccagacaatcggaagctgaggattttcagccagcgtccttttgacaaactggaacagttgtccagtggcaacaaggactcaagagatagaagactgatattatggtattttgaacaccagctgaaacacttagtggctgaatttgtgcaggtcttagaaactttaagtcatgatacattagtaaccactaaaactcgagcccttaccgtggctcatgagctgctttgtaacaagcctgaggaagaaaaggctcttcttgtgcaagtggtaaataaactgggagatcctcagaacagaattgccacaaaagcatcccatctgttagagacattactttgtaaacatcccaatatgaaaggagttgtgtctggtgaagtagaaaggctactcttccgctcaaatatcagctccaaagctcaatattatgcaatttgctttttaaatcaaatggctctgtcccatgaagaaagtgaattggctaacaaattaataactgtttacttttgcttttttcggacttgtgtcaaaaaaaaagatgttgaatcaaaaatgcttagcgcccttttaacaggtgtgaatagggcatacccttattcccagactggtgatgacaaagtaagggagcagattgacacactgtttaaagtgttgcatattgtgaattttaataccagtgtccaggctttaatgttgcttttccaagtaatgaattctcagcagacaatatcggatcgatattacacagcattatacaggaagatgttggatccagggttgatgacgtgttccaagcaagctatgtttcttaaccttgtctacaaatctctgaaagctgacattgtgttgcgccgggtgaaggcttttgtgaagaggttacttcaagttacttgtcaacagatgccaccatttatatgtggagctttatatcttgtgtctgagatccttaaagcaaaaccaggtttaagaagccaactagatgatcatccggagtctgatgatgaagaaaattttattgatgcaaatgatgatgaagacatggaaaaattcactgatgcagacaaagaaacagagatagtgaaaaaacttgagacagaggaaacagttcctgaaactgatgtagaaaccaaaaaaccagaggttgcttcctgggtgcactttgataatttgaaaggtgggaaacagttaaataaatacgatccattcagtagaaaccctctgttctgtggagctgaaaatacaagtctttgggaactcaaaaagttatctgtgcattttcatccctccgtggccctttttgcaaagaccatccttcagggaaactatattcagtattcaggggacccactgcaggatttcactctaatgagatttttggatcgatttgtataccgaaatccaaagccccataaaggcaaagaaaacacagatagtgttgtgatgcagccgaaaagaaaacattttattaaggatattcgtcatcttcctgtgaacagtaaggagttccttgcaaaagaagaaagccaaataccagtggatgaagtgtttttccacaggtattataaaaaagttgctgttaaagagaaacaaaaacgggatgcagatgaagaaagtatagaagacgtggatgatgaagaatttgaagagctgattgacacatttgaagatgataactgtttcagctctggaaaggatgatatggattttgctggaaacgtgaaaaagagaacaaaaggagctaaggataacacattagatgaagattcagaaggtagtgatgatgaacttggtaacctggatgacgatgaagtttctttaggaagtatggatgatgaagaatttgctgaagttgatgaagatggaggaacattcatggatgtgttagatgatgaaagtgagagcgttccagaacttgaagtccactccaaagtcagtactaagaaaagcaagagaaaaggtacagatgattttgactttgctggctcatttcaagggccaagaaaaaagaaaagaaacttaaatgattccagcctatttgtatctgctgaagagtttggccatctattggatgaaaatatgggatccaagtttgataacattggcatgaatgccatggctaacaaagataatgcaagtctcaaacagcttagatgggaggctgaacgtgatgactggctacacaacagagatgcaaaaagtatcatcaagaaaaagaaacattttaaaaagaagaggattaaaaccactcaaaaaactaaaaaacaaaggaaatgagttattaatgtaaattatagattaaaattctacttacatctaatttttgctgttcaaccatgttttttgatctagctctctgattccatacattccagacttctcagtggatttgtaataaactataaataaaaatagctctcatttataaagtcatgtggaaacattgttaaaattaaatgtattgaaaaaaacaacttcttttttccatattgctacataacaaaatgaaaaagaggacagtaggattacagacttcacatataagtcctggcatctctgatcattgtaatgagcactatttcgtctaactacatgatgtcatcttgttcagtctttatctacttgacagagaaagagacagctccaagaagttagcaaacctgagatgaaactgatcttttaaaaccaaaggtttaaactg

SEQ ID NO: 359542 - DNA, 3266 bp, Homo sapiens
cgtggagagttccgaaggtggctaggctgactgccccgccgcttccgcgctgcgtagagcgcgggcgtccaggaccgagatcccagcctctgaagcatgtgttcgcaagattaccttatgctggctactttggatgagaatgaggaagtgatagatggaggcaaaaaaggagcaatcgatgaccttcagcaaggtgaattggaagcatttattcaaaatcttaatttggcgaagtatacaaaagcttccttaattgaagaagatgaaccagctgaaaaagaaaattccagcaaaaaagaagtaaaaatacctaaaataaataataaaaatacagcagaaagtcaaaggacatcagttaataaggtgaaaaataagaataggccagaaccacattctgatgagaatggcagtaccacaccgaaagtaaagaaagataaacagaacatctttgaattttttgagagacagactttgttacttaggcctggaggcaaatggtatgatctggagtacagcaatgaatattctttgaaaccccagcctcaggatgttgtatctaagtacaaaacccttgctcagaagctgtatcagcatgaaatcaacttattcaaaagtaagacgaatagtcaaaagggagcctcttctacctggatgaaggcaattgtgtcatcggggacactaggtgacaggatggcagccatgattcttcttattcaggatgatgccgttcacacacttcagtttgtagaaactcttgtgaaccttgttaaaaagaagggcagcaaacagcagtgccttatggccttggatactttcaaagagttgcttatcacagaccttttgccagacaatcggaagctgaggattttcagccagcgtccttttgacaaactggaacagttgtccagtggcaacaaggactcaagagatagaagactgatattatggtattttgaacaccagctgaaacacttagtggctgaatttgtgcaggtcttagaaactttaagtcatgatacattagtaaccactaaaactcgagcccttaccgtggctcatgagctgctttgtaacaagcctgaggaagaaaaggctcttcttgtgcaagtggtaaataaactgggagatcctcagaacagaattgccacaaaagcatcccatctgttagagacattactttgtaaacatcccaatatgaaaggagttgtgtctggtgaagtagaaaggctactcttccgctcaaatatcagctccaaagctcaatattatgcaatttgctttttaaatcaaatggctctgtcccatgaagaaagtgaattggctaacaaattaataactgtttacttttgcttttttcggacttgtgtcaaaaaaaaagatgttgaatcaaaaatgcttagcgcccttttaacaggtgtgaatagggcatacccttattcccagactggtgatgacaaagtaagggagcagattgacacactgtttaaagtgttgcatattgtgaattttaataccagtgtccaggctttaatgttgcttttccaagtaatgaattctcagcagacaatatcggatcgatattacacagcattatacaggaagatgttggatccagggttgatgacgtgttccaagcaagctatgtttcttaaccttgtctacaaatctctgaaagctgacattgtgttgcgccgggtgaaggcttttgtgaagaggttacttcaagttacttgtcaacagatgccaccatttatatgtggagctttatatcttgtgtctgagatccttaaagcaaaaccaggtttaagaagccaactagatgatcatccggagtctgatgatgaagaaaattttattgatgcaaatgatgatgaagacatggaaaaattcactgatgcagacaaagaaacagagatagtgaaaaaacttgagacagaggaaacagttcctgaaactgatgtagaaaccaaaaaaccagaggttgcttcctgggtgcactttgataatttgaaaggtgggaaacagttaaataaatacgatccattcagtagaaaccctctgttctgtggagctgaaaatacaagtctttgggaactcaaaaagttatctgtgcattttcatccctccgtggccctttttgcaaagaccatccttcagggaaactatattcagtattcaggggacccactgcaggatttcactctaatgagatttttggatcgatttgtataccgaaatccaaagccccataaaggcaaagaaaacacagatagtgttgtgatgcagccgaaaagaaaacattttattaaggatattcgtcatcttcctgtgaacagtaaggagttccttgcaaaagaagaaagccaaataccagtggatgaagtgtttttccacaggtattataaaaaagttgctgttaaagagaaacaaaaacgggatgcagatgaagaaagtatagaagacgtggatgatgaagaatttgaagagctgattgacacatttgaagatgataactgtttcagctctggaaaggatgatatggattttgctggaaacgtgaaaaagagaacaaaaggagctaaggataacacattagatgaagattcagaaggtagtgatgatgaacttggtaacctggatgacgatgaagtttctttaggaagtatggatgatgaagaatttgctgaagttgatgaagatggaggaacattcatggatgtgttagatgatgaaagtgagagcgttccagaacttgaagtccactccaaagtcagtactaagaaaagcaagagaaaaggtacagatgattttgactttgctggctcatttcaagggccaagaaaaaagaaaagaaacttaaatgattccagcctatttgtatctgctgaagagtttggccatctattggatgaaaatatgggatccaagtttgataacattggcatgaatgccatggctaacaaagataatgcaagtctcaaacagcttagatgggaggctgaacgtgatgactggctacacaacagagatgcaaaaagtatcatcaagaaaaagaaacattttaaaaagaagaggattaaaaccactcaaaaaactaaaaaacaaaggaaatgagttattaatgtaaattatagattaaaattctacttacatctaatttttgctgttcaaccatgttttttgatctagctctctgattccatacattccagacttctcagtggatttgtaataaactataaataaaaatagctctcatttataaa

SEQ ID NO: 359543 - DNA, 1498 bp, Homo sapiens
tcatacgccaggtacatgatcctccggaagtctgataatgaggacattgctcgttgctgcaagatgatgcaggataaatgatgtgacatgacttgcgactgcatcgacacgactaaacgaaacgagacgatcgttgaaccgaactgtacagagcggatccagatcctgtactcggatggtataaacgaatctatcagaggtgtagcttcctgcgatgccacctattgtactaatttagcagaccgcgtgggaaacagttaaataaatacgatccattcagtagaaaccctctgttctgtggagctgaaaatacaagtctttgggaactcaaaaagttatctgtgcattttcatccctccgtggccctttttgcaaagaccatccttcagggaaactatattcagtattcaggggacccactgcaggatttcactctaatgagatttttggatcgatttgtataccgaaatccaaagccccataaaggcaaagaaaacacagatagtgttgtgatgcagccgaaaagaaaacattttattaaggatattcgtcatcttcctgtgaacagtaaggagttccttgcaaaagaagaaagccaaataccagtggatgaagtgtttttccacaggtattataaaaaagttgctgttaaagagaaacaaaaacgggatgcagatgaagaaagtatagaagacgtggatgatgaagaatttgaagagctgattgacacatttgaagatgataactgtttcagctctggaaaggatgatatggattttgctggaaacgtgaaaaagagaacaaaaggagctaaggataacacattagatgaagattcagaaggtagtgatgatgaacttggtaacctggatgacgatgaagtttctttaggaagtatggatgatgaagaatttgctgaagttgatgaagatggaggaacattcatggatgtgttagatgatgaaagtgagagcgttccagaacttgaagtccactccaaagtcagtactaagaaaagcaagagaaaaggtacagatgattttgactttgctggctcatttcaagggccaagaaaaaagaaaagaaacttaaatgattccagcctatttgtatctgctgaagagtttggccatctattggatgaaaatatgggatccaagtttgataacattggcatgaatgccatggctaacaaagataatgcaagtctcaaacagcttagatgggaggctgaacgtgatgactggctacacaacagagatgcaaaaagtatcatcaagaaaaagaaacattttaaaaagaagaggattaaaaccactcaaaaaactaaaaaacaaaggaaatgagttattaatgtaaattatagattaaaattctacttacatctaatttttgctgttcaaccatgttttttgatctagctctctgattccatacattccagacttctcagtggatttgtaataaactataaataaaaatagctctcatttataaa

SEQ ID NO: 359544 - DNA, 2707 bp, Homo sapiens
agcggaggctgagtttcacgcgcgtatgctttgcccgccatggccgcagtcaaggagcctttggagttccatgccaagcggccttggcgccccgaggaggcagtagaagatccggacgaggaggatgaggataatactagtgaagccgagaatgggttctccctggaggaagtgttacggctcggaggcaccaagcaagattaccttatgctggctactttggatgagaatgaggaagtgatagatggaggcaaaaaaggagcaatcgatgaccttcagcaaggtgaattggaagcatttattcaaaatcttaatttggcgaagtatacaaaagcttccttaattgaagaagatgaaccagctgaaaaagaaaattccagcaaaaaagaagtaaaaatacctaaaataaataataaaaatacagcagaaagtcaaaggacatcagttaataaggtgaaaaataagaataggccagaaccacattctgatgagaatggcagtaccacaccgaaagtaaagaaagataaacagaacatctttgaattttttgagagacagactttgttacttaggcctggaggcaaatggtatgatctggagtacagcaatgaatattctttgaaaccccagcctcaggatgttgtatctaagtacaaaacccttgctcagaagctgtatcagcatgaaatcaacttattcaaaagtaagacgaatagtcaaaagggagcctcttctacctggatgaaggcaattgtgtcatcggggacactaggtgacaggatggcagccatgattcttcttattcaggatgatgccgttcacacacttcagtttgtagaaactcttgtgaaccttgttaaaaagaagggcagcaaacagcagtgccttatggccttggatactttcaaagagttgcttatcacagaccttttgccagacaatcggaagctgaggattttcagccagcgtccttttgacaaactggaacagttgtccagtggcaacaaggactcaagagatagaagactgatattatggtattttgaacaccagctgaaacacttagtggctgaatttgtgcaggtcttagaaactttaagtcatgatacattagtaaccactaaaactcgagcccttaccgtggctcatgagctgctttgtaacaagcctgaggaagaaaaggctcttcttgtgcaagtggtaaataaactgggagatcctcagaacagaattgccacaaaagcatcccatctgttagagacattactttgtaaacatcccaatatgaaaggagttgtgtctggtgaagtagaaaggctactcttccgctcaaatatcagctccaaagctcaatattatgcaatttgctttttaaatcaaatggctctgtcccatgaagaaagtgaattggctaacaaattaataactgtttacttttgcttttttcggacttgtgtcaaaaaaaaagatgttgaatcaaaaatgcttagcgcccttttaacaggtgtgaatagggcatacccttattcccagactggtgatgacaaagtaagggagcagattgacacactgtttaaagtgttgcatattgtgaattttaataccagtgtccaggctttaatgttgcttttccaagtaatgaattctcagcagacaatatcggatcgatattacacagcattatacaggaagatgttggatccagggttgatgacgtgttccaagcaagctatgtttcttaaccttgtctacaaatctctgaaagctgacattgtgttgcgccgggtgaaggcttttgtgaagaggttacttcaagttacttgtcaacagatgccaccatttatatgtggagctttatatcttgtgtctgagatccttaaagcaaaaccaggtttaagaagccaactagatgatcatccggagtctgatgatgaagaaaattttattgatgcaaatgatgatgaagacatggaaaaattcactgatgcagacaaagaaacagagatagtgaaaaaacttgagacagaggaaacagttcctgaaactgatgtagaaaccaaaaaaccagaggttgcttcctgggtgcactttgataatttgaaaggtgggaaacagttaaataaatacgatccattcagtagaaaccctctgttctgtggagctgaaaatacaagtctttgggaactcaaaaagttatctgtgcattttcatccctccgtggccctttttgcaaagaccatccttcagggaaactatattcagtattcaggggacccactgcaggatttcactctaatgagatttttggatcgatttgtataccgaaatccaaagccccataaaggcaaagaaaacacagatagtgttgtgatgcagccgaaaagaaaacattttattaaggatattcgtcatcttcctgtgaacagtaaggagttccttgcaaaagaagaaagccaaataccagtggatgaagtgtttttccacaggtattataaaaaagttgctgttaaagagaaacaaaaacgggatgcagatgaagaaagtatagaagacgtggatgatgaagaatttgaagagctgattgacacatttgaagatgataactgtttcagctctggaaaggatgatatggattttgctggatttattgtggacggatgtggatatattctgtacaggaacaacacatatggaagtggactgaagc

SEQ ID NO: 359545 - DNA, 2043 bp, Homo sapiens
agcggaggctgagtttcacgcgcgtatgctttgcccgccatggccgcagtcaaggagcctttggagttccatgccaagcggccttggcgccccgaggaggcagtagaagatccggacgaggaggatgaggataatactagtgaagccgagaatgggttctccctggaggaagtgttacggctcggaggcaccaagcaagattaccttatgctggctactttggatgagaatgaggaagtgatagatggaggcaaaaaaggagcaatcgatgaccttcagcaaggtgaattggaagcatttattcaaaatcttaatttggcgaagtatacaaaagcttccttaattgaagaagatgaaccagctgaaaaagaaaattccagcaaaaaagaagtaaaaatacctaaaataaataataaaaatacagcagaaagtcaaaggacatcagttaataaggtgaaaaataagaataggccagaaccacattctgatgagaatggcagtaccacaccgaaagtaaagaaagataaacagaacatctttgaattttttgagagacagactttgttacttaggcctggaggcaaatggtatgatctggagtacagcaatgaatattctttgaaaccccagcctcaggatgttgtatctaagtacaaaacccttgctcagaagctgtatcagcatgaaatcaacttattcaaaagtaagacgaatagtcaaaagggagcctcttctacctggatgaaggcaattgtgtcatcggggacactaggtgacaggatggcagccatgattcttcttattcaggatgatgccgttcacacacttcagtttgtagaaactcttgtgaaccttgttaaaaagaagggcagcaaacagcagtgccttatggccttggatactttcaaagagttgcttatcacagaccttttgccagacaatcggaagctgaggattttcagccagcgtccttttgacaaactggaacagttgtccagtggcaacaaggactcaagagatagaagactgatattatggtattttgaacaccagctgaaacacttagtggctgaatttgtgcaggtcttagaaactttaagtcatgatacattagtaaccactaaaactcgagcccttaccgtggctcatgagctgctttgtaacaagcctgaggaagaaaaggctcttcttgtgcaagtggtaaataaactgggagatcctcagaacagaattgccacaaaagcatcccatctgttagagacattactttgtaaacatcccaatatgaaaggagttgtgtctggtgaagtagaaaggctactcttccgctcaaatatcagctccaaagctcaatattatgcaatttgctttttaaatcaaatggctctgtcccatgaagaaagtgaattggctaacaaattaataactgtttacttttgcttttttcggacttgtgtcaaaaaaaaagatgttgaatcaaaaatgcttagcgcccttttaacaggtgtgaatagggcatacccttattcccagactggtgatgacaaagtaagggagcagattgacacactgtttaaagtgttgcatattgtgaattttaataccagtgtccaggctttaatgttgcttttccaagtaatgaattctcagcagacaatatcggatcgatattacacagcattatacaggtaagaacatacccttccaatatgagacatgaaataataacttgatgtagtacagcacaagcagtgccctctgtggggcaagaaaaagagttagaaaatttggttttaggccccctcagcagcttgctactcgccaccttcaagtaagtcacttaatctttgtttccctgatgggcacaaattatattagatgctttgaatacatttttcattttgagaggttgtaaaatacagaaaaatacccaaaagattcattcatatctaccacctagtatttcagaattaacattttgctatatttgttttaaatcttttgggatattaaagaaataaaattgcagatataattgcagtt

SEQ ID NO: 359546 - DNA, 290 bp, Homo sapiens
tttttttaacacagtgtcaaatccattactgtattgccatccttctcattctatacaaaaatcttcttgttttcaaactggatgatatatcttctgaggatttctttcaccttattaacttcaatctattcatctgaggatatgagtcggccctatgtgctaggcactgcaacgggccttggaatatcatgaaaataatgtcagcaccacagttagctcttacagagcactatgtaccaggcactgtgcaaatatcttcacatatattaacttccttaagccttgcaacc

SEQ ID NO: 359547 - DNA, 2096 bp, Homo sapiens
  misc_feature (1290)..(1290): n is a, c, g, or t
gcaggccggccccaccctcctgacggtcaccctggtccctgaagctgcctggatatggtcgccatgcaggaagccgcccagcacctcctcggcacacacgacttcagcgccttccagtccgctggcagcccggtgccgagccccgtgcgaacgctgcgccgggtctccgtttccccaggccaagccagccccttggtcacccccgaggagagcaggtgaggaagggcccctgggctgtggccctgccctcaagtcacgtgctgattttagctccagcacctcccccagttttaaggcaaggcgaggccctcaacacacacctgcggcacccggccatcagggtcctgcgggccttccgagtgcccagcgacttccacgctcgtcacgcagccacgtcccggacctacctgtaccgcctggccactggctgtcaccggcgtgatgagctgccggtgtttgaacgcaacctatgctggactctcccggcagagtgagtgtggccctgacagcggggagggggcgggcaggccggccccaccctcctgacggtcaccctggtccctgaagctgcctggatatggtcgccatgcaggaagccgcccagcacctcctcggcacacacgacttcagcgccttccagtccgctggcagcccggtgccgagccccgtgcgaacgctgcgccgggtctccgtttccccaggctggggagcggagaacagggaaggctgcttgtctctgaaaaacccctgccatgcctgatggaagaatgttggcagctactggaaaggtctcactggtgccagtggttctggtggggtggtttctgctgcccccagcactgtcccgagggccacccaccaggtggcagcttctgaccagaacctcccctattggggtgagccctgaaggggggaagaacttctgccagccccagacttctgtggcagagcagcaggtacaggactgggggtctctggcacccgcaccagccacgttcccagaccctgcaccaggaccctaggtgagggcccagggcaagcccctctgggatggccaggctacctgcccagcctccagggtcctgctgcctccttgcccaagcattgtttctctggttttaagcccctccaatgggcctcactgggggcaggagatcagccagggcccctggtggccaagctagtgggaaccaggctcgtctttaggcccaccctgtcactctcccgtccaaggccacatagtaggctgaggatggcaaacactgccccacagacacctacaggtacgtntttttccaggaagctgcggttctggaacctggagtttgagagccagtctttcctgtatagacaggtaggctctgttctggggccgtccccagggggtggggctgagggtgggcaggcccctgtgcagtcttggctctgggtcgtgggcggctctgggtcacaggtacggaggatgacggctgtgctggtgggtcacgggcggctctgggtcacaggtacggaggatgacggctgtgctggtgggtcacgggcggctctgggtcacaggtggctctgggtcacaggtacggaggatgacggctgtgctggtggccgtggggctgggggctttggcacctgcccaggtgaagacgattctggagagccaagatcccctgggcaagcaccagacacgtgtagccccagcccacggcttattcctcaagtcagtgctgtacgggaacctcggtgctgcctcctgcaccctgcaggggccacagttcgggagccacggatgaccctggacactcaagccaaagttaggccacaccaggcccaaccctgtgctggtcaagccagggcagtcacagctgcttggggcccacagcactgctgcctggtctccacagtagcctccctgcccgggtcccagcaccctggatgcccgtctctgtcccaggcgggatggggcacagtgcaggacacagccatgtacaccaagaagagagtaccaagtagtcttttgttcagcttttactggaaactgctgtctaggaccacctgccctaaccaggaataaaggcaagacagcctggaaaaaaaaaaat

SEQ ID NO: 359548 - DNA, 1181 bp, Homo sapiens
gccgcctctgacgccaccggctgggctccgccatgagttcggcgccggcctcaggctccgtgcgcgcgcgctatcttgtgtacttccagtacgtgggcaccgactttaacggggtcgcggccgtcaggggcactcagcgcgccgtcggggtccagaactacctggaggaggccgccgagcggctgaattccgtggagccggtcaggttcaccatctccagccgcacggacgccggggtccacgccctgagcaacgcggcgcacctggacgtccagcgccgctcaggccggccgcccttcccgcccgaggtcctggccgaggccctcaacacacacctgcggcacccggccatcagggtcctgcgggccttccgagtgcccagcgacttccacgctcgtcacgcagccacgtcccggacctacctgtaccgcctggccactggctgtcaccggcgtgatgagctgccggtgtttgaacgcaacctatgctggactctcccggcagactgcctggatatggtcgccatgcaggaagccgcccagcacctcctcggcacacacgacttcagcgccttccagtccgctggcagcccggtgccgagccccgtgcgaacgctgcgccgggtctccgtttccccaggccaagccagccccttggtcacccccgaggagagcaggaagctgcggttctggaacctggagtttgagagccagtctttcctgtatagacaggtacggaggatgacggctgtgctggtggccgtggggctgggggctttggcacctgcccaggtgaagacgattctggagagccaagatcccctgggcaagcaccagacacgtgtagccccagcccacggcttattcctcaagtcagtgctgtacgggaacctcggtgctgcctcctgcaccctgcaggggccacagttcgggagccacggatgaccctggacactcaagccaaagttaggccacaccaggcccaaccctgtgctggtcaagccagggcagtcacagctgcttggggcccacagcactgctgcctggtctccacagtagcctccctgcccgggtcccagcaccctggatgcccgtctctgtcccaggcgggatggggcacagtgcaggacacagccatgtacaccatttgagagacccgggatcctcatagagcagctcgac

SEQ ID NO: 359549 - DNA, 1448 bp, Homo sapiens
gccgcctctgacgccaccggctgggctccgccatgagttcggcgccggcctcaggctccgtgcgcgcgcgctatcttgtgtacttccagtacgtgggcaccgactttaacggggtcgcggccgtcaggggcactcagcgcgccgtcggggtccagaactacctggaggaggccgccgagcggctgaattccgtggagccggtcaggttcaccatctccagccgcacggacgccggggtccacgccctgagcaacgcggcgcacctggacgtccagcgccgctcaggccggccgcccttcccgcccgaggtcctggccgaggccctcaacacacacctgcggcacccggccatcagggtcctgcgggccttccgagtgcccagcgacttccacgctcgtcacgcagccacgtcccggacctacctgtaccgcctggccactggctgtcaccggcgtgatgagctgccggtgtttgaacgcaacctatgctggactctcccggcagagaagccgcccagcacctcctcggcacacacgacttcagcgccttccagtccgctggcagcccggtgccgagccccgtgcgaacgctgcgccgggtctccgtttccccaggccaagccagccccttggtcacccccgaggagagcaggaagctgcggttctggaacctggagtttgagagccagtctttcctgtatagacaggtaggctctgttctggggccgtccccagggggtggggctgagggtgggcaggcccctgtgcagtcttggctctgggtcgtgggcggctctgggtcacaggtacggaggatgacggctgtgctggtgggtcacgggcggctctgggtcacaggtacggaggatgacggctgtgctggtgggtcacgggcggctctgggtcacaggtggctctgggtcacaggtacggaggatgacggctgtgctggtggccgtggggctgggggctttggcacctgcccaggtgaagacgattctggagagccaagatcccctgggcaagcaccagacacgtgtagccccagcccacggcttattcctcaagtcagtgctgtacgggaacctcggtgctgcctcctgcaccctgcaggggccacagttcgggagccacggatgaccctggacactcaagccaaagttaggccacaccaggcccaaccctgtgctggtcaagccagggcagtcacagctgcttggggcccacagcactgctgcctggtctccacagtagcctccctgcccgggtcccagcaccctggatgcccgtctctgtcccaggcgggatggggcacagtgcaggacacagccatgtacaccaagaagagagtaccaagtagtcttttgttcagcttttactggaaactgctgtctaggaccacctgccctaaccaggaataaaggcaagacagcctggaaaaaaaaaaat

SEQ ID NO: 359550 - DNA, 1233 bp, Homo sapiens
tcggggaaggaagcggccctggcctcagacggcggcggagaccccagggcagggcgcccccggtaacctccgcccgcttctgcccgcagcggggtcgcggccgtcaggggcactcagcgcgccgtcggggtccagaactacctggaggaggccgccgagcggctgaattccgtggagccggtcaggttcaccatctccagccgcacggacgccggggtccacgccctgagcaacgcggcgcacctggacgtccagcgccgctcaggccggccgcccttcccgcccgaggtcctggccgaggccctcaacacacacctgcggcacccggccatcagggtcctgcgggccttccgagtgcccagcgacttccacgctcgtcacgcagccacgtcccggacctacctgtaccgcctggccactggctgtcaccggcgtgatgagctgccggtgtttgaacgcaacctatgctggactctcccggcagactgcctggatatggtcgccatgcaggaagccgcccagcacctcctcggcacacacgacttcagcgccttccagtccgctggcagcccggtgccgagccccgtgcgaacgctgcgccgggtctccgtttccccaggccaagccagccccttggtcacccccgaggagagcaggaagctgcggttctggaacctggagtttgagagccagtctttcctgtatagacaggtacggaggatgacggctgtgctggtggccgtggggctgggggctttggcacctgcccaggtgaagacgattctggagagccaagatcccctgggcaagcaccagacacgtgtagccccagcccacggcttattcctcaagtcagtgctgtacgggaacctcggtgctgcctcctgcaccctgcaggggccacagttcgggagccacggatgaccctggacactcaagccaaagttaggccacaccaggcccaaccctgtgctggtcaagccagggcagtcacagctgcttggggcccacagcactgctgcctggtctccacagtagcctccctgcccgggtcccagcaccctggatgcccgtctctgtcccaggcgggatggggcacagtgcaggacacagccatgtacaccaagaagagagtaccaagtagtcttttgttcagcttttactggaaactgctgtctaggaccacctgccctaaccaggaataaaggcaagacagcctggaaaaaaaaaaat

SEQ ID NO: 359551 - DNA, 1253 bp, Homo sapiens
gccgcctctgacgccaccggctgggctccgccatgagttcggcgccggcctcaggctccgtgcgcgcgcgctatcttgtgtacttccagtacgtgggcaccgactttaacggggtcgcggccgtcaggggcactcagcgcgccgtcggggtccagaactacctggaggaggccgccgagcggctgaattccgtggagccggtcaggttcaccatctccagccgcacggacgccggggtccacgccctgagcaacgcggcgcacctggacgtccagcgccgctcaggccggccgcccttcccgcccgaggtcctggccgaggccctcaacacacacctgcggcacccggccatcagggtcctgcgggccttccgagtgcccagcgacttccacgctcgtcacgcagccacgtcccggacctacctgtaccgcctggccactggctgtcaccggcgtgatgagctgccggtgtttgaacgcaacctatgctggactctcccggcagactgcctggatatggtcgccatgcaggaagccgcccagcacctcctcggcacacacgacttcagcgccttccagtccgctggcagcccggtgccgagccccgtgcgaacgctgcgccgggtctccgtttccccaggccaagccagccccttggtcacccccgaggagagcaggaagctgcggttctggaacctggagtttgagagccagtctttcctgtatagacaggtacggaggatgacggctgtgctggtggccgtggggctgggggctttggcacctgcccaggtgaagacgattctggagagccaagatcccctgggcaagcaccagacacgtgtagccccagcccacggcttattcctcaagtcagtgctgtacgggaacctcggtgctgcctcctgcaccctgcaggggccacagttcgggagccacggatgaccctggacactcaagccaaagttaggccacaccaggcccaaccctgtgctggtcaagccagggcagtcacagctgcttggggcccacagcactgctgcctggtctccacagtagcctccctgcccgggtcccagcaccctggatgcccgtctctgtcccaggcgggatggggcacagtgcaggacacagccatgtacaccaagaagagagtaccaagtagtcttttgttcagcttttactggaaactgctgtctaggaccacctgccctaaccaggaataaaggcaagacagcctggaaaaaaaaaaat

SEQ ID NO: 359552 - DNA, 1492 bp, Homo sapiens
gccgcctctgacgccaccggctgggctccgccatgagttcggcgccggcctcaggctccgtgcgcgcgcgctatcttgtgtacttccagtacgtgggcaccgactttaagaggccgccgagcggctgaattccgtggagccggtcaggttcaccatctccagccgcacggacgccggggtccacgccctgagcaacgcggcgcacctggacgtccagcgccgctcaggccggccgcccttcccgcccgaggtcctggccgaggccctcaacacacacctgcggcacccggccatcagggtcctgcgggccttccgagtgcccagcgacttccacgctcgtcacgcagccacgtcccggacctacctgtaccgcctggccactggctgtcaccggcgtgatgagctgccggtgtttgaacgcaacctatgctggactctcccggcagagtgagtgtggccctgacagcggggagggggcgggcaggccggccccaccctcctgacggtcaccctggtccctgaagctgcctggatatggtcgccatgcaggaagccgcccagcacctcctcggcacacacgacttcagcgccttccagtccgctggcagcccggtgccgagccccgtgcgaacgctgcgccgggtctccgtttccccaggccaagccagccccttggtcacccccgaggagagcaggaagctgcggttctggaacctggagtttgagagccagtctttcctgtatagacaggtaggctctgttctggggccgtccccagggggtggggctgagggtgggcaggcccctgtgcagtcttggctctgggtcgtgggcggctctgggtcacaggtacggaggatgacggctgtgctggtgggtcacgggcggctctgggtcacaggtacggaggatgacggctgtgctggtgggtcacgggcggctctgggtcacaggtggctctgggtcacaggtacggaggatgacggctgtgctggtggccgtggggctgggggctttggcacctgcccaggtgaagacgattctggagagccaagatcccctgggcaagcaccagacacgtgtagccccagcccacggcttattcctcaagtcagtgctgtacgggaacctcggtgctgcctcctgcaccctgcaggggccacagttcgggagccacggatgaccctggacactcaagccaaagttaggccacaccaggcccaaccctgtgctggtcaagccagggcagtcacagctgcttggggcccacagcactgctgcctggtctccacagtagcctccctgcccgggtcccagcaccctggatgcccgtctctgtcccaggcgggatggggcacagtgcaggacacagccatgtacaccaagaagagagtaccaagtagtcttttgttcagcttttactggaaactgctgtctaggaccacctgccctaaccaggaataaaggcaagacagcctggaaaaaaaaaaat

SEQ ID NO: 359553 - DNA, 1195 bp, Homo sapiens
gccgcctctgacgccaccggctgggctccgccatgagttcggcgccggcctcaggctccgtgcgcgcgcgctatcttgtgtacttccagtacgtgggcaccgactttaagaggccgccgagcggctgaattccgtggagccggtcaggttcaccatctccagccgcacggacgccggggtccacgccctgagcaacgcggcgcacctggacgtccagcgccgctcaggccggccgcccttcccgcccgaggtcctggccgaggccctcaacacacacctgcggcacccggccatcagggtcctgcgggccttccgagtgcccagcgacttccacgctcgtcacgcagccacgtcccggacctacctgtaccgcctggccactggctgtcaccggcgtgatgagctgccggtgtttgaacgcaacctatgctggactctcccggcagactgcctggatatggtcgccatgcaggaagccgcccagcacctcctcggcacacacgacttcagcgccttccagtccgctggcagcccggtgccgagccccgtgcgaacgctgcgccgggtctccgtttccccaggccaagccagccccttggtcacccccgaggagagcaggaagctgcggttctggaacctggagtttgagagccagtctttcctgtatagacaggtacggaggatgacggctgtgctggtggccgtggggctgggggctttggcacctgcccaggtgaagacgattctggagagccaagatcccctgggcaagcaccagacacgtgtagccccagcccacggcttattcctcaagtcagtgctgtacgggaacctcggtgctgcctcctgcaccctgcaggggccacagttcgggagccacggatgaccctggacactcaagccaaagttaggccacaccaggcccaaccctgtgctggtcaagccagggcagtcacagctgcttggggcccacagcactgctgcctggtctccacagtagcctccctgcccgggtcccagcaccctggatgcccgtctctgtcccaggcgggatggggcacagtgcaggacacagccatgtacaccaagaagagagtaccaagtagtcttttgttcagcttttactggaaactgctgtctaggaccacctgccctaaccaggaataaaggcaagacagcctggaaaaaaaaaaat

SEQ ID NO: 359554 - DNA, 365 bp, Homo sapiens
ttagaaaatccataaattggatatctcctgctcccagtaatttggatttgattatattgtttactatttggacactggggattttgtaaatccaaaagaaaggcttctcatgagggattacatgtattaatgttttagagtttgtaagagtgattttattatttgatacctattgaaatcctgggagataggtgagcaggtgtcctgaggcttagagagggtaggccgcctctgctacgtcaggtgtcacatacgttctggtctcaggacttgtgcttttccactatacagggcttccctgtaggatctgggtaaaggagttgaggggtgatctgtctggagagcagcaattatagggcccatct

SEQ ID NO: 359555 - DNA, 1771 bp, Homo sapiens
gaattcatctgtcgactgctaccacgggagttccccggagaaggatcctgcagcccgagtcccgaggataaagcttggggttcatcctccttccctggatcactccacagtcctcaggcttccccaatccaggggactcggcgccgggacgctgctatggacgacattttcactcagtgccgggagggcaacgcagtcgccgttcgcctgtggctggacaacacggagaacgacctcaaccagggggacgatcatggcttctcccccttgcactgggcctgccgagagggccgctctgctgtggttgagatgttgatcatgcggggggcacggatcaatgtaatgaaccgtggggatgacacccccctgcatctggcagccagtcatggacaccgtgatattgtacagaagctattgcagtacaaggcagacatcaatgcagtgaatgaacacgggaatgtgcccctgcactatgcctgtttttggggccaagatcaagtggcagaggacctggtggcaaatggggcccttgtcagcatctgtaacaagtatggagagatgcctgtggacaaagccaaggcacccctgagagagcttctccgagagcgggcagagaagatgggccagaatctcaaccgtattccatacaaggacacattctggaaggggaccacccgcactcggccccgaaatggaaccctgaacaaacactctggcattgacttcaaacagcttaacttcctgacgaagctcaacgagaatcactctggagagctatggaagggccgctggcagggcaatgacattgtcgtgaaggtgctgaaggttcgagactggagtacaaggaagagcagggacttcaatgaagagtgtccccggctcaggattttctcgcatccaaatgtgctcccagtgctaggtgcctgccagtctccacctgctcctcatcctactctcatcacacactggatgccgtatggatccctctacaatgtactacatgaaggcaccaatttcgtcgtggaccagagccaggctgtgaagtttgctttggacatggcaaggggcatggccttcctacacacactagagcccctcatcccacgacatgcactcaatagccgtagtgtaatgattgatgaggacatgactgcccgaattagcatggctgatgtcaagttctctttccaatgtcctggtcgcatgtatgcacctgcctgggtagcccccgaagctctgcagaagaagcctgaagacacaaacagacgctcagcagacatgtggagttttgcagtgcttctgtgggaactggtgacacgggaggtaccctttgctgacctctccaatatggagattggaatgaaggtggcattggaaggccttcggcctaccatcccaccaggtatttcccctcatgtgtgtaagctcatgaagatctgcatgaatgaagaccctgcaaagcgacccaaatttgacatgattgtgcctatccttgagaagatgcaggacaagtaggactggaaggtccttgcctgaactccagaggtgtcgggacatggttgggggaatgcacctccccaaagcagcaggcctctggttgcctcccccgcctccagtcatggtactaccccagccatggggtccatccccttcccccatccctaccactgtggccccaagaggggcgggctcagagctttgtcacttgccacatggtgtctcccaacatgggagggatcagccccgcctgtcacaataaagtttattatga

SEQ ID NO: 359556 - DNA, 717 bp, Homo sapiens
  misc_feature (1)..(1): n is a, c, g, or t
ncacctctttttgaacgaacaatcgtccctggggattaaaaaaatttgttccaattataactccattaccctccccggtttatccccctaaaccctctttccaaaactcaccctctgtagccaataatttcgcccccgccctatattttttttccccccccccggtatgaaccccccctgttagaaaaatgtcttatgaaattttcaccccttagagaactctttaaatctcctcgcttagagttaattttgtgcccccaatataaggtgccccccccccgcagagaattataaggttctcccttcccccaaggatatcccccgagtttatccccatttttcccccattcccgcgacccgttgtttaaaccgcgccggccccgctgcgcctatggctctatatatatataccgcgcctccccctaatatagggcgccccccttgggcaccacaggaaacctgtgggtaaccgccgtataagccttgtggccccctccgagagggagatatacccttttctaaaccgcccccttcctcccgattctcagaaaactcaattccgacctcatatttctcaaattccccacccgcgcccccctctttttttttttttgttttttttttttttttttttagcctgtcacaataaagtttattatgaaaacaggctggtgtggggacatggggacagataagtacatttaggttgggtggctc

SEQ ID NO: 359557 - DNA, 1843 bp, Homo sapiens
ggcggggcggggccggcggcgggctgcgggcgcggccggacgggagttccccggagaaggatcctgcagcccgagtcccgaggataaagcttggggttcatcctccttccctggatcactccacagtcctcaggcttccccaatccaggggactcggcgccgggacgctgctatggacgacattttcactcagtgccgggagggcaacgcagtcgccgttcgcctgtggctggacaacacggagaacgacctcaaccagggggacgatcatggcttctcccccttgcactgggcctgccgagagggccgctctgctgtggttgagatgttgatcatgcggggggcacggatcaatgtaatgaaccgtggggatgacacccccctgcatctggcagccagtcatggacaccgtgatattgtacagaagctattgcagtacaaggcagacatcaatgcagtgaatgaacacgggaatgtgcccctgcactatgcctgtttttggggccaagatcaagtggcagaggacctggtggcaaatggggcccttgtcagcatctgtaacaagtatggagagatgcctgtggacaaagccaaggcacccctgagagagcttctccgagagcgggcagagaagatgggccagaatctcaaccgtattccatacaaggacacattctggaaggggaccacccgcactcggccccgaaatggaaccctgaacaaacactctggcattgacttcaaacagcttaacttcctgacgaagctcaacgagaatcactctggagagctatggaagggccgctggcagggcaatgacattgtcgtgaaggtgctgaaggttcgagactggagtacaaggaagagcagggacttcaatgaagagtgtccccggctcaggattttctcgcatccaaatgtgctcccagtgctaggtgcctgccagtctccacctgctcctcatcctactctcatcacacactggatgccgtatggatccctctacaatgtactacatgaaggcaccaatttcgtcgtggaccagagccaggctgtgaagtttgctttggacatggcaaggggcatggccttcctacacacactagagcccctcatcccacgacatgcactcaatagccgtagtgtaatgattgatgaggacatgactgcccgaattagcatggctgatgtcaagttctctttccaatgtcctggtcgcatgtatgcacctgcctgggtagcccccgaagctctgcagaagaagcctgaagacacaaacagacgctcagcagacatgtggagttttgcagtgcttctgtgggaactggtgacacgggaggtaccctttgctgacctctccaatatggagattggaatgaaggtggcattggaaggccttcggcctaccatcccaccaggtatttcccctcatgtgtgtaagctcatgaagatctgcatgaatgaagaccctgcaaagcgacccaaatttgacatgattgtgcctatccttgagaagatgcaggacaagtaggactggaaggtccttgcctgaactccagaggtgtcgggacatggttgggggaatgcacctccccaaagcagcaggcctctggttgcctcccccgcctccagtcatggtactaccccagccatggggtccatccccttcccccatccctaccactgtggccccaagaggggcgggctcagagctttgtcacttgccacatggtgtctcccaacatgggagggatcagccccgcctgtcacaataaagtttattatgaaaacaggctggtgtggggacatggggacagataagtacatttaggttgggtggctc

SEQ ID NO: 359558 - DNA, 3340 bp, Homo sapiens
tcagagtggcaaattcaaattctttattttttaaaattggtggagtttagtttttaggtttgacaggtcaggatcacctgtcatcttagtctagacttcactggttcccattaggttctacactatttctctttaatactttgcaaagtcatttgttccatttttcatataattctcaaagggtaccctgataaagacagtaagcactgttactgttttgttggtgaggaaatagaggcttaggcagttgcccagtgggcctagcatctaggaagactctagctgagtctaggaagactctaggaagatgctgccagaaggaaaaggggtggaattaatgaaactggaaggttgtggtgctggtttgaggagtaaagtatgggggccaaagttggctatatgctggatatgaagagggggttaattccttgcaggtcttcttgagatagaagtccaggccctgaggtggcacgcagcctgatagtgaacagaacccttgtgcccatacttttgccccccgagtttggcctgccctagcgccacaggcagtactggaagctgataagtcagggcacaaattaaaggtctaggaggcaagaccaactgataaacagggggcgtaatgcttcctggggataatcccatctcaaggaaaagcttttggctatttctgtgttagcagatgcgagcaagttgtggaggaaaatgattaacttaaaggccacaccccccaaccccttcagctgtacgggcatctggatggccagacccctgatcagctccaggccttgcctagagtcgcacacaggaagtgaccacaacactaaggcatccggaggctgctggcccagaccacggaccgccccctgctccgccccttgaatctgcagccccgaactggagggaatttccttttatggccccaggctgtcaggcaggcccagctccaaaccaattgttttgttttgtttgtatactttactttataaaatacatatttcttggaaaagaaaaaaatcaggtatagttttaatcccaaaacagccattctcattttcttctgttttctatgcacaggattgctaagtaggggaatcctgctttgcatggtggtttgttatctacctcatcagtagtcaaaagcatttctccttttcaacataaacccttccaaaacatcatttaaattccattccatttttagatgttagtttcagtaccagagccaaatagtaagtttgttccctcttctataagttgtggcctgccttctccaagacacccttctcccccactaacatgcactgaacagctgctgtcaatccattccctcaagaaacttaaaggtctaacagacaagacagtccattaacagatttttacaatccagtgcaacaagtgctgaagtagggggacatataagatgtggtggaaaacagaaaggaccaatagatgttgcagaaggggtgcaagagaaaccaggggaagagcactaccacctaaggaaatgagatgtgggatatgatgaagataacacatttttttatagaggttgttgagatatctaggtggttggtttggtttgaagctcaggggaaggtctgaaatggacagctttgggagttgctggcatgaatgagaatcaaagtcctagagaggtaagccttcccagagagtatgtaattatcagtttttcaggaatcaaaacctttgccccatcccacctccagctcaatgaccattgccccttcctcaaagggacgatcatggcttctcccccttgcactgggcctgccgagagggccgctctgctgtggttgagatgttgatcatgcggggggcacggatcaatgtaatgaaccgtggggatgacacccccctgcatctggcagccagtcatggacaccgtgatattgtacagaagctattgcagtacaaggcagacatcaatgcagtgaatgaacacgggaatgtgcccctgcactatgcctgtttttggggccaagatcaagtggcagaggacctggtggcaaatggggcccttgtcagcatctgtaacaagtatggagagatgcctgtggacaaagccaaggcacccctgagagagcttctccgagagcgggcagagaagatgggccagaatctcaaccgtattccatacaaggacacattctggaaggggaccacccgcactcggccccgaaatggaaccctgaacaaacactctggcattgacttcaaacagcttaacttcctgacgaagctcaacgagaatcactctggagagctatggaagggccgctggcagggcaatgacattgtcgtgaaggtgctgaaggttcgagactggagtacaaggaagagcagggacttcaatgaagagtgtccccggctcaggattttctcgcatccaaatgtgctcccagtgctaggtgcctgccagtctccacctgctcctcatcctactctcatcacacactggatgccgtatggatccctctacaatgtactacatgaaggcaccaatttcgtcgtggaccagagccaggctgtgaagtttgctttggacatggcaaggggcatggccttcctacacacactagagcccctcatcccacgacatgcactcaatagccgtagtgtaatgattgatgaggacatgactgcccgaattagcatggctgatgtcaagttctctttccaatgtcctggtcgcatgtatgcacctgcctgggtagcccccgaagctctgcagaagaagcctgaagacacaaacagacgctcagcagacatgtggagttttgcagtgcttctgtgggaactggtgacacgggaggtaccctttgctgacctctccaatatggagattggaatgaaggtggcattggaaggccttcggcctaccatcccaccaggtatttcccctcatgtgtgtaagctcatgaagatctgcatgaatgaagaccctgcaaagcgacccaaatttgacatgattgtgcctatccttgagaagatgcaggacaagtaggactggaaggtccttgcctgaactccagaggtgtcgggacatggttgggggaatgcacctccccaaagcagcaggcctctggttgcctcccccgcctccagtcatggtactaccccagccatggggtccatccccttcccccatccctaccactgtggccccaagaggggcgggctcagagctttgtcacttgccacatggtgtctcccaacatgggagggatcagccccgcctgtcacaataaagtttattatgaaaacaggctggtgtggggacatggggacagataagtacatttaggttgggtggctc

SEQ ID NO: 359559 - DNA, 3729 bp, Homo sapiens
tcagagtggcaaattcaaattctttattttttaaaattggtggagtttagtttttaggtttgacaggtcaggatcacctgtcatcttagtctagacttcactggttcccattaggttctacactatttctctttaatactttgcaaagtcatttgttccatttttcatataattctcaaagggtaccctgataaagacagtaagcactgttactgttttgttggtgaggaaatagaggcttaggcagttgcccagtgggcctagcatctaggaagactctagctgagtctaggaagactctaggaagatgctgccagaaggaaaaggggtggaattaatgaaactggaaggttgtggtgctggtttgaggagtaaagtatgggggccaaagttggctatatgctggatatgaagagggggttaattccttgcaggtcttcttgagatagaagtccaggccctgaggtggcacgcagcctgatagtgaacagaacccttgtgcccatacttttgccccccgagtttggcctgccctagcgccacaggcagtactggaagctgataagtcagggcacaaattaaaggtctaggaggcaagaccaactgataaacagggggcgtaatgcttcctggggataatcccatctcaaggaaaagcttttggctatttctgtgttagcagatgcgagcaagttgtggaggaaaatgattaacttaaaggccacaccccccaaccccttcagctgtacgggcatctggatggccagacccctgatcagctccaggccttgcctagagtcgcacacaggaagtgaccacaacactaaggcatccggaggctgctggcccagaccacggaccgccccctgctccgccccttgaatctgcagccccgaactggagggaatttccttttatggccccaggctgtcaggcaggcccagctccaaaccaattgttttgttttgtttgtatactttactttataaaatacatatttcttggaaaagaaaaaaatcaggtatagttttaatcccaaaacagccattctcattttcttctgttttctatgcacaggattgctaagtaggggaatcctgctttgcatggtggtttgttatctacctcatcagtagtcaaaagcatttctccttttcaacataaacccttccaaaacatcatttaaattccattccatttttagatgttagtttcagtaccagagccaaatagtaagtttgttccctcttctataagttgtggcctgccttctccaagacacccttctcccccactaacatgcactgaacagctgctgtcaatccattccctcaagaaacttaaaggtctaacagacaagacagtccattaacagatttttacaatccagtgcaacaagtgctgaagtagggggacatataagatgtggtggaaaacagaaaggaccaatagatgttgcagaaggggtgcaagagaaaccaggggaagagcactaccacctaaggaaatgagatgtgggatatgatgaagataacacatttttttatagaggttgttgagatatctaggtggttggtttggtttgaagctcaggggaaggtctgaaatggacagctttgggagttgctggcatgaatgagaatcaaagtcctagagaggtaagccttcccagagagtatgtaattatcagtttttcaggaatcaaaacctttgccccatcccacctccagctcaatgaccattgccccttcctcaaagggacgatcatggcttctcccccttgcactgggcctgccgagagggccgctctgctgtggttgagatgttgatcatgcggggggcacggatcaatgtaatgaaccgtggggatgacacccccctgcatctggcagccagtcatggacaccgtgatattgtacagaaggtacgtacaaactccttcgtcatccacatcacatacatgccatgagggtcagtcacaggcactgtaacatacagtagaaagcatgtgtgctcttcccccttttcccatgccctgacaccagtatctcatttggaactgactgtactttctgcctcttctttttgtctggccatggggtccagctattgcagtacaaggcagacatcaatgcagtgaatgaacacgggaatgtgcccctgcactatgcctgtttttggggccaagatcaagtggcagaggtgagtactcagcccttaattcctgagatgggtaggaagtaaagtctgagccttggtgggagattttggaaccctcaacccattctgtcagtactactgtgtgacacttacaggattaagttctacatttgtgcattcatggttggttcagtgactgccagcgaggtagcagtggctctcatcataatggccttttcattccaggacgacctggtggcaaatggggcccttgtcagcatctgtaacaagtatggagagatgcctgtggacaaagccaaggcacccctgagagagcttctccgagagcgggcagagaagatgggccagaatctcaaccgtattccatacaaggacacattctggaaggggaccacccgcactcggccccgaaatggaaccctgaacaaacactctggcattgacttcaaacagcttaacttcctgacgaagctcaacgagaatcactctggagagctatggaagggccgctggcagggcaatgacattgtcgtgaaggtgctgaaggttcgagactggagtacaaggaagagcagggacttcaatgaagagtgtccccggctcaggattttctcgcatccaaatgtgctcccagtgctaggtgcctgccagtctccacctgctcctcatcctactctcatcacacactggatgccgtatggatccctctacaatgtactacatgaaggcaccaatttcgtcgtggaccagagccaggctgtgaagtttgctttggacatggcaaggggcatggccttcctacacacactagagcccctcatcccacgacatgcactcaatagccgtagtgtaatgattgatgaggacatgactgcccgaattagcatggctgatgtcaagttctctttccaatgtcctggtcgcatgtatgcacctgcctgggtagcccccgaagctctgcagaagaagcctgaagacacaaacagacgctcagcagacatgtggagttttgcagtgcttctgtgggaactggtgacacgggaggtaccctttgctgacctctccaatatggagattggaatgaaggtggcattggaaggccttcggcctaccatcccaccaggtatttcccctcatgtgtgtaagctcatgaagatctgcatgaatgaagaccctgcaaagcgacccaaatttgacatgattgtgcctatccttgagaagatgcaggacaagtaggactggaaggtccttgcctgaactccagaggtgtcgggacatggttgggggaatgcacctccccaaagcagcaggcctctggttgcctcccccgcctccagtcatggtactaccccagccatggggtccatccccttcccccatccctaccactgtggccccaagaggggcgggctcagagctttgtcacttgccacatggtgtctcccaacatgggagggatcagccccgcctgtcacaataaagtttattatgaaaacaggctggtgtggggacatggggacagataagtacatttaggttgggtggctc

SEQ ID NO: 359560 - DNA, 1670 bp, Homo sapiens
gaattcatctgtcgactgctaccacgggagttccccggagaaggatcctgcagcccgagtcccggtgagtgcgagaggacccgcgccccctgtcacccctcacttctcctgagtcccaatcctcaggcttccccaatccaggggactcggcgccgggacgctgctatggacgacattttcactcagtgccgggagggcaacgcagtcgccgttcgcctgtggctggacaacacggagaacgacctcaaccagggctattgcagtacaaggcagacatcaatgcagtgaatgaacacgggaatgtgcccctgcactatgcctgtttttggggccaagatcaagtggcagaggacctggtggcaaatggggcccttgtcagcatctgtaacaagtatggagagatgcctgtggacaaagccaaggcacccctgagagagcttctccgagagcgggcagagaagatgggccagaatctcaaccgtattccatacaaggacacattctggaaggggaccacccgcactcggccccgaaatggaaccctgaacaaacactctggcattgacttcaaacagcttaacttcctgacgaagctcaacgagaatcactctggagagctatggaagggccgctggcagggcaatgacattgtcgtgaaggtgctgaaggttcgagactggagtacaaggaagagcagggacttcaatgaagagtgtccccggctcaggattttctcgcatccaaatgtgctcccagtgctaggtgcctgccagtctccacctgctcctcatcctactctcatcacacactggatgccgtatggatccctctacaatgtactacatgaaggcaccaatttcgtcgtggaccagagccaggctgtgaagtttgctttggacatggcaaggggcatggccttcctacacacactagagcccctcatcccacgacatgcactcaatagccgtagtgtaatgattgatgaggacatgactgcccgaattagcatggctgatgtcaagttctctttccaatgtcctggtcgcatgtatgcacctgcctgggtagcccccgaagctctgcagaagaagcctgaagacacaaacagacgctcagcagacatgtggagttttgcagtgcttctgtgggaactggtgacacgggaggtaccctttgctgacctctccaatatggagattggaatgaaggtggcattggaaggccttcggcctaccatcccaccaggtatttcccctcatgtgtgtaagctcatgaagatctgcatgaatgaagaccctgcaaagcgacccaaatttgacatgattgtgcctatccttgagaagatgcaggacaagtaggactggaaggtccttgcctgaactccagaggtgtcgggacatggttgggggaatgcacctccccaaagcagcaggcctctggttgcctcccccgcctccagtcatggtactaccccagccatggggtccatccccttcccccatccctaccactgtggccccaagaggggcgggctcagagctttgtcacttgccacatggtgtctcccaacatgggagggatcagccccgcctgtcacaataaagtttattatgaaaacaggctggtgtggggacatggggacagataagtacatttaggttgggtggctc

SEQ ID NO: 359561 - DNA, 3822 bp, Homo sapiens
tcagagtggcaaattcaaattctttattttttaaaattggtggagtttagtttttaggtttgacaggtcaggatcacctgtcatcttagtctagacttcactggttcccattaggttctacactatttctctttaatactttgcaaagtcatttgttccatttttcatataattctcaaagggtaccctgataaagacagtaagcactgttactgttttgttggtgaggaaatagaggcttaggcagttgcccagtgggcctagcatctaggaagactctagctgagtctaggaagactctaggaagatgctgccagaaggaaaaggggtggaattaatgaaactggaaggttgtggtgctggtttgaggagtaaagtatgggggccaaagttggctatatgctggatatgaagagggggttaattccttgcaggtcttcttgagatagaagtccaggccctgaggtggcacgcagcctgatagtgaacagaacccttgtgcccatacttttgccccccgagtttggcctgccctagcgccacaggcagtactggaagctgataagtcagggcacaaattaaaggtctaggaggcaagaccaactgataaacagggggcgtaatgcttcctggggataatcccatctcaaggaaaagcttttggctatttctgtgttagcagatgcgagcaagttgtggaggaaaatgattaacttaaaggccacaccccccaaccccttcagctgtacgggcatctggatggccagacccctgatcagctccaggccttgcctagagtcgcacacaggaagtgaccacaacactaaggcatccggaggctgctggcccagaccacggaccgccccctgctccgccccttgaatctgcagccccgaactggagggaatttccttttatggccccaggctgtcaggcaggcccagctccaaaccaattgttttgttttgtttgtatactttactttataaaatacatatttcttggaaaagaaaaaaatcaggtatagttttaatcccaaaacagccattctcattttcttctgttttctatgcacaggattgctaagtaggggaatcctgctttgcatggtggtttgttatctacctcatcagtagtcaaaagcatttctccttttcaacataaacccttccaaaacatcatttaaattccattccatttttagatgttagtttcagtaccagagccaaatagtaagtttgttccctcttctataagttgtggcctgccttctccaagacacccttctcccccactaacatgcactgaacagctgctgtcaatccattccctcaagaaacttaaaggtctaacagacaagacagtccattaacagatttttacaatccagtgcaacaagtgctgaagtagggggacatataagatgtggtggaaaacagaaaggaccaatagatgttgcagaaggggtgcaagagaaaccaggggaagagcactaccacctaaggaaatgagatgtgggatatgatgaagataacacatttttttatagaggttgttgagatatctaggtggttggtttggtttgaagctcaggggaaggtctgaaatggacagctttgggagttgctggcatgaatgagaatcaaagtcctagagaggtaagccttcccagagagtatgtaattatcagtttttcaggaatcaaaacctttgccccatcccacctccagctcaatgaccattgccccttcctcaaagggacgatcatggcttctcccccttgcactgggcctgccgagagggccgctctgctgtggttgagatgttgatcatgcggggggcacggatcaatgtaatgaaccgtggggatgacacccccctgcatctggcagccagtcatggacaccgtgatattgtacagaaggtacgtacaaactccttcgtcatccacatcacatacatgccatgagggtcagtcacaggcactgtaacatacagtagaaagcatgtgtgctcttcccccttttcccatgccctgacaccagtatctcatttggaactgactgtactttctgcctcttctttttgtctggccatggggtccagctattgcagtacaaggcagacatcaatgcagtgaatgaacacgggaatgtgcccctgcactatgcctgtttttggggccaagatcaagtggcagaggtgagtactcagcccttaattcctgagatgggtaggaagtaaagtctgagccttggtgggagattttggaaccctcaacccattctgtcagtactactgtgtgacacttacaggattaagttctacatttgtgcattcatggttggttcagtgactgccagcgaggtagcagtggctctcatcataatggccttttcattccaggacgacctggtggcaaatggggcccttgtcagcatctgtaacaagtatggagagatgcctgtggacaaagccaaggcacccctgagagagcttctccgaggtccatctccccatcccctagcttgtgtcctctcgtcccttcccacctgtcttctccctctgtaccacagcttaggttgtttttcttccctagagcgggcagagaagatgggccagaatctcaaccgtattccatacaaggacacattctggaaggggaccacccgcactcggccccgaaatggaaccctgaacaaacactctggcattgacttcaaacagcttaacttcctgacgaagctcaacgagaatcactctggagagctatggaagggccgctggcagggcaatgacattgtcgtgaaggtgctgaaggttcgagactggagtacaaggaagagcagggacttcaatgaagagtgtccccggctcaggattttctcgcatccaaatgtgctcccagtgctaggtgcctgccagtctccacctgctcctcatcctactctcatcacacactggatgccgtatggatccctctacaatgtactacatgaaggcaccaatttcgtcgtggaccagagccaggctgtgaagtttgctttggacatggcaaggggcatggccttcctacacacactagagcccctcatcccacgacatgcactcaatagccgtagtgtaatgattgatgaggacatgactgcccgaattagcatggctgatgtcaagttctctttccaatgtcctggtcgcatgtatgcacctgcctgggtagcccccgaagctctgcagaagaagcctgaagacacaaacagacgctcagcagacatgtggagttttgcagtgcttctgtgggaactggtgacacgggaggtaccctttgctgacctctccaatatggagattggaatgaaggtggcattggaaggccttcggcctaccatcccaccaggtatttcccctcatgtgtgtaagctcatgaagatctgcatgaatgaagaccctgcaaagcgacccaaatttgacatgattgtgcctatccttgagaagatgcaggacaagtaggactggaaggtccttgcctgaactccagaggtgtcgggacatggttgggggaatgcacctccccaaagcagcaggcctctggttgcctcccccgcctccagtcatggtactaccccagccatggggtccatccccttcccccatccctaccactgtggccccaagaggggcgggctcagagctttgtcacttgccacatggtgtctcccaacatgggagggatcagccccgcctgtcacaataaagtttattatgaaaacaggctggtgtggggacatggggacagataagtacatttaggttgggtggctc

SEQ ID NO: 359562 - DNA, 3924 bp, Homo sapiens
tcagagtggcaaattcaaattctttattttttaaaattggtggagtttagtttttaggtttgacaggtcaggatcacctgtcatcttagtctagacttcactggttcccattaggttctacactatttctctttaatactttgcaaagtcatttgttccatttttcatataattctcaaagggtaccctgataaagacagtaagcactgttactgttttgttggtgaggaaatagaggcttaggcagttgcccagtgggcctagcatctaggaagactctagctgagtctaggaagactctaggaagatgctgccagaaggaaaaggggtggaattaatgaaactggaaggttgtggtgctggtttgaggagtaaagtatgggggccaaagttggctatatgctggatatgaagagggggttaattccttgcaggtcttcttgagatagaagtccaggccctgaggtggcacgcagcctgatagtgaacagaacccttgtgcccatacttttgccccccgagtttggcctgccctagcgccacaggcagtactggaagctgataagtcagggcacaaattaaaggtctaggaggcaagaccaactgataaacagggggcgtaatgcttcctggggataatcccatctcaaggaaaagcttttggctatttctgtgttagcagatgcgagcaagttgtggaggaaaatgattaacttaaaggccacaccccccaaccccttcagctgtacgggcatctggatggccagacccctgatcagctccaggccttgcctagagtcgcacacaggaagtgaccacaacactaaggcatccggaggctgctggcccagaccacggaccgccccctgctccgccccttgaatctgcagccccgaactggagggaatttccttttatggccccaggctgtcaggcaggcccagctccaaaccaattgttttgttttgtttgtatactttactttataaaatacatatttcttggaaaagaaaaaaatcaggtatagttttaatcccaaaacagccattctcattttcttctgttttctatgcacaggattgctaagtaggggaatcctgctttgcatggtggtttgttatctacctcatcagtagtcaaaagcatttctccttttcaacataaacccttccaaaacatcatttaaattccattccatttttagatgttagtttcagtaccagagccaaatagtaagtttgttccctcttctataagttgtggcctgccttctccaagacacccttctcccccactaacatgcactgaacagctgctgtcaatccattccctcaagaaacttaaaggtctaacagacaagacagtccattaacagatttttacaatccagtgcaacaagtgctgaagtagggggacatataagatgtggtggaaaacagaaaggaccaatagatgttgcagaaggggtgcaagagaaaccaggggaagagcactaccacctaaggaaatgagatgtgggatatgatgaagataacacatttttttatagaggttgttgagatatctaggtggttggtttggtttgaagctcaggggaaggtctgaaatggacagctttgggagttgctggcatgaatgagaatcaaagtcctagagaggtaagccttcccagagagtatgtaattatcagtttttcaggaatcaaaacctttgccccatcccacctccagctcaatgaccattgccccttcctcaaagggacgatcatggcttctcccccttgcactgggcctgccgagagggccgctctgctgtggttgagatgttgatcatgcggggggcacggatcaatgtaatgaaccgtggggatgacacccccctgcatctggcagccagtcatggacaccgtgatattgtacagaaggtacgtacaaactccttcgtcatccacatcacatacatgccatgagggtcagtcacaggcactgtaacatacagtagaaagcatgtgtgctcttcccccttttcccatgccctgacaccagtatctcatttggaactgactgtactttctgcctcttctttttgtctggccatggggtccagctattgcagtacaaggcagacatcaatgcagtgaatgaacacgggaatgtgcccctgcactatgcctgtttttggggccaagatcaagtggcagaggtgagtactcagcccttaattcctgagatgggtaggaagtaaagtctgagccttggtgggagattttggaaccctcaacccattctgtcagtactactgtgtgacacttacaggattaagttctacatttgtgcattcatggttggttcagtgactgccagcgaggtagcagtggctctcatcataatggccttttcattccaggacgacctggtggcaaatggggcccttgtcagcatctgtaacaagtatggagagatgcctgtggacaaagccaaggcacccctgagagagcttctccgaggtccatctccccatcccctagcttgtgtcctctcgtcccttcccacctgtcttctccctctgtaccacagcttaggttgtttttcttccctagagcgggcagagaagatgggccagaatctcaaccgtattccatacaaggacacattctggaaggggaccacccgcactcggcccctgagtcaccactgtgggaagaagggttgtaaaaggaaataatcctggcctcttggggctgggttagggtgaagctgggtacctgacctgcccacactcttaggaaatggaaccctgaacaaacactctggcattgacttcaaacagcttaacttcctgacgaagctcaacgagaatcactctggagagctatggaagggccgctggcagggcaatgacattgtcgtgaaggtgctgaaggttcgagactggagtacaaggaagagcagggacttcaatgaagagtgtccccggctcaggattttctcgcatccaaatgtgctcccagtgctaggtgcctgccagtctccacctgctcctcatcctactctcatcacacactggatgccgtatggatccctctacaatgtactacatgaaggcaccaatttcgtcgtggaccagagccaggctgtgaagtttgctttggacatggcaaggggcatggccttcctacacacactagagcccctcatcccacgacatgcactcaatagccgtagtgtaatgattgatgaggacatgactgcccgaattagcatggctgatgtcaagttctctttccaatgtcctggtcgcatgtatgcacctgcctgggtagcccccgaagctctgcagaagaagcctgaagacacaaacagacgctcagcagacatgtggagttttgcagtgcttctgtgggaactggtgacacgggaggtaccctttgctgacctctccaatatggagattggaatgaaggtggcattggaaggccttcggcctaccatcccaccaggtatttcccctcatgtgtgtaagctcatgaagatctgcatgaatgaagaccctgcaaagcgacccaaatttgacatgattgtgcctatccttgagaagatgcaggacaagtaggactggaaggtccttgcctgaactccagaggtgtcgggacatggttgggggaatgcacctccccaaagcagcaggcctctggttgcctcccccgcctccagtcatggtactaccccagccatggggtccatccccttcccccatccctaccactgtggccccaagaggggcgggctcagagctttgtcacttgccacatggtgtctcccaacatgggagggatcagccccgcctgtcacaataaagtttattatgaaaacaggctggtgtggggacatggggacagataagtacatttaggttgggtggctc

SEQ ID NO: 359563 - DNA, 3527 bp, Homo sapiens
tcagagtggcaaattcaaattctttattttttaaaattggtggagtttagtttttaggtttgacaggtcaggatcacctgtcatcttagtctagacttcactggttcccattaggttctacactatttctctttaatactttgcaaagtcatttgttccatttttcatataattctcaaagggtaccctgataaagacagtaagcactgttactgttttgttggtgaggaaatagaggcttaggcagttgcccagtgggcctagcatctaggaagactctagctgagtctaggaagactctaggaagatgctgccagaaggaaaaggggtggaattaatgaaactggaaggttgtggtgctggtttgaggagtaaagtatgggggccaaagttggctatatgctggatatgaagagggggttaattccttgcaggtcttcttgagatagaagtccaggccctgaggtggcacgcagcctgatagtgaacagaacccttgtgcccatacttttgccccccgagtttggcctgccctagcgccacaggcagtactggaagctgataagtcagggcacaaattaaaggtctaggaggcaagaccaactgataaacagggggcgtaatgcttcctggggataatcccatctcaaggaaaagcttttggctatttctgtgttagcagatgcgagcaagttgtggaggaaaatgattaacttaaaggccacaccccccaaccccttcagctgtacgggcatctggatggccagacccctgatcagctccaggccttgcctagagtcgcacacaggaagtgaccacaacactaaggcatccggaggctgctggcccagaccacggaccgccccctgctccgccccttgaatctgcagccccgaactggagggaatttccttttatggccccaggctgtcaggcaggcccagctccaaaccaattgttttgttttgtttgtatactttactttataaaatacatatttcttggaaaagaaaaaaatcaggtatagttttaatcccaaaacagccattctcattttcttctgttttctatgcacaggattgctaagtaggggaatcctgctttgcatggtggtttgttatctacctcatcagtagtcaaaagcatttctccttttcaacataaacccttccaaaacatcatttaaattccattccatttttagatgttagtttcagtaccagagccaaatagtaagtttgttccctcttctataagttgtggcctgccttctccaagacacccttctcccccactaacatgcactgaacagctgctgtcaatccattccctcaagaaacttaaaggtctaacagacaagacagtccattaacagatttttacaatccagtgcaacaagtgctgaagtagggggacatataagatgtggtggaaaacagaaaggaccaatagatgttgcagaaggggtgcaagagaaaccaggggaagagcactaccacctaaggaaatgagatgtgggatatgatgaagataacacatttttttatagaggttgttgagatatctaggtggttggtttggtttgaagctcaggggaaggtctgaaatggacagctttgggagttgctggcatgaatgagaatcaaagtcctagagaggtaagccttcccagagagtatgtaattatcagtttttcaggaatcaaaacctttgccccatcccacctccagctcaatgaccattgccccttcctcaaagggacgatcatggcttctcccccttgcactgggcctgccgagagggccgctctgctgtggttgagatgttgatcatgcggggggcacggatcaatgtaatgaaccgtggggatgacacccccctgcatctggcagccagtcatggacaccgtgatattgtacagaaggtacgtacaaactccttcgtcatccacatcacatacatgccatgagggtcagtcacaggcactgtaacatacagtagaaagcatgtgtgctcttcccccttttcccatgccctgacaccagtatctcatttggaactgactgtactttctgcctcttctttttgtctggccatggggtccagctattgcagtacaaggcagacatcaatgcagtgaatgaacacgggaatgtgcccctgcactatgcctgtttttggggccaagatcaagtggcagagagcgggcagagaagatgggccagaatctcaaccgtattccatacaaggacacattctggaaggggaccacccgcactcggcccctgagtcaccactgtgggaagaagggttgtaaaaggaaataatcctggcctcttggggctgggttagggtgaagctgggtacctgacctgcccacactcttaggaaatggaaccctgaacaaacactctggcattgacttcaaacagcttaacttcctgacgaagctcaacgagaatcactctggagagctatggaagggccgctggcagggcaatgacattgtcgtgaaggtgctgaaggttcgagactggagtacaaggaagagcagggacttcaatgaagagtgtccccggctcaggattttctcgcatccaaatgtgctcccagtgctaggtgcctgccagtctccacctgctcctcatcctactctcatcacacactggatgccgtatggatccctctacaatgtactacatgaaggcaccaatttcgtcgtggaccagagccaggctgtgaagtttgctttggacatggcaaggggcatggccttcctacacacactagagcccctcatcccacgacatgcactcaatagccgtagtgtaatgattgatgaggacatgactgcccgaattagcatggctgatgtcaagttctctttccaatgtcctggtcgcatgtatgcacctgcctgggtagcccccgaagctctgcagaagaagcctgaagacacaaacagacgctcagcagacatgtggagttttgcagtgcttctgtgggaactggtgacacgggaggtaccctttgctgacctctccaatatggagattggaatgaaggtggcattggaaggccttcggcctaccatcccaccaggtatttcccctcatgtgtgtaagctcatgaagatctgcatgaatgaagaccctgcaaagcgacccaaatttgacatgattgtgcctatccttgagaagatgcaggacaagtaggactggaaggtccttgcctgaactccagaggtgtcgggacatggttgggggaatgcacctccccaaagcagcaggcctctggttgcctcccccgcctccagtcatggtactaccccagccatggggtccatccccttcccccatccctaccactgtggccccaagaggggcgggctcagagctttgtcacttgccacatggtgtctcccaacatgggagggatcagccccgcctgtcacaataaagtttattatgaaaacaggctggtgtggggacatggggacagataagtacatttaggttgggtggctc

SEQ ID NO: 359564 - DNA, 3973 bp, Homo sapiens
tcagagtggcaaattcaaattctttattttttaaaattggtggagtttagtttttaggtttgacaggtcaggatcacctgtcatcttagtctagacttcactggttcccattaggttctacactatttctctttaatactttgcaaagtcatttgttccatttttcatataattctcaaagggtaccctgataaagacagtaagcactgttactgttttgttggtgaggaaatagaggcttaggcagttgcccagtgggcctagcatctaggaagactctagctgagtctaggaagactctaggaagatgctgccagaaggaaaaggggtggaattaatgaaactggaaggttgtggtgctggtttgaggagtaaagtatgggggccaaagttggctatatgctggatatgaagagggggttaattccttgcaggtcttcttgagatagaagtccaggccctgaggtggcacgcagcctgatagtgaacagaacccttgtgcccatacttttgccccccgagtttggcctgccctagcgccacaggcagtactggaagctgataagtcagggcacaaattaaaggtctaggaggcaagaccaactgataaacagggggcgtaatgcttcctggggataatcccatctcaaggaaaagcttttggctatttctgtgttagcagatgcgagcaagttgtggaggaaaatgattaacttaaaggccacaccccccaaccccttcagctgtacgggcatctggatggccagacccctgatcagctccaggccttgcctagagtcgcacacaggaagtgaccacaacactaaggcatccggaggctgctggcccagaccacggaccgccccctgctccgccccttgaatctgcagccccgaactggagggaatttccttttatggccccaggctgtcaggcaggcccagctccaaaccaattgttttgttttgtttgtatactttactttataaaatacatatttcttggaaaagaaaaaaatcaggtatagttttaatcccaaaacagccattctcattttcttctgttttctatgcacaggattgctaagtaggggaatcctgctttgcatggtggtttgttatctacctcatcagtagtcaaaagcatttctccttttcaacataaacccttccaaaacatcatttaaattccattccatttttagatgttagtttcagtaccagagccaaatagtaagtttgttccctcttctataagttgtggcctgccttctccaagacacccttctcccccactaacatgcactgaacagctgctgtcaatccattccctcaagaaacttaaaggtctaacagacaagacagtccattaacagatttttacaatccagtgcaacaagtgctgaagtagggggacatataagatgtggtggaaaacagaaaggaccaatagatgttgcagaaggggtgcaagagaaaccaggggaagagcactaccacctaaggaaatgagatgtgggatatgatgaagataacacatttttttatagaggttgttgagatatctaggtggttggtttggtttgaagctcaggggaaggtctgaaatggacagctttgggagttgctggcatgaatgagaatcaaagtcctagagaggtaagccttcccagagagtatgtaattatcagtttttcaggaatcaaaacctttgccccatcccacctccagctcaatgaccattgccccttcctcaaagggacgatcatggcttctcccccttgcactgggcctgccgagagggccgctctgctgtggttgagatgttgatcatgcggggggcacggatcaatgtaatgaaccgtggggatgacacccccctgcatctggcagccagtcatggacaccgtgatattgtacagaaggtacgtacaaactccttcgtcatccacatcacatacatgccatgagggtcagtcacaggcactgtaacatacagtagaaagcatgtgtgctcttcccccttttcccatgccctgacaccagtatctcatttggaactgactgtactttctgcctcttctttttgtctggccatggggtccagctattgcagtacaaggcagacatcaatgcagtgaatgaacacgggaatgtgcccctgcactatgcctgtttttggggccaagatcaagtggcagaggtgagtactcagcccttaattcctgagatgggtaggaagtaaagtctgagccttggtgggagattttggaaccctcaacccattctgtcagtactactgtgtgacacttacaggattaagttctacatttgtgcattcatggttggttcagtgactgccagcgaggtagcagtggctctcatcataatggccttttcattccaggacgacctggtggcaaatggggcccttgtcagcatctgtaacaagtatggagagatgcctgtggacaaagccaaggcacccctgagagagcttctccgagagcgggcagagaagatgggccagaatctcaaccgtattccatacaaggacacattctggaaggggaccacccgcactcggcccctgagtcaccactgtgggaagaagggttgtaaaaggaaataatcctggcctcttggggctgggttagggtgaagctgggtacctgacctgcccacactcttaggaaatggaaccctgaacaaacactctggcattgacttcaaacagcttaacttcctgacgaagctcaacgagaatcactctggagaggtgacccctgcccttcttgcccttccctcactaaacccccataaattacttgctttgtacctgttttaagtttttcctccagttagtgggcaaggaagtggcagcaacatttcaagcctcctaacccctacctgtcctgcagctatggaagggccgctggcagggcaatgacattgtcgtgaaggtgctgaaggttcgagactggagtacaaggaagagcagggacttcaatgaagagtgtccccggctcaggattttctcgcatccaaatgtgctcccagtgctaggtgcctgccagtctccacctgctcctcatcctactctcatcacacactggatgccgtatggatccctctacaatgtactacatgaaggcaccaatttcgtcgtggaccagagccaggctgtgaagtttgctttggacatggcaaggggcatggccttcctacacacactagagcccctcatcccacgacatgcactcaatagccgtagtgtaatgattgatgaggacatgactgcccgaattagcatggctgatgtcaagttctctttccaatgtcctggtcgcatgtatgcacctgcctgggtagcccccgaagctctgcagaagaagcctgaagacacaaacagacgctcagcagacatgtggagttttgcagtgcttctgtgggaactggtgacacgggaggtaccctttgctgacctctccaatatggagattggaatgaaggtggcattggaaggccttcggcctaccatcccaccaggtatttcccctcatgtgtgtaagctcatgaagatctgcatgaatgaagaccctgcaaagcgacccaaatttgacatgattgtgcctatccttgagaagatgcaggacaagtaggactggaaggtccttgcctgaactccagaggtgtcgggacatggttgggggaatgcacctccccaaagcagcaggcctctggttgcctcccccgcctccagtcatggtactaccccagccatggggtccatccccttcccccatccctaccactgtggccccaagaggggcgggctcagagctttgtcacttgccacatggtgtctcccaacatgggagggatcagccccgcctgtcacaataaagtttattatgaaaacaggctggtgtggggacatggggacagataagtacatttaggttgggtggctc

SEQ ID NO: 359565 - DNA, 1936 bp, Homo sapiens
ggcggggcggggccggcggcgggctgcgggcgcggccggacgggagttccccggagaaggatcctgcagcccgagtcccgaggataaagcttggggttcatcctccttccctggatcactccacagtcctcaggcttccccaatccaggggactcggcgccgggacgctgctatggacgacattttcactcagtgccgggagggcaacgcagtcgccgttcgcctgtggctggacaacacggagaacgacctcaaccagggggacgatcatggcttctcccccttgcactgggcctgccgagagggccgctctgctgtggttgagatgttgatcatgcggggggcacggatcaatgtaatgaaccgtggggatgacacccccctgcatctggcagccagtcatggacaccgtgatattgtacagaagctattgcagtacaaggcagacatcaatgcagtgaatgaacacgggaatgtgcccctgcactatgcctgtttttggggccaagatcaagtggcagaggacctggtggcaaatggggcccttgtcagcatctgtaacaagtatggagagatgcctgtggacaaagccaaggcacccctgagagagcttctccgaggtccatctccccatcccctagcttgtgtcctctcgtcccttcccacctgtcttctccctctgtaccacagcttaggttgtttttcttccctagagcgggcagagaagatgggccagaatctcaaccgtattccatacaaggacacattctggaaggggaccacccgcactcggccccgaaatggaaccctgaacaaacactctggcattgacttcaaacagcttaacttcctgacgaagctcaacgagaatcactctggagagctatggaagggccgctggcagggcaatgacattgtcgtgaaggtgctgaaggttcgagactggagtacaaggaagagcagggacttcaatgaagagtgtccccggctcaggattttctcgcatccaaatgtgctcccagtgctaggtgcctgccagtctccacctgctcctcatcctactctcatcacacactggatgccgtatggatccctctacaatgtactacatgaaggcaccaatttcgtcgtggaccagagccaggctgtgaagtttgctttggacatggcaaggggcatggccttcctacacacactagagcccctcatcccacgacatgcactcaatagccgtagtgtaatgattgatgaggacatgactgcccgaattagcatggctgatgtcaagttctctttccaatgtcctggtcgcatgtatgcacctgcctgggtagcccccgaagctctgcagaagaagcctgaagacacaaacagacgctcagcagacatgtggagttttgcagtgcttctgtgggaactggtgacacgggaggtaccctttgctgacctctccaatatggagattggaatgaaggtggcattggaaggccttcggcctaccatcccaccaggtatttcccctcatgtgtgtaagctcatgaagatctgcatgaatgaagaccctgcaaagcgacccaaatttgacatgattgtgcctatccttgagaagatgcaggacaagtaggactggaaggtccttgcctgaactccagaggtgtcgggacatggttgggggaatgcacctccccaaagcagcaggcctctggttgcctcccccgcctccagtcatggtactaccccagccatggggtccatccccttcccccatccctaccactgtggccccaagaggggcgggctcagagctttgtcacttgccacatggtgtctcccaacatgggagggatcagccccgcctgtcacaataaagtttattatgaaaacaggctggtgtggggacatggggacagataagtacatttaggttgggtggctc

SEQ ID NO: 359566 - DNA, 2126 bp, Homo sapiens
gaattcatctgtcgactgctaccacgggagttccccggagaaggatcctgcagcccgagtcccggtgagtgcgagaggacccgcgccccctgtcacccctcacttctcctgagtcccaaaggataaagcttggggttcatcctccttccctggatcactccacagtcctcaggcttccccaatccaggggactcggcgccgggacgctgctatggacgacattttcactcagtgccgggagggcaacgcagtcgccgttcgcctgtggctggacaacacggagaacgacctcaaccagggggacgatcatggcttctcccccttgcactgggcctgccgagagggccgctctgctgtggttgagatgttgatcatgcggggggcacggatcaatgtaatgaaccgtggggatgacacccccctgcatctggcagccagtcatggacaccgtgatattgtacagaagctattgcagtacaaggcagacatcaatgcagtgaatgaacacgggaatgtgcccctgcactatgcctgtttttggggccaagatcaagtggcagaggacctggtggcaaatggggcccttgtcagcatctgtaacaagtatggagagatgcctgtggacaaagccaaggcacccctgagagagcttctccgagagcgggcagagaagatgggccagaatctcaaccgtattccatacaaggacacattctggaaggggaccacccgcactcggcccctgagtcaccactgtgggaagaagggttgtaaaaggaaataatcctggcctcttggggctgggttagggtgaagctgggtacctgacctgcccacactcttaggaaatggaaccctgaacaaacactctggcattgacttcaaacagcttaacttcctgacgaagctcaacgagaatcactctggagaggtgacccctgcccttcttgcccttccctcactaaacccccataaattacttgctttgtacctgttttaagtttttcctccagttagtgggcaaggaagtggcagcaacatttcaagcctcctaacccctacctgtcctgcagctatggaagggccgctggcagggcaatgacattgtcgtgaaggtgctgaaggttcgagactggagtacaaggaagagcagggacttcaatgaagagtgtccccggctcaggattttctcgcatccaaatgtgctcccagtgctaggtgcctgccagtctccacctgctcctcatcctactctcatcacacactggatgccgtatggatccctctacaatgtactacatgaaggcaccaatttcgtcgtggaccagagccaggctgtgaagtttgctttggacatggcaaggggcatggccttcctacacacactagagcccctcatcccacgacatgcactcaatagccgtagtgtaatgattgatgaggacatgactgcccgaattagcatggctgatgtcaagttctctttccaatgtcctggtcgcatgtatgcacctgcctgggtagcccccgaagctctgcagaagaagcctgaagacacaaacagacgctcagcagacatgtggagttttgcagtgcttctgtgggaactggtgacacgggaggtaccctttgctgacctctccaatatggagattggaatgaaggtggcattggaaggccttcggcctaccatcccaccaggtatttcccctcatgtgtgtaagctcatgaagatctgcatgaatgaagaccctgcaaagcgacccaaatttgacatgattgtgcctatccttgagaagatgcaggacaagtaggactggaaggtccttgcctgaactccagaggtgtcgggacatggttgggggaatgcacctccccaaagcagcaggcctctggttgcctcccccgcctccagtcatggtactaccccagccatggggtccatccccttcccccatccctaccactgtggccccaagaggggcgggctcagagctttgtcacttgccacatggtgtctcccaacatgggagggatcagccccgcctgtcacaataaagtttattatgaaaacaggctggtgtggggacatggggacagataagtacatttaggttgggtggctc

SEQ ID NO: 359567 - DNA, 1029 bp, Homo sapiens
ggcggggcggggccggcggcgggctgcgggcgcggccggacgggagttccccggagaaggatcctgcagcccgagtcccgtcctcaggcttccccaatccaggggactcggcgccgggacgctgctatggacgacattttcactcagtgccgggagggcaacgcagtcgccgttcgcctgtggctggacaacacggagaacgacctcaaccagggggacgatcatggcttctcccccttgcactgggcctgccgagagggccgctctgctgtggttgagatgttgatcatgcggggggcacggatcaatgtaatgaaccgtggggatgacacccccctgcatctggcagccagtcatggacaccgtgatattgtacagaagctattgcagtacaaggcagacatcaatgcagtgaatgaacacgggaatgtgcccctgcactatgcctgtttttggggccaagatcaagtggcagaggacctggtggcaaatggggcccttgtcagcatctgtaacaagtatggagagatgcctgtggacaaagccaaggcacccctgagagagcttctccgagagcgggcagagaagatgggccagaatctcaaccgtattccatacaaggacacattctggaaggggaccacccgcactcggccccgaaatggaaccctgaacaaacactctggcattgacttcaaacagcttaacttcctgacgaagctcaacgagaatcactctggagagctatggaagggccgctggcagggcaatgacattgtcgtgaaggtgctgaaggttcgagactggagtacaaggaagagcagggacttcaatgaagagtgtccccggctcaggattttctcgcatccaaatgtgctcccagtgctaggtgcctgccagtctccacctgctcctcatcctactctcatcacacactggatgccgtatggatccctctacaatgtactacatgaaggcaccaatttcgtcgtgggcagccactgtggagccacttcgtgggcagcgggg

SEQ ID NO: 359568 - DNA, 1030 bp, Homo sapiens
  misc_feature (911)..(912): n is a, c, g, or t
  misc_feature (919)..(919): n is a, c, g, or t
  misc_feature (921)..(921): n is a, c, g, or t
  misc_feature (925)..(925): n is a, c, g, or t
  misc_feature (927)..(928): n is a, c, g, or t
  misc_feature (937)..(937): n is a, c, g, or t
  misc_feature (942)..(942): n is a, c, g, or t
ggcggggcggggccggcggcgggctgcgggcgcggccggacgggagttccccggagaaggatcctgcagcccgagtcccgaggataaagcttggggttcatcctccttccctggatcactccacagtcctcaggcttccccaatccaggggactcggcgccgggacgctgctatggacgacattttcactcagtgccgggagggcaacgcagtcgccgttcgcctgtggctggacaacacggagaacgacctcaaccagggggacgatcatggcttctcccccttgcactgggcctgccgagagggccgctctgctgtggttgagatgttgatcatgcggggggcacggatcaatgtaatgaaccgtggggatgacacccccctgcatctggcagccagtcatggacaccgtgatattgtacagaagctattgcagtacaaggcagacatcaatgcagtgaatgaacacgggaatgtgcccctgcactatgcctgtttttggggccaagatcaagtggcagaggacctggtggcaaatggggcccttgtcagcatctgtaacaagtatggagagatgcctgtggacaaagccaaggcacccctgagagagcttctccgagagcgggcagagaagatgggccagaatctcaaccgtattccatacaaggacacattctggaaggggaccacccgcactcggccccgaaatggaaccctgaacaaacactctggcattgacttcaaacagcttaacttcctgacgaagctcaacgagaatcactctggagagctatggaagggccgctggcagggcaatgacattgtcgtgaaggtgctgaaggttcgagactggagtacaaggaagagcagggacttcaatgaagagtgtccccggctcaggatttctcgcnnccaatgngntccngnntggtggcgncagtnccctggtctcatctactctccccgggtcggttgtcccctcagtttttgagcccttttggggcccccggtggtgtgccgggggggcccc

SEQ ID NO: 359569 - DNA, 2768 bp, Homo sapiens
tcagagtggcaaattcaaattctttattttttaaaattggtggagtttagtttttaggtttgacaggtcaggatcacctgtcatcttagtctagacttcactggttcccattaggttctacactatttctctttaatactttgcaaagtcatttgttccatttttcatataattctcaaagggtaccctgataaagacagtaagcactgttactgttttgttggtgaggaaatagaggcttaggcagttgcccagtgggcctagcatctaggaagactctagctgagtctaggaagactctaggaagatgctgccagaaggaaaaggggtggaattaatgaaactggaaggttgtggtgctggtttgaggagtaaagtatgggggccaaagttggctatatgctggatatgaagagggggttaattccttgcaggtcttcttgagatagaagtccaggccctgaggtggcacgcagcctgatagtgaacagaacccttgtgcccatacttttgccccccgagtttggcctgccctagcgccacaggcagtactggaagctgataagtcagggcacaaattaaaggtctaggaggcaagaccaactgataaacagggggcgtaatgcttcctggggataatcccatctcaaggaaaagcttttggctatttctgtgttagcagatgcgagcaagttgtggaggaaaatgattaacttaaaggccacaccccccaaccccttcagctgtacgggcatctggatggccagacccctgatcagctccaggccttgcctagagtcgcacacaggaagtgaccacaacactaaggcatccggaggctgctggcccagaccacggaccgccccctgctccgccccttgaatctgcagccccgaactggagggaatttccttttatggccccaggctgtcaggcaggcccagctccaaaccaattgttttgttttgtttgtatactttactttataaaatacatatttcttggaaaagaaaaaaatcaggtatagttttaatcccaaaacagccattctcattttcttctgttttctatgcacaggattgctaagtaggggaatcctgctttgcatggtggtttgttatctacctcatcagtagtcaaaagcatttctccttttcaacataaacccttccaaaacatcatttaaattccattccatttttagatgttagtttcagtaccagagccaaatagtaagtttgttccctcttctataagttgtggcctgccttctccaagacacccttctcccccactaacatgcactgaacagctgctgtcaatccattccctcaagaaacttaaaggtctaacagacaagacagtccattaacagatttttacaatccagtgcaacaagtgctgaagtagggggacatataagatgtggtggaaaacagaaaggaccaatagatgttgcagaaggggtgcaagagaaaccaggggaagagcactaccacctaaggaaatgagatgtgggatatgatgaagataacacatttttttatagaggttgttgagatatctaggtggttggtttggtttgaagctcaggggaaggtctgaaatggacagctttgggagttgctggcatgaatgagaatcaaagtcctagagaggtaagccttcccagagagtatgtaattatcagtttttcaggaatcaaaacctttgccccatcccacctccagctcaatgaccattgccccttcctcaaagggacgatcatggcttctcccccttgcactgggcctgccgagagggccgctctgctgtggttgagatgttgatcatgcggggggcacggatcaatgtaatgaaccgtggggatgacacccccctgcatctggcagccagtcatggacaccgtgatattgtacagaaggtacgtacaaactccttcgtcatccacatcacatacatgccatgagggtcagtcacaggcactgtaacatacagtagaaagcatgtgtgctcttcccccttttcccatgccctgacaccagtatctcatttggaactgactgtactttctgcctcttctttttgtctggccatggggtccagctattgcagtacaaggcagacatcaatgcagtgaatgaacacgggaatgtgcccctgcactatgcctgtttttggggccaagatcaagtggcagaggtgagtactcagcccttaattcctgagatgggtaggaagtaaagtctgagccttggtgggagattttggaaccctcaacccattctgtcagtactactgtgtgacacttacaggattaagttctacatttgtgcattcatggttggttcagtgactgccagcgaggtagcagtggctctcatcataatggccttttcattccaggacctgtcttctccctctgtaccacagcttaggttgtttttcttccctagagcgggcagagaagatgggccagaatctcaaccgtattccatacaaggacacattctggaaggggaccacccgcactcggccccctccttctatctgttttctcttcctcagattgatgaggacatgactgcccgaattagcatggctgatgtcaagttctctttccaatgtcctggtcgcatgtatgcacctgcctgggtagcccccgaaggtgagtgaagtcatcatgtcgggaggtaaaaaaggaccacctcagaagtagtggaagggggcagagacaggacaggcaagggggccagaacagacaagcc

SEQ ID NO: 359570 - DNA, 2284 bp, Homo sapiens
tcagagtggcaaattcaaattctttattttttaaaattggtggagtttagtttttaggtttgacaggtcaggatcacctgtcatcttagtctagacttcactggttcccattaggttctacactatttctctttaatactttgcaaagtcatttgttccatttttcatataattctcaaagggtaccctgataaagacagtaagcactgttactgttttgttggtgaggaaatagaggcttaggcagttgcccagtgggcctagcatctaggaagactctagctgagtctaggaagactctaggaagatgctgccagaaggaaaaggggtggaattaatgaaactggaaggttgtggtgctggtttgaggagtaaagtatgggggccaaagttggctatatgctggatatgaagagggggttaattccttgcaggtcttcttgagatagaagtccaggccctgaggtggcacgcagcctgatagtgaacagaacccttgtgcccatacttttgccccccgagtttggcctgccctagcgccacaggcagtactggaagctgataagtcagggcacaaattaaaggtctaggaggcaagaccaactgataaacagggggcgtaatgcttcctggggataatcccatctcaaggaaaagcttttggctatttctgtgttagcagatgcgagcaagttgtggaggaaaatgattaacttaaaggccacaccccccaaccccttcagctgtacgggcatctggatggccagacccctgatcagctccaggccttgcctagagtcgcacacaggaagtgaccacaacactaaggcatccggaggctgctggcccagaccacggaccgccccctgctccgccccttgaatctgcagccccgaactggagggaatttccttttatggccccaggctgtcaggcaggcccagctccaaaccaattgttttgttttgtttgtatactttactttataaaatacatatttcttggaaaagaaaaaaatcaggtatagttttaatcccaaaacagccattctcattttcttctgttttctatgcacaggattgctaagtaggggaatcctgctttgcatggtggtttgttatctacctcatcagtagtcaaaagcatttctccttttcaacataaacccttccaaaacatcatttaaattccattccatttttagatgttagtttcagtaccagagccaaatagtaagtttgttccctcttctataagttgtggcctgccttctccaagacacccttctcccccactaacatgcactgaacagctgctgtcaatccattccctcaagaaacttaaaggtctaacagacaagacagtccattaacagatttttacaatccagtgcaacaagtgctgaagtagggggacatataagatgtggtggaaaacagaaaggaccaatagatgttgcagaaggggtgcaagagaaaccaggggaagagcactaccacctaaggaaatgagatgtgggatatgatgaagataacacatttttttatagaggttgttgagatatctaggtggttggtttggtttgaagctcaggggaaggtctgaaatggacagctttgggagttgctggcatgaatgagaatcaaagtcctagagaggtaagccttcccagagagtatgtaattatcagtttttcaggaatcaaaacctttgccccatcccacctccagctcaatgaccattgccccttcctcaaagggacgatcatggcttctcccccttgcactgggcctgccgagagggccgctctgctgtggttgagatgttgatcatgcggggggcacggatcaatgtaatgaaccgtggggatgacacccccctgcatctggcagccagtcatggacaccgtgatattgtacagaagctattgcagtacaaggcagacatcaatgcagtgaatgaacacgggaatgtgcccctgcactatgcctgtttttggggccaagatcaagtggcagaggacctggtggcaaatggggcccttgtcagcatctgtaacaagtatggagagatgcctgtggacaaagccaaggcacccctgagagagcttctccgagagcgggcagagaagatgggccagaatctcaaccgtattccatccccttcccccatccctaccactgtggccccaagaggggcgggctcagagctttgtcacttgccacatggtgtctcccaacatgggagggatcagccccgcctgtcacaataaagtttattatga

SEQ ID NO: 359571 - DNA, 2340 bp, Homo sapiens
tcagagtggcaaattcaaattctttattttttaaaattggtggagtttagtttttaggtttgacaggtcaggatcacctgtcatcttagtctagacttcactggttcccattaggttctacactatttctctttaatactttgcaaagtcatttgttccatttttcatataattctcaaagggtaccctgataaagacagtaagcactgttactgttttgttggtgaggaaatagaggcttaggcagttgcccagtgggcctagcatctaggaagactctagctgagtctaggaagactctaggaagatgctgccagaaggaaaaggggtggaattaatgaaactggaaggttgtggtgctggtttgaggagtaaagtatgggggccaaagttggctatatgctggatatgaagagggggttaattccttgcaggtcttcttgagatagaagtccaggccctgaggtggcacgcagcctgatagtgaacagaacccttgtgcccatacttttgccccccgagtttggcctgccctagcgccacaggcagtactggaagctgataagtcagggcacaaattaaaggtctaggaggcaagaccaactgataaacagggggcgtaatgcttcctggggataatcccatctcaaggaaaagcttttggctatttctgtgttagcagatgcgagcaagttgtggaggaaaatgattaacttaaaggccacaccccccaaccccttcagctgtacgggcatctggatggccagacccctgatcagctccaggccttgcctagagtcgcacacaggaagtgaccacaacactaaggcatccggaggctgctggcccagaccacggaccgccccctgctccgccccttgaatctgcagccccgaactggagggaatttccttttatggccccaggctgtcaggcaggcccagctccaaaccaattgttttgttttgtttgtatactttactttataaaatacatatttcttggaaaagaaaaaaatcaggtatagttttaatcccaaaacagccattctcattttcttctgttttctatgcacaggattgctaagtaggggaatcctgctttgcatggtggtttgttatctacctcatcagtagtcaaaagcatttctccttttcaacataaacccttccaaaacatcatttaaattccattccatttttagatgttagtttcagtaccagagccaaatagtaagtttgttccctcttctataagttgtggcctgccttctccaagacacccttctcccccactaacatgcactgaacagctgctgtcaatccattccctcaagaaacttaaaggtctaacagacaagacagtccattaacagatttttacaatccagtgcaacaagtgctgaagtagggggacatataagatgtggtggaaaacagaaaggaccaatagatgttgcagaaggggtgcaagagaaaccaggggaagagcactaccacctaaggaaatgagatgtgggatatgatgaagataacacatttttttatagaggttgttgagatatctaggtggttggtttggtttgaagctcaggggaaggtctgaaatggacagctttgggagttgctggcatgaatgagaatcaaagtcctagagaggtaagccttcccagagagtatgtaattatcagtttttcaggaatcaaaacctttgccccatcccacctccagctcaatgaccattgccccttcctcaaagggacgatcatggcttctcccccttgcactgggcctgccgagagggccgctctgctgtggttgagatgttgatcatgcggggggcacggatcaatgtaatgaaccgtggggatgacacccccctgcatctggcagccagtcatggacaccgtgatattgtacagaagctattgcagtacaaggcagacatcaatgcagtgaatgaacacgggaatgtgcccctgcactatgcctgtttttggggccaagatcaagtggcagaggacctggtggcaaatggggcccttgtcagcatctgtaacaagtatggagagatgcctgtggacaaagccaaggcacccctgagagagcttctccgagagcgggcagagaagatgggccagaatctcaaccgtattccatccccttcccccatccctaccactgtggccccaagaggggcgggctcagagctttgtcacttgccacatggtgtctcccaacatgggagggatcagccccgcctgtcacaataaagtttattatgaaaacaggctggtgtggggacatggggacagataagtacatttaggttgggtggctc

SEQ ID NO: 359572 - DNA, 2258 bp, Homo sapiens
tcagagtggcaaattcaaattctttattttttaaaattggtggagtttagtttttaggtttgacaggtcaggatcacctgtcatcttagtctagacttcactggttcccattaggttctacactatttctctttaatactttgcaaagtcatttgttccatttttcatataattctcaaagggtaccctgataaagacagtaagcactgttactgttttgttggtgaggaaatagaggcttaggcagttgcccagtgggcctagcatctaggaagactctagctgagtctaggaagactctaggaagatgctgccagaaggaaaaggggtggaattaatgaaactggaaggttgtggtgctggtttgaggagtaaagtatgggggccaaagttggctatatgctggatatgaagagggggttaattccttgcaggtcttcttgagatagaagtccaggccctgaggtggcacgcagcctgatagtgaacagaacccttgtgcccatacttttgccccccgagtttggcctgccctagcgccacaggcagtactggaagctgataagtcagggcacaaattaaaggtctaggaggcaagaccaactgataaacagggggcgtaatgcttcctggggataatcccatctcaaggaaaagcttttggctatttctgtgttagcagatgcgagcaagttgtggaggaaaatgattaacttaaaggccacaccccccaaccccttcagctgtacgggcatctggatggccagacccctgatcagctccaggccttgcctagagtcgcacacaggaagtgaccacaacactaaggcatccggaggctgctggcccagaccacggaccgccccctgctccgccccttgaatctgcagccccgaactggagggaatttccttttatggccccaggctgtcaggcaggcccagctccaaaccaattgttttgttttgtttgtatactttactttataaaatacatatttcttggaaaagaaaaaaatcaggtatagttttaatcccaaaacagccattctcattttcttctgttttctatgcacaggattgctaagtaggggaatcctgctttgcatggtggtttgttatctacctcatcagtagtcaaaagcatttctccttttcaacataaacccttccaaaacatcatttaaattccattccatttttagatgttagtttcagtaccagagccaaatagtaagtttgttccctcttctataagttgtggcctgccttctccaagacacccttctcccccactaacatgcactgaacagctgctgtcaatccattccctcaagaaacttaaaggtctaacagacaagacagtccattaacagatttttacaatccagtgcaacaagtgctgaagtagggggacatataagatgtggtggaaaacagaaaggaccaatagatgttgcagaaggggtgcaagagaaaccaggggaagagcactaccacctaaggaaatgagatgtgggatatgatgaagataacacatttttttatagaggttgttgagatatctaggtggttggtttggtttgaagctcaggggaaggtctgaaatggacagctttgggagttgctggcatgaatgagaatcaaagtcctagagaggtaagccttcccagagagtatgtaattatcagtttttcaggaatcaaaacctttgccccatcccacctccagctcaatgaccattgccccttcctcaaagggacgatcatggcttctcccccttgcactgggcctgccgagagggccgctctgctgtggttgagatgttgatcatgcggggggcacggatcaatgtaatgaaccgtggggatgacacccccctgcatctggcagccagtcatggacaccgtgatattgtacagaagctattgcagtacaaggcagacatcaatgcagtgaatgaacacgggaatgtgcccctgcactatgcctgtttttggggccaagatcaagtggcagaggacctggtggcaaatggggcccttgtcagcatctgtaacaagtatggagagatgcctgtggacaaagccaaggcacccctgtggccccaagaggggcgggctcagagctttgtcacttgccacatggtgtctcccaacatgggagggatcagccccgcctgtcacaataaagtttattatgaaaacaggctggtgtggggacatggggacagataagtacatttaggttgggtggctc

SEQ ID NO: 359573 - DNA, 581 bp, Homo sapiens
ggcggggcggggccggcggcgggctgcgggcgcggccggacgggagttccccggagaaggatcctgcagcccgagtcccgtcctcaggcttccccaatccaggggactcggcgccgggacgctgctatggacgacattttcactcagtgccgggagggcaacgcagtcgccgttcgcctgtggctggacaacacggagaacgacctcaaccagggggacgatcatggcttctcccccttgcactgggcctgccgagagggccgctctgctgtggttgagatgttgatcatgcggggggcacggatcaatgtaatgaaccgtggggatgacacccccctgcatctggcagccagtcatggacaccgtgatattgtacagaagctattgcagtacaaggcagacatcaatgcagtgaatgaacacgggaatgtgcccctgcactatgcctgtttttggggccaagatcaagtggcagagctgtggccccaagaggggcgggctcagagctttgtcacttgccacatggtgtctcccaacatgggagggatcagccccgcctgtcacaataaagtttattatga

SEQ ID NO: 359574 - DNA, 581 bp, Homo sapiens
gaggacacagccaggggtcatcccgcagccccgaactccttcacagacccccactagccggggacgcagctcaggccccctacccccaacacaaacacttctctcctgtagaggataaagcttggggttcatcctccttccctggatcactccacagtcctcaggcttccccaatccaggggactcggcgccgggacgctgctatggacgacattttcactcagtgccgggagggcaacgcagtcgccgttcgcctgtggctggacaacacggagaacgacctcaaccagggggacgatcatggcttctcccccttgcactgggcctgccgagagggccgctctgctgtggttgcctcccccgcctccagtcatggtactaccccagccatggggtccatccccttcccccatccctaccactgtggccccaagaggggcgggctcagagctttgtcacttgccacatggtgtctcccaacatgggagggatcagccccgcctgtcacaataaagtttattatgaaaacaggctggtgtggggacatggggacagataagtacatttaggttgggtggctc

SEQ ID NO: 359575 - DNA, 271 bp, Homo sapiens
gaattcatctgtcgactgctaccacgggagttccccggagaaggatcctgcagcccgagtcccggtgagtgcgagaggacccgcgccccctgtcacccctcacttctcctgagtcccaagtaaggaacggagccaaccctggggaggacccccggtcccctctcccagagtatacggagcctgaacctccccacttcccccaactctgttcgccgatagggtctagttgcctgctctcggacatccgttcagcagacactacctcttcgtc

SEQ ID NO: 359576 - DNA, 1797 bp, Homo sapiens
ggcggggcggggccggcggcgggctgcgggcgcggccggacgggagttccccggagaaggatcctgcagcccgagtcccgtcctcaggcttccccaatccaggggactcggcgccgggacgctgctatggacgacattttcactcagtgccgggagggcaacgcagtcgccgttcgcctgtggctggacaacacggagaacgacctcaaccagggggacgatcatggcttctcccccttgcactgggcctgccgagagggccgctctgctgtggttgagatgttgatcatgcggggggcacggatcaatgtaatgaaccgtggggatgacacccccctgcatctggcagccagtcatggacaccgtgatattgtacagaagctattgcagtacaaggcagacatcaatgcagtgaatgaacacgggaatgtgcccctgcactatgcctgtttttggggccaagatcaagtggcagaggacctggtggcaaatggggcccttgtcagcatctgtaacaagtatggagagatgcctgtggacaaagccaaggcacccctgagagagcttctccgagagcgggcagagaagatgggccagaatctcaaccgtattccatacaaggacacattctggaaggggaccacccgcactcggccccgaaatggaaccctgaacaaacactctggcattgacttcaaacagcttaacttcctgacgaagctcaacgagaatcactctggagagctatggaagggccgctggcagggcaatgacattgtcgtgaaggtgctgaaggttcgagactggagtacaaggaagagcagggacttcaatgaagagtgtccccggctcaggattttctcgcatccaaatgtgctcccagtgctaggtgcctgccagtctccacctgctcctcatcctactctcatcacacactggatgccgtatggatccctctacaatgtactacatgaaggcaccaatttcgtcgtggaccagagccaggctgtgaagtttgctttggacatggcaaggggcatggccttcctacacacactagagcccctcatcccacgacatgcactcaatagccgtagtgtaatgattgatgaggacatgactgcccgaattagcatggctgatgtcaagttctctttccaatgtcctggtcgcatgtatgcacctgcctgggtagcccccgaagctctgcagaagaagcctgaagacacaaacagacgctcagcagacatgtggagttttgcagtgcttctgtgggaactggtgacacgggaggtaccctttgctgacctctccaatatggagattggaatgaaggtggcattggaaggccttcggcctaccatcccaccaggtatttcccctcatgtgtgtaagctcatgaagatctgcatgaatgaagaccctgcaaagcgacccaaatttgacatgattgtgcctatccttgagaagatgcaggacaagtaggactggaaggtccttgcctgaactccagaggtgtcgggacatggttgggggaatgcacctccccaaagcagcaggcctctggttgcctcccccgcctccagtcatggtactaccccagccatggggtccatccccttcccccatccctaccactgtggccccaagaggggcgggctcagagctttgtcacttgccacatggtgtctcccaacatgggagggatcagccccgcctgtcacaataaagtttattatgaaaacaggctggtgtggggacatggggacagataagtacatttaggttgggtggctc

SEQ ID NO: 359577 - DNA, 1874 bp, Homo sapiens
gaggacacagccaggggtcatcccgcagccccgaactccttcacagacccccactagccggggacgcagctcaggccccctacccccaacacaaacacttctctcctgtagaggataaagcttggggttcatcctccttccctggatcactccacagtcctcaggcttccccaatccaggggactcggcgccgggacgctgctatggacgacattttcactcagtgccgggagggcaacgcagtcgccgttcgcctgtggctggacaacacggagaacgacctcaaccagggggacgatcatggcttctcccccttgcactgggcctgccgagagggccgctctgctgtggttgagatgttgatcatgcggggggcacggatcaatgtaatgaaccgtggggatgacacccccctgcatctggcagccagtcatggacaccgtgatattgtacagaagctattgcagtacaaggcagacatcaatgcagtgaatgaacacgggaatgtgcccctgcactatgcctgtttttggggccaagatcaagtggcagaggacctggtggcaaatggggcccttgtcagcatctgtaacaagtatggagagatgcctgtggacaaagccaaggcacccctgagagagcttctccgagagcgggcagagaagatgggccagaatctcaaccgtattccatacaaggacacattctggaaggggaccacccgcactcggccccgaaatggaaccctgaacaaacactctggcattgacttcaaacagcttaacttcctgacgaagctcaacgagaatcactctggagagctatggaagggccgctggcagggcaatgacattgtcgtgaaggtgctgaaggttcgagactggagtacaaggaagagcagggacttcaatgaagagtgtccccggctcaggattttctcgcatccaaatgtgctcccagtgctaggtgcctgccagtctccacctgctcctcatcctactctcatcacacactggatgccgtatggatccctctacaatgtactacatgaaggcaccaatttcgtcgtggaccagagccaggctgtgaagtttgctttggacatggcaaggggcatggccttcctacacacactagagcccctcatcccacgacatgcactcaatagccgtagtgtaatgattgatgaggacatgactgcccgaattagcatggctgatgtcaagttctctttccaatgtcctggtcgcatgtatgcacctgcctgggtagcccccgaagctctgcagaagaagcctgaagacacaaacagacgctcagcagacatgtggagttttgcagtgcttctgtgggaactggtgacacgggaggtaccctttgctgacctctccaatatggagattggaatgaaggtggcattggaaggccttcggcctaccatcccaccaggtatttcccctcatgtgtgtaagctcatgaagatctgcatgaatgaagaccctgcaaagcgacccaaatttgacatgattgtgcctatccttgagaagatgcaggacaagtaggactggaaggtccttgcctgaactccagaggtgtcgggacatggttgggggaatgcacctccccaaagcagcaggcctctggttgcctcccccgcctccagtcatggtactaccccagccatggggtccatccccttcccccatccctaccactgtggccccaagaggggcgggctcagagctttgtcacttgccacatggtgtctcccaacatgggagggatcagccccgcctgtcacaataaagtttattatgaaaacaggctggtgtggggacatggggacagataagtacatttaggttgggtggctc

SEQ ID NO: 359578 - DNA, 1677 bp, Homo sapiens
ggcggggcggggccggcggcgggctgcgggcgcggccggacgggagttccccggagaaggatcctgcagcccgagtcccgaggataaagcttggggttcatcctccttccctggatcactccacagtcctcaggcttccccaatccaggggactcggcgccgggacgctgctatggacgacattttcactcagtgccgggagggcaacgcagtcgccgttcgcctgtggctggacaacacggagaacgacctcaaccagggctattgcagtacaaggcagacatcaatgcagtgaatgaacacgggaatgtgcccctgcactatgcctgtttttggggccaagatcaagtggcagaggacctggtggcaaatggggcccttgtcagcatctgtaacaagtatggagagatgcctgtggacaaagccaaggcacccctgagagagcttctccgagagcgggcagagaagatgggccagaatctcaaccgtattccatacaaggacacattctggaaggggaccacccgcactcggccccgaaatggaaccctgaacaaacactctggcattgacttcaaacagcttaacttcctgacgaagctcaacgagaatcactctggagagctatggaagggccgctggcagggcaatgacattgtcgtgaaggtgctgaaggttcgagactggagtacaaggaagagcagggacttcaatgaagagtgtccccggctcaggattttctcgcatccaaatgtgctcccagtgctaggtgcctgccagtctccacctgctcctcatcctactctcatcacacactggatgccgtatggatccctctacaatgtactacatgaaggcaccaatttcgtcgtggaccagagccaggctgtgaagtttgctttggacatggcaaggggcatggccttcctacacacactagagcccctcatcccacgacatgcactcaatagccgtagtgtaatgattgatgaggacatgactgcccgaattagcatggctgatgtcaagttctctttccaatgtcctggtcgcatgtatgcacctgcctgggtagcccccgaagctctgcagaagaagcctgaagacacaaacagacgctcagcagacatgtggagttttgcagtgcttctgtgggaactggtgacacgggaggtaccctttgctgacctctccaatatggagattggaatgaaggtggcattggaaggccttcggcctaccatcccaccaggtatttcccctcatgtgtgtaagctcatgaagatctgcatgaatgaagaccctgcaaagcgacccaaatttgacatgattgtgcctatccttgagaagatgcaggacaagtaggactggaaggtccttgcctgaactccagaggtgtcgggacatggttgggggaatgcacctccccaaagcagcaggcctctggttgcctcccccgcctccagtcatggtactaccccagccatggggtccatccccttcccccatccctaccactgtggccccaagaggggcgggctcagagctttgtcacttgccacatggtgtctcccaacatgggagggatcagccccgcctgtcacaataaagtttattatgaaaacaggctggtgtggggacatggggacagataagtacatttaggttgggtggctc

SEQ ID NO: 359579 - DNA, 1577 bp, Homo sapiens
  misc_feature (14)..(14): n is a, c, g, or t
  misc_feature (18)..(18): n is a, c, g, or t
  misc_feature (133)..(133): n is a, c, g, or t
tccggttggcccgnatangcttctgtacaacatcacggtgtccatgactggctgccagatgcaggggggtgtcatccccacggttcattacattgatccgtgccccccgcatgatcaacatctcaaccacagnagagcggccctctcggcaggcccagtggctattgcagtacaaggcagacatcaatgcagtgaatgaacacgggaatgtgcccctgcactatgcctgtttttggggccaagatcaagtggcagaggacctggtggcaaatggggcccttgtcagcatctgtaacaagtatggagagatgcctgtggacaaagccaaggcacccctgagagagcttctccgagagcgggcagagaagatgggccagaatctcaaccgtattccatacaaggacacattctggaaggggaccacccgcactcggccccgaaatggaaccctgaacaaacactctggcattgacttcaaacagcttaacttcctgacgaagctcaacgagaatcactctggagagctatggaagggccgctggcagggcaatgacattgtcgtgaaggtgctgaaggttcgagactggagtacaaggaagagcagggacttcaatgaagagtgtccccggctcaggattttctcgcatccaaatgtgctcccagtgctaggtgcctgccagtctccacctgctcctcatcctactctcatcacacactggatgccgtatggatccctctacaatgtactacatgaaggcaccaatttcgtcgtggaccagagccaggctgtgaagtttgctttggacatggcaaggggcatggccttcctacacacactagagcccctcatcccacgacatgcactcaatagccgtagtgtaatgattgatgaggacatgactgcccgaattagcatggctgatgtcaagttctctttccaatgtcctggtcgcatgtatgcacctgcctgggtagcccccgaagctctgcagaagaagcctgaagacacaaacagacgctcagcagacatgtggagttttgcagtgcttctgtgggaactggtgacacgggaggtaccctttgctgacctctccaatatggagattggaatgaaggtggcattggaaggccttcggcctaccatcccaccaggtatttcccctcatgtgtgtaagctcatgaagatctgcatgaatgaagaccctgcaaagcgacccaaatttgacatgattgtgcctatccttgagaagatgcaggacaagtaggactggaaggtccttgcctgaactccagaggtgtcgggacatggttgggggaatgcacctccccaaagcagcaggcctctggttgcctcccccgcctccagtcatggtactaccccagccatggggtccatccccttcccccatccctaccactgtggccccaagaggggcgggctcagagctttgtcacttgccacatggtgtctcccaacatgggagggatcagccccgcctgtcacaataaagtttattatgaaaacaggctggtgtggggacatggggacagataagtacatttaggttgggtggctc

SEQ ID NO: 359580 - DNA, 1890 bp, Homo sapiens
ggcggggcggggccggcggcgggctgcgggcgcggccggacgggagttccccggagaaggatcctgcagcccgagtcccgtcctcaggcttccccaatccaggggactcggcgccgggacgctgctatggacgacattttcactcagtgccgggagggcaacgcagtcgccgttcgcctgtggctggacaacacggagaacgacctcaaccagggggacgatcatggcttctcccccttgcactgggcctgccgagagggccgctctgctgtggttgagatgttgatcatgcggggggcacggatcaatgtaatgaaccgtggggatgacacccccctgcatctggcagccagtcatggacaccgtgatattgtacagaagctattgcagtacaaggcagacatcaatgcagtgaatgaacacgggaatgtgcccctgcactatgcctgtttttggggccaagatcaagtggcagaggacctggtggcaaatggggcccttgtcagcatctgtaacaagtatggagagatgcctgtggacaaagccaaggcacccctgagagagcttctccgaggtccatctccccatcccctagcttgtgtcctctcgtcccttcccacctgtcttctccctctgtaccacagcttaggttgtttttcttccctagagcgggcagagaagatgggccagaatctcaaccgtattccatacaaggacacattctggaaggggaccacccgcactcggccccgaaatggaaccctgaacaaacactctggcattgacttcaaacagcttaacttcctgacgaagctcaacgagaatcactctggagagctatggaagggccgctggcagggcaatgacattgtcgtgaaggtgctgaaggttcgagactggagtacaaggaagagcagggacttcaatgaagagtgtccccggctcaggattttctcgcatccaaatgtgctcccagtgctaggtgcctgccagtctccacctgctcctcatcctactctcatcacacactggatgccgtatggatccctctacaatgtactacatgaaggcaccaatttcgtcgtggaccagagccaggctgtgaagtttgctttggacatggcaaggggcatggccttcctacacacactagagcccctcatcccacgacatgcactcaatagccgtagtgtaatgattgatgaggacatgactgcccgaattagcatggctgatgtcaagttctctttccaatgtcctggtcgcatgtatgcacctgcctgggtagcccccgaagctctgcagaagaagcctgaagacacaaacagacgctcagcagacatgtggagttttgcagtgcttctgtgggaactggtgacacgggaggtaccctttgctgacctctccaatatggagattggaatgaaggtggcattggaaggccttcggcctaccatcccaccaggtatttcccctcatgtgtgtaagctcatgaagatctgcatgaatgaagaccctgcaaagcgacccaaatttgacatgattgtgcctatccttgagaagatgcaggacaagtaggactggaaggtccttgcctgaactccagaggtgtcgggacatggttgggggaatgcacctccccaaagcagcaggcctctggttgcctcccccgcctccagtcatggtactaccccagccatggggtccatccccttcccccatccctaccactgtggccccaagaggggcgggctcagagctttgtcacttgccacatggtgtctcccaacatgggagggatcagccccgcctgtcacaataaagtttattatgaaaacaggctggtgtggggacatggggacagataagtacatttaggttgggtggctc

SEQ ID NO: 359581 - DNA, 868 bp, Homo sapiens
ggcggggcggggccggcggcgggctgcgggcgcggccggacgggagttccccggagaaggatcctgcagcccgagtcccgtcctcaggcttccccaatccaggggactcggcgccgggacgctgctatggacgacattttcactcagtgccgggagggcaacgcagtcgccgttcgcctgtggctggacaacacggagaacgacctcaaccagggggacgatcatggcttctcccccttgcactgggcctgccgagagggccgctctgctgtggttgagatgttgatcatgcggggggcacggatcaatgtaatgaaccgtggggatgacacccccctgcatctggcagccagtcatggacaccgtgatattgtacagaagctattgcagtacaaggcagacatcaatgcagtgaatgaacacgggaatgtgcccctgcactatgcctgtttttggggccaagatcaagtggcagaggacctggtggcaaatggggcccttgtcagcatctgtaacaagtatggagagatgcctgtggacaaagccaaggcacccctgagagagcttctccgagagcgggcagagaagatgggccagaatctcaaccgtattccatacaaggacacattctggaaggggaccacccgcactcggccccgaaatggaaccctgaacaaacactctggcattgacttcaaacagcttaacttcctgacgaagctcaacgagaatcactctggagagctatggaagggccgctggcagggcaatgacattgtcgtgaaggtgctgaaggttcgagactggagtccctgctcttccttgtactccaggtcgacgcggccggcgaatttagtagtagtagtag

SEQ ID NO: 359582 - DNA, 798 bp, Homo sapiens
ggcggggcggggccggcggcgggctgcgggcgcggccggacgggagttccccggagaaggatcctgcagcccgagtcccgtcctcaggcttccccaatccaggggactcggcgccgggacgctgctatggacgacattttcactcagtgccgggagggcaacgcagtcgccgttcgcctgtggctggacaacacggagaacgacctcaaccagggggacgatcatggcttctcccccttgcactgggcctgccgagagggccgctctgctgtggttgagatgttgatcatgcggggggcacggatcaatgtaatgaaccgtggggatgacacccccctgcatctggcagccagtcatggacaccgtgatattgtacagaagctattgcagtacaaggcagacatcaatgcagtgaatgaacacgggaatgtgcccctgcactatgcctgtttttggggccaagatcaagtggcagaggacaagtaggactggaaggtccttgcctgaactccagaggtgtcgggacatggttgggggaatgcacctccccaaagcagcaggcctctggttgcctcccccgcctccagtcatggtactaccccagccatggggtccatccccttcccccatccctaccactgtggccccaagaggggcgggctcagagctttgtcacttgccacatggtgtctcccaacatgggagggatcagccccgcctgtcacaataaagtttattatgaaaacaggctggtgtggggacatggggacagataagtacatttaggttgggtggctc

SEQ ID NO: 359583 - DNA, 188 bp, Homo sapiens
ctgcagaagaagcctgaagacacaaacagacgctcagcagacatgtggagttttgcagtgcttctgtgggaactggtgacacgggaggtaccctttgctgacctctccaatatggagattggaatgaaggtgagagcacaacagcatacatttgtgttgcgggagtggttggtgatggtgaaaataac

SEQ ID NO: 359584 - DNA, 2654 bp, Homo sapiens
  misc_feature (1119)..(1119): n is a, c, g, or t
  misc_feature (1560)..(1560): n is a, c, g, or t
tttttccctctgcatataccgttacctatgtgtgagcacatgttgttctgtaacttttttaacttaacagtgtagtcaactgataattcaataatggaagtaaaggtaaaaataaactaagcctacagagatttttacatctttgctatttaatatgtgatgaacctccatattcaggaattttatttacaaacaccttatctattctttgtccttcctctttagagtggatgtaactgaaattcagatagctttagtgattgtctttgtgttgtctgcatttggaggagcaacaatgtgggactatacggtaaatctgaatatttaaatttatatttaagtacttttcaaatatttaggaaaaagtattgcattgttaattttcttcaaaaatccttggcattgtatttaattttttttttttaattggtgtatttaatatttgttccatttcttaacatttttttcttcattttataatgtgtattatcctatataccttatggcatttcctcctatgcttgagtatattgccacatagaagaagacaacctcatttccctaatactaaataaaacaaaaacaacaacaaaaaacacacattggaataactttttccagggtgaaataaaataaatattttaaaaataaatccagtaaaatgttttacatttaaaacttgtcactcaatattaggaaagtagttaatttgcatttttataatctactttgaggtgaagattcccatattaaggaatgtttttattttctgcctgcttggtgacctcagtagtttcataaaagttggctcttaggaggccactgtcataaattcaagcttttttgcaaaagaagaacatttctgaagaaacagttgtcctgttaccacaacgtaagtccaccatactggctaactgactcacactttctgctcatagtgttaagaataataataataaggatatcaatagtcaacaactaacagtcattcaatacttatgttcctaaacattcaccatctgcccctcagttttatctgcccctcagaacaatcctataaaatagatattattagtattatgctttataaataagtcttagggtgattaagtaatttgnccaaggacacatgagaagtgctggagctaggaattaaacagactgattccagactgtatgtaatcactaagctatatatctagtaaaaatagtaagtgatacaaaactaaacatagttttgtggtaaacatgatcagcagtcacactccttgttatttacctaaatgatttgaaaacttatgtccacacaaaaacctgtacacaaatgtttacagcagctttattcataattgccaaaatttgaaagcaactaagatgtccttcatcttagctggataaactaatgctaaaaagaaatgagctatcaagccatgaaaagaagttatgcgaggaacttatggagttccaagaagttatggaggaaccttaaatgtttgttactaagagaaagaagccaatctgaaaagtctgcatattgtgtgattccaactatatgacatnctttaaaaaggcaaaattatggagacagtaaaaggatcagaagttaccatgggttggaggaagaagggatgaataggtgaagcacagagaatttttagggcagtaaaactattttgtatgatactaaatggtggctacatgtcattatacattcgtcatagcacacagaatgtgtaacaccaagattgaactctaatgtaaactatgaactttgggtgataatgacgtgtcaatgtaggttcaccagttgtaacaaacgtaccacgctggtgtaggatgttgttggcagagggaggggtggctatatacttttccactcaaattttgttgcaaacctaaaaccactctaaaaaattaagtccattaaaaacacagtatgaggccaggagttcaagaccagcctgggtaacttagcaagaccttgcctctacaaaaattctgtaaaactttagccaggcatggtggcatgcacctgtagtcccagctactcaggaggctgaggcaggagggtcaactgaacccaggagttcaaggctgcaatgagccattatcatgccactgactacactcctgcctgagtgacacagcaagaccccatctttaaaaaaaaaaaaaaaaaagatttccctgtagcatttagtatcagaattgccaattatcatttgtcagtaggctccgaaatagactttgggcatgtttttaagtagtagtgatagattcttcaatacattcatattccctctcatcatgtaagagtaaatagaatcaaggatatgctactataggcccatacaagataacagagggatgctatgcgttttttgtagtaactgttcaggttgtgcccgtaagaaggtaaatgtacgggcagatcacctgaggtcaagagttaaagaccagcctggccaacatggcaaaaccctgtctctgctaaaaatacacaaattagccgggtgtggtgatgggcacctgtaatcccagctactcgggaggctgaggcaggagaatcacttgaacctgggaggcagaggttgcagtgagccaagattgggccactgcactccagccctgggcgacaagagactcgtctcaag

SEQ ID NO: 359585 - DNA, 532 bp, Homo sapiens
tttcagtctattttctaaacatagtagcctctagcttctggcaattcattgttactgttttttaaatcctttgctgcctttggaagttttcttgaacagcagttgaccaacaggtaaatatattgctagagatttaatcctggatattaactacacagatgttttgcttgcatacacatcatgatatttgttacatttatgatgcaaatcatggtgtctccctttcctgtgatgctactttttagaagctactaaattcaaatgaactatcctttttcatgtttaagtcagatgaaatcttatgagattaaacatttagtcatagttatataaacagactaagctggtttggtggattcatctttcacttatgaagaaagcagtttcaaaaaaaagtcactttaggctggtccaatggtagtcagttatctcaattgattgctcacagtcagttacaggtcaaactccttgttcttctcttttcccccctcactactgtacttggctagtctacaaaaaataataaaaattt

SEQ ID NO: 359586 - DNA, 1547 bp, Homo sapiens
ccccagccggacccctccccgaggccccgccccacccgcgagccgcagccgcggccccacagcttctggggctggggccccggcagccgggcaggccggcctgacctcgacctccgccgtgcgggcccgaccggtgagtccagcccggcagtcgcaggacccggccgccagcctctccctccacctctccctgcccccagcgccaggcgcgggctgcgctcggtggcggcggcggggccctcaggcggccatggcggcaggcgccggggccgggtccgcgccgcgctggctgagggcgctgagcgagccgctgagcgcggcgcagctgcggcgactggaggagcaccgctacagcgcggcgggcgtctcgctgctcgagccgccgctgcagctctactggacctggctgctccagtggatcccgctctggatggcccccaactccatcaccctgctggggctcgccgtcaacgtggtcaccacgctcgtgctcatctcctactgtcccacggccaccgaagaggcaccatactggacataccttttatgtgcactgggactttttatttaccagtcactggatgctattgatgggaaacaagccagaagaacaaactcttgttcccctttaggggagctctttgaccatggctgtgactctctttccacagtatttatggcagtgggagcttcaattgccgctcgcttaggaacttatcctgactggttttttttctgctcttttattgggatgtttgtgttttattgcgctcattggcagacttatgtttcaggcatgttgagatttggaaaagtggatgtaactgaaattcagatagctttagtgattgtctttgtgttgtctgcatttggaggagcaacaatgtgggactatacgattcctattctagaaataaaattgaagatccttccagttcttggatttctaggtggagtaatattttcctgttcaaattatttccatgttatcctccatggtggtgttggcaagaatggatccactatagcaggcaccagtgtcttgtcacctggactccacataggactaattattatactggcaataatgatctataaaaagtcagcaactgatgtgtttgaaaagcatccttgtctttatatcctaatgtttggatgtgtctttgctaaagtctcacaaaaattagtggtagctcacatgaccaaaagtgaactatatcttcaagacactgtctttttggggccaggtcttttgtttttagaccagtactttaataactttatagacgaatatgttgttctatggatggcaatggtgatttcttcatttgatatggtgatatactttagtgctttgtgcctgcaaatttcaagacaccttcatctaaatatattcaagactgcatgtcatcaagcacctgaacaggttcaagttctttcttcaaagagtcatcagaataacatggattgaagagacttccgaacacttgctatctcttgctgctgctgtttcatggaaggagatattaaacatttgtttaattttt

SEQ ID NO: 359587 - DNA, 2261 bp, Homo sapiens
ccccagccggacccctccccgaggccccgccccacccgcgagccgcagccgcggccccacagcttctggggctggggccccggcagccgggcaggccggcctgacctcgacctccgccgtgcgggcccgaccggtgagtccagcccggcagtcgcaggacccggccgccagcctctccctccacctctccctgcccccagcgccaggcgcgggctgcgctcggtggcggcggcggggccctcaggcggccatggcggcaggcgccggggccgggtccgcgccgcgctggctgagggcgctgagcgagccgctgagcgcggcgcagctgcggcgactggaggagcaccgctacagcgcggcgggcgtctcgctgctcgagccgccgctgcagctctactggacctggctgctccagtggatcccgctctggatggcccccaactccatcaccctgctggggctcgccgtcaacgtggtcaccacgctcgtgctcatctcctactgtcccacggccaccgaagaggcaccatactggacataccttttatgtgcactgggactttttatttaccagtcactggatgctattgatgggaaacaagccagaagaacaaactcttgttcccctttaggggagctctttgaccatggctgtgactctctttccacagtatttatggcagtgggagcttcaattgccgctcgcttaggaacttatcctgactggttttttttctgctcttttattgggatgtttgtgttttattgcgctcattggcagacttatgtttcaggcatgttgagatttggaaaagtggatgtaactgaaattcagatagctttagtgattgtctttgtgttgtctgcatttggaggagcaacaatgtgggactatacgattcctattctagaaataaaattgaagatccttccagttcttggatttctaggtggagtaatattttcctgttcaaattatttccatgttatcctccatggtggtgttggcaagaatggatccactatagcaggcaccagtgtcttgtcacctggactccacataggactaattattatactggcaataatgatctataaaaagtcagcaactgatgtgtttgaaaagcatccttgtctttatatcctaatgtttggatgtgtctttgctaaagtctcacaaaaattagtggtagctcacatgaccaaaagtgaactatatcttcaagacactgtctttttggggccaggtcttttgtttttagaccagtactttaataactttatagacgaatatgttgttctatggatggcaatggtgatttcttcatttgatatggtgatatactttagtgctttgtgcctgcaaatttcaagacaccttcatctaaatatattcaagactgcatgtcatcaagcacctgaacaggttcacaagcatattgactgactaatagcccaaggaaaagaggagatgaagttaggggaatctatgagtgaaggaaatccccctgtgcaggaggttcaagttctttcttcaaagagtcatcagaataacatggattgaagagacttccgaacacttgctatctcttgctgctgctgtttcatggaaggagatattaaacatttgtttaatttttatttaagtgttatacctatttcagcaaataaaatatttcattgcttatattaatccttattttttcaatttcaatatgatcacttacagtttccatcataatttttttttgcaacatagccatttcttttttaaattcattttgtgcaccagtaagtagattatcatgattcttctccaactcttccatactctaaaaacacaaaagacaagttaagttacaaaggaccacttttcatctcaggttctaaacttgtacaattaattttcaaaagtagtaatttttgaatattcaaatgctcatctatttgaaataaaaatattctaagtaatacatgaataccaaaatacctactaaaaaagaaaaaatataagacatgaataaaatgttataggaagtacaatgtagtatactttgcccaaaatgggtttcctgaactgttaaggtcaagataaaaaagactggaagtcccacatcagtaaaaaccatttctattaagctttccaaatatcaagcaataatctacttatgactaatagtgtgccatgaattcactagagggaataaaataatctatagtacaacctctttcacattatgaaaaataaaaattatgtctta

SEQ ID NO: 359588 - DNA, 2168 bp, Homo sapiens
ccccagccggacccctccccgaggccccgccccacccgcgagccgcagccgcggccccacagcttctggggctggggccccggcagccgggcaggccggcctgacctcgacctccgccgtgcgggcccgaccggtgagtccagcccggcagtcgcaggacccggccgccagcctctccctccacctctccctgcccccagcgccaggcgcgggctgcgctcggtggcggcggcggggccctcaggcggccatggcggcaggcgccggggccgggtccgcgccgcgctggctgagggcgctgagcgagccgctgagcgcggcgcagctgcggcgactggaggagcaccgctacagcgcggcgggcgtctcgctgctcgagccgccgctgcagctctactggacctggctgctccagtggatcccgctctggatggcccccaactccatcaccctgctggggctcgccgtcaacgtggtcaccacgctcgtgctcatctcctactgtcccacggccaccgaagaggcaccatactggacataccttttatgtgcactgggactttttatttaccagtcactggatgctattgatgggaaacaagccagaagaacaaactcttgttcccctttaggggagctctttgaccatggctgtgactctctttccacagtatttatggcagtgggagcttcaattgccgctcgcttaggaacttatcctgactggttttttttctgctcttttattgggatgtttgtgttttattgcgctcattggcagacttatgtttcaggcatgttgagatttggaaaagtggatgtaactgaaattcagatagctttagtgattgtctttgtgttgtctgcatttggaggagcaacaatgtgggactatacgattcctattctagaaataaaattgaagatccttccagttcttggatttctaggtggagtaatattttcctgttcaaattatttccatgttatcctccatggtggtgttggcaagaatggatccactatagcaggcaccagtgtcttgtcacctggactccacataggactaattattatactggcaataatgatctataaaaagtcagcaactgatgtgtttgaaaagcatccttgtctttatatcctaatgtttggatgtgtctttgctaaagtctcacaaaaattagtggtagctcacatgaccaaaagtgaactatatcttcaagacactgtctttttggggccaggtcttttgtttttagaccagtactttaataactttatagacgaatatgttgttctatggatggcaatggtgatttcttcatttgatatggtgatatactttagtgctttgtgcctgcaaatttcaagacaccttcatctaaatatattcaagactgcatgtcatcaagcacctgaacaggttcaagttctttcttcaaagagtcatcagaataacatggattgaagagacttccgaacacttgctatctcttgctgctgctgtttcatggaaggagatattaaacatttgtttaatttttatttaagtgttatacctatttcagcaaataaaatatttcattgcttatattaatccttattttttcaatttcaatatgatcacttacagtttccatcataatttttttttgcaacatagccatttcttttttaaattcattttgtgcaccagtaagtagattatcatgattcttctccaactcttccatactctaaaaacacaaaagacaagttaagttacaaaggaccacttttcatctcaggttctaaacttgtacaattaattttcaaaagtagtaatttttgaatattcaaatgctcatctatttgaaataaaaatattctaagtaatacatgaataccaaaatacctactaaaaaagaaaaaatataagacatgaataaaatgttataggaagtacaatgtagtatactttgcccaaaatgggtttcctgaactgttaaggtcaagataaaaaagactggaagtcccacatcagtaaaaaccatttctattaagctttccaaatatcaagcaataatctacttatgactaatagtgtgccatgaattcactagagggaataaaataatctatagtacaacctctttcacattatgaaaaataaaaattatgtctta

SEQ ID NO: 359589 - DNA, 1589 bp, Homo sapiens
agcgggacgcggcgcgccgccgaccattcttggtgtctgtcgggtgcctcgggtcatttacgagcagcgagccggccttgacgcgtccaggcatcgcccttcgcgcggcgcgcagcgcgctgagatccattccgctgccacgtcgcaggacccggccgccagcctctccctccacctctccctgcccccagcgccaggcgcgggctgcgctcggtggcggcggcggggccctcaggcggccatggcggcaggcgccggggccgggtccgcgccgcgctggctgagggcgctgagcgagccgctgagcgcggcgcagctgcggcgactggaggagcaccgctacagcgcggcgggcgtctcgctgctcgagccgccgctgcagctctactggacctggctgctccagtggatcccgctctggatggcccccaactccatcaccctgctggggctcgccgtcaacgtggtcaccacgctcgtgctcatctcctactgtcccacggccaccgaagaggcaccatactggacataccttttatgtgcactgggactttttatttaccagtcactggatgctattgatgggaaacaagccagaagaacaaactcttgttcccctttaggggagctctttgaccatggctgtgactctctttccacagtatttatggcagtgggagcttcaattgccgctcgcttaggaacttatcctgactggttttttttctgctcttttattgggatgtttgtgttttattgcgctcattggcagacttatgtttcaggcatgttgagatttggaaaagtggatgtaactgaaattcagatagctttagtgattgtctttgtgttgtctgcatttggaggagcaacaatgtgggactatacgattcctattctagaaataaaattgaagatccttccagttcttggatttctaggtggagtaatattttcctgttcaaattatttccatgttatcctccatggtggtgttggcaagaatggatccactatagcaggcaccagtgtcttgtcacctggactccacataggactaattattatactggcaataatgatctataaaaagtcagcaactgatgtgtttgaaaagcatccttgtctttatatcctaatgtttggatgtgtctttgctaaagtctcacaaaaattagtggtagctcacatgaccaaaagtgaactatatcttcaagacactgtctttttggggccaggtcttttgtttttagaccagtactttaataactttatagacgaatatgttgttctatggatggcaatggtgatttcttcatttgatatggtgatatactttagtgctttgtgcctgcaaatttcaagacaccttcatctaaatatattcaagactgcatgtcatcaagcacctgaacaggttcaagttctttcttcaaagagtcatcagaataacatggattgaagagacttccgaacacttgctatctcttgctgctgctgtttcatggaaggagatattaaacatttgtttaatttttatttaagtgttatacctatttcagcaaataaaatatttcattgcttatatt

SEQ ID NO: 359590 - DNA, 1460 bp, Homo sapiens
ccccagccggacccctccccgaggccccgccccacccgcgagccgcagccgcggccccacagcttctggggctggggccccggcagccgggcaggccggcctgacctcgacctccgccgtgcgggcccgaccggtgagtccagcccggcagtcgcaggacccggccgccagcctctccctccacctctccctgcccccagcgccaggcgcgggctgcgctcggtggcggcggcggggccctcaggcggccatggcggcaggcgccggggccgggtccgcgccgcgctggctgagggcgctgagcgagccgctgagcgcggcgcagctgcggcgactggaggagcaccgctacagcgcggcgggcgtctcgctgctcgagccgccgctgcagctctactggacctggctgctccagtggatcccgctctggatggcccccaactccatcaccctgctggggctcgccgtcaacgtggtcaccacgctcgtgctcatctcctactgtcccacggccaccgaagaggcaccatactggacataccttttatgtgcactgggactttttatttaccagtcactggatgctattgatgggaaacaagccagaagaacaaactcttgttcccctttaggggagctctttgaccatggctgtgactctctttccacagtatttatggcagtgggagcttcaattgccgctcgcttaggaacttatcctgactggttttttttctgctcttttattgggatgtttgtgttttattgcgctcattggcagacttatgtttcaggcatgttgagatttggaaaagtggatgtaactgaaattcagatagctttagtgattgtctttgtgttgtctgcatttggaggagcaacaatgtgggactatacgattcctattctagaaataaaattgaagatccttccagttcttggatttctaggtggagtaatattttcctgttcaaattatttccatgttatcctccatggtggtgttggcaagaatggatccactatagcaggcaccagtgtcttgtcacctggactccacataggactaattattatactggcaataatgatctataaaaagtcagcaactgatgtgtttgaaaagcatccttgtctttatatcctaatgtttggatgtgtctttgctaaagtctcacaaaaattagtggtagctcacatgaccaaaagtgaactatatcttcaagacactgtctttttggggccaggtcttttgtttttagaccagtactttaataactttatagacgaatatgttgttctatggatggcaatggtgatttcttcatttgatatggtgatatactttagtgctttgtgcctgcaaatttcaagacaccttcatcttttattattattctaggctcgagttcgctcacactacagtcagtcgagtcaagcccgaacacgatatagggata

SEQ ID NO: 359591 - DNA, 1344 bp, Homo sapiens
ccccagccggacccctccccgaggccccgccccacccgcgagccgcagccgcggccccacagcttctggggctggggccccggcagccgggcaggccggcctgacctcgacctccgccgtgcgggcccgaccggtgagtccagcccggcagtcgcaggacccggccgccagcctctccctccacctctccctgcccccagcgccaggcgcgggctgcgctcggtggcggcggcggggccctcaggcggccatggcggcaggcgccggggccgggtccgcgccgcgctggctgagggcgctgagcgagccgctgagcgcggcgcagctgcggcgactggaggagcaccgctacagcgcggcgggcgtctcgctgctcgagccgccgctgcagctctactggacctggctgctccagtggatcccgctctggatggcccccaactccatcaccctgctggggctcgccgtcaacgtggtcaccacgctcgtgctcatctcctactgtcccacggccaccgaagaggcaccatactggacataccttttatgtgcactgggactttttatttaccagtcactggatgctattgatgggaaacaagccagaagaacaaactcttgttcccctttaggggagctctttgaccatggctgtgactctctttccacagtatttatggcagtgggagcttcaattgccgctcgcttaggaacttatcctgactggttttttttctgctcttttattgggatgtttgtgttttattgcgctcattggcagacttatgtttcaggcatgttgagatttggaaaagtggatgtaactgaaattcagatagctttagtgattgtctttgtgttgtctgcatttggaggagcaacaatgtgggactatacgttttcttgaacagcagttgaccaacaggtaaatatattgctagagatttaatcctggatattaactacacagatgttttgcttgcatacacatcatgatatttgttacatttatgatgcaaatcatggtgtctccctttcctgtgatgctactttttagaagctactaaattcaaatgaactatcctttttcatgtttaagtcagatgaaatcttatgagattaaacatttagtcatagttatataaacagactaagctggtttggtggattcatctttcacttatgaagaaagcagtttcaaaaaaaagtcactttaggctggtccaatggtagtcagttatctcaattgattgctcacagtcagttacaggtcaaactccttgttcttctcttttcccccctcactactgtacttggctagtctacaaaaaataataaaaattt

SEQ ID NO: 359592 - DNA, 148 bp, Homo sapiens
tcaaattatttccatgttatcctccatggtggtgttggcaagaatggatccactatagcagtaaggcaataatttcatcattcagtgtcaattttatgatacattttcttatcaccagttataaaaagattaaaatatgccaaagttc

SEQ ID NO: 359593 - DNA, 1598 bp, Homo sapiens
ccccagccggacccctccccgaggccccgccccacccgcgagccgcagccgcggccccacagcttctggggctggggccccggcagccgggcaggccggcctgacctcgacctccgccgtgcgggcccgaccggtgagtccagcccggcagtcgcaggacccggccgccagcctctccctccacctctccctgcccccagcgccaggcgcgggctgcgctcggtggcggcggcggggccctcaggcggccatggcggcaggcgccggggccgggtccgcgccgcgctggctgagggcgctgagcgagccgctgagcgcggcgcagctgcggcgactggaggagcaccgctacagcgcggcgggcgtctcgctgctcgagccgccgctgcagctctactggacctggctgctccagtggatcccgctctggatggcccccaactccatcaccctgctggggctcgccgtcaacgtggtcaccacgctcgtgctcatctcctactgtcccacggccaccgaagaggcaccatactggacataccttttatgtgcactgggactttttatttaccagtcactggatgctattgatgggaaacaagccagaagaacaaactcttgttcccctttaggggagctctttgaccatggctgtgactctctttccacagtatttatggcagtgggagcttcaattgccgctcgcttaggaacttatcctgactggttttttttctgctcttttattgggatgtttgtgttttattgcgctcattggcagacttatgtttcaggcatgttgagatttggaaaagtggatgtaactgaaattcagatagctttagtgattgtctttgtgttgtctgcatttggaggagcaacaatgtgggactatacgattcctattctagaaataaaattgaagatccttccagttcttggatttctaggtggagtaatattttcctgttcaaattatttccatgttatcctccatggtggtgttggcaagaatggatccactatagcaggcaccagtgtcttgtcacctggactccacataggactaattattatactggcaataatgatctataaaaagtcagcaactgatgtgtttgaaaagcatccttgtctttatatcctaatgtttggatgtgtctttgctaaagtctcacaaaaattagtggtagctcacatgaccaaaagtgaactatatcttcaagacactgtctttttggggccaggtcttttgtttttagaccagtactttaataactttatagacgaatatgttgttctatggatggcaatggtgatttcttcatttgatatggtgatatactttagtgctttgtgcctgcaaatttcaagacaccttcatctaaatatattcaagactgcatgtcatcaagcacctgaacaggttcaagttctttcttcaaagagtcatcagaataacatggattgaagagacttccgaacacttgctatctcttgctgctgctgtttcatggaaggagatattaaacatttgtttaatttttatttaagtgttatacctatttcagcaaataaaatatttcattgcttatatt

SEQ ID NO: 359594 - DNA, 1691 bp, Homo sapiens
ccccagccggacccctccccgaggccccgccccacccgcgagccgcagccgcggccccacagcttctggggctggggccccggcagccgggcaggccggcctgacctcgacctccgccgtgcgggcccgaccggtgagtccagcccggcagtcgcaggacccggccgccagcctctccctccacctctccctgcccccagcgccaggcgcgggctgcgctcggtggcggcggcggggccctcaggcggccatggcggcaggcgccggggccgggtccgcgccgcgctggctgagggcgctgagcgagccgctgagcgcggcgcagctgcggcgactggaggagcaccgctacagcgcggcgggcgtctcgctgctcgagccgccgctgcagctctactggacctggctgctccagtggatcccgctctggatggcccccaactccatcaccctgctggggctcgccgtcaacgtggtcaccacgctcgtgctcatctcctactgtcccacggccaccgaagaggcaccatactggacataccttttatgtgcactgggactttttatttaccagtcactggatgctattgatgggaaacaagccagaagaacaaactcttgttcccctttaggggagctctttgaccatggctgtgactctctttccacagtatttatggcagtgggagcttcaattgccgctcgcttaggaacttatcctgactggttttttttctgctcttttattgggatgtttgtgttttattgcgctcattggcagacttatgtttcaggcatgttgagatttggaaaagtggatgtaactgaaattcagatagctttagtgattgtctttgtgttgtctgcatttggaggagcaacaatgtgggactatacgattcctattctagaaataaaattgaagatccttccagttcttggatttctaggtggagtaatattttcctgttcaaattatttccatgttatcctccatggtggtgttggcaagaatggatccactatagcaggcaccagtgtcttgtcacctggactccacataggactaattattatactggcaataatgatctataaaaagtcagcaactgatgtgtttgaaaagcatccttgtctttatatcctaatgtttggatgtgtctttgctaaagtctcacaaaaattagtggtagctcacatgaccaaaagtgaactatatcttcaagacactgtctttttggggccaggtcttttgtttttagaccagtactttaataactttatagacgaatatgttgttctatggatggcaatggtgatttcttcatttgatatggtgatatactttagtgctttgtgcctgcaaatttcaagacaccttcatctaaatatattcaagactgcatgtcatcaagcacctgaacaggttcacaagcatattgactgactaatagcccaaggaaaagaggagatgaagttaggggaatctatgagtgaaggaaatccccctgtgcaggaggttcaagttctttcttcaaagagtcatcagaataacatggattgaagagacttccgaacacttgctatctcttgctgctgctgtttcatggaaggagatattaaacatttgtttaatttttatttaagtgttatacctatttcagcaaataaaatatttcattgcttatatt

SEQ ID NO: 359595 - DNA, 2058 bp, Homo sapiens
ccccagccggacccctccccgaggccccgccccacccgcgagccgcagccgcggccccacagcttctggggctggggccccggcagccgggcaggccggcctgacctcgacctccgccgtgcgggcccgaccggtgagtccagcccggcagtcgcaggacccggccgccagcctctccctccacctctccctgcccccagcgccaggcgcgggctgcgctcggtggcggcggcggggccctcaggcggccatggcggcaggcgccggggccgggtccgcgccgcgctggctgagggcgctgagcgagccgctgagcgcggcgcagctgcggcgactggaggagcaccgctacagcgcggcgggcgtctcgctgctcgagccgccgctgcagctctactggacctggctgctccagtggatcccgctctggatggcccccaactccatcaccctgctggggctcgccgtcaacgtggtcaccacgctcgtgctcatctcctactgtcccacggccaccgaagaggcaccatactggacataccttttatgtgcactgggactttttatttaccagtcactggatgctattgatgggaaacaagccagaagaacaaactcttgttcccctttaggggagctctttgaccatggctgtgactctctttccacagtatttatggcagtgggagcttcaattgccgctcgcttaggaacttatcctgactggttttttttctgctcttttattgggatgtttgtgttttattgcgctcattggcagacttatgtttcaggcatgttgagatttggaaaagtggatgtaactgaaattcagatagctttagtgattgtctttgtgttgtctgcatttggaggagcaacaatgtgggactatacgattcctattctagaaataaaattgaagatccttccagttcttggatttctaggtggagtaatattttcctgttcaaattatttccatgttatcctccatggtggtgttggcaagaatggatccactatagcaggcaccagtgtcttgtcacctggactccacataggactaattattatactggcaataatgatctataaaaagtcagcaactgatgtgtttgaaaagcatccttgtctttatatcctaatgtttggatgtgtctttgctaaagtctcacaaaaattagtggtagctcacatgaccaaaagtgaactatatcttcaagacactgtctttttggggccaggtcttttgtttttagaccagtactttaataactttatagacgaatatgttgttctatggatggcaatggtgatttcttcatttgatatggtgatatactttagtgctttgtgcctgcaaatttcaagacaccttcatctaaatatattcaagactgcatgtcatcaagcacctgaacaggttcacaagcatattgactgactaatagcccaaggaaaagaggagatgaagttaggggaatctatgagtgaaggaaatccccctgtgcaggaggctagtataccatcaataaggttatatttgaatataaaacataaaccctgtagatttcattgtgtcttatttcagttatgaagcccccgttgtatcatcattttttatcacagatgttctcagaattgtctacatattaattagaaacaagactaaagaaatgtcaatcctgaggacaacagtgaacccctgtaattctaagtagcagtttgtctctgagacttatcagacacagggttttcactgccaaaggattacataaatattcagaacataaaggattttagccatcttgagggtgcttactttgactgctaaaaactgaaaagtgattcaatactgcttaagtgcatggcttataatgtaattattgaatcaagttatgttctaagaaattttttatactaatcatttttcaagaggcatattagtatgttataaaatacttgcttttagtatactagaatttaaaagggctacaggaattttttaaataaaatttgtatttaataaaaggaatttgttgtaccagttcagaa

SEQ ID NO: 359596 - DNA, 1640 bp, Homo sapiens
ccccagccggacccctccccgaggccccgccccacccgcgagccgcagccgcggccccacagcttctggggctggggccccggcagccgggcaggccggcctgacctcgacctccgccgtgcgggcccgaccggtgagtccagcccggcagtcgcaggacccggccgccagcctctccctccacctctccctgcccccagcgccaggcgcgggctgcgctcggtggcggcggcggggccctcaggcggccatggcggcaggcgccggggccgggtccgcgccgcgctggctgagggcgctgagcgagccgctgagcgcggcgcagctgcggcgactggaggagcaccgctacagcgcggcgggcgtctcgctgctcgagccgccgctgcagctctactggacctggctgctccagtggatcccgctctggatggcccccaactccatcaccctgctggggctcgccgtcaacgtggtcaccacgctcgtgctcatctcctactgtcccacggccaccgaagaggcaccatactggacataccttttatgtgcactgggactttttatttaccagtcactggatgctattgatgggaaacaagccagaagaacaaactcttgttcccctttaggggagctctttgaccatggctgtgactctctttccacagtatttatggcagtgggagcttcaattgccgctcgcttaggaacttatcctgactggttttttttctgctcttttattgggatgtttgtgttttattgcgctcattggcagacttatgtttcaggcatgttgagatttggaaaagtggatgtaactgaaattcagatagctttagtgattgtctttgtgttgtctgcatttggaggagcaacaatgtgggactatacgattcctattctagaaataaaattgaagatccttccagttcttggatttctaggtggagtaatattttcctgttcaaattatttccatgttatcctccatggtggtgttggcaagaatggatccactatagcaggcaccagtgtcttgtcacctggactccacataggactaattattatactggcaataatgatctataaaaagtcagcaactgatgtgtttgaaaagcatccttgtctttatatcctaatgtttggatgtgtctttgctaaagtctcacaaaaattagtggtagctcacatgaccaaaagtgaactatatcttcaagacactgtctttttggggccaggtcttttgtttttagaccagtactttaataactttatagacgaatatgttgttctatggatggcaatggtgatttcttcatttgatatggtgatatactttagtgctttgtgcctgcaaatttcaagacaccttcatctaaatatattcaagactgcatgtcatcaagcacctgaacaggttcacaagcatattgactgactaatagcccaaggaaaagaggagatgaagttaggggaatctatgagtgaaggaaatccccctgtgcaggaggttcaagttctttcttcaaagagtcatcagaataacatggattgaagagacttccgaacacttgctatctcttgctgctgctgtttcatggaaggagatattaaacatttgtttaattttt

SEQ ID NO: 359597 - DNA, 1678 bp, Homo sapiens
ccccagccggacccctccccgaggccccgccccacccgcgagccgcagccgcggccccacagcttctggggctggggccccggcagccgggcaggccggcctgacctcgacctccgccgtgcgggcccgaccggtgagtccagcccggcagtcgcaggacccggccgccagcctctccctccacctctccctgcccccagcgccaggcgcgggctgcgctcggtggcggcggcggggccctcaggcggccatggcggcaggcgccggggccgggtccgcgccgcgctggctgagggcgctgagcgagccgctgagcgcggcgcagctgcggcgactggaggagcaccgctacagcgcggcgggcgtctcgctgctcgagccgccgctgcagctctactggacctggctgctccagtggatcccgctctggatggcccccaactccatcaccctgctggggctcgccgtcaacgtggtcaccacgctcgtgctcatctcctactgtcccacggccaccgaagaggcaccatactggacataccttttatgtgcactgggactttttatttaccagtcactggatgctattgatgggaaacaagccagaagaacaaactcttgttcccctttaggggagctctttgaccatggctgtgactctctttccacagtatttatggcagtgggagcttcaattgccgctcgcttaggaacttatcctgactggttttttttctgctcttttattgggatgtttgtgttttattgcgctcattggcagacttatgtttcaggcatgttgagatttggaaaagtggatgtaactgaaattcagatagctttagtgattgtctttgtgttgtctgcatttggaggagcaacaatgtgggactatacgattcctattctagaaataaaattgaagatccttccagttcttggatttctaggtggagtaatattttcctgttcaaattatttccatgttatcctccatggtggtgttggcaagaatggatccactatagcaggcaccagtgtcttgtcacctggactccacataggactaattattatactggcaataatgatctataaaaagtcagcaactgatgtgtttgaaaagcatccttgtctttatatcctaatgtttggatgtgtctttgctaaagtctcacaaaaattagtggtagctcacatgaccaaaagtgaactatatcttcaagacactgtctttttggggccaggtcttttgtttttagaccagtactttaataactttatagacgaatatgttgttctatggatggcaatggtgatttcttcatttgatatggtgatatactttagtgctttgtgcctgcaaatttcaagacaccttcatctaaatatattcaagactgcatgtcatcaagcacctgaacaggttcaagttctttcttcaaagagtcatcagaataacatggattgaagagacttccgaacacttgctatctcttgctgctgctgtttcatggaaggagatattaaacatttgtttaatttttatttaagtgttatacctatttcagcaaataaaatatttcattgcttatattaaaaaaaaaacaacagaaagaaaaaacgacaatgacacaagaagaacaaaaacaaagagagaacaaaaaaaagagagaac

SEQ ID NO: 359598 - DNA, 1489 bp, Homo sapiens
tccacctcccccctccccccccacccctcactccacccccccactcccaccaccccccccccaccctctccctccacctctccctccccccacccccacccaccccctccctccctcccccccccccccccctcacgcccccatccccccaccccccccccccccctcccccccgcgctccctcacccccctcaaccaacccctcacccccccgcactccccccactccaccagcaccgctacagcgcggcgggcgtctcgctgctcgagccgccgctgcagctctactggacctggctgctccagtggatcccgctctggatggcccccaactccatcaccctgctggggctcgccgtcaacgtggtcaccacgctcgtgctcatctcctactgtcccacggccaccgaagaggcaccatactggacataccttttatgtgcactgggactttttatttaccagtcactggatgctattgatgggaaacaagccagaagaacaaactcttgttcccctttaggggagctctttgaccatggctgtgactctctttccacagtatttatggcagtgggagcttcaattgccgctcgcttaggaacttatcctgactggttttttttctgctcttttattgggatgtttgtgttttattgcgctcattggcagacttatgtttcaggcatgttgagatttggaaaagtggatgtaactgaaattcagatagctttagtgattgtctttgtgttgtctgcatttggaggagcaacaatgtgggactatacgattcctattctagaaataaaattgaagatccttccagttcttggatttctaggtggagtaatattttcctgttcaaattatttccatgttatcctccatggtggtgttggcaagaatggatccactatagcaggcaccagtgtcttgtcacctggactccacataggactaattattatactggcaataatgatctataaaaagtcagcaactgatgtgtttgaaaagcatccttgtctttatatcctaatgtttggatgtgtctttgctaaagtctcacaaaaattagtggtagctcacatgaccaaaagtgaactatatcttcaagacactgtctttttggggccaggtcttttgtttttagaccagtactttaataactttatagacgaatatgttgttctatggatggcaatggtgatttcttcatttgatatggtgatatactttagtgctttgtgcctgcaaatttcaagacaccttcatctaaatatattcaagactgcatgtcatcaagcacctgaacaggttcaagttctttcttcaaagagtcatcagaataacatggattgaagagacttccgaacacttgctatctcttgctgctgctgtttcatggaaggagatattaaacatttgtttaatttttatttaagtgttatacctatttcagcaaataaaatatttcattgcttatatt

SEQ ID NO: 359599 - DNA, 1625 bp, Homo sapiens
ccccagccggacccctccccgaggccccgccccacccgcgagccgcagccgcggccccacagcttctggggctggggccccggcagccgggcaggccggcctgacctcgacctccgccgtgcgggcccgaccggtgagtccagcccggcagtcgcaggacccggccgccagcctctccctccacctctccctgcccccagcgccaggcgcgggctgcgctcggtggcggcggcggggccctcaggcggccatggcggcaggcgccggggccgggtccgcgccgcgctggctgagggcgctgagcgagccgctgagcgcggcgcagctgcggcgactggaggagcaccgctacagcgcggcgggcgtctcgctgctcgagccgccgctgcagctctactggacctggctgctccagtggatcccgctctggatggcccccaactccatcaccctgctggggctcgccgtcaacgtggtcaccacgctcgtgctcatctcctactgtcccacggccaccgaagaggcaccatactggacataccttttatgtgcactgggactttttatttaccagtcactggatgctattgatgggaaacaagccagaagaacaaactcttgttcccctttaggggagctctttgaccatggctgtgactctctttccacagtatttatggcagtgggagcttcaattgccgctcgcttaggaacttatcctgactggttttttttctgctcttttattgggatgtttgtgttttattgcgctcattggcagacttatgtttcaggcatgttgagatttggaaaagtggatgtaactgaaattcagatagctttagtgattgtctttgtgttgtctgcatttggaggagcaacaatgtgggactatacgttttcttgaacagcagttgaccaacagattcctattctagaaataaaattgaagatccttccagttcttggatttctaggtggagtaatattttcctgttcaaattatttccatgttatcctccatggtggtgttggcaagaatggatccactatagcaggcaccagtgtcttgtcacctggactccacataggactaattattatactggcaataatgatctataaaaagtcagcaactgatgtgtttgaaaagcatccttgtctttatatcctaatgtttggatgtgtctttgctaaagtctcacaaaaattagtggtagctcacatgaccaaaagtgaactatatcttcaagacactgtctttttggggccaggtcttttgtttttagaccagtactttaataactttatagacgaatatgttgttctatggatggcaatggtgatttcttcatttgatatggtgatatactttagtgctttgtgcctgcaaatttcaagacaccttcatctaaatatattcaagactgcatgtcatcaagcacctgaacaggttcaagttctttcttcaaagagtcatcagaataacatggattgaagagacttccgaacacttgctatctcttgctgctgctgtttcatggaaggagatattaaacatttgtttaatttttatttaagtgttatacctatttcagcaaataaaatatttcattgcttatatt

SEQ ID NO: 359600 - DNA, 827 bp, Homo sapiens
gctgggaccatctgctgggtccctcaggtgctatgcacctgccgggcatgtgatgccgtttatctcactcagtcttcacaaacccatgagagatgcagtattattccctttatgcagatgaagaaactggggttaattgaggttgagtaccttgcccagggtcacacagtaagcgatagaacctggattcaaccccagtctggagccccatggtgcgtcacacgtatgatcatcctctgtcttgtatgtcttgtttggaaagggttggaaactcttgacatgaggaatggttgttattaatagcaggttttgaggaaaaccttctagaagagtcccagtatggggaagtggcagaggagacccctgcctccaacaaccagaatgccaggatgctcgagggaagacagacacctgcctccaccctggagcaagatgccactgactaccgcctccgaagcctgcggaaactcctggctcagccccgggagggcctgctggcccccttctccaagcggaactccacagcgtccttcccagggaggaccagccacattccagtgcagcagccagagaagaggaagcaaaaacccagccctgagcccagccaagattcacctcattccgacaagtggcctcctgggcaccctgtgaagaacctgcctcagatgagggggcccaggcccaggcccgctggtgacagccccaggaagactcagtggctgaaccaggtggagtcgtacatcgcagagcagagacggggtgacaggatgcggcctcaggcccctggaaggggctggcatggggaggaggaagtggtggcggccgca

SEQ ID NO: 359601 - DNA, 429 bp, Homo sapiens
gctgggaccatctgctgggtccctcaggtgctatgcacctgccgggcatgtgatgccgtttatctcactcagtcttcacaaacccatgagagatgcagtattattccctttatgcagatgaagaaactggggttaattgaggttgagtaccttgcccagggtcacacagtaagcgatagaacctggattcaaccccagtctggagccccatggtgcgtcacacgtatgatcatcctctgtcttgtatgtcttgtttggaaagggaggggaagggaaatctaccaggcttggtggcatgtgcctgtagtcccagatactcaggaggctgaggcgggaggatcacctgagcctggggaggttgagtctgcagtaagccgtgatcatgccaccacactccagcctgggccacagagtgagagcttgtcgcca

SEQ ID NO: 359602 - DNA, 570 bp, Homo sapiens
atatattgtttttgttttccagagagattagtttataaaacaaagcaaacaaaaccctacagaagggtttgtattctggtcttgtagagcagcaaggaagggggctctcaggagtctgtggcactttgcagcctggtttaagggtaaggaccccggggacagagtgctggaggcagctactctaggtcagtcagatcccaggcagtgcagaggcaaaaaattggggtttctgaacacctccattactcattagtgaatttgtgcagagtaatgcgtacttgtaaagaaatctgttgaactggtgagaggaagccccagcaggagaatttggtgaccaaaactgtccccagcattagaggggtttcacattttcatctcctgaaggaatggctgctgtgactccctggctggattctaggggcaccctgatcttcacagccatcctcgccaacttatgtgtagtccttttcttcttgagccaagaaaagattggtagcatcttttcagacatattaaatcaagacacgacatttttaaaataaaaatatttttatagacacatatatggca

SEQ ID NO: 359603 - DNA, 544 bp, Homo sapiens
tatgttattccctatagaatctggagcaggagcctcagtctcctatcaaaaggagaagaacctgaagaaaacacttctcttccttctctctgcctaggggcagtgaccttggattcaaccaccatcatcccttccagacaccagaggggggagtcccacaaggcagaaggtgcccctgtgacccatccacttctcttccatgttctttacctccttgctcaggaagccataaagttgagctgagtggaaggtgaatttcattgcaaagtttacacaggctctgctgacaggttcatgaaaacactactgaatatgttacataccaccaaggctcacagcacatcctgtgttggaagtgatacttttccattaccagtaaacctccttttgtcctaggagctcactgaacagctaaaatcaggtgatatttttatgtggaacatgcaacgtattaagtccttttgctcagtgacccaaaaaggaactaaacggtacccagactagaaatcaatgtcaaattattcaaataaattccacttaaaga

SEQ ID NO: 359604 - DNA, 2442 bp, Homo sapiens
  misc_feature (80)..(80): n is a, c, g, or t
  misc_feature (156)..(156): n is a, c, g, or t
  misc_feature (164)..(164): n is a, c, g, or t
  misc_feature (204)..(204): n is a, c, g, or t
cccctgtatgtgggtggggtgggcgtacggaggggcgaaaaacagagggcggtcgtccctaggccccgtcttcgacttgngacacgctgggcatctcgggttataaaaggtggggctgagacgagtgtgtgtcaatttcgaacccccgactccggngctccgcnggggaaggggctgggggtcagctttgtaaagggacctaangctcctccaccctaaggcttcccctcccccaatatcccgaacagtcgcggggtggggacagtgagagcccagaaggttcgagaatgtctcagcctgtgtttcagaagcacttgaattgttggcctctgcccagtgggttcccttggccacgaaccccactccttttctggcctcagttttccgtctgtggcaagagggaggctctgtgtcaataccgaacacgcttaatttctgcaagtctcaggaagggtataataggataggatataaattacgttctctccactccccagcacctaatactgtgtggcatgctgtaggtatttaataaatacgtgttcaatgaatttatcctcccaggaatcccttaagagaggggaattttaggccaggtgccgttgatcacgcctgtaatccaaacactgggaggctgaggcgggtggatcgcttgagcccaagagttcgagaccagcctgggcaacccagggagacccccccctcgtctctacagaaacttaaaaagttagccgggcatggtggcgcactcctgtagtcgcagctgcttgggaggctgaggcaggaggatcactggagcccggaaggcggaagttgcagtgagctgaaatcgtgccactgcactccatcctggacagcagagcgagactctgtctcaaaaaaaaaaagtaaattaaagagaggaattttagttctatgttacaggtgagaaaactgaggctgggactggggtgggggcaggtcagtagcttcaagtctggactgcaggtgacaggggtaactggaacctgggtttgtcggcagctttccaacgtctctgcctgctcgacaaagcagaggcaagagtgacattttgagacgcctaccaggcctgtacaccagattccagtcccgaaatagcctgctgtgggggttgggtgagcctgtatttcaccctggggactgggaaggtgttcagaatctaggagctgcggggccgggtgcggtggctcctgcctgtaatctcagcactttgggaggctggggcgggccgatcccctgaggttaggagttcgagaccagcctggccaacatggtgaaaatacaaaaattagctgggcgtggtgtaagaatccaggagccgcagggttttccttggagtgctgcgagggctgtgggtgagggtggtgggcacagggagtgggtggggaccttacgtgtgctgttcttctcctaatccagttctcctggttttcccccgtccccgtctctcgtatttgtggtctccttgtctcctctctcccctttttcccctcccccttctctgtctcttgcttggtgttggttttctgtgtgtctctgtgtgtccccgcgccaccccctgtgctgtgtcccaaaactctgcctggctggtgcctgtcttctctcttgagggcatctgtcacctcttctgcttggtcatctgtgttcctctttatttcttcctggccccatcttgctctctccccacaccgcctgtgtctaccctcctctccccgatcccccacttctccctctctcccctgggccccaatgtcttggactctcctaccagtggcgcttgaggctacaagtccaagtatcttcagctcaagaagaagttagaagatgagttccccggccgcctggacatctgcggcgagggaactccccaggccaccgggttctttgaagtgatggtagccgggaagttgattcactctaagaagaaaggcgatggctacgtggacacagaaagcaagtttctgaagttggtggccgccatcaaagccgccttggctcagggctaatgcgccctgaaggcagagtccagggaccttgacccagcccctctcagcagacgcttcatgataggaaggactgaaaagtcttgtggacacctggtctttccctgatgttctcgtggctgctgttgggggcagagattgacgcccccggtctttgcctctgagcgggagagtctgtgtgtatgtgtcttccccggaatccacaccaccccaccctcctcctgtcccgtggtttcatcatatctctttgcataccccatgtcttccccagttgtcccctggagtttggggggacatcccgcctcaggcatccttctcaaggggaagccaagagaggcatcaggatgggtgggtttctgattgtggcaacgtttgcaaccgttcacgattcaataaatattggatgaatttaaccgaa

SEQ ID NO: 359605 - DNA, 476 bp, Homo sapiens
  misc_feature (53)..(53): n is a, c, g, or t
agagagagagagagagagagagagagagagagagagagagaaagccgccttgntcagggctaatgcgccctgaaggcagtccagggaccttgacccagcccctctcagcagacgcttcatgataggaaggactgaaaagtcttgtggacacctggtctttccctgatgttctcgtggctgctgttgggggcagagattgacgcccccggtctttgcctctgagcgggagagtctgtgtgtatgtgtcttccccggaatccacaccaccccaccctcctcctgtcccgtggtttcatcatatctctttgcataccccatgtcttccccagttgtcccctggagtttggggggacatcccgcctcaggcatccttctcaaggggaagccaagagaggcatcaggatgggtgggtttctgattgtggcaacgtttgcaaccgttcacgattcaataaatattggatgaatttaaccgaa

SEQ ID NO: 359606 - DNA, 1073 bp, Homo sapiens
ctgtccgtcctgcctggttttggggctagcatggggttggggctgaggttggtgtctcggtcccagctcaccccttccctcttcctcccctccctagaaaggcgatggctacgtggacacagaaagcaagtttctgaagttggtggccgccatcaaagccgccttggctcagggctaatgcgccctgaaggcagaggtgagggggcccactagacagggacaccaccctttggatcttctccctgccccatgctctgactccttggcccagggtggagagcctgggagatgggggggacatcacgtgtgtccccagagcgagcgggataaagttagacccggttggtggaggacaacaactgagatggggtcagaggtgtgcagggtgacagctgagatggtgatgggtcagagatatgcaggatgacagctgagatggggtcaaaggtatgcaggatgacagctgagatggtgatgggtcagaggtgtgcaggatgacagctgagatggtgatgggtcaaaggtatgcaggatgacggctgagatggtgatgggtcagaggtgtgcaggatgacggctgagatgctgatgagtcagaggtgtgcaggatgatggctgagatggtgatgggtcagaggtgtgcaggatgacggctgagatggtgatgggtcagagatgtgcaggatgacagctgagatggggtcagaggtgtgcaggatgacagctgagatagggtcagaggtatgcaggatgacagctgagatggggtatgcaagatgacagctgagttggtggtggggtcagagggctgccctaaaacagctctcctggtttgggaatgaaaagtgctagcaacccaacggttcagaatccggaactctaggtctttgtcccattgccaagaaacagttcccaacccagcaggtcatgtgacagcgtccggccaagttcccagcatgttttgagacagaatttccttgctccacaatttcgagtaggtcactaattatcaccgggctctgaacctgagaattagttctaggaatattccagacctgatccagctccagaaa

SEQ ID NO: 359607 - DNA, 193 bp, Homo sapiens
  misc_feature (16)..(16): n is a, c, g, or t
ctcgaattcaagcttntaacgatgtacggggacatgtcttccccagttgtcccctggagtttggggggacatcccgcctcaggcatccttctcaaggggaagccaagagaggcatcaggatgggtgggtttctgattgtggcaacgtttgcaaccgttcacgattcaataaatattggatgaatttaaccgaa

SEQ ID NO: 359608 - DNA, 868 bp, Homo sapiens
cgggctggcgggtcgcgggttccttatcctccgccttggcgcctctccgcccaccgcccaccgcccctccctggcattggttggcgccagggaagccgaggctccatcctttctgcgcaggttcccgccgcactcgcgcagacctagcgcgtccaggtgggaggttagtgtggcccgggcgtccgctcctcagcggatgtggcagccccgagccatggctctcgccgtccgagtcgtttattgtatcttcagctcaagaagaagttagaagatgagttccccggccgcctggacatctgcggcgagggaactccccaggccaccgggttctttgaagtgatggtagccgggaagttgattcactctaagaagaaaggcgatggctacgtggacacagaaagcaagtttctgaagttggtggccgccatcaaagccgccttggctcagggctaatgcgccctgaaggcagagtccagggaccttgacccagcccctctcagcagacgcttcatgataggaaggactgaaaagtcttgtggacacctggtctttccctgatgttctcgtggctgctgttgggggcagagattgacgcccccggtctttgcctctgagcgggagagtctgtgtgtatgtgtcttccccggaatccacaccaccccaccctcctcctgtcccgtggtttcatcatatctctttgcataccccatgtcttccccagttgtcccctggagtttggggggacatcccgcctcaggcatccttctcaaggggaagccaagagaggcatcaggatgggtgggtttctgattgtggcaacgtttgcaaccgttcacgattcaataaatattggatgaatttaaccgaa

SEQ ID NO: 359609 - DNA, 1499 bp, Homo sapiens
cgggctggcgggtcgcgggttccttatcctccgccttggcgcctctccgcccaccgcccaccgcccctccctggcattggttggcgccagggaagccgaggctccatcctttctgcgcaggttcccgccgcactcgcgcagacctagcgcgtccaggtgggaggttagtgtggcccgggcgtccgctcctcagcggatgtggcagccccgagccatggctctcgccgtccgagtcgtttattgtggcgcttgaggctacaagtccaagtatcttcagctcaagaagaagttagaagatgagttccccggccgcctggacatctgcggcgagggaactccccaggccaccgggttctttgaagtgatggtagccgggaagttgattcactctaagaagaaaggcgatggctacgtggacacagaaagcaagtttctgaagttggtggccgccatcaaagccgccttggctcagggctaatgcgccctgaaggcagagtccagggaccttgacccagcccctctcagcagacgcttcatgataggaaggactgaaaagtcttgtggacacctggtctttccctgatgttctcgtggctgctgttgggggcagagattgacgcccccggtctttgcctctgagcgggagagtctgtgtgtatgtgtcttccccggaatccacaccaccccaccctcctcctgtcccgtggtttcatcatatctctttgcataccccatgtcttccccagttgtcccctggagtttggggggacatcccgcctcaggcatccttctcaaggggaagccaagagaggcatcaggatgggtgggtttctgattgtggcaacgtttgcaaccgttcacgattcaataaatattggatgaatttaaccgaaaaaaacaacaacacaacacaacaaaactccagaaaggcattctaatcgccggggtcgcggaaacaccaccggtacctacacatggcgcccttgggccataagctggttccttggaccacagtcttccttgggtccaacggcgctggcaacactctctgccgggccccccccatattaagagaagctacgatataacatttcggagaaagcccagcgggttaccctgcttagaaagacgacgacgagcaaacaccagcagagagcccgaccagacgaaaaaggaaagtgccaaggagatacccaacctgagaaaacccacaaaacagggacaccggcgacccggcgtcgaccacacgaacgacaaaaaaaacaaccaaccaccagcagaagagcaaaagagtaagaaaacgaaaatcaaagaaaaggacgagaaaaagtaaaaaaaagagaacagagggaaaagagagggggagcgagaaagacgacagcaacaagaagacaaacgaaaagaaggaatggagagcacaaccaacagggaaaaaaaggaggagagacgcagaaagaaaacgagagggagaacgggaacacgaacaatgagcgaactac

SEQ ID NO: 359610 - DNA, 946 bp, Homo sapiens
cgggctggcgggtcgcgggttccttatcctccgccttggcgcctctccgcccaccgcccaccgcccctccctggcattggttggcgccagggaagccgaggctccatcctttctgcgcaggttcccgccgcactcgcgcagacctagcgcgtccaggtgggaggttagtgtggcccgggcgtccgctcctcagcggatgtggcagccccgagccatggctctcgccgtccgagtcgtttattgtggcgcttgaggctacaagtccaagtatcttcagctcaagaagaagttagaagatgagttccccggccgcctggacatctgcggcgagggaactccccaggccaccgggttctttgaagtgatggtagccgggaagttgattcactctaagaagaaaggcgatggctacgtggacacagaaagcaagtttctgaagttggtggccgccatcaaagccgccttggctcagggctaatgcgccctgaaggcagagtccagggaccttgacccagcccctctcagcagacgcttcatgataggaaggactgaaaagtcttgtggacacctggtctttccctgatgttctcgtggctgctgttgggggcagagattgacgcccccggtctttgcctctgagcgggagagtctgtgtgtatgtgtcttccccggaatccacaccaccccaccctcctcctgtcccgtggtttcatcatatctctttgcataccccatgtcttccccagttgtcccctggagtttggggggacatcccgcctcaggcatccttctcaaggggaagccaagagaggcatcaggatgggtgggtttctgattgtggcaacgtttgcaaccgttcacgattcaataaatattggatgaatttaaccgaaaaacacacagaaaaaaaaaaactccgaagacattacatatgtagaggtagcga

SEQ ID NO: 359611 - DNA, 1223 bp, Homo sapiens
cgggctggcgggtcgcgggttccttatcctccgccttggcgcctctccgcccaccgcccaccgcccctccctggcattggttggcgccagggaagccgaggctccatcctttctgcgcaggttcccgccgcactcgcgcagacctagcgcgtccaggtgggaggttagtgtggcccgggcgtccgctcctcagcggatgtggcagccccgagccatggctctcgccgtccgagtcgtttattgtggcgcttgaggctacaagtccaagtatcttcagctcaagaagaagttagaagatgagttccccggccgcctggacatctgcggcgagggaactccccaggccaccgggttctttgaagtgatggtagccgggaagttgattcactctaagaagaaaggcgatggctacgtggacacagaaagcaagtttctgaagttggtggccgccatcaaagccgccttggctcagggctaatgcgccctgaaggcagagtccagggaccttgacccagcccctctcagcagacgcttcatgataggaaggactgaaaagtcttgtggacacctggtctttccctgatgttctcgtggctgctgttgggggcagagattgacgcccccggtctttgcctctgagcgggagagtctgtgtgtatgtgtcttccccggaatccacaccaccccaccctcctcctgtcccgtggtttcatcatatctctttgcataccccatgtcttccccagttgtcccctggagtttggggggacatcccgcctcaggcatccttctcaaggggaagccaagagaggcatcaggatgggtgggtttctgattgtggcaacgtttgcaaccgttcacgattcaataaatattggatgaatttaaccgaaaaaaaaaaaaaaaaaaaaaaaaaaaaaaaaaaaaaaaaaaaaaaaaaaaaaaaaaaaaaaaaaaaaaaaaaaaaaaaaaaaaaaagcggagcgggcgggcgcccaacaatagaataatgcacgccaccgcggggcggcacccaccgatccaacgaaacaccaccccaatcatttcagtcaccagaagggcgcccaccccaacagagccgccgtgtctccaccccccatcaccaggcggccccgacctccaaccactccagccacgtggaaaaccaccccctcacgcgcgcgccctctgcgccaagcacaccccccctccgtcggggggcc

SEQ ID NO: 359612 - DNA, 860 bp, Homo sapiens
cgggctggcgggtcgcgggttccttatcctccgccttggcgcctctccgcccaccgcccaccgcccctccctggcattggttggcgccagggaagccgaggctccatcctttctgcgcaggttcccgccgcactcgcgcagacctagcgcgtccaggtgggaggttagtgtggcccgggcgtccgctcctcagcggatgtggcagccccgagccatggctctcgccgtccgagtcgtttattgtggcgcttgaggctacaagtccaagtatcttcagctcaagaagaagttagaagatgagttccccggccgcctggacatctgcggcgagggaactccccaggccaccgggttctttgaagtgatggtagccgggaagttgattcactctaagaagaaaggcgatggctacgtggacacagaaaccgccttggctcagggctaatgcgccctgaaggcagagtccagggaccttgacccagcccctctcagcagacgcttcatgataggaaggactgaaaagtcttgtggacacctggtctttccctgatgttctcgtggctgctgttgggggcagagattgacgcccccggtctttgcctctgagcgggagagtctgtgtgtatgtgtcttccccggaatccacaccaccccaccctcctcctgtcccgtggtttcatcatatctctttgcataccccatgtcttccccagttgtcccctggagtttggggggacatcccgcctcaggcatccttctcaaggggaagccaagagaggcatcaggatgggtgggtttctgattgtggcaacgtttgcaaccgttcacgattcaataaatattggatgaatttaaccgaa

SEQ ID NO: 359613 - DNA, 779 bp, Homo sapiens
cgggctggcgggtcgcgggttccttatcctccgccttggcgcctctccgcccaccgcccaccgcccctccctggcattggttggcgccagggaagccgaggctccatcctttctgcgcaggttcccgccgcactcgcgcagacctagcgcgtccaggtgggaggttagtgtggcccgggcgtccgctcctcagcggatgtggcagccccgagccatggctctcgccgtccgagtcgtttattgtggcgcttgaggctacaagtccaagtatcttcagctcaagaagaagttagaagatgagttccccggccgcctggacatctgcggcgagggaactccccaggccaccgggttctttgaagtgatggtagccgggaagttgattcactctaagaagaaaggcgatggctacgtggacacagaaagcaagtttctgaagttggtggccgccatcaaagccgccttggctcagggctaatgcgccctgaaggcagagtccagggaccttgacccagcccctctcagcagacgcttcatgataggaaggactgaaaagtcttgtggacacctggtctttccctcctgtcccgtggtttcatcatatctctttgcataccccatgtcttccccagttgtcccctggagtttggggggacatcccgcctcaggcatccttctcaaggggaagccaagagaggcatcaggatgggtgggtttctgattgtggcaacgtttgcaaccgttcacgattcaataaatattggatgaatttaaccgaa

SEQ ID NO: 359614 - DNA, 420 bp, Homo sapiens
ctccccgccgacagcacaggtttcccaggacaagaccctgactcaccccagcatggaaactaccaggaggagggtcccccatcctactatgacaaccaggacttccctgatgttctcgtggctgctgttgggggcagagattgacgcccccggtctttgcctctgagcgggagagtctgtgtgtatgtgtcttccccggaatccacaccaccccaccctcctcctgtcccgtggtttcatcatatctctttgcataccccatgtcttccccagttgtcccctggagtttggggggacatcccgcctcaggcatccttctcaaggggaagccaagagaggcatcaggatgggtgggtttctgattgtggcaacgtttgcaaccgttcacgattcaataaatattggatgaatttaaccgaa

SEQ ID NO: 359615 - DNA, 1373 bp, Homo sapiens
cgggctggcgggtcgcgggttccttatcctccgccttggcgcctctccgcccaccgcccaccgcccctccctggcattggttggcgccagggaagccgaggctccatcctttctgcgcaggttcccgccgcactcgcgcagacctagcgcgtccaggtgggaggttagtgtggcccgggcgtccgctcctcagcggatgtggcagccccgagccatggctctcgccgtccgagtcgtttattgtggcgcttgaggctacaagtccaagtatcttcagctcaagaagaagttagaagatgagttccccggccgcctggacatctgcggcgagggaactccccaggccaccgggttctttgaagtgatggtagccgggaagttgattcactctaagaagaaaggcgatggctacgtggacacagaaagcaagtttctgaagttggtggccgccatcaaagccgccttggctcagggctaatgcgccctgaaggcagaggtgagggggcccactagacagggacaccaccctttggatcttctccctgccccatgctctgactccttggcccagggtggagagcctgggagatgggggggacatcacgtgtgtccccagagcgagcgggataaagttagacccggttggtggaggacaacaactgagatggggtcagaggtgtgcagggtgacagctgagatggtgatgggtcagagatatgcaggatgacagctgagatggggtcaaaggtatgcaggatgacagctgagatggtgatgggtcagaggtgtgcaggatgacagctgagatggtgatgggtcaaaggtatgcaggatgacggctgagatggtgatgggtcagaggtgtgcaggatgacggctgagatgctgatgagtcagaggtgtgcaggatgatggctgagatggtgatgggtcagaggtgtgcaggatgacggctgagatggtgatgggtcagagatgtgcaggatgacagctgagatggggtcagaggtgtgcaggatgacagctgagatagggtcagaggtatgcaggatgacagctgagatggggtatgcaagatgacagctgagttggtggtggggtcagagggctgccctaaaacagctctcctggtttgggaatgaaaagtgctagcaacccaacggttcagaatccggaactctaggtctttgtcccattgccaagaaacagttcccaacccagcaggtcatgtgacagcgtccggccaagttcccagcatgttttgagacagaatttccttgctccacaatttcgagtaggtcactaattatcaccgggctctgaacctgagaattagttctaggaatattccagacctgatccagctccagaaa

SEQ ID NO: 359616 - DNA, 1873 bp, Homo sapiens
  misc_feature (80)..(80): n is a, c, g, or t
  misc_feature (156)..(156): n is a, c, g, or t
  misc_feature (164)..(164): n is a, c, g, or t
  misc_feature (204)..(204): n is a, c, g, or t
  misc_feature (1865)..(1865): n is a, c, g, or t
cccctgtatgtgggtggggtgggcgtacggaggggcgaaaaacagagggcggtcgtccctaggccccgtcttcgacttgngacacgctgggcatctcgggttataaaaggtggggctgagacgagtgtgtgtcaatttcgaacccccgactccggngctccgcnggggaaggggctgggggtcagctttgtaaagggacctaangctcctccaccctaaggcttcccctcccccaatatcccgaacagtcgcggggtggggacagtgagagcccagaaggttcgagaatgtctcagcctgtgtttcagaagcacttgaattgttggcctctgcccagtgggttcccttggccacgaaccccactccttttctggcctcagttttccgtctgtggcaagagggaggctctgtgtcaataccgaacacgcttaatttctgcaagtctcaggaagggtataataggataggatataaattacgttctctccactccccagcacctaatactgtgtggcatgctgtaggtatttaataaatacgtgttcaatgaatttatcctcccaggaatcccttaagagaggggaattttaggccaggtgccgttgatcacgcctgtaatccaaacactgggaggctgaggcgggtggatcgcttgagcccaagagttcgagaccagcctgggcaacccagggagacccccccctcgtctctacagaaacttaaaaagttagccgggcatggtggcgcactcctgtagtcgcagctgcttgggaggctgaggcaggaggatcactggagcccggaaggcggaagttgcagtgagctgaaatcgtgccactgcactccatcctggacagcagagcgagactctgtctcaaaaaaaaaaagtaaattaaagagaggaattttagttctatgttacaggtgagaaaactgaggctgggactggggtgggggcaggtcagtagcttcaagtctggactgcaggtgacaggggtaactggaacctgggtttgtcggcagctttccaacgtctctgcctgctcgacaaagcagaggcaagagtgacattttgagacgcctaccaggcctgtacaccagattccagtcccgaaatagcctgctgtgggggttgggtgagcctgtatttcaccctggggactgggaaggtgttcagaatctaggagctgcggggccgggtgcggtggctcctgcctgtaatctcagcactttgggaggctggggcgggccgatcccctgaggttaggagttcgagaccagcctggccaacatggtgaaaatacaaaaattagctgggcgtggtgtaagaatccaggagccgcagggttttccttggagtgctgcgagggctgtgggtgagggtggtgggcacagggagtgggtggggaccttacgtgtgctgttcttctcctaatccagttctcctggttttcccccgtccccgtctctcgtatttgtggtctccttgtctcctctctcccctttttcccctcccccttctctgtctcttgcttggtgttggttttctgtgtgtctctgtgtgtccccgcgccaccccctgtgctgtgtcccaaaactctgcctggctggtgcctgtcttctctcttgagggcatctgtcacctcttctgcttggtcatctgtgttcctctttatttcttcctggccccatcttgctctctccccacaccgcctgtgtctaccctcctctccccgatcccccacttctccctctctcccctgggccccaatgtcttggactctcctaccagtggcgcttgaggctacaagtccaagtggactgcaggtgacaggggtaactgggaacctggggtttgtcggcanctttccaa

SEQ ID NO: 359617 - DNA, 893 bp, Homo sapiens
cgggctggcgggtcgcgggttccttatcctccgccttggcgcctctccgcccaccgcccaccgcccctccctggcattggttggcgccagggaagccgaggctccatcctttctgcgcaggttcccgccgcactcgcgcagacctagcgcgtccaggtgggaggttagtgtggcccgggcgtccgctcctcagcggatgtggcagccccgagccatggctctcgccgtccgagtcgtttattgtggcgcttgaggctacaagtccaagtatcttcagctcaagaagaagttagaagatgagttccccggccgcctggacatctgcggcgagggaactccccaggccaccgggttctttgaagtgatggtagccgggaagttgattcactctaagaagaaaggcgatggctacgtggacacagaaagcaagtttctgaagttggtggccgccatcaaagccgccttggctcagggctaatgcgccctgaaggcagagtccagggaccttgacccagcccctctcagcagacgcttcatgataggaaggactgaaaagtcttgtggacacctggtctttccctgatgttctcgtggctgctgttgggggcagagattgacgcccccggtctttgcctctgagcgggagagtctgtgtgtatgtgtcttccccggaatccacaccaccccaccctcctcctgtcccgtggtttcatcatatctctttgcataccccatgtcttccccagttgtcccctggagtttggggggacatcccgcctcaggcatccttctcaaggggaagccaagagaggcatcaggatgggtgggtttctgattgtggcaacgtttgcaaccgttcacgattcaataaatattggatgaatttaaccgaa

SEQ ID NO: 359618 - DNA, 1574 bp, Homo sapiens
  misc_feature (80)..(80): n is a, c, g, or t
  misc_feature (156)..(156): n is a, c, g, or t
  misc_feature (164)..(164): n is a, c, g, or t
  misc_feature (204)..(204): n is a, c, g, or t
cccctgtatgtgggtggggtgggcgtacggaggggcgaaaaacagagggcggtcgtccctaggccccgtcttcgacttgngacacgctgggcatctcgggttataaaaggtggggctgagacgagtgtgtgtcaatttcgaacccccgactccggngctccgcnggggaaggggctgggggtcagctttgtaaagggacctaangctcctccaccctaaggcttcccctcccccaatatcccgaacagtcgcggggtggggacagtgagagcccagaaggttcgagaatgtctcagcctgtgtttcagaagcacttgaattgttggcctctgcccagtgggttcccttggccacgaaccccactccttttctggcctcagttttccgtctgtggcaagagggaggctctgtgtcaataccgaacacgcttaatttctgcaagtctcaggaagggtataataggataggatataaattacgttctctccactccccagcacctaatactgtgtggcatgctgtaggtatttaataaatacgtgttcaatgaatttatcctcccaggaatcccttaagagaggggaattttaggccaggtgccgttgatcacgcctgtaatccaaacactgggaggctgaggcgggtggatcgcttgagcccaagagttcgagaccagcctgggcaacccagggagacccccccctcgtctctacagaaacttaaaaagttagccgggcatggtggcgcactcctgtagtcgcagctgcttgggaggctgaggcaggaggatcactggagcccggaaggcggaagttgcagtgagctgaaatcgtgccactgcactccatcctggacagcagagcgagactctgtctcaaaaaaaaaaagtaaattaaagagaggaattttagttctatgttacagtggcgcttgaggctacaagtccaagtatcttcagctcaagaagaagttagaagatgagttccccggccgcctggacatctgcggcgagggaactccccaggccaccgggttctttgaagtgatggtagccgggaagttgattcactctaagaagaaaggcgatggctacgtggacacagaaagcaagtttctgaagttggtggccgccatcaaagccgccttggctcagggctaatgcgccctgaaggcagagtccagggaccttgacccagcccctctcagcagacgcttcatgataggaaggactgaaaagtcttgtggacacctggtctttccctgatgttctcgtggctgctgttgggggcagagattgacgcccccggtctttgcctctgagcgggagagtctgtgtgtatgtgtcttccccggaatccacaccaccccaccctcctcctgtcccgtggtttcatcatatctctttgcataccccatgtcttccccagttgtcccctggagtttggggggacatcccgcctcaggcatccttctcaaggggaagccaagagaggcatcaggatgggtgggtttctgattgtggcaacgtttgcaaccgttcacgattcaataaatattggatgaatttaaccgaa

SEQ ID NO: 359619 - DNA, 2525 bp, Homo sapiens
  misc_feature (80)..(80): n is a, c, g, or t
  misc_feature (156)..(156): n is a, c, g, or t
  misc_feature (164)..(164): n is a, c, g, or t
  misc_feature (204)..(204): n is a, c, g, or t
cccctgtatgtgggtggggtgggcgtacggaggggcgaaaaacagagggcggtcgtccctaggccccgtcttcgacttgngacacgctgggcatctcgggttataaaaggtggggctgagacgagtgtgtgtcaatttcgaacccccgactccggngctccgcnggggaaggggctgggggtcagctttgtaaagggacctaangctcctccaccctaaggcttcccctcccccaatatcccgaacagtcgcggggtggggacagtgagagcccagaaggttcgagaatgtctcagcctgtgtttcagaagcacttgaattgttggcctctgcccagtgggttcccttggccacgaaccccactccttttctggcctcagttttccgtctgtggcaagagggaggctctgtgtcaataccgaacacgcttaatttctgcaagtctcaggaagggtataataggataggatataaattacgttctctccactccccagcacctaatactgtgtggcatgctgtaggtatttaataaatacgtgttcaatgaatttatcctcccaggaatcccttaagagaggggaattttaggccaggtgccgttgatcacgcctgtaatccaaacactgggaggctgaggcgggtggatcgcttgagcccaagagttcgagaccagcctgggcaacccagggagacccccccctcgtctctacagaaacttaaaaagttagccgggcatggtggcgcactcctgtagtcgcagctgcttgggaggctgaggcaggaggatcactggagcccggaaggcggaagttgcagtgagctgaaatcgtgccactgcactccatcctggacagcagagcgagactctgtctcaaaaaaaaaaagtaaattaaagagaggaattttagttctatgttacaggtgagaaaactgaggctgggactggggtgggggcaggtcagtagcttcaagtctggactgcaggtgacaggggtaactggaacctgggtttgtcggcagctttccaacgtctctgcctgctcgacaaagcagaggcaagagtgacattttgagacgcctaccaggcctgtacaccagattccagtcccgaaatagcctgctgtgggggttgggtgagcctgtatttcaccctggggactgggaaggtgttcagaatctaggagctgcggggccgggtgcggtggctcctgcctgtaatctcagcactttgggaggctggggcgggccgatcccctgaggttaggagttcgagaccagcctggccaacatggtgaaaatacaaaaattagctgggcgtggtgtaagaatccaggagccgcagggttttccttggagtgctgcgagggctgtgggtgagggtggtgggcacagggagtgggtggggaccttacgtgtgctgttcttctcctaatccagttctcctggttttcccccgtccccgtctctcgtatttgtggtctccttgtctcctctctcccctttttcccctcccccttctctgtctcttgcttggtgttggttttctgtgtgtctctgtgtgtccccgcgccaccccctgtgctgtgtcccaaaactctgcctggctggtgcctgtcttctctcttgagggcatctgtcacctcttctgcttggtcatctgtgttcctctttatttcttcctggccccatcttgctctctccccacaccgcctgtgtctaccctcctctccccgatcccccacttctccctctctcccctgggccccaatgtcttggactctcctaccagtggcgcttgaggctacaagtccaagtatcttcagctcaagaagaagttagaagatgagttccccggccgcctggacatcgtgagtcttgggatggggagaaagacttgagcacagccactgtgtcggtccgttaggcctggatggcactgcaggggggttagtgcggcgagggaactccccaggccaccgggttctttgaagtgatggtagccgggaagttgattcactctaagaagaaaggcgatggctacgtggacacagaaagcaagtttctgaagttggtggccgccatcaaagccgccttggctcagggctaatgcgccctgaaggcagagtccagggaccttgacccagcccctctcagcagacgcttcatgataggaaggactgaaaagtcttgtggacacctggtctttccctgatgttctcgtggctgctgttgggggcagagattgacgcccccggtctttgcctctgagcgggagagtctgtgtgtatgtgtcttccccggaatccacaccaccccaccctcctcctgtcccgtggtttcatcatatctctttgcataccccatgtcttccccagttgtcccctggagtttggggggacatcccgcctcaggcatccttctcaaggggaagccaagagaggcatcaggatgggtgggtttctgattgtggcaacgtttgcaaccgttcacgattcaataaatattggatgaatttaaccgaa

SEQ ID NO: 359620 - DNA, 3048 bp, Homo sapiens
  misc_feature (80)..(80): n is a, c, g, or t
  misc_feature (156)..(156): n is a, c, g, or t
  misc_feature (164)..(164): n is a, c, g, or t
  misc_feature (204)..(204): n is a, c, g, or t
cccctgtatgtgggtggggtgggcgtacggaggggcgaaaaacagagggcggtcgtccctaggccccgtcttcgacttgngacacgctgggcatctcgggttataaaaggtggggctgagacgagtgtgtgtcaatttcgaacccccgactccggngctccgcnggggaaggggctgggggtcagctttgtaaagggacctaangctcctccaccctaaggcttcccctcccccaatatcccgaacagtcgcggggtggggacagtgagagcccagaaggttcgagaatgtctcagcctgtgtttcagaagcacttgaattgttggcctctgcccagtgggttcccttggccacgaaccccactccttttctggcctcagttttccgtctgtggcaagagggaggctctgtgtcaataccgaacacgcttaatttctgcaagtctcaggaagggtataataggataggatataaattacgttctctccactccccagcacctaatactgtgtggcatgctgtaggtatttaataaatacgtgttcaatgaatttatcctcccaggaatcccttaagagaggggaattttaggccaggtgccgttgatcacgcctgtaatccaaacactgggaggctgaggcgggtggatcgcttgagcccaagagttcgagaccagcctgggcaacccagggagacccccccctcgtctctacagaaacttaaaaagttagccgggcatggtggcgcactcctgtagtcgcagctgcttgggaggctgaggcaggaggatcactggagcccggaaggcggaagttgcagtgagctgaaatcgtgccactgcactccatcctggacagcagagcgagactctgtctcaaaaaaaaaaagtaaattaaagagaggaattttagttctatgttacaggtgagaaaactgaggctgggactggggtgggggcaggtcagtagcttcaagtctggactgcaggtgacaggggtaactggaacctgggtttgtcggcagctttccaacgtctctgcctgctcgacaaagcagaggcaagagtgacattttgagacgcctaccaggcctgtacaccagattccagtcccgaaatagcctgctgtgggggttgggtgagcctgtatttcaccctggggactgggaaggtgttcagaatctaggagctgcggggccgggtgcggtggctcctgcctgtaatctcagcactttgggaggctggggcgggccgatcccctgaggttaggagttcgagaccagcctggccaacatggtgaaaatacaaaaattagctgggcgtggtgtaagaatccaggagccgcagggttttccttggagtgctgcgagggctgtgggtgagggtggtgggcacagggagtgggtggggaccttacgtgtgctgttcttctcctaatccagttctcctggttttcccccgtccccgtctctcgtatttgtggtctccttgtctcctctctcccctttttcccctcccccttctctgtctcttgcttggtgttggttttctgtgtgtctctgtgtgtccccgcgccaccccctgtgctgtgtcccaaaactctgcctggctggtgcctgtcttctctcttgagggcatctgtcacctcttctgcttggtcatctgtgttcctctttatttcttcctggccccatcttgctctctccccacaccgcctgtgtctaccctcctctccccgatcccccacttctccctctctcccctgggccccaatgtcttggactctcctaccagtggcgcttgaggctacaagtccaagtatcttcagctcaagaagaagttagaagatgagttccccggccgcctggacatctgcggcgagggaactccccaggccaccgggttctttgaagtgatggtagccgggaagttgattcactctaagaagaaaggcgatggctacgtggacacagaaagcaagtttctgaagttggtggccgccatcaaagccgccttggctcagggctaatgcgccctgaaggcagagtccagggaccttgacccagcccctctcagcagacgcttcatgataggaaggactgaaaagtcttgtggacacctggtctttccctgatgttctcgtggctgctgttgggggcagagattgacgcccccggtctttgcctctgagcgggagagtctgtgtgtatgtgtcttccccggaatccacaccaccccaccctcctcctgtcccgtggtttcatcatatctctttgcataccccatgtcttccccagttgtcccctggagtttggggggacatcccgcctcaggcatccttctcaaggggaagccaagagaggcatcaggatgggtgggtttctgattgtggcaacgtttgcaaccgttcacgattcaataaatattggatgaatttaaccgaaaaaaacaacaacacaacacaacaaaactccagaaaggcattctaatcgccggggtcgcggaaacaccaccggtacctacacatggcgcccttgggccataagctggttccttggaccacagtcttccttgggtccaacggcgctggcaacactctctgccgggccccccccatattaagagaagctacgatataacatttcggagaaagcccagcgggttaccctgcttagaaagacgacgacgagcaaacaccagcagagagcccgaccagacgaaaaaggaaagtgccaaggagatacccaacctgagaaaacccacaaaacagggacaccggcgacccggcgtcgaccacacgaacgacaaaaaaaacaaccaaccaccagcagaagagcaaaagagtaagaaaacgaaaatcaaagaaaaggacgagaaaaagtaaaaaaaagagaacagagggaaaagagagggggagcgagaaagacgacagcaacaagaagacaaacgaaaagaaggaatggagagcacaaccaacagggaaaaaaaggaggagagacgcagaaagaaaacgagagggagaacgggaacacgaacaatgagcgaactac

SEQ ID NO: 359621 - DNA, 777 bp, Homo sapiens
cgggctggcgggtcgcgggttccttatcctccgccttggcgcctctccgcccaccgcccaccgcccctccctggcattggttggcgccagggaagccgaggctccatcctttctgcgcaggttcccgccgcactcgcgcagacctagcgcgtccaggtgggaggttagtgtggcccgggcgtccgctcctcagcggatgtggcagccccgagccatggctctcgccgtccgagtcgtttattgtggcgcttgaggctacaagtccaagtatcttcagctcaagaagaagttagaagatgagttccccggccgcctggacatctgcggcgagggaactccccaggccaccgggttctttgaagtgatggtagccgggaagttgattcactctaagaagaaaggcgatggctacgtggacacagaaagcaagtttctgaagttggtggccgccatcaaagccgccttggctcagggctaatgcgccctgaaggcagagattgacgcccccggtctttgcctctgagcgggagagtctgtgtgtatgtgtcttccccggaatccacaccaccccaccctcctcctgtcccgtggtttcatcatatctctttgcataccccatgtcttccccagttgtcccctggagtttggggggacatcccgcctcaggcatccttctcaaggggaagccaagagaggcatcaggatgggtgggtttctgattgtggcaacgtttgcaaccgttcacgattcaataaatattggatgaatttaaccgaa

SEQ ID NO: 359622 - DNA, 2209 bp, Homo sapiens
  misc_feature (80)..(80): n is a, c, g, or t
  misc_feature (156)..(156): n is a, c, g, or t
  misc_feature (164)..(164): n is a, c, g, or t
  misc_feature (204)..(204): n is a, c, g, or t
cccctgtatgtgggtggggtgggcgtacggaggggcgaaaaacagagggcggtcgtccctaggccccgtcttcgacttgngacacgctgggcatctcgggttataaaaggtggggctgagacgagtgtgtgtcaatttcgaacccccgactccggngctccgcnggggaaggggctgggggtcagctttgtaaagggacctaangctcctccaccctaaggcttcccctcccccaatatcccgaacagtcgcggggtggggacagtgagagcccagaaggttcgagaatgtctcagcctgtgtttcagaagcacttgaattgttggcctctgcccagtgggttcccttggccacgaaccccactccttttctggcctcagttttccgtctgtggcaagagggaggctctgtgtcaataccgaacacgcttaatttctgcaagtctcaggaagggtataataggataggatataaattacgttctctccactccccagcacctaatactgtgtggcatgctgtaggtatttaataaatacgtgttcaatgaatttatcctcccaggaatcccttaagagaggggaattttaggccaggtgccgttgatcacgcctgtaatccaaacactgggaggctgaggcgggtggatcgcttgagcccaagagttcgagaccagcctgggcaacccagggagacccccccctcgtctctacagaaacttaaaaagttagccgggcatggtggcgcactcctgtagtcgcagctgcttgggaggctgaggcaggaggatcactggagcccggaaggcggaagttgcagtgagctgaaatcgtgccactgcactccatcctggacagcagagcgagactctgtctcaaaaaaaaaaagtaaattaaagagaggaattttagttctatgttacaggtgagaaaactgaggctgggactggggtgggggcaggtcagtagcttcaagtctggactgcaggtgacaggggtaactggaacctgggtttgtcggcagctttccaacgtctctgcctgctcgacaaagcagaggcaagagtgacattttgagacgcctaccaggcctgtacaccagattccagtcccgaaatagcctgctgtgggggttgggtgagcctgtatttcaccctggggactgggaaggtgttcagaatctaggagctgcggggccgggtgcggtggctcctgcctgtaatctcagcactttgggaggctggggcgggccgatcccctgaggttaggagttcgagaccagcctggccaacatggtgaaaatacaaaaattagctgggcgtggtgtaagaatccaggagccgcagggttttccttggagtgctgcgagggctgtgggtgagggtggtgggcacagggagtgggtggggaccttacgtgtgctgttcttctcctaatccagttctcctggttttcccccgtccccgtctctcgtatttgtggtctccttgtctcctctctcccctttttcccctcccccttctctgtctcttgcttggtgttggttttctgtgtgtctctgtgtgtccccgcgccaccccctgtgctgtgtcccaaaactctgcctggctggtgcctgtcttctctcttgagggcatctgtcacctcttctgcttggtcatctgtgttcctctttatttcttcctggccccatcttgctctctccccacaccgcctgtgtctaccctcctctccccgatcccccacttctccctctctcccctgggccccaatgtcttggactctcctaccagtggcgcttgaggctacaagtccaagtatcttcagctcaagaagaagttagaagatgagttccccggccgcctggacatctgcggcgagggaactccccaggccaccgggttctttgaagtgatggtagccgggaagttgattcactctaagaagaaaggcgatggctacgtggacacagagagggacaaagatgaatagagaagtgggctggggtcaggccgacaggattgaggactcgaccttggtggagaagaaagagagaccggggagtgagttcagggctagaactggagatggacagggaaagatggaggacacagggggtctgcagcagacggcaggcagagggtgagggtgacagagagactcttggacagacagaggctgggcaggtgagacctggtactgtcgggcta

SEQ ID NO: 359623 - DNA, 1726 bp, Homo sapiens
tccgcggtgccggccgacccggaagcatgtctgtccctagcggaggcgcgggtgccgtgctgagagcgcctgcctgtgcgccccgagcggggctgggactcttccaagatgcccacgttcgcacagagaccccggatcgcggaagctcgcgtctcgaaaggcggtctcacgccctgcccgtcctgggttcacggtttttcatcacctgcggctgtcctgcgatcgaccacagctgtgcaggaggggcaggaggtatctgttgctgcagttaccggaacctttgccaggactagtacaggaccacgggctggtagctcagggatgtctcgtctgtgagttacagctgcacgctctccaggaaagaaggaatttcctcttctctggaaaccccaccacacagctggtttctcattggtgctgcttgcccattccctgagctgtgactgccagaggagtgggaggttggtggtgcctccagcccatcaggggcaggccctgggaccgcctgggaacaggaggactatggcacaaaccgagtgagtgatgggagcaacccgcagggctctgccacatccctgtcttccttcactgacatgaaacgcagaaaaggcagctttgccacaacacaggagcacgcaccgaatgtggccgcccagggctctgtccttgaccctgttgtccaggactgtttaccaagggctgacaggcactgagtgccccgtgcacctggccagacactgcactcatgcagcggaaaggacagtgaacgagactttgtccctggcctccaaaggcttagggcgtagtggctgtcatgaggcacagtgacaagggccaggagggggacctcttagggggccatgcagtgatggaagccagaaggaatgaaggcctgcagtgaggatggagtggtcggcctgaagccatctctagcaagtggtcaggacgctgattgttctgcgcaggttggaggtaggtggtgagtctgagaaaggggccggaaagactccccagcaactgctggcaaagggtgaagggcacgttcccacaggattcaagccagctgcctttggaggggagacgggcactcagtttaggcgctcctacagcagggtcagcaagacaagcaggttgcggcaagggtctgcgcactgctgtgtaaatgtaggggcatcggggggcagaaagaccaggggagaagtgtgcatcacccttggggttaagggacagttgtctgctaggtgttgcttcctggagatggctgaaaagccagtccagtctgcagggaccaggccaccacccacctgatgtgggagcatttcccccaatccctgctgggctgctgaatctgggggacatagggaagctgaggctggtgttctgagtagtggcagagctgagccacagggcatgtctgaggtcagccccgagcaaaatggaatagggactcagggtgggtcaggtaactggaaagcgggcactgtgcacgcagcccttgaggggagccagggtgggtggggatcccccactgtgtgcagaaggcagcagccttggaagcagggtgtgctcctcggtgtggtcgctcgataccagaaaatgactctaaaaactgaagagtgtttgagtttcattcacacaaaacatggacatcatctgtgaggctctgtcccagagagacagggccatccctcatgtctgttattgggttgtagataaacaaaagtat

SEQ ID NO: 359624 - DNA, 2198 bp, Homo sapiens
tccgcggtgccggccgacccggaagcatgtctgtccctagcggaggcgcgggtgccgtgctgagagcgcctgcctgtgcgccccgagcggggctgggactcttccaagatgcccacgttcgcacagagaccccggatcgcggaagctcgcgtctcgaaaggcctgtgggtcaaggggggccatctcggtgggatctggggcgggacgacccccactgctgaaccctgggcgcggggcagggtcagaggctccgctcggcctccccctggatgagacgcgcatgcccggtgtcccccggccgccgtcggcgtcgtgtcttcagtccttatcgactccagactttggggatgcgtattaacgccagactcctgcaaagtcttgccttcaacactcagctcctggggagagacgggtggagggatgactggaaacgtggcctcgacgtccctacagagcccctccagcgtggggaggcctaagtacctcaaggttcaggcccacggaaggagtcgggggagcgaggcccggtgatctacgtgtgaaggagcttggacaggacctcacaaacgccagggagacggcgagggggttcgtgcgtttgtaacgtcttgacatcgctgatcctcccgcaggcggtctcacgccctgcccgtcctgggttcacggtttttcatcacctgcggctgtcctgcgatcgaccacagctgtgcaggaggggcaggaggtatctgttgctgcagttaccggaacctttgccaggactagtacaggaccacgggctggtagctcagggatgtctcgtctgtgagttacagctgcacgctctccaggaaagaaggaatttcctcttctctggaaaccccaccacacagctggtttctcattggtgctgcttgcccattccctgagctgtgactgccagaggagtgggaggttggtggtgcctccagcccatcaggggcaggccctgggaccgcctgggaacaggaggactatggcacaaaccgagtgagtgatgggagcaacccgcagggctctgccacatccctgtcttccttcactgacatgaaacgcagaaaaggcagctttgccacaacacaggagcacgcaccgaatgtggccgcccagggctctgtccttgaccctgttgtccaggactgtttaccaagggctgacaggcactgagtgccccgtgcacctggccagacactgcactcatgcagcggaaaggacagtgaacgagactttgtccctggcctccaaaggcttagggcgtagtggctgtcatgaggcacagtgacaagggccaggagggggacctcttagggggccatgcagtgatggaagccagaaggaatgaaggcctgcagtgaggatggagtggtcggcctgaagccatctctagcaagtggtcaggacgctgattgttctgcgcaggttggaggtaggtggtgagtctgagaaaggggccggaaagactccccagcaactgctggcaaagggtgaagggcacgttcccacaggattcaagccagctgcctttggaggggagacgggcactcagtttaggcgctcctacagcagggtcagcaagacaagcaggttgcggcaagggtctgcgcactgctgtgtaaatgtaggggcatcggggggcagaaagaccaggggagaagtgtgcatcacccttggggttaagggacagttgtctgctaggtgttgcttcctggagatggctgaaaagccagtccagtctgcagggaccaggccaccacccacctgatgtgggagcatttcccccaatccctgctgggctgctgaatctgggggacatagggaagctgaggctggtgttctgagtagtggcagagctgagccacagggcatgtctgaggtcagccccgagcaaaatggaatagggactcagggtgggtcaggtaactggaaagcgggcactgtgcacgcagcccttgaggggagccagggtgggtggggatcccccactgtgtgcagaaggcagcagccttggaagcagggtgtgctcctcggtgtggtcgctcgataccagaaaatgactctaaaaactgaagagtgtttgagtttcattcacacaaaacatggacatcatctgtgaggctctgtcccagagagacagggccatccctcatgtctgttattgggttgtagataaacaaaagtat

SEQ ID NO: 359625 - DNA, 1729 bp, Homo sapiens
tccgcggtgccggccgacccggaagcatgtctgtccctagcggaggcgcgggtgccgtgctgagagcgcctgcctgtgcgccccgagcggggctgggactcttccaagatgcccacgttcgcacagagaccccggatcgcggaagctcgcgtctcgaaaggcctgtgggtcaaggggggccatctcggtgggatctggggcgggacgacccccactgctgaaccctgggcgcggggcagggtcagaggctccgctcggcctccccctggatgagacgcgcatgcccggtgtcccccggccgccgtcggcgtcgtgtcttcagtccttatcgactccagactttggggatgcgtattaacgccagactcctgcaaagtcttgccttcaacactcagctcctggggagagacgggtggagggatgactggaaacgtggcctcgacgtccctacagagcccctccagcgtggggaggcctaagtacctcaaggttcaggcccacggaaggagtcgggggagcgaggcccggtgatctacgtgtgaaggagcttggacaggacctcacaaacgccagggagacggcgagggggttcgtgcgtttgtaacgtcttgacatcgctgatcctcccgcaggcggtctcacgccctgcccgtcctgggttcacggtttttcatcacctgcggctgtcctgcgatcgaccacagctgtgcaggaggggcaggaggtatctgttgctgcagttaccggaacctttgccaggactagtacaggaccacgggtgaggatggtggggaagcctgcgtggggcagggaacggtgaggcaggaagagggaagggcagcagaggcctgagtggttgcaggttcacacactgagctgccagtaactgcccagctcagacgggctcaaattcagaagccaccattgctcctcacccccacccccaggacgctgattgttctgcgcaggttggaggtaggtggtgagtctgagaaaggggccggaaagactccccagcaactgctggcaaagggtgaagggcacgttcccacaggattcaagccagctgcctttggaggggagacgggcactcagtttaggcgctcctacagcagggtcagcaagacaagcaggttgcggcaagggtctgcgcactgctgtgtaaatgtaggggcatcggggggcagaaagaccaggggagaagtgtgcatcacccttggggttaagggacagttgtctgctaggtgttgcttcctggagatggctgaaaagccagtccagtctgcagggaccaggccaccacccacctgatgtgggagcatttcccccaatccctgctgggctgctgaatctgggggacatagggaagctgaggctggtgttctgagtagtggcagagctgagccacagggcatgtctgaggtcagccccgagcaaaatggaatagggactcagggtgggtcaggtaactggaaagcgggcactgtgcacgcagcccttgaggggagccagggtgggtggggatcccccactgtgtgcagaaggcagcagccttggaagcagggtgtgctcctcggtgtggtcgctcgataccagaaaatgactctaaaaactgaagagtgtttgagtttcattcacacaaaacatggacatcatctgtgaggctctgtcccagagagacagggccatccctcatgtctgttattgggttgtagataaacaaaagtat

SEQ ID NO: 359626 - DNA, 2499 bp, Homo sapiens
tccgcggtgccggccgacccggaagcatgtctgtccctagcggaggcgcgggtgccgtgctgagagcgcctgcctgtgcgccccgagcggggctgggactcttccaagatgcccacgttcgcacagagaccccggatcgcggaagctcgcgtctcgaaaggcctgtgggtcaaggggggccatctcggtgggatctggggcgggacgacccccactgctgaaccctgggcgcggggcagggtcagaggctccgctcggcctccccctggatgagacgcgcatgcccggtgtcccccggccgccgtcggcgtcgtgtcttcagtccttatcgactccagactttggggatgcgtattaacgccagactcctgcaaagtcttgccttcaacactcagctcctggggagagacgggtggagggatgactggaaacgtggcctcgacgtccctacagagcccctccagcgtggggaggcctaagtacctcaaggttcaggcccacggaaggagtcgggggagcgaggcccggtgatctacgtgtgaaggagcttggacaggacctcacaaacgccagggagacggcgagggggttcgtgcgtttgtaacgtcttgacatcgctgatcctcccgcaggcggtctcacgccctgcccgtcctgggttcacggtttttcatcacctgcggctgtcctgcgatcgaccacagctgtgcaggaggggcaggaggtatctgttgctgcagttaccggaacctttgccaggactagtacaggaccacgggtgaggatggtggggaagcctgcgtggggcagggaacggtgaggcaggaagagggaagggcagcagaggcctgagtggttgcaggttcacacactgagctgccagtaactgcccagctcagacgggctcaaattcagaagccaccattgctcctcacccccacccccaggtcagctgtccactagctctgccatgacttgatactgcagctcaaacagtgccaaccaaaacccactctcctcaccgcctgttatgggtaacacggtatggttacagctttactcatgtcctctttccccaggctggtagctcagggatgtctcgtctgtgagttacagctgcacgctctccaggaaagaaggaatttcctcttctctggaaaccccaccacacagctggtttctcattggtgctgcttgcccattccctgagctgtgactgccagaggagtgggaggttggtggtgcctccagcccatcaggggcaggccctgggaccgcctgggaacaggaggactatggcacaaaccgagtgagtgatgggagcaacccgcagggctctgccacatccctgtcttccttcactgacatgaaacgcagaaaaggcagctttgccacaacacaggagcacgcaccgaatgtggccgcccagggctctgtccttgaccctgttgtccaggactgtttaccaagggctgacaggcactgagtgccccgtgcacctggccagacactgcactcatgcagcggaaaggacagtgaacgagactttgtccctggcctccaaaggcttagggcgtagtggctgtcatgaggcacagtgacaagggccaggagggggacctcttagggggccatgcagtgatggaagccagaaggaatgaaggcctgcagtgaggatggagtggtcggcctgaagccatctctagcaagtggtcaggacgctgattgttctgcgcaggttggaggtaggtggtgagtctgagaaaggggccggaaagactccccagcaactgctggcaaagggtgaagggcacgttcccacaggattcaagccagctgcctttggaggggagacgggcactcagtttaggcgctcctacagcagggtcagcaagacaagcaggttgcggcaagggtctgcgcactgctgtgtaaatgtaggggcatcggggggcagaaagaccaggggagaagtgtgcatcacccttggggttaagggacagttgtctgctaggtgttgcttcctggagatggctgaaaagccagtccagtctgcagggaccaggccaccacccacctgatgtgggagcatttcccccaatccctgctgggctgctgaatctgggggacatagggaagctgaggctggtgttctgagtagtggcagagctgagccacagggcatgtctgaggtcagccccgagcaaaatggaatagggactcagggtgggtcaggtaactggaaagcgggcactgtgcacgcagcccttgaggggagccagggtgggtggggatcccccactgtgtgcagaaggcagcagccttggaagcagggtgtgctcctcggtgtggtcgctcgataccagaaaatgactctaaaaactgaagagtgtttgagtttcattcacacaaaacatggacatcatctgtgaggctctgtcccagagagacagggccatccctcatgtctgttattgggttgtagataaacaaaagtat

SEQ ID NO: 359627 - DNA, 1905 bp, Homo sapiens
tccgcggtgccggccgacccggaagcatgtctgtccctagcggaggcgcgggtgccgtgctgagagcgcctgcctgtgcgccccgagcggggctgggactcttccaagatgcccacgttcgcacagagaccccggatcgcggaagctcgcgtctcgaaagagcccctccagcgtggggaggcctaagtacctcaaggttcaggcccacggaaggagtcgggggagcgaggcccggtgatctacgtgtgaaggagcttggacaggacctcacaaacgccagggagacggcgagggggttcgtgcgtttgtaacgtcttgacatcgctgatcctcccgcaggcggtctcacgccctgcccgtcctgggttcacggtttttcatcacctgcggctgtcctgcgatcgaccacagctgtgcaggaggggcaggaggtatctgttgctgcagttaccggaacctttgccaggactagtacaggaccacgggctggtagctcagggatgtctcgtctgtgagttacagctgcacgctctccaggaaagaaggaatttcctcttctctggaaaccccaccacacagctggtttctcattggtgctgcttgcccattccctgagctgtgactgccagaggagtgggaggttggtggtgcctccagcccatcaggggcaggccctgggaccgcctgggaacaggaggactatggcacaaaccgagtgagtgatgggagcaacccgcagggctctgccacatccctgtcttccttcactgacatgaaacgcagaaaaggcagctttgccacaacacaggagcacgcaccgaatgtggccgcccagggctctgtccttgaccctgttgtccaggactgtttaccaagggctgacaggcactgagtgccccgtgcacctggccagacactgcactcatgcagcggaaaggacagtgaacgagactttgtccctggcctccaaaggcttagggcgtagtggctgtcatgaggcacagtgacaagggccaggagggggacctcttagggggccatgcagtgatggaagccagaaggaatgaaggcctgcagtgaggatggagtggtcggcctgaagccatctctagcaagtggtcaggacgctgattgttctgcgcaggttggaggtaggtggtgagtctgagaaaggggccggaaagactccccagcaactgctggcaaagggtgaagggcacgttcccacaggattcaagccagctgcctttggaggggagacgggcactcagtttaggcgctcctacagcagggtcagcaagacaagcaggttgcggcaagggtctgcgcactgctgtgtaaatgtaggggcatcggggggcagaaagaccaggggagaagtgtgcatcacccttggggttaagggacagttgtctgctaggtgttgcttcctggagatggctgaaaagccagtccagtctgcagggaccaggccaccacccacctgatgtgggagcatttcccccaatccctgctgggctgctgaatctgggggacatagggaagctgaggctggtgttctgagtagtggcagagctgagccacagggcatgtctgaggtcagccccgagcaaaatggaatagggactcagggtgggtcaggtaactggaaagcgggcactgtgcacgcagcccttgaggggagccagggtgggtggggatcccccactgtgtgcagaaggcagcagccttggaagcagggtgtgctcctcggtgtggtcgctcgataccagaaaatgactctaaaaactgaagagtgtttgagtttcattcacacaaaacatggacatcatctgtgaggctctgtcccagagagacagggccatccctcatgtctgttattgggttgtagataaacaaaagtat

SEQ ID NO: 359628 - DNA, 524 bp, Homo sapiens
tccgcggtgccggccgacccggaagcatgtctgtccctagcggaggcgcgggtgccgtgctgagagcgcctgcctgtgcgccccgagcggggctgggactcttccaagatgcccacgttcgcacagagaccccggatcgcggaagctcgcgtctcgaaaggcggtctcacgccctgcccgtcctgggttcacggtttttcatcacctgcggctgtcctgcgatcgaccacagctgtgcaggaggggcaggaggtatctgttgctgcagttaccggaacctttgccaggactagtacaggaccacgggctggtagctcagggatgtctcgtctgtgagttacagctgcacgctctccaggaaagaaggaatttcctcttctctggaaaccccaccacacagctggtttctcattggtgctgcttgcccattccctgagctgtgactgccagaggagtgggaggttggcggcatgtccagcctgttaggtgtgacacttgtgatggcttggaaacaggcggaccat

SEQ ID NO: 359629 - DNA, 1672 bp, Homo sapiens
tccgcggtgccggccgacccggaagcatgtctgtccctagcggaggcgcgggtgccgtgctgagagcgcctgcctgtgcgccccgagcggggctgggactcttccaagatgcccacgttcgcacagagaccccggatcgcggaagctcgcgtctcgaaaggcggtctcacgccctgcccgtcctgggttcacggtttttcatcacctgcggctgtcctgcgatcgaccacagctgtgcaggaggggcaggaggctggtagctcagggatgtctcgtctgtgagttacagctgcacgctctccaggaaagaaggaatttcctcttctctggaaaccccaccacacagctggtttctcattggtgctgcttgcccattccctgagctgtgactgccagaggagtgggaggttggtggtgcctccagcccatcaggggcaggccctgggaccgcctgggaacaggaggactatggcacaaaccgagtgagtgatgggagcaacccgcagggctctgccacatccctgtcttccttcactgacatgaaacgcagaaaaggcagctttgccacaacacaggagcacgcaccgaatgtggccgcccagggctctgtccttgaccctgttgtccaggactgtttaccaagggctgacaggcactgagtgccccgtgcacctggccagacactgcactcatgcagcggaaaggacagtgaacgagactttgtccctggcctccaaaggcttagggcgtagtggctgtcatgaggcacagtgacaagggccaggagggggacctcttagggggccatgcagtgatggaagccagaaggaatgaaggcctgcagtgaggatggagtggtcggcctgaagccatctctagcaagtggtcaggacgctgattgttctgcgcaggttggaggtaggtggtgagtctgagaaaggggccggaaagactccccagcaactgctggcaaagggtgaagggcacgttcccacaggattcaagccagctgcctttggaggggagacgggcactcagtttaggcgctcctacagcagggtcagcaagacaagcaggttgcggcaagggtctgcgcactgctgtgtaaatgtaggggcatcggggggcagaaagaccaggggagaagtgtgcatcacccttggggttaagggacagttgtctgctaggtgttgcttcctggagatggctgaaaagccagtccagtctgcagggaccaggccaccacccacctgatgtgggagcatttcccccaatccctgctgggctgctgaatctgggggacatagggaagctgaggctggtgttctgagtagtggcagagctgagccacagggcatgtctgaggtcagccccgagcaaaatggaatagggactcagggtgggtcaggtaactggaaagcgggcactgtgcacgcagcccttgaggggagccagggtgggtggggatcccccactgtgtgcagaaggcagcagccttggaagcagggtgtgctcctcggtgtggtcgctcgataccagaaaatgactctaaaaactgaagagtgtttgagtttcattcacacaaaacatggacatcatctgtgaggctctgtcccagagagacagggccatccctcatgtctgttattgggttgtagataaacaaaagtat

SEQ ID NO: 359630 - DNA, 1071 bp, Homo sapiens
ggtcatccaagccaatgaacttagattctcatgtggaatgatttatgtattttaaacaaagccttcatcttatttagaaatcacttgcatgaggcactcttttgaaaatgttctcctcatctggaaaataatttggctgtataatcgtggtattcaggaagttagggcaggtgtttaggtggaagagcagaagggagtattccaatgaggctgaagagtgaggggaattgaccccctgggagaagggaaggcatgtcagggccctccttttaacaggaaaggattgaagaaggcagtgaccctgagagaagaggagaagccaggcctgggcgccaaacacttttgggcctgttgctttgaagggtagaaagagtggccataatatttctcctgacccagcagatttgaaaagattcctccagcagacagtggaaagccccttgcttcctcagccattcagtctgatttctgaaataactatgctatttcctggttgtggtgaagtggcagggcccgagggtttgatcagcttttcatgggctatggccattagtggggttggggtgcaggtgggagtttgttaacacaagagcttgttattctcggagcttcaggccctggtttggaaatgttaactggccaaccagccacgggagttggaattccctaactattgtcagagagagtgcaaagggatttgtctgattgaacaatctgcatttgaagatgacctggacctgcctgcatcccgcatggcagaggtggacatttggaaggtgcgtttgctcatgtttcctcttctctccccagaacctgctaaggctgcctcagacctgactgcctggttcagcctcttcgctgacctcgacccactctcaaatcctgatgctgttgggaaaaccgataaagaacacgaattgctcaatgcatgaatctgtacccttcgggagggcactcacatgccgcccccagcagctcccctgggggctagcagaagtataaagtgatcagtatgctgttttaataattatgtgccattttaataaaatgaaagggtcaacggccctgttt

SEQ ID NO: 359631 - DNA, 1668 bp, Homo sapiens
ggtcatccaagccaatgaacttagattctcatgtggaatgatttatgtattttaaacaaagccttcatcttatttagaaatcacttgcatgaggcactcttttgaaaatgttctcctcatctggaaaataatttggctgtataatcgtggtattcaggaagttagggcaggtgtttaggtggaagagcagaagggagtattccaatgaggctgaagagtgaggggaattgaccccctgggagaagggaaggcatgtcagggccctccttttaacaggaaaggattgaagaaggcagtgaccctgagagaagaggagaagccaggcctgggcgccaaacacttttgggcctgttgctttgaagggtagaaagagtggccataatatttctcctgacccagcagatttgaaaagattcctccagcagacagtggaaagccccttgcttcctcagccattcagtctgatttctgaaataactatgctatttcctggttgtggtgaagtggcagggcccgagggtttgatcagcttttcatgggctatggccattagtggggttggggtgcaggtgggagtttgttaacacaagagcttgttattctcggagcttcaggccctggtttggaaatgttaactggccaaccagccacgggagttggaattccctaactattgtcagagagagtgcaaagggatttgtctgattgaacaatctgcatttgaagatgacctggacctgcctgcatcccgcatggcagaggtggacatttggaaggtgcgtttgctcatgtttcctcttctctccccagaacctgctaaggctgcctcagacctgactgcctggttcagcctcttcgctgacctcgacccactctcaaatcctgatgctgttgggaaaaccgataaagaacacgaattgctcaatgcatgaatctgtacccttcgggagggcactcacatgccgcccccagcagctcccctgggggctagcagaagtataaagtgatcagtatgctgttttaataattatgtgccattttaataaaatgaaagggtcaacggccctgtttatattggtataattatttactcttatttggtataaagggttttcgtgtatctctatgtggatctaaataatacaggattgtctagaagcggtttccaggccaccgctctcctgcctacatcccatcatggctgctgcggtgtcactgggctaccgtgagatccaagttgaaatcagaagcctactttgatggtaggtttgaatgacgtgtcctacagcctcagaggcagcaggaggctagcaaagcttaaatgcctccttctctgcccccagcctctgtcccccttggaggagggctgtaggaagattccctcttcctgccaagccaccttccagtgagctctggatgaagctctggccaaccaaagacactgtccccacagcaggtgcctggtgggccacgtgttctcacactggtggaggagctgggcttctctccaaggcacaaaccttactatggaaagcagccatatttgcagataccactgtctccttttgtcctcttcgtggctggaattcaaaagcatgtatttctgaagcctcttgtgacattgtttttttttttttttaattaaacagaaaagatatttgacatgca

SEQ ID NO: 359632 - DNA, 1787 bp, Homo sapiens
cactctgggcggcggatccgagcgggggataccccaggagatgggggtcgaggagagaccccggggagtagagagagagaaactcactccccgagtccccgaccctccccaagcaaggttataatataacttatcctctcatgcttttttcctgccccttctccccaaatcatcaacaatagaagaagaagaaaacatgtcaggacacaaatgcagttatccctgggacttacaggatcgatatgctcaagataagtcagttgtaaataagatgcaacagaaatattgggagacgaagcaggcctttattaaagccacagggaagaaggaagatgaacatgttgttgcctctgacgcggacctggatgccaagctagagctgtttcattcaattcagagaacctgtctggacttatcgaaagcaattgtactctatcaaaagaggatatgtttcttgtctcaagaagaaaacgaactgggaaaatttcttcgatcccaaggtttccaagataaaaccagagcaggaaagatgatgcaagcgacaggaaaggccctctgcttttcttcccagcaaaggttggccttacgaaatcctttgtgtcgatttcaccaagaagtggagacttttcggcatcgggccatctcagatacttggctgacggtgaaccgcatggaacagtgcaggacggaatatagaggagcactattatggatgaaggacgtgtctcaggagcttgatccagacctctacaagcaaatggagaagttcaggaaggtacaaacacaagtgcgccttgcaaaaaaaaactttgacaaattgaagatggatgtttgtcaaaaagtggatcttcttggagcgagcagatgcaatctcttgtctcacatgctagcaacataccagaccactctgcttcatttttgggagaaaacttctcacactatggcagccatccatgagagtttcaaaggttatcaaccatatgaatttactactttaaagagcttacaagaccctatgaaaaaattagttgagaaagaagagaagaagaaaatcaaccagcaggaaagtacagatgcagccgtgcaggagccgagccaattaatttcattagaggaagaaaaccagcgcaaggaatcctctagttttaagactgaagatggaaaaagtattttatctgccttagacaaaggctctacacatactgcatgctcaggacccatagatgaactattagacatgaaatctgaggaaggtgcttgcctgggaccagtggcagggaccccggaacctgaaggtgctgacaaagatgacctgctgctgttgagtgagatcttcaatgcttcctccttggaagagggcgagttcagcaaagagtgggccgctgtgtttggagacggccaagtgaaggagccagtgcccactatggccctgggagagccagaccccaaggcccagacaggctcaggtttccttccttcgcagcttttagaccaaaatatgaaagacttacaggcctcgctacaagaacctgctaaggctgcctcagacctgactgcctggttcagcctcttcgctgacctcgacccactctcaaatcctgatgctgttgggaaaaccgataaagaacacgaattgctcaatgcatgaatctgtacccttcgggagggcactcacatgccgcccccagcagctcccctgggggctagcagaagtataaagtgatcagtatgctgttttaataattatgtgccattttaataaaatgaaagggtcaacggccctgttt

SEQ ID NO: 359633 - DNA, 2029 bp, Homo sapiens
cactctgggcggcggatccgagcgggggataccccaggagatgggggtcgaggagagaccccggggagtagagagagagaaactcactccccgagtccccgaccctccccaagcaaggttataatataacttatcctctcatgcttttttcctgccccttctccccaaatcatcaacaatagaagaagaagaaaacatgtcaggacacaaatgcagttatccctgggacttacaggatcgatatgctcaagataagtcagttgtaaataagatgcaacagaaatattgggagacgaagcaggcctttattaaagccacagggaagaaggaagatgaacatgttgttgcctctgacgcggacctggatgccaagctagagctgtttcattcaattcagagaacctgtctggacttatcgaaagcaattgtactctatcaaaagaggatatgtttcttgtctcaagaagaaaacgaactgggaaaatttcttcgatcccaaggtttccaagataaaaccagagcaggaaagatgatgcaagcgacaggaaaggccctctgcttttcttcccagcaaaggttggccttacgaaatcctttgtgtcgatttcaccaagaagtggagacttttcggcatcgggccatctcagatacttggctgacggtgaaccgcatggaacagtgcaggacggaatatagaggagcactattatggatgaaggacgtgtctcaggagcttgatccagacctctacaagcaaatggagaagttcaggaaggtacaaacacaagtgcgccttgcaaaaaaaaactttgacaaattgaagatggatgtttgtcaaaaagtggatcttcttggagcgagcagatgcaatctcttgtctcacatgctagcaacataccagcttgcctgggaccagtggcagggaccccggaacctgaaggtgctgacaaagatgacctgctgctgttgagtgagatcttcaatgcttcctccttggaagagggcgagttcagcaaagagtgggccgctgtgtttggagacggccaagtgaaggagccagtgcccactatggccctgggagagccagaccccaaggcccagacaggctcaggtttccttccttcgcagcttttagaccaaaatatgaaagacttacaggcctcgctacaagaacctgctaaggctgcctcagacctgactgcctggttcagcctcttcgctgacctcgacccactctcaaatcctgatgctgttgggaaaaccgataaagaacacgaattgctcaatgcatgaatctgtacccttcgggagggcactcacatgccgcccccagcagctcccctgggggctagcagaagtataaagtgatcagtatgctgttttaataattatgtgccattttaataaaatgaaagggtcaacggccctgtttatattggtataattatttactcttatttggtataaagggttttcgtgtatctctatgtggatctaaataatacaggattgtctagaagcggtttccaggccaccgctctcctgcctacatcccatcatggctgctgcggtgtcactgggctaccgtgagatccaagttgaaatcagaagcctactttgatggtaggtttgaatgacgtgtcctacagcctcagaggcagcaggaggctagcaaagcttaaatgcctccttctctgcccccagcctctgtcccccttggaggagggctgtaggaagattccctcttcctgccaagccaccttccagtgagctctggatgaagctctggccaaccaaagacactgtccccacagcaggtgcctggtgggccacgtgttctcacactggtggaggagctgggcttctctccaaggcacaaaccttactatggaaagcagccatatttgcagataccactgtctccttttgtcctcttcgtggctggaattcaaaagcatgtatttctgaagcctcttgtgacattgtttttttttttttttaattaaacagaaaagatatttgacatgca

SEQ ID NO: 359634 - DNA, 1538 bp, Homo sapiens
  misc_feature (1537)..(1537): n is a, c, g, or t
cactctgggcggcggatccgagcgggggataccccaggagatgggggtcgaggagagaccccggggagtagagagagagaaactcactccccgagtccccgaccctccccaagcaaggttataatataacttatcctctcatgcttttttcctgccccttctccccaaatcatcaacaatagaagaagaagaaaacatgtcaggacacaaatgcagttatccctgggacttacaggatcgatatgctcaagataagtcagttgtaaataagatgcaacagaaatattgggagacgaagcaggcctttattaaagccacagggaagaaggaagatgaacatgttgttgcctctgacgcggacctggatgccaagctagagctgtttcattcaattcagagaacctgtctggacttatcgaaagcaattgtactctatcaaaagaggatatgtttcttgtctcaagaagaaaacgaactgggaaaatttcttcgatcccaaggtttccaagataaaaccagagcaggaaagatgatgcaagcgacaggaaaggccctctgcttttcttcccagcaaaggttggccttacgaaatcctttgtgtcgatttcaccaagaagtggagacttttcggcatcgggccatctcagatacttggctgacggtgaaccgcatggaacagtgcaggacggaatatagaggagcactattatggatgaaggacgtgtctcaggagcttgatccagacctctacaagcaaatggagaagttcaggaaggtacaaacacaagtgcgccttgcaaaaaaaaactttgacaaattgaagatggatgtttgtcaaaaagtggatcttcttggagcgagcagatgcaatctcttgtctcacatgctagcaacataccagaccactctgcttcatttttgggagaaaacttctcacactatggcagccatccatgagagtttcaaaggttatcaaccatatgaatttactactttaaaggtatggaagctagaggggccactagaaaatcttgagaaaagtaaagttttgtttatatcacaagcaaagtccattgcagaaagcatcattattccaggactcagaatgctgaagagagaactgtgcccccagcagagtctttttctttctttctttctttttttttactgcatcaggattcaatacaatgagaatctactgcaatccaaaagcgcgaattgaaccttgaaccttgagatacatgttcctgggagatgaattgtggtgaacttgagtctaatgattggtcctgctcctttaaaatacttgtttgacattgctaaaggggagattgtacaagtcccataaactcagttacttttaattattatattcaaatatcctcacttgagaaggtgtcctcctttcctctcttacttctgaaatgtatcattttattctgagagtattatccaacataaaattgaatttttctgtaagactacagcaatattttctaattgaaaaagcagtattaaactcaatgatttttcatcnc

SEQ ID NO: 359635 - DNA, 728 bp, Homo sapiens
ctgttcgactcttggaaaactgccacagtggaatcaccactgttgtcctggtttacagtttgacatcttttttatgtgtcgaatattttggtgagttctgagtggctcatgcttcacgtacaagggttttcccatgaaatttacattgagttgtccacctccagcttatagggcttctggaacagagtgggtcttgctcttagtgattccatgggagaaaatggaattggaggtactagtagaattcagggaactgtccagtcagagacttcgactgtcatggatttggagctttccttgccactggatgagggcatgatgacctgctgctgttgagtgagatcttcaatgcttcctccttggaagagggcgagttcagcaaagagtgggccgctgtgtttggagacggccaagtgaaggagccagtgcccactatggccctgggagagccagaccccaaggcccagacaggctcaggtttccttccttcgcagcttttagaccaaaatatgaaagacttacaggcctcgctacaagaacctgctaaggctgcctcagacctgactgcctggttcagcctcttcgctgacctcgacccactctcaaatcctgatgctgttgggaaaaccgataaagaacacgaattgctcaatgcatgaatctgtacccttcgggactggatgagggcagggacctctagatcgaccacagcatgcagctgcacccca

SEQ ID NO: 359636 - DNA, 319 bp, Homo sapiens
cactctgggcggcggatccgagcgggggataccccaggagatgggggtcgaggagagaccccggggagtagagagagagaaactcactccccgagtccccgaccctccccaagcaaggtgaggtcaacgccacccaccttcccccggtcaccctgggaggggtcgctccggcgggcgtctgctggagggtagaagcggggaagggaggcagcggcggcgcccaggcggcggtaggtagccgggcggcgagggcgcccgcaccccccggccgctgcgctgcgctgcggtgcgcacgggctccgccggttgctattccggc

SEQ ID NO: 359637 - DNA, 1743 bp, Homo sapiens
ggcgggggcgcgccgggcgggctgcaggaagcagcaggagacgcccggcagccgggacggtcggggacgcctggttataatataacttatcctctcatgcttttttcctgccccttctccccaaatcatcaacaatagaagaagaagaaaacatgtcaggacacaaatgcagttatccctgggacttacaggatcgatatgctcaagataagtcagttgtaaataagatgcaacagaaatattgggagacgaagcaggcctttattaaagccacagggaagaaggaagatgaacatgttgttgcctctgacgcggacctggatgccaagctagagctgtttcattcaattcagagaacctgtctggacttatcgaaagcaattgtactctatcaaaagaggatatgtttcttgtctcaagaagaaaacgaactgggaaaatttcttcgatcccaaggtttccaagataaaaccagagcaggaaagatgatgcaagcgacaggaaaggccctctgcttttcttcccagcaaaggttggccttacgaaatcctttgtgtcgatttcaccaagaagtggagacttttcggcatcgggccatctcagatacttggctgacggtgaaccgcatggaacagtgcaggacggaatatagaggagcactattatggatgaaggacgtgtctcaggagcttgatccagacctctacaagcaaatggagaagttcaggaaggtacaaacacaagtgcgccttgcaaaaaaaaactttgacaaattgaagatggatgtttgtcaaaaagtggatcttcttggagcgagcagatgcaatctcttgtctcacatgctagcaacataccagaccactctgcttcatttttgggagaaaacttctcacactatggcagccatccatgagagtttcaaaggttatcaaccatatgaatttactactttaaagagcttacaagaccctatgaaaaaattagttgagaaagaagagaagaagaaaatcaaccagcaggaaagtacagatgcagccgtgcaggagccgagccaattaatttcattagaggaagaaaaccagcgcaaggaatcctctagttttaagactgaagatggaaaaagtattttatctgccttagacaaaggctctacacatactgcatgctcaggacccatagatgaactattagacatgaaatctgaggaaggtgcttgcctgggaccagtggcagggaccccggaacctgaaggtgctgacaaagatgacctgctgctgttgagtgagatcttcaatgcttcctccttggaagagggcgagttcagcaaagagtgggccgctgtgtttggagacggccaagtgaaggagccagtgcccactatggccctgggagagccagaccccaaggcccagacaggctcaggtttccttccttcgcagcttttagaccaaaatatgaaagacttacaggcctcgctacaagaacctgctaaggctgcctcagacctgactgcctggttcagcctcttcgctgacctcgacccactctcaaatcctgatgctgttgggaaaaccgataaagaacacgaattgctcaatgcatgaatctgtacccttcgggagggcactcacatgccgcccccagcagctcccctgggggctagcagaagtataaagtgatcagtatgctgttttaataattatgtgccattttaataaaatgaaagggtcaacggccctgttt

SEQ ID NO: 359638 - DNA, 2152 bp, Homo sapiens
ctgtcatcccggcacttggggaaaccggggtgggtggatcacctgaggtcaagggtttgagaccagcctggccgtctttactttaaataccctaaaaaaaaaaaaaaaatcagctgggcgtggtagcacacacctgtaatcccagctactcaggaggctgaggcaggaggatcacagtgacctataatgagccgttgtgctccagcctgggcgacagaagtcttgtctcaagaagaaaacgaactgggaaaatttcttcgatcccaaggtttccaagataaaaccagagcaggaaagatgatgcaagcgacaggaaaggccctctgcttttcttcccagcaaaggttggccttacgaaatcctttgtgtcgatttcaccaagaagtggagacttttcggcatcgggccatctcagatacttggctgacggtgaaccgcatggaacagtgcaggacggaatatagaggagcactattatggatgaaggacgtgtctcaggagcttgatccagacctctacaagcaaatggagaagttcaggaaggtacaaacacaagtgcgccttgcaaaaaaaaactttgacaaattgaagatggatgtttgtcaaaaagtggatcttcttggagcgagcagatgcaatctcttgtctcacatgctagcaacataccagaccactctgcttcatttttgggagaaaacttctcacactatggcagccatccatgagagtttcaaaggttatcaaccatatgaatttactactttaaagagcttacaagaccctatgaaaaaattagttgagaaagaagagaagaagaaaatcaaccagcaggaaagtacagatgcagccgtgcaggagccgagccaattaatttcattagaggaagaaaaccagcgcaaggaatcctctagttttaagactgaagatggaaaaagtattttatctgccttagacaaaggctctacacatactgcatgctcaggacccatagatgaactattagacatgaaatctgaggaaggtgcttgcctgggaccagtggcagggaccccggaacctgaaggtgctgacaaagatgacctgctgctgttgagtgagatcttcaatgcttcctccttggaagagggcgagttcagcaaagagtgggccgctgtgtttggagacggccaagtgaaggagccagtgcccactatggccctgggagagccagaccccaaggcccagacaggctcaggtttccttccttcgcagcttttagaccaaaatatgaaagacttacaggcctcgctacaagaacctgctaaggctgcctcagacctgactgcctggttcagcctcttcgctgacctcgacccactctcaaatcctgatgctgttgggaaaaccgataaagaacacgaattgctcaatgcatgaatctgtacccttcgggagggcactcacatgccgcccccagcagctcccctgggggctagcagaagtataaagtgatcagtatgctgttttaataattatgtgccattttaataaaatgaaagggtcaacggccctgtttatattggtataattatttactcttatttggtataaagggttttcgtgtatctctatgtggatctaaataatacaggattgtctagaagcggtttccaggccaccgctctcctgcctacatcccatcatggctgctgcggtgtcactgggctaccgtgagatccaagttgaaatcagaagcctactttgatggtaggtttgaatgacgtgtcctacagcctcagaggcagcaggaggctagcaaagcttaaatgcctccttctctgcccccagcctctgtcccccttggaggagggctgtaggaagattccctcttcctgccaagccaccttccagtgagctctggatgaagctctggccaaccaaagacactgtccccacagcaggtgcctggtgggccacgtgttctcacactggtggaggagctgggcttctctccaaggcacaaaccttactatggaaagcagccatatttgcagataccactgtctccttttgtcctcttcgtggctggaattcaaaagcatgtatttctgaagcctcttgtgacattgtttttttttttttttaattaaacagaaaagatatttgacatgca

SEQ ID NO: 359639 - DNA, 2157 bp, Homo sapiens
agcagatgccttggcctttggagagtgatctaaaatggcctagtcggagagatgctaatcacatacgctccattcctcctcaaagggccaaatgtagaaatgggcagtggtcatgccttggccatcctccatgaacacgggattggccccagcttcaaatgagcactcagcccaggctcaagaccacccccaacaacgcggatggaggtgcttgccagtggtccagttagtagcagtaaactaagggatgggtacatggataatcttctctggctgactaatcagttggaactacatgcatttcgattattattcagcaaatattgatggagcatcttctacattccaggttggccttacgaaatcctttgtgtcgatttcaccaagaagtggagacttttcggcatcgggccatctcagatacttggctgacggtgaaccgcatggaacagtgcaggacggaatatagaggagcactattatggatgaaggacgtgtctcaggagcttgatccagacctctacaagcaaatggagaagttcaggaaggtacaaacacaagtgcgccttgcaaaaaaaaactttgacaaattgaagatggatgtttgtcaaaaagtggatcttcttggagcgagcagatgcaatctcttgtctcacatgctagcaacataccagaccactctgcttcatttttgggagaaaacttctcacactatggcagccatccatgagagtttcaaaggttatcaaccatatgaatttactactttaaagagcttacaagaccctatgaaaaaattagttgagaaagaagagaagaagaaaatcaaccagcaggaaagtacagatgcagccgtgcaggagccgagccaattaatttcattagaggaagaaaaccagcgcaaggaatcctctagttttaagactgaagatggaaaaagtattttatctgccttagacaaaggctctacacatactgcatgctcaggacccatagatgaactattagacatgaaatctgaggaaggtgcttgcctgggaccagtggcagggaccccggaacctgaaggtgctgacaaagatgacctgctgctgttgagtgagatcttcaatgcttcctccttggaagagggcgagttcagcaaagagtgggccgctgtgtttggagacggccaagtgaaggagccagtgcccactatggccctgggagagccagaccccaaggcccagacaggctcaggtttccttccttcgcagcttttagaccaaaatatgaaagacttacaggcctcgctacaagaacctgctaaggctgcctcagacctgactgcctggttcagcctcttcgctgacctcgacccactctcaaatcctgatgctgttgggaaaaccgataaagaacacgaattgctcaatgcatgaatctgtacccttcgggagggcactcacatgccgcccccagcagctcccctgggggctagcagaagtataaagtgatcagtatgctgttttaataattatgtgccattttaataaaatgaaagggtcaacggccctgtttatattggtataattatttactcttatttggtataaagggttttcgtgtatctctatgtggatctaaataatacaggattgtctagaagcggtttccaggccaccgctctcctgcctacatcccatcatggctgctgcggtgtcactgggctaccgtgagatccaagttgaaatcagaagcctactttgatggtaggtttgaatgacgtgtcctacagcctcagaggcagcaggaggctagcaaagcttaaatgcctccttctctgcccccagcctctgtcccccttggaggagggctgtaggaagattccctcttcctgccaagccaccttccagtgagctctggatgaagctctggccaaccaaagacactgtccccacagcaggtgcctggtgggccacgtgttctcacactggtggaggagctgggcttctctccaaggcacaaaccttactatggaaagcagccatatttgcagataccactgtctccttttgtcctcttcgtggctggaattcaaaagcatgtatttctgaagcctcttgtgacattgtttttttttttttttaattaaacagaaaagatatttgacatgca

SEQ ID NO: 359640 - DNA, 2022 bp, Homo sapiens
tgcactccagcctgagcgacagagcaagactccatctcaaaaaaaaaaaaaaagaaaattaagactaggttccttgtcttcaaagagctcaaagtttaggaagaatctggagatagtgaagtctatttttctatacctctaggacagagcagagtgtgctaagtgaaataagttctaagaaagccagtgacagcttaaagagggagaaatagaatcagctgagggattgcaacagtagagcgttaattatttaccctgggttttggaggatggatcagatgagaaaaagagaatggagaggagaatgtcccaggtggtgggagcagcatgagttctgggaggcagcatttggggaaacagggaggcatttagtttggctgaaatacagagtgtaattgggggcataatgggaagcatggaaatgagttagaatcatgctttaaagaatcttcaaagctacagagagtcatacttccctggggaccaggactagaactgggcattcaaaacattaatagctttactgtctttctttgcagaccactctgcttcatttttgggagaaaacttctcacactatggcagccatccatgagagtttcaaaggttatcaaccatatgaatttactactttaaagagcttacaagaccctatgaaaaaattagttgagaaagaagagaagaagaaaatcaaccagcaggaaagtacagatgcagccgtgcaggagccgagccaattaatttcattagaggaagaaaaccagcgcaaggaatcctctagttttaagactgaagatggaaaaagtattttatctgccttagacaaaggctctacacatactgcatgctcaggacccatagatgaactattagacatgaaatctgaggaaggtgcttgcctgggaccagtggcagggaccccggaacctgaaggtgctgacaaagatgacctgctgctgttgagtgagatcttcaatgcttcctccttggaagagggcgagttcagcaaagagtgggccgctgtgtttggagacggccaagtgaaggagccagtgcccactatggccctgggagagccagaccccaaggcccagacaggctcaggtttccttccttcgcagcttttagaccaaaatatgaaagacttacaggcctcgctacaagaacctgctaaggctgcctcagacctgactgcctggttcagcctcttcgctgacctcgacccactctcaaatcctgatgctgttgggaaaaccgataaagaacacgaattgctcaatgcatgaatctgtacccttcgggagggcactcacatgccgcccccagcagctcccctgggggctagcagaagtataaagtgatcagtatgctgttttaataattatgtgccattttaataaaatgaaagggtcaacggccctgtttatattggtataattatttactcttatttggtataaagggttttcgtgtatctctatgtggatctaaataatacaggattgtctagaagcggtttccaggccaccgctctcctgcctacatcccatcatggctgctgcggtgtcactgggctaccgtgagatccaagttgaaatcagaagcctactttgatggtaggtttgaatgacgtgtcctacagcctcagaggcagcaggaggctagcaaagcttaaatgcctccttctctgcccccagcctctgtcccccttggaggagggctgtaggaagattccctcttcctgccaagccaccttccagtgagctctggatgaagctctggccaaccaaagacactgtccccacagcaggtgcctggtgggccacgtgttctcacactggtggaggagctgggcttctctccaaggcacaaaccttactatggaaagcagccatatttgcagataccactgtctccttttgtcctcttcgtggctggaattcaaaagcatgtatttctgaagcctcttgtgacattgtttttttttttttttaattaaacagaaaagatatttgacatgca

SEQ ID NO: 359641 - DNA, 2502 bp, Homo sapiens
  misc_feature (2502)..(2502): n is a, c, g, or t
tggcggccgccgcaggaagggccggttcctgcgctccccccgcccctttccctcgccttcggctgacgctgacgtcggatgagtgatccggagggacgctccgaccgcggccgggaggctcctgggggccggggctccgaggttataatataacttatcctctcatgcttttttcctgccccttctccccaaatcatcaacaatagaagaagaagaaaacatgtcaggacacaaatgcagttatccctgggacttacaggatcgatatgctcaagataagtcagttgtaaataagatgcaacagaaatattgggagacgaagcaggcctttattaaagccacagggaagaaggaagatgaacatgttgttgcctctgacgcggacctggatgccaagctagagctgtttcattcaattcagagaacctgtctggacttatcgaaagcaattgtactctatcaaaagaggatatgtttcttgtctcaagaagaaaacgaactgggaaaatttcttcgatcccaaggtttccaagataaaaccagagcaggaaagatgatgcaagcgacaggaaaggccctctgcttttcttcccagcaaaggttggccttacgaaatcctttgtgtcgatttcaccaagaagtggagacttttcggcatcgggccatctcagatacttggctgacggtgaaccgcatggaacagtgcaggacggaatatagaggagcactattatggatgaaggacgtgtctcaggagcttgatccagacctctacaagcaaatggagaagttcaggaaggtacaaacacaagtgcgccttgcaaaaaaaaactttgacaaattgaagatggatgtttgtcaaaaagtggatcttcttggagcgagcagatgcaatctcttgtctcacatgctagcaacataccagaccactctgcttcatttttgggagaaaacttctcacactatggcagccatccatgagagtttcaaaggttatcaaccatatgaatttactactttaaagagcttacaagaccctatgaaaaaattagttgagaaagaagagaagaagaaaatcaaccagcaggaaagtacagatgcagccgtgcaggagccgagccaattaatttcattagaggaagaaaaccagcgcaaggaatcctctagttttaagactgaagatggaaaaagtattttatctgccttagacaaaggctctacacatactgcatgctcaggacccatagatgaactattagacatgaaatctgaggaaggtgcttgcctgggaccagtggcagggaccccggaacctgaaggtgctgacaaagatgacctgctgctgttgagtgagatcttcaatgcttcctccttggaagagggcgagttcagcaaagagtgggccgctgtgtttggagacggccaagtgaaggagccagtgcccactatggccctgggagagccagaccccaaggcccagacaggctcaggtttccttccttcgcagcttttagaccaaaatatgaaagacttacaggcctcgctacaagaacctgctaaggctgcctcagacctgactgcctggttcagcctcttcgctgacctcgacccactctcaaatcctgatgctgttgggaaaaccgataaagaacacgaattgctcaatgcatgaatctgtacccttcgggagggcactcacatgccgcccccagcagctcccctgggggctagcagaagtataaagtgatcagtatgctgttttaataattatgtgccattttaataaaatgaaagggtcaacggccctgtttaaacacaaaaaaacaaaagaaaaaaaaaaaaaacaaaacacaaaaacaacaaaaagaaacaagggggggcgcgcgccgcccaaaagatttgccccgcggggggcgccgccatagaaataaacgcgcgcgggccccccgccgttttacttgcgagcgaacaagagggcgcgccgccactaaagaagagagagcgcgggatatataatacaacccgaggagcgagcgcggagcacgagcgcgccgcggtctatactaacaagcgcccggacgagagggggagacacacacgcgggagccgaaatcgcgcgcgggagacagtcttgtgtgaagacaggagagagacacgcgcttcaatgggcgagggggggggcagggacacaaatatgggggggcaggcacaacacacctcacacccgagagagagaatttataaacagcgcctccagaggggggacgatcacatatactcagaaccttttttcaacagcagcgagcgcgagatctaacggtgcgctgtgtgaaacaaccacacacgcgtgcgcggatacttacgcgcttgcgacgcgcccgctggtaaagaaaaaaattctggcgccgtcggccccaccgcgggagcaatctcgctactaacctctagaagagacccattttttactcccccagagggcggggaggggactactataacagn

SEQ ID NO: 359642 - DNA, 1136 bp, Homo sapiens
tggcggccgccgcaggaagggccggttcctgcgctccccccgcccctttccctcgccttcggctgacgctgacgtcggatgagtgatccggagggacgctccgaccgcggccgggaggctcctgggggccggggctccgaggttataatataacttatcctctcatgcttttttcctgccccttctccccaaatcatcaacaatagaagaagaagaaaacatgtcaggacacaaatgcagttatccctgggacttacaggatcgatatgctcaagataagtcagttgtaaataagatgcaacagaaatattgggagacgaagcaggcctttattaaagccacagggaagaaggaagatgaacatgttgttgcctctgacgcggacctggatgccaagctagagctgtttcattcaattcagagaacctgtctggacttatcgaaagcaattgtactctatcaaaagaggatatgtttcttgtctcaagaagaaaacgaactgggaaaatttcttcgatcccaaggtttccaagataaaaccagagcaggaaagatgatgcaagcgacaggaaaggccctctgcttttcttcccagcaaaggttggccttacgaaatcctttgtgtcgatttcaccaagaagtggagacttttcggcatcgggccatctcagatacttggctgacggtgaaccgcatggaacagtgcaggacggaatatagaggagcactattatggatgaaggacgtgtctcaggagcttgatccagacctctacaagcaaatggagaagttcaggaaggtacaaacacaagtgcgccttgcaaaaaaaaactttgacaaattgaagatggatgtttgtcaaaaagtggatcttcttggagcgagcagatgcaatctcttgtctcacatgctagcaacataccaggtaacaaaataatgtttgttgcaatgaaccaaggatggcacaaggtttaaataacatcaaaatggtgtttgagctaaaagtaagctttggccattgtgaagttctgaatgcctttccgtaatttcacttcccacatctctgccttctaggacaagagttatcgacgtagcgcttggtagctatttcctgattataatatgtctttctagag

SEQ ID NO: 359643 - DNA, 1157 bp, Homo sapiens
tggcggccgccgcaggaagggccggttcctgcgctccccccgcccctttccctcgccttcggctgacgctgacgtcggatgagtgatccggagggacgctccgaccgcggccgggaggctcctgggggccggggctccgagaagaagaagaaaacatgtcaggacacaaatgcagttatccctgggacttacaggatcgatatgctcaagataagtcagttgtaaataagatgcaacagaaatattgggagacgaagcaggcctttattaaagccacagggaagaaggaagatgaacatgttgttgcctctgacgcggacctggatgccaagctagagctgtttcattcaattcagagaacctgtctggacttatcgaaagcaattgtactctatcaaaagaggatatgtttcttgtctcaagaagaaaacgaactgggaaaatttcttcgatcccaaggtttccaagataaaaccagagcaggaaagatgatgcaagcgacaggaaaggccctctgcttttcttcccagcaaaggttggccttacgaaatcctttgtgtcgatttcaccaagaagtggagacttttcggcatcgggccatctcagatacttggctgacggtgaaccgcatggaacagtgcaggacggaatatagaggagcactattatggatgaaggacgtgtctcaggagcttgatccagacctctacaagcaaatggagaagttcaggaagttacaaaacacaagtgcgccttgcaaaaaaaactttgacaaactttgaacgacattgggatttgggtctgtcccaacacggggatcctctgtggaggacggagcgaagaatgcaatctcttgtctccaatgtaggaacttccagacactctggttccatttgggagcaactctccacctatggggggctcccctgagaggttcaaaggtttaaccccatggattcactttaagaagctcaaaccctaacaattttctggcaaacgaagcaacaacatctcaggaggttaatgggaggagaccgcccaatattgagaaagacccgggcccttatacagagagagaatgcgagaggcagcagggcgcgccagaaaacacatagagggggagcgcccagcaacatagctgtcaatcagacaaagcg

SEQ ID NO: 359644 - DNA, 418 bp, Homo sapiens
agtttccatttgtaggtcattttaataatataatgtatatatttttgagactagactatgggaagtctttctgttgctgactgctgccaaaccccttttcagtaatcacaaattaataattggtcatttttctacatcagtaatattttattaagacaatcattttggtaggctgggtgcattgtctgacatctgtaatcccagcattttaggaggccaaggcaggaggatcacttggagccaggagtttgagaccagcctgggcaacaaagtgagacccccatctctacaaaaaataaaaacacttaaaaattatccgggtaccgtgcatgtgcagtcccagctactcaggaggctgaggcaggaggatcacagtgacctataatgagccgttgtgctccagcctgggcgacagaag

SEQ ID NO: 359645 - DNA, 2275 bp, Homo sapiens
ggcgggggcgcgccgggcgggctgcaggaagcagcaggagacgcccggcagccgggacggtcggggacgcctgaagaagaagaaaacatgtcaggacacaaatgcagttatccctgggacttacaggatcgatatgctcaagataagtcagttgtaaataagatgcaacagaaatattgggagacgaagcaggcctttattaaagccacagggaagaaggaagatgaacatgttgttgcctctgacgcggacctggatgccaagctagagctgtttcattcaattcagagaacctgtctggacttatcgaaagcaattgtactctatcaaaagaggatatgtttcttgtctcaagaagaaaacgaactgggaaaatttcttcgatcccaaggtttccaagataaaaccagagcaggaaagatgatgcaagcgacaggaaaggccctctgcttttcttcccagcaaaggttggccttacgaaatcctttgtgtcgatttcaccaagaagtggagacttttcggcatcgggccatctcagatacttggctgacggtgaaccgcatggaacagtgcaggacggaatatagaggagcactattatggatgaaggacgtgtctcaggagcttgatccagacctctacaagcaaatggagaagttcaggaaggtacaaacacaagtgcgccttgcaaaaaaaaactttgacaaattgaagatggatgtttgtcaaaaagtggatcttcttggagcgagcagatgcaatctcttgtctcacatgctagcaacataccagaccactctgcttcatttttgggagaaaacttctcacactatggcagccatccatgagagtttcaaaggttatcaaccatatgaatttactactttaaagagcttacaagaccctatgaaaaaattagttgagaaagaagagaagaagaaaatcaaccagcaggaaagtacagatgcagccgtgcaggagccgagccaattaatttcattagaggaagaaaaccagcgcaaggaatcctctagttttaagactgaagatggaaaaagtattttatctgccttagacaaaggctctacacatactgcatgctcaggacccatagatgaactattagacatgaaatctgaggaaggtgcttgcctgggaccagtggcagggaccccggaacctgaaggtgctgacaaagatgacctgctgctgttgagtgagatcttcaatgcttcctccttggaagagggcgagttcagcaaagagtgggccgctgtgtttggagacggccaagtgaaggagccagtgcccactatggccctgggagagccagaccccaaggcccagacaggctcaggtttccttccttcgcagcttttagaccaaaatatgaaagacttacaggcctcgctacaagaacctgctaaggctgcctcagacctgactgcctggttcagcctcttcgctgacctcgacccactctcaaatcctgatgctgttgggaaaaccgataaagaacacgaattgctcaatgcatgaatctgtacccttcgggagggcactcacatgccgcccccagcagctcccctgggggctagcagaagtataaagtgatcagtatgctgttttaataattatgtgccattttaataaaatgaaagggtcaacggccctgtttatattggtataattatttactcttatttggtataaagggttttcgtgtatctctatgtggatctaaataatacaggattgtctagaagcggtttccaggccaccgctctcctgcctacatcccatcatggctgctgcggtgtcactgggctaccgtgagatccaagttgaaatcagaagcctactttgatggtaggtttgaatgacgtgtcctacagcctcagaggcagcaggaggctagcaaagcttaaatgcctccttctctgcccccagcctctgtcccccttggaggagggctgtaggaagattccctcttcctgccaagccaccttccagtgagctctggatgaagctctggccaaccaaagacactgtccccacagcaggtgcctggtgggccacgtgttctcacactggtggaggagctgggcttctctccaaggcacaaaccttactatggaaagcagccatatttgcagataccactgtctccttttgtcctcttcgtggctggaattcaaaagcatgtatttctgaagcctcttgtgacattgtttttttttttttttaattaaacagaaaagatatttgacatgca

SEQ ID NO: 359646 - DNA, 2025 bp, Homo sapiens
tggcggccgccgcaggaagggccggttcctgcgctccccccgcccctttccctcgccttcggctgacgctgacgtcggatgagtgatccggagggacgctccgaccgcggccgggaggctcctgggggccggggctccgaggttataatataacttatcctctcatgcttttttcctgccccttctccccaaatcatcaacaatagaagaagaagaaaacatgtcaggacacaaatgcagttatccctgggacttacaggatcgatatgctcaagataagtcagttgtaaataagatgcaacagaaatattgggagacgaagcaggcctttattaaagccacagggaagaaggaagatgaacatgttgttgcctctgacgcggacctggatgccaagctagagctgtttcattcaattcagagaacctgtctggacttatcgaaagcaattgtactctatcaaaagaggatatgttcattttaggaggccaaggcaggaggatcacttggagccaggagtttgagaccagcctgggcaacaaagtgagacccccatctctacaaaaaataaaaacacttaaaaattatccgggtaccgtgcatgtgcagtcccagctactcaggaggctgaggcaggaggatcacagtgacctataatgagccgttgtgctccagcctgggcgacagaagtcttgtctcaagaagaaaacgaactgggaaaatttcttcgatcccaaggtttccaagataaaaccagagcaggaaagatgatgcaagcgacaggaaaggccctctgcttttcttcccagcaaaggttggccttacgaaatcctttgtgtcgatttcaccaagaagtggagacttttcggcatcgggccatctcagatacttggctgacggtgaaccgcatggaacagtgcaggacggaatatagaggagcactattatggatgaaggacgtgtctcaggagcttgatccagacctctacaagcaaatggagaagttcaggaaggtacaaacacaagtgcgccttgcaaaaaaaaactttgacaaattgaagatggatgtttgtcaaaaagtggatcttcttggagcgagcagatgcaatctcttgtctcacatgctagcaacataccagaccactctgcttcatttttgggagaaaacttctcacactatggcagccatccatgagagtttcaaaggttatcaaccatatgaatttactactttaaagagcttacaagaccctatgaaaaaattagttgagaaagaagagaagaagaaaatcaaccagcaggaaagtacagatgcagccgtgcaggagccgagccaattaatttcattagaggaagaaaaccagcgcaaggaatcctctagttttaagactgaagatggaaaaagtattttatctgccttagacaaaggctctacacatactgcatgctcaggacccatagatgaactattagacatgaaatctgaggaaggtgcttgcctgggaccagtggcagggaccccggaacctgaaggtgctgacaaagatgacctgctgctgttgagtgagatcttcaatgcttcctccttggaagagggcgagttcagcaaagagtgggccgctgtgtttggagacggccaagtgaaggagccagtgcccactatggccctgggagagccagaccccaaggcccagacaggctcaggtttccttccttcgcagcttttagaccaaaatatgaaagacttacaggcctcgctacaagaacctgctaaggctgcctcagacctgactgcctggttcagcctcttcgctgacctcgacccactctcaaatcctgatgctgttgggaaaaccgataaagaacacgaattgctcaatgcatgaatctgtacccttcgggagggcactcacatgccgcccccagcagctcccctgggggctagcagaagtataaagtgatcagtatgctgttttaataattatgtgccattttaataaaatgaaagggtcaacggccctgttt

SEQ ID NO: 359647 - DNA, 1811 bp, Homo sapiens
tggcggccgccgcaggaagggccggttcctgcgctccccccgcccctttccctcgccttcggctgacgctgacgtcggatgagtgatccggagggacgctccgaccgcggccgggaggctcctgggggccggggctccgaggttataatataacttatcctctcatgcttttttcctgccccttctccccaaatcatcaacaatagaagaagaagaaaacatgtcaggacacaaatgcagttatccctgggacttacaggatcgatatgctcaagataagtcagttgtaaataagatgcaacagaaatattgggagacgaagcaggcctttattaaagccacagggaagaaggaagatgaacatgttgttgcctctgacgcggacctggatgccaagctagagctgtttcattcaattcagagaacctgtctggacttatcgaaagcaattgtactctatcaaaagaggatatgtttcttgtctcaagaagaaaacgaactgggaaaatttcttcgatcccaaggtttccaagataaaaccagagcaggaaagatgatgcaagcgacaggaaaggccctctgcttttcttcccagcaaaggttggccttacgaaatcctttgtgtcgatttcaccaagaagtggagacttttcggcatcgggccatctcagatacttggctgacggtgaaccgcatggaacagtgcaggacggaatatagaggagcactattatggatgaaggacgtgtctcaggagcttgatccagacctctacaagcaaatggagaagttcaggaaggtacaaacacaagtgcgccttgcaaaaaaaaactttgacaaattgaagatggatgtttgtcaaaaagtggatcttcttggagcgagcagatgcaatctcttgtctcacatgctagcaacataccagaccactctgcttcatttttgggagaaaacttctcacactatggcagccatccatgagagtttcaaaggttatcaaccatatgaatttactactttaaagagcttacaagaccctatgaaaaaattagttgagaaagaagagaagaagaaaatcaaccagcaggaaagtacagatgcagccgtgcaggagccgagccaattaatttcattagaggaagaaaaccagcgcaaggaatcctctagttttaagactgaagatggaaaaagtattttatctgccttagacaaaggctctacacatactgcatgctcaggacccatagatgaactattagacatgaaatctgaggaaggtgcttgcctgggaccagtggcagggaccccggaacctgaaggtgctgacaaagatgacctgctgctgttgagtgagatcttcaatgcttcctccttggaagagggcgagttcagcaaagagtgggccgctgtgtttggagacggccaagtgaaggagccagtgcccactatggccctgggagagccagaccccaaggcccagacaggctcaggtttccttccttcgcagcttttagaccaaaatatgaaagacttacaggcctcgctacaagaacctgctaaggctgcctcagacctgactgcctggttcagcctcttcgctgacctcgacccactctcaaatcctgatgctgttgggaaaaccgataaagaacacgaattgctcaatgcatgaatctgtacccttcgggagggcactcacatgccgcccccagcagctcccctgggggctagcagaagtataaagtgatcagtatgctgttttaataattatgtgccattttaataaaatgaaagggtcaacggccctgttt

SEQ ID NO: 359648 - DNA, 2343 bp, Homo sapiens
tggcggccgccgcaggaagggccggttcctgcgctccccccgcccctttccctcgccttcggctgacgctgacgtcggatgagtgatccggagggacgctccgaccgcggccgggaggctcctgggggccggggctccgagaagaagaagaaaacatgtcaggacacaaatgcagttatccctgggacttacaggatcgatatgctcaagataagtcagttgtaaataagatgcaacagaaatattgggagacgaagcaggcctttattaaagccacagggaagaaggaagatgaacatgttgttgcctctgacgcggacctggatgccaagctagagctgtttcattcaattcagagaacctgtctggacttatcgaaagcaattgtactctatcaaaagaggatatgtttcttgtctcaagaagaaaacgaactgggaaaatttcttcgatcccaaggtttccaagataaaaccagagcaggaaagatgatgcaagcgacaggaaaggccctctgcttttcttcccagcaaaggttggccttacgaaatcctttgtgtcgatttcaccaagaagtggagacttttcggcatcgggccatctcagatacttggctgacggtgaaccgcatggaacagtgcaggacggaatatagaggagcactattatggatgaaggacgtgtctcaggagcttgatccagacctctacaagcaaatggagaagttcaggaaggtacaaacacaagtgcgccttgcaaaaaaaaactttgacaaattgaagatggatgtttgtcaaaaagtggatcttcttggagcgagcagatgcaatctcttgtctcacatgctagcaacataccagaccactctgcttcatttttgggagaaaacttctcacactatggcagccatccatgagagtttcaaaggttatcaaccatatgaatttactactttaaagagcttacaagaccctatgaaaaaattagttgagaaagaagagaagaagaaaatcaaccagcaggaaagtacagatgcagccgtgcaggagccgagccaattaatttcattagaggaagaaaaccagcgcaaggaatcctctagttttaagactgaagatggaaaaagtattttatctgccttagacaaaggctctacacatactgcatgctcaggacccatagatgaactattagacatgaaatctgaggaaggtgcttgcctgggaccagtggcagggaccccggaacctgaaggtgctgacaaagatgacctgctgctgttgagtgagatcttcaatgcttcctccttggaagagggcgagttcagcaaagagtgggccgctgtgtttggagacggccaagtgaaggagccagtgcccactatggccctgggagagccagaccccaaggcccagacaggctcaggtttccttccttcgcagcttttagaccaaaatatgaaagacttacaggcctcgctacaagaacctgctaaggctgcctcagacctgactgcctggttcagcctcttcgctgacctcgacccactctcaaatcctgatgctgttgggaaaaccgataaagaacacgaattgctcaatgcatgaatctgtacccttcgggagggcactcacatgccgcccccagcagctcccctgggggctagcagaagtataaagtgatcagtatgctgttttaataattatgtgccattttaataaaatgaaagggtcaacggccctgtttatattggtataattatttactcttatttggtataaagggttttcgtgtatctctatgtggatctaaataatacaggattgtctagaagcggtttccaggccaccgctctcctgcctacatcccatcatggctgctgcggtgtcactgggctaccgtgagatccaagttgaaatcagaagcctactttgatggtaggtttgaatgacgtgtcctacagcctcagaggcagcaggaggctagcaaagcttaaatgcctccttctctgcccccagcctctgtcccccttggaggagggctgtaggaagattccctcttcctgccaagccaccttccagtgagctctggatgaagctctggccaaccaaagacactgtccccacagcaggtgcctggtgggccacgtgttctcacactggtggaggagctgggcttctctccaaggcacaaaccttactatggaaagcagccatatttgcagataccactgtctccttttgtcctcttcgtggctggaattcaaaagcatgtatttctgaagcctcttgtgacattgtttttttttttttttaattaaacagaaaagatatttgacatgca

SEQ ID NO: 359649 - DNA, 2089 bp, Homo sapiens
tggtcgtgtcgcttaggatcctacatgtcatgggacgcgatgaacatgtgttgcttctgcgcgtcacctgggatgccaatctaactgtttcattcaattcagagaacctgtctggacttatcgaaagcaattgtactctatcaaaagaggatatgtttcttgtctcaagaagaaaacgaactgggaaaatttcttcgatcccaaggtttccaagataaaaccagagcaggaaagatgatgcaagcgacaggaaaggccctctgcttttcttcccagcaaaggttggccttacgaaatcctttgtgtcgatttcaccaagaagtggagacttttcggcatcgggccatctcagatacttggctgacggtgaaccgcatggaacagtgcaggacggaatatagaggagcactattatggatgaaggacgtgtctcaggagcttgatccagacctctacaagcaaatggagaagttcaggaaggtacaaacacaagtgcgccttgcaaaaaaaaactttgacaaattgaagatggatgtttgtcaaaaagtggatcttcttggagcgagcagatgcaatctcttgtctcacatgctagcaacataccagaccactctgcttcatttttgggagaaaacttctcacactatggcagccatccatgagagtttcaaaggttatcaaccatatgaatttactactttaaagagcttacaagaccctatgaaaaaattagttgagaaagaagagaagaagaaaatcaaccagcaggaaagtacagatgcagccgtgcaggagccgagccaattaatttcattagaggaagaaaaccagcgcaaggaatcctctagttttaagactgaagatggaaaaagtattttatctgccttagacaaaggctctacacatactgcatgctcaggacccatagatgaactattagacatgaaatctgaggaaggtgcttgcctgggaccagtggcagggaccccggaacctgaaggtgctgacaaagatgacctgctgctgttgagtgagatcttcaatgcttcctccttggaagagggcgagttcagcaaagagtgggccgctgtgtttggagacggccaagtgaaggagccagtgcccactatggccctgggagagccagaccccaaggcccagacaggctcaggtttccttccttcgcagcttttagaccaaaatatgaaagacttacaggcctcgctacaagaacctgctaaggctgcctcagacctgactgcctggttcagcctcttcgctgacctcgacccactctcaaatcctgatgctgttgggaaaaccgataaagaacacgaattgctcaatgcatgaatctgtacccttcgggagggcactcacatgccgcccccagcagctcccctgggggctagcagaagtataaagtgatcagtatgctgttttaataattatgtgccattttaataaaatgaaagggtcaacggccctgtttatattggtataattatttactcttatttggtataaagggttttcgtgtatctctatgtggatctaaataatacaggattgtctagaagcggtttccaggccaccgctctcctgcctacatcccatcatggctgctgcggtgtcactgggctaccgtgagatccaagttgaaatcagaagcctactttgatggtaggtttgaatgacgtgtcctacagcctcagaggcagcaggaggctagcaaagcttaaatgcctccttctctgcccccagcctctgtcccccttggaggagggctgtaggaagattccctcttcctgccaagccaccttccagtgagctctggatgaagctctggccaaccaaagacactgtccccacagcaggtgcctggtgggccacgtgttctcacactggtggaggagctgggcttctctccaaggcacaaaccttactatggaaagcagccatatttgcagataccactgtctccttttgtcctcttcgtggctggaattcaaaagcatgtatttctgaagcctcttgtgacattgtttttttttttttttaattaaacagaaaagatatttgacatgca

SEQ ID NO: 359650 - DNA, 2380 bp, Homo sapiens
tggcggccgccgcaggaagggccggttcctgcgctccccccgcccctttccctcgccttcggctgacgctgacgtcggatgagtgatccggagggacgctccgaccgcggccgggaggctcctgggggccggggctccgaggttataatataacttatcctctcatgcttttttcctgccccttctccccaaatcatcaacaatagaagaagaagaaaacatgtcaggacacaaatgcagttatccctgggacttacaggatcgatatgctcaagataagtcagttgtaaataagatgcaacagaaatattgggagacgaagcaggcctttattaaagccacagggaagaaggaagatgaacatgttgttgcctctgacgcggacctggatgccaagctagagctgtttcattcaattcagagaacctgtctggacttatcgaaagcaattgtactctatcaaaagaggatatgtttcttgtctcaagaagaaaacgaactgggaaaatttcttcgatcccaaggtttccaagataaaaccagagcaggaaagatgatgcaagcgacaggaaaggccctctgcttttcttcccagcaaaggttggccttacgaaatcctttgtgtcgatttcaccaagaagtggagacttttcggcatcgggccatctcagatacttggctgacggtgaaccgcatggaacagtgcaggacggaatatagaggagcactattatggatgaaggacgtgtctcaggagcttgatccagacctctacaagcaaatggagaagttcaggaaggtacaaacacaagtgcgccttgcaaaaaaaaactttgacaaattgaagatggatgtttgtcaaaaagtggatcttcttggagcgagcagatgcaatctcttgtctcacatgctagcaacataccagaccactctgcttcatttttgggagaaaacttctcacactatggcagccatccatgagagtttcaaaggttatcaaccatatgaatttactactttaaagagcttacaagaccctatgaaaaaattagttgagaaagaagagaagaagaaaatcaaccagcaggaaagtacagatgcagccgtgcaggagccgagccaattaatttcattagaggaagaaaaccagcgcaaggaatcctctagttttaagactgaagatggaaaaagtattttatctgccttagacaaaggctctacacatactgcatgctcaggacccatagatgaactattagacatgaaatctgaggaaggtgcttgcctgggaccagtggcagggaccccggaacctgaaggtgctgacaaagatgacctgctgctgttgagtgagatcttcaatgcttcctccttggaagagggcgagttcagcaaagagtgggccgctgtgtttggagacggccaagtgaaggagccaaccccaaggcccagacaggctcaggtttccttccttcgcagcttttagaccaaaatatgaaagacttacaggcctcgctacaagaacctgctaaggctgcctcagacctgactgcctggttcagcctcttcgctgacctcgacccactctcaaatcctgatgctgttgggaaaaccgataaagaacacgaattgctcaatgcatgaatctgtacccttcgggagggcactcacatgccgcccccagcagctcccctgggggctagcagaagtataaagtgatcagtatgctgttttaataattatgtgccattttaataaaatgaaagggtcaacggccctgtttatattggtataattatttactcttatttggtataaagggttttcgtgtatctctatgtggatctaaataatacaggattgtctagaagcggtttccaggccaccgctctcctgcctacatcccatcatggctgctgcggtgtcactgggctaccgtgagatccaagttgaaatcagaagcctactttgatggtaggtttgaatgacgtgtcctacagcctcagaggcagcaggaggctagcaaagcttaaatgcctccttctctgcccccagcctctgtcccccttggaggagggctgtaggaagattccctcttcctgccaagccaccttccagtgagctctggatgaagctctggccaaccaaagacactgtccccacagcaggtgcctggtgggccacgtgttctcacactggtggaggagctgggcttctctccaaggcacaaaccttactatggaaagcagccatatttgcagataccactgtctccttttgtcctcttcgtggctggaattcaaaagcatgtatttctgaagcctcttgtgacattgtttttttttttttttaattaaacagaaaagatatttgacatgca

SEQ ID NO: 359651 - DNA, 1286 bp, Homo sapiens
tggcggccgccgcaggaagggccggttcctgcgctccccccgcccctttccctcgccttcggctgacgctgacgtcggatgagtgatccggagggacgctccgaccgcggccgggaggctcctgggggccggggctccgaggttataatataacttatcctctcatgcttttttcctgccccttctccccaaatcatcaacaatagaagaagaagaaaacatgtcaggacacaaatgcagttatccctgggacttacaggatcgatatgctcaagataagtcagttgtaaataagatgcaacagaaatattgggagacgaagcaggcctttattaaagccacagggaagaaggaagatgaacatgttgttgcctctgacgcggacctggatgccaagctagagctgtttcattcaattcagagaacctgtctggacttatcgaaagcaattgtactctatcaaaagaggatatgtttcttgtctcaagaagaaaacgaactgggaaaatttcttcgatcccaaggtttccaagataaaaccagagcaggaaagatgatgcaagcgacaggaaaggccctctgcttttcttcccagcaaaggttggccttacgaaatcctttgtgtcgatttcaccaagaagtggagacttttcggcatcgggccatctcagatacttggctgacggtgaaccgcatggaacagtgcaggacggaatatagaggagcactattatggatgaaggacgtgtctcaggagcttgatccagacctctacaagcaaatggagaagttcaggaaggtacaaacacaagtgcgccttgcaaaaaaaaactttgacaaattgaagatggatgtttgtcaaaaagtggatcttcttggagcgagcagatgcaatctcttgtctcacatgctagcaacataccagaccactctgcttcatttttgggagaaaacttctcacactatggcagccatccatgagagtttcaaaggttatcaaccatatgaatttactactttaaagagcttacaagaccctatgaaaaaattagttgagaaagaagagaagaagaaaatcaaccagcaggaaagtacagatgcaacctccagaatgcgagaaaatttttgcaatctatccatctgacaaagggctaatatctagaatctgcaaagtacttaaacttatttataagaacaaaacagccccatcaaaaagtgggaaaaagatttgaacagacacttctcaatagaagatattgatgcaaccataagcatgaaaaaagctc

SEQ ID NO: 359652 - DNA, 1139 bp, Homo sapiens
tggcggccgccgcaggaagggccggttcctgcgctccccccgcccctttccctcgccttcggctgacgctgacgtcggatgagtgatccggagggacgctccgaccgcggccgggaggctcctgggggccggggctccgaggttataatataacttatcctctcatgcttttttcctgccccttctccccaaatcatcaacaatagaagaagaagaaaacatgtcaggacacaaatgcagttatccctgggacttacaggatcgatatgctcaagataagtcagttgtaaataagatgcaacagaaatattgggagacgaagcaggcctttattaaagccacagggaagaaggaagatgaacatgttgttgcctctgacgcggacctggatgccaagctagagctgtttcattcaattcagagaacctgtctggacttatcgaaagcaattgtactctatcaaaagaggatatgtttcttgtctcaagaagaaaacgaactgggaaaatttcttcgatcccaaggtttccaagataaaaccagagcaggaaagatgatgcaagcgacaggaaaggccctctgcttttcttcccagcaaaggttggccttacgaaatcctttgtgtcgatttcaccaagaagtggagacttttcggcatcgggccatctcagatacttggctgacggtgaaccgcatggaacagtgcaggacggaatatagaggagcactattatggatgaaggacgtgtctcaggagcttgatccagacctctacaagcaaatggagaagttcaggaaggtacaaacacaagtgcgccttgcaaaaaaaaactttgacaaattgaagatggatgtttgtcaaaaagtggatcttcttggagcgagcagatgcaatctcttgtctcacatgctagcaacataccaggtaacaaaataatgtttgttgcaatgaaccaaggatggcacaaggtttaaataacatcaaaatggtgtttgagctaaaagtaagctttggccattgtgaagttctgaatgcctttccgtaatttcacttcccacatctctgccttctagggccctacgtttaaccaaaccaaatagtagttatttcctgtatataccataatttcccacttctg

SEQ ID NO: 359653 - DNA, 3230 bp, Homo sapiens
  misc_feature (638)..(638): n is a, c, g, or t
actccttttattttattttcctatgtttagttttctttggagttgaacagctaggctgaatgagattaaagttttccaaacacacatggcagtatggaggttttatgaaaagtgatggtgaagagttgggagagatggagggaaaaaaatgcagtcagaagtttcagaacaaatacacaaaatcctatgttagtttgaatctttatttttctggcacacttttaaaaggctgtattaaaatagtgatttttttttttttgcctcagggaacctcagtcaacaggaatacctctgtttctaacctagagaataatattgttaaaattgctttgttaatttttttttcctcaggaataattttctcttttggaaagcactttccccgtctcagtagaaaagtctagcagttgtaacttcttgtttcttatttgctttgggggaaatcaaagaaaacagacggtgaaggaaagggtgggaaaaattaagtctcatgaaaaaaaaaaaagaggtccggggagagacctgggccaaatggtcacagcaccaactggcgtggcccaggaaattgaaacaatcctgctccatgtggggccccacagggccactggctgcccgatcccaggtttggctgagcaaanacaagggctggaggtggtggtacctgcagcagggccatggacagatgagtctcggttcagctggctcttgaggttaaaaatcatcaggaagtttctaggtcaggctgttgttgtcttcctggtgggagagtggtgggaagtggagaggatacctcacaagagaagcttctctgctgaacttgcttctcctgcctgttcttttaggagatcctttggttttccttcaggctagactttgcttgggcaagagacctaaaccgacttggaaggaggcaaaggctggaagcatagaagcctctgggctcagaggagggtgttgatgatgcttttattttggagtctcctagtgtcccctcccttgagccatcctatcccagagttggggaggagagatagggagagagggactaggggaggtcaggggctagtgcacaggcaggagagaagcaatggcctttgccatagattctacatctaggcagtcttgaaaggcatatagtctttatttatttttttattttttagtggaaatgaaaactggtgggcttttttttctcagcatctgctttggagatgttggggaggggaaaagaaaaaaccctattgatgtcagttcccttttcagttcctaagatggattcgagccccagtcctcttctcccccttgtgtctcttctctcgcctcgcaggtcagccgcttggaacagaccccggaggaggggggcagagaggggaggtgggggggggggggtccggcgtgtcacgtgacccccagggttgccaatgtccggtcctgagggtatcaggcctttccaagttgccacccactgcccaggcctcacccagcgatgcagaaagccacctactacgacaacgccgcggctgctctcttcggaggctattcctcgtaccctggcagcaatggcttcggcttcgatgtccccccccaacccccatttcaggccgccacgcacctggagggcgactaccagcgctcagcttgctcgctgcagtccctgggcaacgctgccccacatgccaagagcaaggagctcaacggcagctgcatgaggccgggtctggcccccgagaccctgtcggccccgcctggctcacccccgcccagtgccgcacctaccagtgccactagcaacagcagtaatgggggcgggcccagcaaaagtggtcccccaaagtgcggtcccggcaccaactccaccctcaccaaacagatattcccctggatgaaagagtcgaggcaaacgtccaagctgaaaaacaactcccccggcacagcagagggctgtggtggcggcggcggtggcggcggcggcggaggcagtggtggcagcgggggcggtggcggcggcggcgggggaggggacaagagccccccggggtcggcggcgtccaagcgggcgcggacggcgtacacgagcgcgcagctggtggagctggagaaggagttccattttaaccgctacctgtgccggcctcgccgtgtagagatggccaacctgctgaacctcagcgagcggcagatcaagatctggttccagaaccggcgcatgaagtacaagaaggaccagaaggccaagggattggcctcgtcgtcggggggcccatctccagccggcagccccccgcagcccatgcagtccacggccggcttcatgaacgccttacactccatgacccccagctacgagagcccgtccccacccgccttcggtaaagcccaccagaatgcctacgcgctgccctccaactaccagccccctctcaaaggctgcggcgccccgcagaagtaccctccgaccccggcgcccgagtatgagccgcacgtcctccaagccaacgggggcgcctacgggacgcccaccatgcagggcagtccggtgtacgtgggcgggggcggctacgcggatccgctgccgccccctgccggcccctccctctatggcctcaaccacctttcccatcacccttccgggaacctggactacaacggggcgccccctatggcgcccagccagcaccacggaccctgcgaaccccaccccacctacacagacctctcctctcaccacgcgcctcctcctcagggtagaatccaagaagcgcccaaattaacacacctgtgatgggaaagggcgaacgaggattaggggatggggaggaagagagagactgtggagctctggggggcaacctggaggtctgaaaagaggagccagagaaggtggtacccaggcttcctggtcagaaccggcctggagctccttcccttccccctggcctgagaggttgcttttaagtcttccaccccttgttccatctgcctgccaacccatcggaaaggaatccacatcatattggagatgaccccatcaaccccagggctccagcactaccaagttggaattccacgcccgggagtggggtagaggaagacgagacaggacgaggcagaaaagcacattttaaaaaccagacaagatggctaggccatcaccaaccaacggacttaccttacatctttgtaggtaattccccccaaatcttgattttttttttcctcaattatccttt

SEQ ID NO: 359654 - DNA, 634 bp, Homo sapiens
ccccaccccctcttgttctggatcccagatcttgggtccccttagcacctttctctcttcccactgtcccgtccgccaggcctcggcgccctccaacccggagccctgctgagcaaagtcccgaagcggagtttctaaggcgccttttaattcggttacctccagctcccaaaacttgctgccgcccgcggggctcggccctcggccggctggtgtgctgggaacctgcctccgataaccgttttggtgtcctgatcgcttgctcttcttcgcctccttgggccatcgtaggtggctggtagcttgtcgccagtcgccgcggcagcagcgaccggctgaggcagcctggcagcagcagccagggactacccgggtgcacaaaccttcccagccctgtctgcaccaccggcggagtctccattctttcctatcgcgtctctggctccttcgctttccacactcgcctggcctccgtcccgcgatggtttggggtttattgcaaggggagcggcaggaatttcggccccaggcatctagttaaattattgttttattattattactatcatcatcatcgtcatcattattattgctgtaacaatcagactaaataaagccagggcctagccagcca

SEQ ID NO: 359655 - DNA, 462 bp, Homo sapiens
aggattccatgaggctggcctctttcctcgcagcataagaagcaaatctccttggaccggctgttgggggaaaaaagtgttagccgtctctcccggatctgcaagggggaaaaaatttggaaccataaagttgaaaacttttttctctcagtttggaagaagcccttcgtcatgaatgggatctgcagagttcgggcgagaggaggcgagaggcgcaaaggaggggagatttgtcgcctgcctctccattctttcctatcgcgtctctggctccttcgctttccacactcgcctggcctccgtcccgcgatggtttggggtttattgcaaggggagcggcaggaatttcggccccaggcatctagttaaattattgttttattattattactatcatcatcatcgtcatcattattattgctgtaacaatcagactaaataaagccagggcctagccagcca

SEQ ID NO: 359656 - DNA, 187 bp, Homo sapiens
aggattccatgaggctggcctctttcctcgcagcataagaaggtatcgctttcctctgaggtgtttaaggctttaatgagtataattttttgcacagatgtttctgggtgtttgcaggttttcagagtatttttatattacaaagaagctagccagtgccatagctcaaactctgacaagcaaatag

SEQ ID NO: 359657 - DNA, 2642 bp, Homo sapiens
  misc_feature (387)..(387): n is a, c, g, or t
ttttgcattcctccagcttgcagctccggtagttggaggctgggtagggcagggggaaccgacaggccggtgtccccagccgcaaaagagctgctgaactgtccgtttaaatgctgctgggagactcgtaaaaaaatcatcgtggacctggaggatgagaggggcgagctttatttcggtcggattgcggtgtggtggtttagctgcaaggggatgccgcagccccagttgagggggaaaatagttcttaaaaagcatatgcccccctaaggaatgtctctaaagaaccaaatcaaagctgctctttggaaggtatgaatagaatttaaaaaaaaaagatttctatggagcttaaagttcacagccattctgtgtagacaagagctnagaaaaatgtgagaattatacagaaaaccattaatcacttcttttctttaaatacgtatcctctctcctttgttattattcaacagcaaatctccttggaccggctgttgggggaaaaaagtgttagccgtctctcccggatctgcaagggggaaaaaatttggaaccataaagttgaaaacttttttctctcagtttggaagaagcccttcgtcatgaatgggatctgcagagttcgggcgagaggaggcgagaggcgcaaaggaggggagatttgtcgcctgccgctcgctctggggctcgatgtgaatatatattatgtctgcctgttctcccctcgtcggtggctaaggtcagccgcttggaacagaccccggaggaggggggcagagaggggaggtgggggggggggggtccggcgtgtcacgtgacccccagggttgccaatgtccggtcctgagggtatcaggcctttccaagttgccacccactgcccaggcctcacccagcgatgcagaaagccacctactacgacaacgccgcggctgctctcttcggaggctattcctcgtaccctggcagcaatggcttcggcttcgatgtccccccccaacccccatttcaggccgccacgcacctggagggcgactaccagcgctcagcttgctcgctgcagtccctgggcaacgctgccccacatgccaagagcaaggagctcaacggcagctgcatgaggccgggtctggcccccgagaccctgtcggccccgcctggctcacccccgcccagtgccgcacctaccagtgccactagcaacagcagtaatgggggcgggcccagcaaaagtggtcccccaaagtgcggtcccggcaccaactccaccctcaccaaacagatattcccctggatgaaagagtcgaggcaaacgtccaagctgaaaaacaactcccccggcacagcagagggctgtggtggcggcggcggtggcggcggcggcggaggcagtggtggcagcgggggcggtggcggcggcggcgggggaggggacaagagccccccggggtcggcggcgtccaagcgggcgcggacggcgtacacgagcgcgcagctggtggagctggagaaggagttccattttaaccgctacctgtgccggcctcgccgtgtagagatggccaacctgctgaacctcagcgagcggcagatcaagatctggttccagaaccggcgcatgaagtacaagaaggaccagaaggccaagggattggcctcgtcgtcggggggcccatctccagccggcagccccccgcagcccatgcagtccacggccggcttcatgaacgccttacactccatgacccccagctacgagagcccgtccccacccgccttcggtaaagcccaccagaatgcctacgcgctgccctccaactaccagccccctctcaaaggctgcggcgccccgcagaagtaccctccgaccccggcgcccgagtatgagccgcacgtcctccaagccaacgggggcgcctacgggacgcccaccatgcagggcagtccggtgtacgtgggcgggggcggctacgcggatccgctgccgccccctgccggcccctccctctatggcctcaaccacctttcccatcacccttccgggaacctggactacaacggggcgccccctatggcgcccagccagcaccacggaccctgcgaaccccaccccacctacacagacctctcctctcaccacgcgcctcctcctcagggtagaatccaagaagcgcccaaattaacacacctgtgatgggaaagggcgaacgaggattaggggatggggaggaagagagagactgtggagctctggggggcaacctggaggtctgaaaagaggagccagagaaggtggtacccaggcttcctggtcagaaccggcctggagctccttcccttccccctggcctgagaggttgcttttaagtcttccaccccttgttccatctgcctgccaacccatcggaaaggaatccacatcatattggagatgaccccatcaaccccagggctccagcactaccaagttggaattccacgcccgggagtggggtagaggaagacgagacaggacgaggcagaaaagcacattttaaaaaccagacaagatggctaggccatcaccaaccaacggacttaccttacatctttgtaggtaattccccccaaatcttgattttttttttcctcaattatccttt

SEQ ID NO: 359658 - DNA, 532 bp, Homo sapiens
tttaaaatttgtgggtatatactaatagtaggtgtatatatatatacatatatatatacatgtacatatatatatggggtacagccataaattattcaaaactaaatctggagatcagttcaccgtctcttctactttctaaggaaaagcaattcttactcatgaatggaaaaatgctctgcagtctctaagtgtgtgtggtggaggaggggaagttgacttgctcctagggagggatgtttaatcacatctaatgtgtcatgaaaattacacacatttttatacagaacaatacatattgactatttcttgtctttctctcctgctagaacatgaacttcatgaggacagagacttgggcttattcaccaccaagtccccagttcctaactccagtcctttggagttagaagcaggttgcccaaagttcatgatgcagaaaaaccattttttccgagatttataggataagtcctgtaattccagattgcttggcgccaatcaggtactcaataaatgtttgttgagtgaa

SEQ ID NO: 359659 - DNA, 1672 bp, Homo sapiens
ctgacaagacagaaagagagctgggttgaggtcggggcggattcagagcccaccgtgtcagcaaagacacataaggaactcgccctccggaaagacgcgggggaattctgggagtgcgcggccttggagcgcgacatgcgcggcagctcccgctgctgaatagctgagaggcgcacccgggcggccagctgggctcggagtgcagcggggttaggatggacgaggacgtgttgcaccctgaagagcctcatcatcgcctgctcttgaggttcacagatgatacctttgatccagaacttgcagcaacaatagatccatcttcggttgtgaatccggcccggaatgcagccaccccttagagcaaccccccttgctgctcgtgccctgctgtgctactgcctcagtcacttcctgcttggtcaagaccacagctgctgatgtcacagctgaggcacatcagaaaggctgcctgattcaaagaaagctgccggataaatcatagagcacagacacttctacctcatgctcttatgggactttaggaaccaaacataagcacctatggaaaatgcacggcggtcttgaaaggctgtggtctttatcagaaaatatctgaatgactgtttgttatgtcagtcctactctgcaggcttgctaagatgatgattgaaagggctcttggtttctgctttggaatctggcatttatgttttgaagcgttgtgagcaagcgatgtggcagattgcagggtgagggggacaaacctgggccaggagccaggggtttctctacccccttccctgacttacagctggaactgggctcagtggtttcagcctcatttgctaagaaggtctgggtatgtaatcctggctgcatcttaaaaatccctaggagcttttaagacatattgacacataagctctaactcacatgaaacgaaaacacatctctggggctgggctgagcaaatgcattttttaaaaggcccctcaggtgattctgtctcagagatgttgaaaaccagtgggttaggagctcagtcatccactttcagatctgtgattatgccactattaaatacagttggctatcacatagattttatgctttagcttgttcttttttcctttgctataccaaataaaatcttctgagctgtagttccagtccttaaaataatggttgttaccatactgaggttaaacattagtgcatttgcttaacaaggactttaaaacttatcacactgccataatttttaatggtttctataatgattaattaataagaaaatcaataattggattttaagcaggaaactaggcaggaaagttgaaattcatagaccaattcaatggaaaacattaaaatgtattgggagatgcccaatattctatgctgtttggtggttcactggtttctaatctattataacggcacccatagttaaaaagcactagtttttttttggtctgatagttgaaaaaacaacaatcctttgcacgtaggaattattttttccaacatcataatttctgactttgcacatattctattgaattgccaaaatgactttaaagagtctagtacatgcagggaatattacaattgcaatcattattttaacaccatctcctccccctcttcccttcccaaaagatataaagac

SEQ ID NO: 359660 - DNA, 1610 bp, Homo sapiens
ctgacaagacagaaagagagctgggttgaggtcggggcggattcagagcccaccgtgtcagcaaagacacataaggaactcgccctccggaaagacgcgggggaattctgggagtgcgcggccttggagcgcgacatgcgcggcagctcccgctgctgaatagctgagaggcgcacccgggcggccagctgggctcggagtgcagcggggttaggatggacgaggacgtgttgcaccctgaagagcctcatcatcgcctgctcttgaggttcacagatgatacctttgatccagaacttgcagcaacaatagatccatcttcggttgtgaatccggcccggaatgcagccaccccttagagcaaccccccttgctgctcgtgccctgctgtgctactgcctcagtcacttcctgcttggtcaagaccacagctgctgatgtcacagctgaggcacatcagaaaggctgcctgattcaaagaaagctgccggataaatcatagagcacagacacttctacctcatgctcttatgggactttaggaaccaaacataagcacctatggaaaatgcacggcggtcttgaaaggctgtggtctttatcagaaaatatctgaatgactgtttgttatgtcagtcctactctgcaggcttgctaagatgatgattgaaagggctcttggtttctgctttggaatctggcatttatgttttgaagcgttgtgagcaagcgatgtggcagattgcagggtgagggggacaaacctgggccaggagccaggggtttctctacccccttccctgacttacagctggaactgggctcagtggtttcagcctcatttgctaagaaggtctgggtatgtaatcctggctgcatctaacacatctctggggctgggctgagcaaatgcattttttaaaaggcccctcaggtgattctgtctcagagatgttgaaaaccagtgggttaggagctcagtcatccactttcagatctgtgattatgccactattaaatacagttggctatcacatagattttatgctttagcttgttcttttttcctttgctataccaaataaaatcttctgagctgtagttccagtccttaaaataatggttgttaccatactgaggttaaacattagtgcatttgcttaacaaggactttaaaacttatcacactgccataatttttaatggtttctataatgattaattaataagaaaatcaataattggattttaagcaggaaactaggcaggaaagttgaaattcatagaccaattcaatggaaaacattaaaatgtattgggagatgcccaatattctatgctgtttggtggttcactggtttctaatctattataacggcacccatagttaaaaagcactagtttttttttggtctgatagttgaaaaaacaacaatcctttgcacgtaggaattattttttccaacatcataatttctgactttgcacatattctattgaattgccaaaatgactttaaagagtctagtacatgcagggaatattacaattgcaatcattattttaacaccatctcctccccctcttcccttcccaaaagatataaagac

SEQ ID NO: 359661 - DNA, 489 bp, Homo sapiens
ttttattagtcgtctgtgaaagaacagctggatcttgtgaagtgctggaaattttctctttagtgtaagtggtccacggctgaagcagtcggaccacctttgaaaataacgtgtaattgttatttctcattttgccacatcctgtggagacaaaagattagtgttgtgtcttttcattttttatttttcttcttggggaaaataatattgacaatggagttgagtataagcctgctcttgaggttcacagatgatacctttgatccagaacttgcagcaacaatagaacatgaacttcatgaggacagagacttgggcttattcaccaccaagtccccagttcctaactccagtcctttggagttagaagcaggttgcccaaagttcatgatgcagaaaaaccattttttccgagatttataggataagtcctgtaattccagattgcttggcgccaatcaggtactcaataaatgtttgttgagtgaa

SEQ ID NO: 359662 - DNA, 439 bp, Homo sapiens
ctgacaagacagaaagagagctgggttgaggtcggggcggattcagagcccaccgtgtcagcaaagacacataaggaactcgccctccggaaagacgcgggggaattctgggagtgcgcggccttggagcgcgacatgcgcggcagctcccgctgctgaatagctgagaggcgcacccgggcggccagctgggctcggagtgcagcggggttaggatggacgaggacgtgttgcaccctgaagagcctcatcatcgcctgctcttgaggttcacagatgatacctttgatccagaacttgcagcaacaataggttcacctgcttccaggcgggcagggcgttgtattcatccctcgtcatgtctagtgcaaactggaaacattgggagaagcgccccgcggctcagtgaaaggagccgggcgtgcgtgtgttgttttac

SEQ ID NO: 359663 - DNA, 515 bp, Homo sapiens
ctgacaagacagaaagagagctgggttgaggtcggggcggattcagagcccaccgtgtcagcaaagacacataaggaactcgccctccggaaagacgcgggggaattctgggagtgcgcggccttggagcgcgacatgcgcggcagctcccgctgctgaatagctgagaggcgcacccgggcggccagctgggctcggagtgcagcggggttaggatggacgaggacgtgttgcaccctgaagagcctcatcatcgcctgctcttgaggttcacagatgatacctttgatccagaacttgcagcaacaatagaacatgaacttcatgaggacagagacttgggcttattcaccaccaagtccccagttcctaactccagtcctttggagttagaagcaggttgcccaaagttcatgatgcagaaaaaccattttttccgagatttataggataagtcctgtaattccagattgcttggcgccaatcaggtactcaataaatgtttgttgagtgaa

SEQ ID NO: 359664 - DNA, 376 bp, Homo sapiens
ctgacaagacagaaagagagctgggttgaggtcggggcggattcagagcccaccgtgtcagcaaagacacataaggaactcgccctccggaaagacgcgggggaattctgggagtgcgcggccttggagcgcgacatgcgcggcagctcccgctgctgaatagctgagaggcgcacccgggcggccagctgggctcggagtgcagcggggttaggatggacgaggacgtgttgcaccctgaagagcctcatcatcggtgagagtggggtgggcaagtccagcctgctcttgaggttcacagatgatacctttgatccagaacttgcagcaacaataggttaatgactgaagggctctggaaaggggataagaggcc

SEQ ID NO: 359665 - DNA, 2224 bp, Homo sapiens
ctgacaagacagaaagagagctgggttgaggtcggggcggattcagagcccaccgtgtcagcaaagacacataaggaactcgccctccggaaagacgcgggggaattctgggagtgcgcggccttggagcgcgacatgcgcggcagctcccgctgctgaatagctgagaggcgcacccgggcggccagctgggctcggagtgcagcggggttaggatggacgaggacgtgttgcaccctgaagagcctcatcatcggtgagagtggggtgggcaagtccagcctgctcttgaggttcacagatgatacctttgatccagaacttgcagcaacaatagacaatgcaggaatcacatgaacctgtccatccacagataaagtggtaaagaaactgccgtattagatacatgatggtatactcttcagccataaagcttcgggaaaccctgtcatccgcaaccacgtggagaaacctgtccatccacagatgaagggatcaggaagctctggtatatatactgaagggaaatgctttttggctaccaaaataatgaaattttgttgtttggagcaacacagatgaacctgtccatccacaaatgaagacatcaagaaactctagtatgtacacaaggcaaaacacttcagctatcaaaatcatgacattatgtcacttggagcaacacagttgacccgccaaggcagcctcttcctccatagatggatgaacgctgtggccgctgctcctgcctgggccatgccctgatgctgccaacaccactgctcctctatttataagtcttagtagagttgctgacccagcaataactgaacagctgatatgtacctcacactaagccaggcgcttcatatgtatctaacttgaaaaatgctgagctagttaccttaacaccattaacttttacttaaaagtttgtttttcttttttaatcccagtgagctccaaacaagttttaggaggctccccaaaaccagtgaagactttaactaaaagtagaatttcaaagtattagaaaccaaaccccaaaattaaatgtgaagatcagtgtctgtactgagctggcccatctggtggacacaggatttgcgttatcgactgcaatgttacccaggattcacgatttctagcatctgtcagggttaagaaaattggattgagtaccaaatacagcagagcaaacccggctttgaggcaagggccccatcaagtagtcatgcagtacttttgttagggttctgggtgcaaatcttcctcgtccctcccaccttctcctgggcctccttgtaaacccaaaccgccaggtaccttcaatttttctttcaagaccaggctgttcttaatgttggtaaattggtcaaggaaatgggtgagccactgcttgctctgcacatcgtcctcagagtgctcggtcttcaggcagtacagcagctgcatggctttggcctgcaggagtaagtggcccattcctaggctgtccccaaagatgtgtcctctgaagaagctggtcaggtagagggggtgtccactatggttatagatggggaaggagatgctgcccaggtcgagcgttttgtccacctgccaggtgtacaggagtgggttgggggcaccacgcagagcatcttgtacctcgcgcacacctgctggtactggagctggcttgcgtttccctgtgccacacgcagatcctgcactgtactgtccagtcaactgacttcagcaaagatgtctgggttcagcagcgagttgctgtgtgaggccaccagaatggaggtgatatcggcctcagtgctcatcctggaggtggagaagtggtcagagtcctctgtggtgaaatggccctacaccaaagtgggagacattcagaatcgaggcgaaattggcctcagtgctcctcttggaggcagagaagcagtaggagtcggtggtgaaatggccctgtgtgaatgtggaagaccagcagattggaggtggaattggcctcagtgcttgtcctggaggtggagaagcggtcagagtccttggtggtgaagtggccctgcacaaaacgttgctcccccttggccggtgaaagaataaaagaaagctggccacttgcatttccgtttcagtttatagaatacatgttttggaaatagtatcttctagatctgtctttttctcttctgatttaacttagtaaagctaagttttatctcttcaa

SEQ ID NO: 359666 - DNA, 2199 bp, Homo sapiens
ctgacaagacagaaagagagctgggttgaggtcggggcggattcagagcccaccgtgtcagcaaagacacataaggaactcgccctccggaaagacgcgggggaattctgggagtgcgcggccttggagcgcgacatgcgcggcagctcccgctgctgaatagctgagaggcgcacccgggcggccagctgggctcggagtgcagcggggttaggatggacgaggacgtgttgcaccctgaagagcctcatcatcgcctgctcttgaggttcacagatgatacctttgatccagaacttgcagcaacaatagacaatgcaggaatcacatgaacctgtccatccacagataaagtggtaaagaaactgccgtattagatacatgatggtatactcttcagccataaagcttcgggaaaccctgtcatccgcaaccacgtggagaaacctgtccatccacagatgaagggatcaggaagctctggtatatatactgaagggaaatgctttttggctaccaaaataatgaaattttgttgtttggagcaacacagatgaacctgtccatccacaaatgaagacatcaagaaactctagtatgtacacaaggcaaaacacttcagctatcaaaatcatgacattatgtcacttggagcaacacagttgacccgccaaggcagcctcttcctccatagatggatgaacgctgtggccgctgctcctgcctgggccatgccctgatgctgccaacaccactgctcctctatttataagtcttagtagagttgctgacccagcaataactgaacagctgatatgtacctcacactaagccaggcgcttcatatgtatctaacttgaaaaatgctgagctagttaccttaacaccattaacttttacttaaaagtttgtttttcttttttaatcccagtgagctccaaacaagttttaggaggctccccaaaaccagtgaagactttaactaaaagtagaatttcaaagtattagaaaccaaaccccaaaattaaatgtgaagatcagtgtctgtactgagctggcccatctggtggacacaggatttgcgttatcgactgcaatgttacccaggattcacgatttctagcatctgtcagggttaagaaaattggattgagtaccaaatacagcagagcaaacccggctttgaggcaagggccccatcaagtagtcatgcagtacttttgttagggttctgggtgcaaatcttcctcgtccctcccaccttctcctgggcctccttgtaaacccaaaccgccaggtaccttcaatttttctttcaagaccaggctgttcttaatgttggtaaattggtcaaggaaatgggtgagccactgcttgctctgcacatcgtcctcagagtgctcggtcttcaggcagtacagcagctgcatggctttggcctgcaggagtaagtggcccattcctaggctgtccccaaagatgtgtcctctgaagaagctggtcaggtagagggggtgtccactatggttatagatggggaaggagatgctgcccaggtcgagcgttttgtccacctgccaggtgtacaggagtgggttgggggcaccacgcagagcatcttgtacctcgcgcacacctgctggtactggagctggcttgcgtttccctgtgccacacgcagatcctgcactgtactgtccagtcaactgacttcagcaaagatgtctgggttcagcagcgagttgctgtgtgaggccaccagaatggaggtgatatcggcctcagtgctcatcctggaggtggagaagtggtcagagtcctctgtggtgaaatggccctacaccaaagtgggagacattcagaatcgaggcgaaattggcctcagtgctcctcttggaggcagagaagcagtaggagtcggtggtgaaatggccctgtgtgaatgtggaagaccagcagattggaggtggaattggcctcagtgcttgtcctggaggtggagaagcggtcagagtccttggtggtgaagtggccctgcacaaaacgttgctcccccttggccggtgaaagaataaaagaaagctggccacttgcatttccgtttcagtttatagaatacatgttttggaaatagtatcttctagatctgtctttttctcttctgatttaacttagtaaagctaagttttatctcttcaa

SEQ ID NO: 359667 - DNA, 2120 bp, Homo sapiens
ctgacaagacagaaagagagctgggttgaggtcggggcggattcagagcccaccgtgtcagcaaagacacataaggaactcgccctccggaaagacgcgggggaattctgggagtgcgcggccttggagcgcgacatgcgcggcagctcccgctgctgaatagctgagaggcgcacccgggcggccagctgggctcggagtgcagcggggttaggatggacgaggacgtgttgcaccctgaagagcctcatcatcggtgagagtggggtgggcaagtccagcctgctcttgaggttcacagatgatacctttgatccagaacttgcagcaacaatagacaatgcaggaatcacatgaacctgtccatccacagataaagtggtaaagaaactgccgtattagatacatgatggtatactcttcagccataaagcttcgggaaaccctgtcatccgcaaccacgtggagaaacctgtccatccacagatgaagggatcaggaagctctggtatatatactgaagggaaatgctttttggctaccaaaataatgaaattttgttgtttggagcaacacagatgaacctgtccatccacaaatgaagacatcaagaaactctagtatgtacacaaggcaaaacacttcagctatcaaaatcatgacattatgtcacttggagcaacacagttgacccgccaaggcagcctcttcctccatagatggatgaacgctgtggccgctgctcctgcctgggccatgccctgatgctgccaacaccactgctcctctatttataagtcttagtagagttgctgacccagcaataactgaacagctgatatgtacctcacactaagccaggcgcttcatatgtatctaacttgaaaaatgctgagctagttaccttaacaccattaacttttacttaaaagtttgtttttcttttttaatcccagtgagctccaaacaagttttaggaggctccccaaaaccagtgaagactttaactaaaagtagaatttcaaagtattagaaaccaaaccccaaaattaaatgtgaagatcagtgtctgtactgagctggcccatctggtggacacaggatttgcgttatcgactgcaatgttacccaggattcacgatttctagcatctgtcagggttaagaaaattggattgagtaccaaatacagcagagcaaacccggctttgaggcaagggccccatcaagtagtcatgcagtacttttgttagggttctgggtgcaaatcttcctcgtccctcccaccttctcctgggcctccttgtaaacccaaaccgccaggtaccttcaatttttctttcaagaccaggctgttcttaatgttggtaaattggtcaaggaaatgggtgagccactgcttgctctgcacatcgtcctcagagtgctcggtcttcaggcagtacagcagctgcatggctttggcctgcaggagtaagtggcccattcctaggctgtccccaaagatgtgtcctctgaagaagctggtcaggtagagggggtgtccactatggttatagatggggaaggagatgctgcccaggtcgagcgttttgtccacctgccaggtgtacaggagtgggttgggggcaccacgcagagcatcttgtacctcgcgcacacctgctggtactggagctggcttgcgtttccctgtgccacacgcagatcctgcactgtactgtccagtcaactgacttcagcaaagatgtctgggttcagcagcgagttgctgtgtgaggccaccagaatggaggtgatatcggcctcagtgctcatcctggaggtggagaagtggtcagagtcctctgtggtgaaatggccctacaccaaagtgggagacattcagaatcgaggcgaaattggcctcagtgctcctcttggaggcagagaagcagtaggagtcggtggtgaaatggccctgtgtgaatgtggaagaccagcagattggaggtggaattggcctcagtgcttgtcctggaggtggagaagcggtcagagtccttggtggtgaagtggccctgcacaaaacgttgctcccccttggccggtgaaagaataaaagaaagctggccacttgca

SEQ ID NO: 359668 - DNA, 1883 bp, Homo sapiens
acttggtttgcttgcttacttgacatttgaggtgcacaaggatgtgagtatagcgtattagatacatgatggtatactcttcagccataaagcttcgggaaaccctgtcatccgcaaccacgtggagaaacctgtccatccacagatgaagggatcaggaagctctggtatatatactgaagggaaatgctttttggctaccaaaataatgaaattttgttgtttggagcaacacagatgaacctgtccatccacaaatgaagacatcaagaaactctagtatgtacacaaggcaaaacacttcagctatcaaaatcatgacattatgtcacttggagcaacacagttgacccgccaaggcagcctcttcctccatagatggatgaacgctgtggccgctgctcctgcctgggccatgccctgatgctgccaacaccactgctcctctatttataagtcttagtagagttgctgacccagcaataactgaacagctgatatgtacctcacactaagccaggcgcttcatatgtatctaacttgaaaaatgctgagctagttaccttaacaccattaacttttacttaaaagtttgtttttcttttttaatcccagtgagctccaaacaagttttaggaggctccccaaaaccagtgaagactttaactaaaagtagaatttcaaagtattagaaaccaaaccccaaaattaaatgtgaagatcagtgtctgtactgagctggcccatctggtggacacaggatttgcgttatcgactgcaatgttacccaggattcacgatttctagcatctgtcagggttaagaaaattggattgagtaccaaatacagcagagcaaacccggctttgaggcaagggccccatcaagtagtcatgcagtacttttgttagggttctgggtgcaaatcttcctcgtccctcccaccttctcctgggcctccttgtaaacccaaaccgccaggtaccttcaatttttctttcaagaccaggctgttcttaatgttggtaaattggtcaaggaaatgggtgagccactgcttgctctgcacatcgtcctcagagtgctcggtcttcaggcagtacagcagctgcatggctttggcctgcaggagtaagtggcccattcctaggctgtccccaaagatgtgtcctctgaagaagctggtcaggtagagggggtgtccactatggttatagatggggaaggagatgctgcccaggtcgagcgttttgtccacctgccaggtgtacaggagtgggttgggggcaccacgcagagcatcttgtacctcgcgcacacctgctggtactggagctggcttgcgtttccctgtgccacacgcagatcctgcactgtactgtccagtcaactgacttcagcaaagatgtctgggttcagcagcgagttgctgtgtgaggccaccagaatggaggtgatatcggcctcagtgctcatcctggaggtggagaagtggtcagagtcctctgtggtgaaatggccctacaccaaagtgggagacattcagaatcgaggcgaaattggcctcagtgctcctcttggaggcagagaagcagtaggagtcggtggtgaaatggccctgtgtgaatgtggaagaccagcagattggaggtggaattggcctcagtgcttgtcctggaggtggagaagcggtcagagtccttggtggtgaagtggccctgcacaaaacgttgctcccccttggccggtgaaagaataaaagaaagctggccacttgcatttccgtttcagtttatagaatacatgttttggaaatagtatcttctagatctgtctttttctcttctgatttaacttagtaaagctaagttttatctcttcaa

SEQ ID NO: 359669 - DNA, 1697 bp, Homo sapiens
ctgacaagacagaaagagagctgggttgaggtcggggcggattcagagcccaccgtgtcagcaaagacacataaggaactcgccctccggaaagacgcgggggaattctgggagtgcgcggccttggagcgcgacatgcgcggcagctcccgctgctgaatagctgagaggcgcacccgggcggccagctgggctcggagtgcagcggggttaggatggacgaggacgtgttgcaccctgaagagcctcatcatcggtgagagtggggtgggcaagtccagcctgctcttgaggttcacagatgatacctttgatccagaacttgcagcaacaatagatccatcttcggttgtgaatccggcccggaatgcagccaccccttagagcaaccccccttgctgctcgtgccctgctgtgctactgcctcagtcacttcctgcttggtcaagaccacagctgctgatgtcacagctgaggcacatcagaaaggctgcctgattcaaagaaagctgccggataaatcatagagcacagacacttctacctcatgctcttatgggactttaggaaccaaacataagcacctatggaaaatgcacggcggtcttgaaaggctgtggtctttatcagaaaatatctgaatgactgtttgttatgtcagtcctactctgcaggcttgctaagatgatgattgaaagggctcttggtttctgctttggaatctggcatttatgttttgaagcgttgtgagcaagcgatgtggcagattgcagggtgagggggacaaacctgggccaggagccaggggtttctctacccccttccctgacttacagctggaactgggctcagtggtttcagcctcatttgctaagaaggtctgggtatgtaatcctggctgcatcttaaaaatccctaggagcttttaagacatattgacacataagctctaactcacatgaaacgaaaacacatctctggggctgggctgagcaaatgcattttttaaaaggcccctcaggtgattctgtctcagagatgttgaaaaccagtgggttaggagctcagtcatccactttcagatctgtgattatgccactattaaatacagttggctatcacatagattttatgctttagcttgttcttttttcctttgctataccaaataaaatcttctgagctgtagttccagtccttaaaataatggttgttaccatactgaggttaaacattagtgcatttgcttaacaaggactttaaaacttatcacactgccataatttttaatggtttctataatgattaattaataagaaaatcaataattggattttaagcaggaaactaggcaggaaagttgaaattcatagaccaattcaatggaaaacattaaaatgtattgggagatgcccaatattctatgctgtttggtggttcactggtttctaatctattataacggcacccatagttaaaaagcactagtttttttttggtctgatagttgaaaaaacaacaatcctttgcacgtaggaattattttttccaacatcataatttctgactttgcacatattctattgaattgccaaaatgactttaaagagtctagtacatgcagggaatattacaattgcaatcattattttaacaccatctcctccccctcttcccttcccaaaagatataaagac

SEQ ID NO: 359670 - DNA, 1588 bp, Homo sapiens
tgtgcacttatttctaggccactggccagggcagcagacaggagagcacagagagataggaaagaaaacggcatagctccacccggaggtcttgtgtggccttaggatttcaaaatttacactgtccccaagaacacaggtattttagataaaggcagagctgagaagatacacgtgctgcagagggcgtagccctggaataacatgcacgatctctcatccctccagatccatcttcggttgtgaatccggcccggaatgcagccaccccttagagcaaccccccttgctgctcgtgccctgctgtgctactgcctcagtcacttcctgcttggtcaagaccacagctgctgatgtcacagctgaggcacatcagaaaggctgcctgattcaaagaaagctgccggataaatcatagagcacagacacttctacctcatgctcttatgggactttaggaaccaaacataagcacctatggaaaatgcacggcggtcttgaaaggctgtggtctttatcagaaaatatctgaatgactgtttgttatgtcagtcctactctgcaggcttgctaagatgatgattgaaagggctcttggtttctgctttggaatctggcatttatgttttgaagcgttgtgagcaagcgatgtggcagattgcagggtgagggggacaaacctgggccaggagccaggggtttctctacccccttccctgacttacagctggaactgggctcagtggtttcagcctcatttgctaagaaggtctgggtatgtaatcctggctgcatcttaaaaatccctaggagcttttaagacatattgacacataagctctaactcacatgaaacgaaaacacatctctggggctgggctgagcaaatgcattttttaaaaggcccctcaggtgattctgtctcagagatgttgaaaaccagtgggttaggagctcagtcatccactttcagatctgtgattatgccactattaaatacagttggctatcacatagattttatgctttagcttgttcttttttcctttgctataccaaataaaatcttctgagctgtagttccagtccttaaaataatggttgttaccatactgaggttaaacattagtgcatttgcttaacaaggactttaaaacttatcacactgccataatttttaatggtttctataatgattaattaataagaaaatcaataattggattttaagcaggaaactaggcaggaaagttgaaattcatagaccaattcaatggaaaacattaaaatgtattgggagatgcccaatattctatgctgtttggtggttcactggtttctaatctattataacggcacccatagttaaaaagcactagtttttttttggtctgatagttgaaaaaacaacaatcctttgcacgtaggaattattttttccaacatcataatttctgactttgcacatattctattgaattgccaaaatgactttaaagagtctagtacatgcagggaatattacaattgcaatcattattttaacaccatctcctccccctcttcccttcccaaaagatataaagac

SEQ ID NO: 359671 - DNA, 1040 bp, Homo sapiens
ctgacaagacagaaagagagctgggttgaggtcggggcggattcagagcccaccgtgtcagcaaagacacataaggaactcgccctccggaaagacgcgggggaattctgggagtgcgcggccttggagcgcgacatgcgcggcagctcccgctgctgaatagctgagaggcgcacccgggcggccagctgggctcggagtgcagcggggttaggatggacgaggacgtgttgcaccctgaagagcctcatcatcgcctgctcttgaggttcacagatgatacctttgatccagaacttgcagcaacaataggtaccaaccttcgccttttctatgacgtttgcaaactctcctacccacaggaagcagcagtggggagagagcaggaggaagcagtccccactgttgagcgccgaagctcgaggttccaccagcctggtctgcacatgtcttcttcctgaacacgaggcagacagtcaccgtctttccagacagaacggggataggacgcaccccatatcggaagcatccctgctgcggacgctttcacttctaaagagtcttgtctgctaataagagtgcccatggcccagggtggcagcagggggatttagaaagggcatgatgatggcactagcggctgctttcctggtttgtgctttcccaaatgtcacccacttctcaggaccattatcagtgtcatgtgcgtgggttaatgaaggctcccccttccagggagatgagcacacaggctccttttccctccttcactcttctcccggggcctttctctcccctggccacctcctgcacccaattacatctgtggcccaggcaagggaagccacgccttcaggaagggtcggctcttcccctggggagtttccactatgaaccctaggggcctctcaacaggaaggatggaggcgccaccttctgtggctttcaacaccttttcctaaatatttgttgattttgagctttccacaattaaacagatcatgtagtctctgggttaggactcaggacagagattggtt

SEQ ID NO: 359672 - DNA, 2266 bp, Homo sapiens
ctgacaagacagaaagagagctgggttgaggtcggggcggattcagagcccaccgtgtcagcaaagacacataaggaactcgccctccggaaagacgcgggggaattctgggagtgcgcggccttggagcgcgacatgcgcggcagctcccgctgctgaatagctgagaggcgcacccgggcggccagctgggctcggagtgcagcggggttaggatggacgaggacgtgttgcaccctgaagagcctcatcatcggtgagagtggggtgggcaagtccagcctgctcttgaggttcacagatgatacctttgatccagaacttgcagcaacaatagacaatgcaggaatcacatgaacctgtccatccacagataaagtggtaaagaaactgccgtattagatacatgatggtatactcttcagccataaagcttcgggaaaccctgtcatccgcaaccacgtggagaaacctgtccatccacagatgaagggatcaggaagctctggtatatatactgaagggaaatgctttttggctaccaaaataatgaaattttgttgtttggagcaacacagatgaacctgtccatccacaaatgaagacatcaagaaactctagtatgtacacaaggcaaaacacttcagctatcaaaatcatgacattatgtcacttggagcaacacagttgacccgccaaggcagcctcttcctccatagatggatgaacgctgtggccgctgctcctgcctgggccatgccctgatgctgccaacaccactgctcctctatttataagtcttagtagagttgctgacccagcaataactgaacagctgatatgtacctcacactaagccaggcgcttcatatgtatctaacttgaaaaatgctgagctagttaccttaacaccattaacttttacttaaaagtttgtttttcttttttaatcccagtgagctccaaacaagttttaggaggctccccaaaaccagtgaagactttaactaaaagtagaatttcaaagtattagaaaccaaaccccaaaattaaatgtgaagatcagtgtctgtactgagctggcccatctggtggacacaggatttgcgttatcgactgcaatgttacccaggattcacgatttctagcatctgtcagggttaagaaaattggattgagtaccaaatacagcagagcaaacccggctttgaggcaagggccccatcaagtagtcatgcagtacttttgttagggttctgggtgcaaatcttcctcgtccctcccaccttctcctgggcctccttgtaaacccaaaccgccaggtaccttcaatttttctttcaagaccaggctgttcttaatgttggtaaattggtcaaggaaatgggtgagccactgcttgctctgcacatcgtcctcagagtgctcggtcttcaggcagtacagcagctgcatggctttggcctgcaggagtaagtggcccattcctaggctgtccccaaagatgtgtcctctgaagaagctggtcaggtagagggggtgtccactatggttatagatggggaaggagatgctgcccaggtcgagcgttttgtccacctgccaggtgtacaggagtgggttgggggcaccacgcagagcatcttgtacctcgcgcacacctgctggtactggagctggcttgcgtttccctgtgccacacgcagatcctgcactgtactgtccagtcaactgacttcagcaaagatgtctgggttcagcagcgagttgctgtgtgaggccaccagaatggaggtgatatcggcctcagtgctcatcctggaggtggagaagtggtcagagtcctctgtggtgaaatggccctacaccaaagtgggagacattcagaatcgaggcgaaattggcctcagtgctcctcttggaggcagagaagcagtaggagtcggtggtgaaatggccctgtgtgaatgtggaagaccagcagattggaggtggaattggcctcagtgcttgtcctggaggtggagaagcggtcagagtccttggtggtgaagtggccctgcacaaaacgttgctcccccttggccggtgaaagaataaaagaaagctggccacttgcatttccgtttcagtttatagaatacatgttttggaaatagtatcttctagatctgtctttttctcttctgatttaacttagtaaagctaagttttatctcttcaaaaaaaaagagagagagtgagaaagaaagaaagaaagaaagaa

SEQ ID NO: 359673 - DNA, 4058 bp, Homo sapiens
  misc_feature (2614)..(2614): n is a, c, g, or t
  misc_feature (3277)..(3277): n is a, c, g, or t
  misc_feature (3639)..(3639): n is a, c, g, or t
cccatgctgagggctaggctggatgaggctgggttgttacaggggtcccagaagctctcctgtattaggtacagaccaggaagtggctggcttaagagcacagagctgggatcaaactttattaaaacacactggcccaccccaccaggcatgtagattctcagagcaagcaaacaagacatactaaaacatacaaatgcataactcattttcctggtgtttcaaatatttattttaggtagtaaaggcttttgtcgttctaaatcctgattacaagtcacatgatcaagaacaactaataaaggagattcaggagcatgttaaaaaaactacagcaccttacaaatatcccagaaaggtaggcatcctaattataacgaatatttgctcagtgttgtggacaatttcaagtgtttatttttacattttaatgaatattttcttcacacatgctgcaccacatgtcccaaactgaactgatgacatatgggtaagaatcagaatctttgagattaaaatgaaaccctgaacctattttgtttggtcctttggcttactggactcacagtaaatacttaatatcaagacaactttcctaacaatacccttttccctattttggctgttacccaaaacccattccaaagactattctaattcttccacctagaattcataatcaaactgctatataattggctttatgtaaagataaaaatttccaggctaattttcttccccttgatgccaacaggtagaatttattcaagagctgccaaagactatcagtgggaagacaaaaagaaatgaactgaggaagaaagaatggaagacaatttaaagttgtttcattaattaccatatctataaaacaaacatagtatctgtcaatctctagaaaccacaagatgatggagaggtcataaaaactgtggtagtatgcttagaaactgttgatttaaaatatcttgtggttatgatatcagaggctaaattttgaaataaaatatttggcaaattcctccacattagtgtcaatgttcctatcatttcttaatataaaaataataccatcaattgctgattaatttttaaatgtatagtatagaagcagtttctgaaccagatctctgctacataggttttcaaactttagttgactaattcttctgatatgttgatatacaaatcagaaccaatgttcaagcctgaaataaaactaaagaacttataaaagtttttagaaaaatataaaatatcagttagaagattatgataatctcaaagtacaagaatctacctgaaaatagactagggatttttattagtcacattttttgcaaataatttaaaaatagtttagacttgtttcaaggtctaactataaaagaaggatcatatactattgttgcttattatatgtaatctaataaatactgtttacaaaagattacacttgtggttcctgaagaaagtatggtaaatgcagtaaacattaatatataaaataaaaataaaatagtgtaagatgttatcagaatactcatgtttggaaattcaaggaacaattaggattcatacatgaaaggttatcaattcctcattgaaggcctgagtctcaaagaatttttggtggaaatacttaaatttctgtcacaaatatggcttgtttctggagaactaaaagtgagtccccctgtggaatgagatggaaccatgctgttggctctttccttttgaagtgtttgttcccatttgaaataaccacaacattttctgttttcttggtatttcccgatagggcaacaatagaagacttttccatggttcggtccattattagaaacaacaagtctcttagatctccgaccacacttgcataatggaggtgtcattttcccactcttccatggctcttgtaggttaactgtagaagttaatatagatgggagacgcctccaggaagaacttcttactggggagcaatcagatgatgtaggcttttcttcatgaatagtgaagggttgtttttttgctggtgggaaagcttggggactgcatggattccttttggtaccacctgaaagaagaggatgtttccccaaaactaaaggatgagacatattggcattaactctgttgaaggtacttgatttgtgttcaggtaacttaaaggcagaaatatctgaacctggatctttggcttcttttacattataaatagtagtgtgaggactcttgtacacaatagacttagaagtctcagatttttgaggagtttcctctatgtctccaaagttttcatgacttgacatttccaattctttcaaaaccattaatctttctccagaattaaatgaaatctctaagtctgagtcactaatgggaactgtacagtctacgttttcctcaggctgagatgctggcagtaaaaccacatcctcccaatcagccaacacaggtaaacagtccagagtagagctcatttccaaatcagaaacatgatgaacagttggaacggtggtagaaacaagtaccaattctgaaccaactgttgaagccttagatttggtattaaatgcaagatgttcattttttccttgcttttgcatanagataggtgaattcaaggtaggagactgcaactgccccacagaagtagaggacttagtattaaaaagaggtaaggaacttttgacattgtgaagacttgcttttatattgttttttacttgtaattgatcctgttgtgcctttataggagaatttgcacaaattgacttcatttgaactttttcatgaggatttattatatttttaggctccttattatatatgctgggaccctggatgctaatgttacaggcagacatttcttcaacttgaattgtattcaaatttctggccagaatgctgaaattcttcttagtgggaacctatgattccacagacaaatgcaacagctttagaaactgtgcattcgttaatttcttcagtatacagttttatgacaaaaaagagaaatgtcattgatttataaatgactgcacacattaaatctacgtttcaaagaacgtatgactgtttatgaagtttgagatgacagaataaaaaggcaagacactactaaccttgttcaacgaccttgtaattttcattacacaaccatctctgatcattttccaagcaagaagggcagtattccgagaatcgtccaaccctgaggatacagatatcaaacactgaatttagtggtactagtactatttccttagtnctaaagaaataacttaaaaagaaaaacaccacttgtgtagaaattggaacacagttttagttttatgaccatctactaattttaatcatgataaactggtcttggaagtggaaggctatggcagcattaccagtgaaagacaagctcgtccacatttatagaggaggatatgaaaatgtattagacagttccccaaaatgtggccagcgttctgcaggaaccaggatttgtgaataatctaatagtcttgttcagttttttcactagtccattctattatttgagcacttgtttaatctccatttgatttggctcattcttttcattcttcttagcaactagaaagccactagatggcagtntatcttacaatagtttatgaaagtggtaatttgaaagtcttagaaacaatgtgaattgtttagattaggagttttttttttttaggctgaagatatcccttactaatgacattaccaaaaaatgaaattcatatgaagtattttttaaaagtcaaatggcttacataatttttaatgtatactaaccagaatgttctcgtcctgagaattctattcctacttcctgcaaggcaccacttagtccttttggttttctcctatagaaaagctaaccaataaaaaaagatatatttaaaagaagattactattttaaagactatgtattaaacacttttcataatttttagttctattagatttagaatgtgcttattttttgtgtgttgtttttaaatactttaagaaatgcatttatgtg

SEQ ID NO: 359674 - DNA, 1575 bp, Homo sapiens
cggattgtcagactgctcctccctcttctttagactgccacgaggaaaaagcagatgtgagaactcaaggttcagggctgctcttctaagaaacaagtctgccataatctccatctgtgttggaatctgttaactaatgaactggtctctgtgcaaatcctgagtgctaaagcttccaacaagactgatgctagctcgtgtcaccaggaagatgctacgtcatgccaagtgttttcagcgcctagcaatttttggttctgtgagggcactgcataaagataatagaacagcaacccctcagaatttctccaactatgaatccatgaaacaggacttcaaactggggattccagagtatttcaactttgctaaagatgtcctggaccaatggactgataaggaaaaggctggaaagaaaccttcaaatccagccttctggtggatcaacagaaatggagaagagatgcgatggagttttgaggaactgggatctctgtccagaaaatttgccaatatactttcagaagcctgttccctacaaagaggagatcgggtaattctgattctgcccagggtcccagagtggtggcttgcaaatgtggcctgtctgcgaacagggacagttttaattccaggaaccactcagctgacccagaaagacattctctacagactacaatcttcaaaagcaaactgcattatcaccaatgatgttttagccccagcagtagacgctgttgcatccaaatgtgaaaatctgcactccaagctgattgtatcagagaactccagagaggggtgggggaacctcaaggagttgatgaaacatgccagtgacagccacacctgtgtgaagacaaaacacaatgagatcatggccatattctttaccagtggaacaagtggatatccgaaaatgactgcacacacccacagcagttttggtttaggattatctgtaaatggaaggttctggctagatttgacaccctcagatgtgatgtggaatacctcagatacgggctgggcaaagtctgcatggagtagtgttttttctccgtggatccagggagcatgtgtattcacacaccatttaccccgttttgagccgacttctatcttgcaaacactctccaagtaccccatcacagtcttctgttcagcaccaactgtataccgaatgcttgtacagaatgatataaccagctataagtttaaaagcttaaagcactgtgtgagtgctggggaaccaattacccctgacgtgactgaaaaatggagaaacaagacgggcctggatatctacgaaggatatggacagactgaaacggtgctaatctgtggaaattttaagggaatgaaaattaaacctggctcaatgggaaaaccttctcctgctttcgatgttaaggtttgcacatccccttccaggagaatgtttaacaacccaatctgtacactacctacctaccgcttacccccatataaactttctttgttatgatggtgattccattttacttccatgatactttaatttttataaatatgtgaaaatgattagaaatgttagct

SEQ ID NO: 359675 - DNA, 454 bp, Homo sapiens
cggcggcccccccccgggcattgacttgtttttcccaccaccgccgggattttcgagtggatggtagtaaaggcttttgtcgttctaaatcctgattacaagtcacatgatcaagaacaactaataaaggagattcaggagcatgttaaaaaaactacagcaccttacaaatatcccagaaaggtagaatttattcaagagctgccaaagactatcagtgggaagacaaaaagaaatgaactgaggaagaaagaatggaagacaatttaaagttgtttcattaattaccatatctataaaacaaacatagtatctgtcaatctctagaaaccacaagatgatggagaggtcataaaaactgtggtagtatgcttagaaactgttgatttaaaatatcttgtggttatgatatcagaggctaaattttgaaataaaatatttggcaaattcctcc

SEQ ID NO: 359676 - DNA, 2133 bp, Homo sapiens
cggattgtcagactgctcctccctcttctttagactgccacgaggaaaaagcagatgtgagaactcaaggttcagggctgctcttctaagaaacaagtctgccataatctccatctgtgttggaatctgttaactaatgaactggtctctgtgcaaatcctgagtgctaaagcttccaacaagactgatgctagctcgtgtcaccaggaagatgctacgtcatgccaagtgttttcagcgcctagcaatttttggttctgtgagggcactgcataaagataatagaacagcaacccctcagaatttctccaactatgaatccatgaaacaggacttcaaactggggattccagagtatttcaactttgctaaagatgtcctggaccaatggactgataaggaaaaggctggaaagaaaccttcaaatccagccttctggtggatcaacagaaatggagaagagatgcgatggagttttgaggaactgggatctctgtccagaaaatttgccaatatactttcagaagcctgttccctacaaagaggagatcgggtaattctgattctgcccagggtcccagagtggtggcttgcaaatgtggcctgtctgcgaacagggacagttttaattccaggaaccactcagctgacccagaaagacattctctacagactacaatcttcaaaagcaaactgcattatcaccaatgatgttttagccccagcagtagacgctgttgcatccaaatgtgaaaatctgcactccaagctgattgtatcagagaactccagagaggggtgggggaacctcaaggagttgatgaaacatgccagtgacagccacacctgtgtgaagacaaaacacaatgagatcatggccatattctttaccagtggaacaagtggatatccgaaaatgactgcacacacccacagcagttttggtttaggattatctgtaaatggaaggttctggctagatttgacaccctcagatgtgatgtggaatacctcagatacgggctgggcaaagtctgcatggagtagtgttttttctccgtggatccagggagcatgtgtattcacacaccatttaccccgttttgagccgacttctatcttgcaaacactctccaagtaccccatcacagtcttctgttcagcaccaactgtataccgaatgcttgtacagaatgatataaccagctataagtttaaaagcttaaagcactgtgtgagtgctggggaaccaattacccctgacgtgactgaaaaatggagaaacaagacgggcctggatatctacgaaggatatggacagactgaaacggtgctaatctgtggaaattttaagggaatgaaaattaaacctggctcaatgggaaaaccttctcctgctttcgatgttaagattgtagatgtaaatggcaatgttctacctcctggacaagaaggagatattggcattcaagttctacccaaccgaccatttggcctttttactcattacgtagataatccttcaaaaacagcttcaactctacgaggcaatttctatatcactggggacagaggatatatggataaagatgggtatttctggtttgttgcaagagcagatgatgtcatattatcctctggctatcgaattggaccatttgaggtagaaaatgccctgaatgaacacccttcagttgcagagtcagctgttgtcagcagcccagaccccatcagaggagagggtagtaaaggcttttgtcgttctaaatcctgattacaagtcacatgatcaagaacaactaataaaggagattcaggagcatgttaaaaaaactacagcaccttacaaatatcccagaaaggtagaatttattcaagagctgccaaagactatcagtgggaagacaaaaagaaatgaactgaggaagaaagaatggaagacaatttaaagttgtttcattaattaccatatctataaaacaaacatagtatctgtcaatctctagaaaccacaagatgatggagaggtcataaaaactgtggtagtatgcttagaaactgttgatttaaaatatcttgtggttatgatatcagaggctaaattttgaaataaaatatttggcaaattcctcc

SEQ ID NO: 359677 - DNA, 4697 bp, Homo sapiens
  misc_feature (3253)..(3253): n is a, c, g, or t
  misc_feature (3916)..(3916): n is a, c, g, or t
  misc_feature (4278)..(4278): n is a, c, g, or t
cgtgtctctgcttgtttgactttctgttctgctgtttcttccctgctgctggcggtggccgtctgtgcctcgcgctgtggtatgtatgtgctggcgccatttgatttcttcggctctgtctctgcctctgctttgtgtcttgtctacgtgctcttggtgttttgtcgctttgtgcgtgctatgtgcgttgtggggcctgctcattcttgtgcccctggtgttcgggctctgtgcttctgctggtgcgtctttgtcgttcgtgctcttgttgttgcttctcctgtctgtttctttgtcgtttatggtctgtcgccgctcgtctttctgtttgtccgcttctcgtctttccccccgtgtttgccgctctcttgggcctcttgctcctcgctggttttgtttgctcgtttgtgcttttcgtcgtttgcttctggtgtgtctgcttttgtctgttgtcgttgtgctgttgttgtttgtgtggtgttgttctgctgtattgtttgttccgtttctccccccgcgcggggccttacattttgatatttcgagtgcttcgtctctgtggactcccccgttggattagtgatccccccttagtgggcctcccggaacgtcactgctggagtttgtttcacgaaaccgcttctgttgtccccccgggcgtttgtttaattttggtgagagagaattcccgcccccgtttgttcactgcgccccgattctccctctagtggaaccaccgctagtggcccctcgttgcacacttagcctcatctggggcccccgcgcgcccccaccgccatggttctaagaaaactttctctcgcgggggccgcgcgggcgcgccccacacacacgtttttttttttttttttttttggtagtaaaggcttttgtcgttctaaatcctgattacaagtcacatgatcaagaacaactaataaaggagattcaggagcatgttaaaaaaactacagcaccttacaaatatcccagaaaggtaggcatcctaattataacgaatatttgctcagtgttgtggacaatttcaagtgtttatttttacattttaatgaatattttcttcacacatgctgcaccacatgtcccaaactgaactgatgacatatgggtaagaatcagaatctttgagattaaaatgaaaccctgaacctattttgtttggtcctttggcttactggactcacagtaaatacttaatatcaagacaactttcctaacaatacccttttccctattttggctgttacccaaaacccattccaaagactattctaattcttccacctagaattcataatcaaactgctatataattggctttatgtaaagataaaaatttccaggctaattttcttccccttgatgccaacaggtagaatttattcaagagctgccaaagactatcagtgggaagacaaaaagaaatgaactgaggaagaaagaatggaagacaatttaaagttgtttcattaattaccatatctataaaacaaacatagtatctgtcaatctctagaaaccacaagatgatggagaggtcataaaaactgtggtagtatgcttagaaactgttgatttaaaatatcttgtggttatgatatcagaggctaaattttgaaataaaatatttggcaaattcctccacattagtgtcaatgttcctatcatttcttaatataaaaataataccatcaattgctgattaatttttaaatgtatagtatagaagcagtttctgaaccagatctctgctacataggttttcaaactttagttgactaattcttctgatatgttgatatacaaatcagaaccaatgttcaagcctgaaataaaactaaagaacttataaaagtttttagaaaaatataaaatatcagttagaagattatgataatctcaaagtacaagaatctacctgaaaatagactagggatttttattagtcacattttttgcaaataatttaaaaatagtttagacttgtttcaaggtctaactataaaagaaggatcatatactattgttgcttattatatgtaatctaataaatactgtttacaaaagattacacttgtggttcctgaagaaagtatggtaaatgcagtaaacattaatatataaaataaaaataaaatagtgtaagatgttatcagaatactcatgtttggaaattcaaggaacaattaggattcatacatgaaaggttatcaattcctcattgaaggcctgagtctcaaagaatttttggtggaaatacttaaatttctgtcacaaatatggcttgtttctggagaactaaaagtgagtccccctgtggaatgagatggaaccatgctgttggctctttccttttgaagtgtttgttcccatttgaaataaccacaacattttctgttttcttggtatttcccgatagggcaacaatagaagacttttccatggttcggtccattattagaaacaacaagtctcttagatctccgaccacacttgcataatggaggtgtcattttcccactcttccatggctcttgtaggttaactgtagaagttaatatagatgggagacgcctccaggaagaacttcttactggggagcaatcagatgatgtaggcttttcttcatgaatagtgaagggttgtttttttgctggtgggaaagcttggggactgcatggattccttttggtaccacctgaaagaagaggatgtttccccaaaactaaaggatgagacatattggcattaactctgttgaaggtacttgatttgtgttcaggtaacttaaaggcagaaatatctgaacctggatctttggcttcttttacattataaatagtagtgtgaggactcttgtacacaatagacttagaagtctcagatttttgaggagtttcctctatgtctccaaagttttcatgacttgacatttccaattctttcaaaaccattaatctttctccagaattaaatgaaatctctaagtctgagtcactaatgggaactgtacagtctacgttttcctcaggctgagatgctggcagtaaaaccacatcctcccaatcagccaacacaggtaaacagtccagagtagagctcatttccaaatcagaaacatgatgaacagttggaacggtggtagaaacaagtaccaattctgaaccaactgttgaagccttagatttggtattaaatgcaagatgttcattttttccttgcttttgcatanagataggtgaattcaaggtaggagactgcaactgccccacagaagtagaggacttagtattaaaaagaggtaaggaacttttgacattgtgaagacttgcttttatattgttttttacttgtaattgatcctgttgtgcctttataggagaatttgcacaaattgacttcatttgaactttttcatgaggatttattatatttttaggctccttattatatatgctgggaccctggatgctaatgttacaggcagacatttcttcaacttgaattgtattcaaatttctggccagaatgctgaaattcttcttagtgggaacctatgattccacagacaaatgcaacagctttagaaactgtgcattcgttaatttcttcagtatacagttttatgacaaaaaagagaaatgtcattgatttataaatgactgcacacattaaatctacgtttcaaagaacgtatgactgtttatgaagtttgagatgacagaataaaaaggcaagacactactaaccttgttcaacgaccttgtaattttcattacacaaccatctctgatcattttccaagcaagaagggcagtattccgagaatcgtccaaccctgaggatacagatatcaaacactgaatttagtggtactagtactatttccttagtnctaaagaaataacttaaaaagaaaaacaccacttgtgtagaaattggaacacagttttagttttatgaccatctactaattttaatcatgataaactggtcttggaagtggaaggctatggcagcattaccagtgaaagacaagctcgtccacatttatagaggaggatatgaaaatgtattagacagttccccaaaatgtggccagcgttctgcaggaaccaggatttgtgaataatctaatagtcttgttcagttttttcactagtccattctattatttgagcacttgtttaatctccatttgatttggctcattcttttcattcttcttagcaactagaaagccactagatggcagtntatcttacaatagtttatgaaagtggtaatttgaaagtcttagaaacaatgtgaattgtttagattaggagttttttttttttaggctgaagatatcccttactaatgacattaccaaaaaatgaaattcatatgaagtattttttaaaagtcaaatggcttacataatttttaatgtatactaaccagaatgttctcgtcctgagaattctattcctacttcctgcaaggcaccacttagtccttttggttttctcctatagaaaagctaaccaataaaaaaagatatatttaaaagaagattactattttaaagactatgtattaaacacttttcataatttttagttctattagatttagaatgtgcttattttttgtgtgttgtttttaaatactttaagaaatgcatttatgtg

SEQ ID NO: 359678 - DNA, 4041 bp, Homo sapiens
  misc_feature (2597)..(2597): n is a, c, g, or t
  misc_feature (3260)..(3260): n is a, c, g, or t
  misc_feature (3622)..(3622): n is a, c, g, or t
tcctagcacacccatcacttgggaaattacaaaggttttagaagctctgggccaggaacccaggatgaagactcagtacagctataagtttaaaagcttaaagcactgtgtgagtgctggggaaccaattacccctgacgtgactgaaaaatggagaaacaagacgggcctggatatctacgaaggatatggacagactgaaacggtgctaatctgtggaaattttaagggaatgaaaattaaacctggctcaatgggaaaaccttctcctgctttcgatgttaagattgtagatgtaaatggcaatgttctacctcctggacaagaaggagatattggcattcaagttctacccaaccgaccatttggcctttttactcattacgtagataatccttcaaaaacagcttcaactctacgaggcaatttctatatcactggggacagaggatatatggataaagatgggtatttctggtttgttgcaagagcagatgatgtcatattatcctctggctatcgaattggaccatttgaggtagaaaatgccctgaatgaacacccttcagttgcagagtcagctgttgtcagcagcccagaccccatcagaggagagggtagtaaaggcttttgtcgttctaaatcctgattacaagtcacatgatcaagaacaactaataaaggagattcaggagcatgttaaaaaaactacagcaccttacaaatatcccagaaaggtagaatttattcaagagctgccaaagactatcagtgggaagacaaaaagaaatgaactgaggaagaaagaatggaagacaatttaaagttgtttcattaattaccatatctataaaacaaacatagtatctgtcaatctctagaaaccacaagatgatggagaggtcataaaaactgtggtagtatgcttagaaactgttgatttaaaatatcttgtggttatgatatcagaggctaaattttgaaataaaatatttggcaaattcctccacattagtgtcaatgttcctatcatttcttaatataaaaataataccatcaattgctgattaatttttaaatgtatagtatagaagcagtttctgaaccagatctctgctacataggttttcaaactttagttgactaattcttctgatatgttgatatacaaatcagaaccaatgttcaagcctgaaataaaactaaagaacttataaaagtttttagaaaaatataaaatatcagttagaagattatgataatctcaaagtacaagaatctacctgaaaatagactagggatttttattagtcacattttttgcaaataatttaaaaatagtttagacttgtttcaaggtctaactataaaagaaggatcatatactattgttgcttattatatgtaatctaataaatactgtttacaaaagattacacttgtggttcctgaagaaagtatggtaaatgcagtaaacattaatatataaaataaaaataaaatagtgtaagatgttatcagaatactcatgtttggaaattcaaggaacaattaggattcatacatgaaaggttatcaattcctcattgaaggcctgagtctcaaagaatttttggtggaaatacttaaatttctgtcacaaatatggcttgtttctggagaactaaaagtgagtccccctgtggaatgagatggaaccatgctgttggctctttccttttgaagtgtttgttcccatttgaaataaccacaacattttctgttttcttggtatttcccgatagggcaacaatagaagacttttccatggttcggtccattattagaaacaacaagtctcttagatctccgaccacacttgcataatggaggtgtcattttcccactcttccatggctcttgtaggttaactgtagaagttaatatagatgggagacgcctccaggaagaacttcttactggggagcaatcagatgatgtaggcttttcttcatgaatagtgaagggttgtttttttgctggtgggaaagcttggggactgcatggattccttttggtaccacctgaaagaagaggatgtttccccaaaactaaaggatgagacatattggcattaactctgttgaaggtacttgatttgtgttcaggtaacttaaaggcagaaatatctgaacctggatctttggcttcttttacattataaatagtagtgtgaggactcttgtacacaatagacttagaagtctcagatttttgaggagtttcctctatgtctccaaagttttcatgacttgacatttccaattctttcaaaaccattaatctttctccagaattaaatgaaatctctaagtctgagtcactaatgggaactgtacagtctacgttttcctcaggctgagatgctggcagtaaaaccacatcctcccaatcagccaacacaggtaaacagtccagagtagagctcatttccaaatcagaaacatgatgaacagttggaacggtggtagaaacaagtaccaattctgaaccaactgttgaagccttagatttggtattaaatgcaagatgttcattttttccttgcttttgcatanagataggtgaattcaaggtaggagactgcaactgccccacagaagtagaggacttagtattaaaaagaggtaaggaacttttgacattgtgaagacttgcttttatattgttttttacttgtaattgatcctgttgtgcctttataggagaatttgcacaaattgacttcatttgaactttttcatgaggatttattatatttttaggctccttattatatatgctgggaccctggatgctaatgttacaggcagacatttcttcaacttgaattgtattcaaatttctggccagaatgctgaaattcttcttagtgggaacctatgattccacagacaaatgcaacagctttagaaactgtgcattcgttaatttcttcagtatacagttttatgacaaaaaagagaaatgtcattgatttataaatgactgcacacattaaatctacgtttcaaagaacgtatgactgtttatgaagtttgagatgacagaataaaaaggcaagacactactaaccttgttcaacgaccttgtaattttcattacacaaccatctctgatcattttccaagcaagaagggcagtattccgagaatcgtccaaccctgaggatacagatatcaaacactgaatttagtggtactagtactatttccttagtnctaaagaaataacttaaaaagaaaaacaccacttgtgtagaaattggaacacagttttagttttatgaccatctactaattttaatcatgataaactggtcttggaagtggaaggctatggcagcattaccagtgaaagacaagctcgtccacatttatagaggaggatatgaaaatgtattagacagttccccaaaatgtggccagcgttctgcaggaaccaggatttgtgaataatctaatagtcttgttcagttttttcactagtccattctattatttgagcacttgtttaatctccatttgatttggctcattcttttcattcttcttagcaactagaaagccactagatggcagtntatcttacaatagtttatgaaagtggtaatttgaaagtcttagaaacaatgtgaattgtttagattaggagttttttttttttaggctgaagatatcccttactaatgacattaccaaaaaatgaaattcatatgaagtattttttaaaagtcaaatggcttacataatttttaatgtatactaaccagaatgttctcgtcctgagaattctattcctacttcctgcaaggcaccacttagtccttttggttttctcctatagaaaagctaaccaataaaaaaagatatatttaaaagaagattactattttaaagactatgtattaaacacttttcataatttttagttctattagatttagaatgtgcttattttttgtgtgttgtttttaaatactttaagaaatgcatttatgtg

SEQ ID NO: 359679 - DNA, 3491 bp, Homo sapiens
  misc_feature (26)..(26): n is a, c, g, or t
  misc_feature (28)..(28): n is a, c, g, or t
  misc_feature (47)..(49): n is a, c, g, or t
  misc_feature (52)..(52): n is a, c, g, or t
  misc_feature (2047)..(2047): n is a, c, g, or t
  misc_feature (2710)..(2710): n is a, c, g, or t
  misc_feature (3072)..(3072): n is a, c, g, or t
gccccggagggcccgccccaagcccngnaggtgtttagtcttttggnnnggnccgtccggattggaggtagtaaaggcttttgtcgttctaaatcctgattacaagtcacatgatcaagaacaactaataaaggagattcaggagcatgttaaaaaaactacagcaccttacaaatatcccagaaaggtagaatttattcaagagctgccaaagactatcagtgggaagacaaaaagaaatgaactgaggaagaaagaatggaagacaatttaaagttgtttcattaattaccatatctataaaacaaacatagtatctgtcaatctctagaaaccacaagatgatggagaggtcataaaaactgtggtagtatgcttagaaactgttgatttaaaatatcttgtggttatgatatcagaggctaaattttgaaataaaatatttggcaaattcctccacattagtgtcaatgttcctatcatttcttaatataaaaataataccatcaattgctgattaatttttaaatgtatagtatagaagcagtttctgaaccagatctctgctacataggttttcaaactttagttgactaattcttctgatatgttgatatacaaatcagaaccaatgttcaagcctgaaataaaactaaagaacttataaaagtttttagaaaaatataaaatatcagttagaagattatgataatctcaaagtacaagaatctacctgaaaatagactagggatttttattagtcacattttttgcaaataatttaaaaatagtttagacttgtttcaaggtctaactataaaagaaggatcatatactattgttgcttattatatgtaatctaataaatactgtttacaaaagattacacttgtggttcctgaagaaagtatggtaaatgcagtaaacattaatatataaaataaaaataaaatagtgtaagatgttatcagaatactcatgtttggaaattcaaggaacaattaggattcatacatgaaaggttatcaattcctcattgaaggcctgagtctcaaagaatttttggtggaaatacttaaatttctgtcacaaatatggcttgtttctggagaactaaaagtgagtccccctgtggaatgagatggaaccatgctgttggctctttccttttgaagtgtttgttcccatttgaaataaccacaacattttctgttttcttggtatttcccgatagggcaacaatagaagacttttccatggttcggtccattattagaaacaacaagtctcttagatctccgaccacacttgcataatggaggtgtcattttcccactcttccatggctcttgtaggttaactgtagaagttaatatagatgggagacgcctccaggaagaacttcttactggggagcaatcagatgatgtaggcttttcttcatgaatagtgaagggttgtttttttgctggtgggaaagcttggggactgcatggattccttttggtaccacctgaaagaagaggatgtttccccaaaactaaaggatgagacatattggcattaactctgttgaaggtacttgatttgtgttcaggtaacttaaaggcagaaatatctgaacctggatctttggcttcttttacattataaatagtagtgtgaggactcttgtacacaatagacttagaagtctcagatttttgaggagtttcctctatgtctccaaagttttcatgacttgacatttccaattctttcaaaaccattaatctttctccagaattaaatgaaatctctaagtctgagtcactaatgggaactgtacagtctacgttttcctcaggctgagatgctggcagtaaaaccacatcctcccaatcagccaacacaggtaaacagtccagagtagagctcatttccaaatcagaaacatgatgaacagttggaacggtggtagaaacaagtaccaattctgaaccaactgttgaagccttagatttggtattaaatgcaagatgttcattttttccttgcttttgcatanagataggtgaattcaaggtaggagactgcaactgccccacagaagtagaggacttagtattaaaaagaggtaaggaacttttgacattgtgaagacttgcttttatattgttttttacttgtaattgatcctgttgtgcctttataggagaatttgcacaaattgacttcatttgaactttttcatgaggatttattatatttttaggctccttattatatatgctgggaccctggatgctaatgttacaggcagacatttcttcaacttgaattgtattcaaatttctggccagaatgctgaaattcttcttagtgggaacctatgattccacagacaaatgcaacagctttagaaactgtgcattcgttaatttcttcagtatacagttttatgacaaaaaagagaaatgtcattgatttataaatgactgcacacattaaatctacgtttcaaagaacgtatgactgtttatgaagtttgagatgacagaataaaaaggcaagacactactaaccttgttcaacgaccttgtaattttcattacacaaccatctctgatcattttccaagcaagaagggcagtattccgagaatcgtccaaccctgaggatacagatatcaaacactgaatttagtggtactagtactatttccttagtnctaaagaaataacttaaaaagaaaaacaccacttgtgtagaaattggaacacagttttagttttatgaccatctactaattttaatcatgataaactggtcttggaagtggaaggctatggcagcattaccagtgaaagacaagctcgtccacatttatagaggaggatatgaaaatgtattagacagttccccaaaatgtggccagcgttctgcaggaaccaggatttgtgaataatctaatagtcttgttcagttttttcactagtccattctattatttgagcacttgtttaatctccatttgatttggctcattcttttcattcttcttagcaactagaaagccactagatggcagtntatcttacaatagtttatgaaagtggtaatttgaaagtcttagaaacaatgtgaattgtttagattaggagttttttttttttaggctgaagatatcccttactaatgacattaccaaaaaatgaaattcatatgaagtattttttaaaagtcaaatggcttacataatttttaatgtatactaaccagaatgttctcgtcctgagaattctattcctacttcctgcaaggcaccacttagtccttttggttttctcctatagaaaagctaaccaataaaaaaagatatatttaaaagaagattactattttaaagactatgtattaaacacttttcataatttttagttctattagatttagaatgtgcttattttttgtgtgttgtttttaaatactttaagaaatgcatttatgtg

SEQ ID NO: 359680 - DNA, 5166 bp, Homo sapiens
  misc_feature (3722)..(3722): n is a, c, g, or t
  misc_feature (4385)..(4385): n is a, c, g, or t
  misc_feature (4747)..(4747): n is a, c, g, or t
cggattgtcagactgctcctccctcttctttagactgccacgaggaaaaagcagatgtgagaactcaaggttcagggctgctcttctaagaaacaagtctgccataatctccatctgtgttggaatctgttaactaatgaactggtctctgtgcaaatcctgagtgctaaagcttccaacaagactgatgctagctcgtgtcaccaggaagatgctacgtcatgccaagtgttttcagcgcctagcaatttttggttctgtgagggcactgcataaagataatagaacagcaacccctcagaatttctccaactatgaatccatgaaacaggacttcaaactggggattccagagtatttcaactttgctaaagatgtcctggaccaatggactgataaggaaaaggctggaaagaaaccttcaaatccagccttctggtggatcaacagaaatggagaagagatgcgatggagttttgaggaactgggatctctgtccagaaaatttgccaatatactttcagaagcctgttccctacaaagaggagatcgggtaattctgattctgcccagggtcccagagtggtggcttgcaaatgtggcctgtctgcgaacagggacagttttaattccaggaaccactcagctgacccagaaagacattctctacagactacaatcttcaaaagcaaactgcattatcaccaatgatgttttagccccagcagtagacgctgttgcatccaaatgtgaaaatctgcactccaagctgattgtatcagagaactccagagaggggtgggggaacctcaaggagttgatgaaacatgccagtgacagccacacctgtgtgaagacaaaacacaatgagatcatggccatattctttaccagtggaacaagtggatatccgaaaatgactgcacacacccacagcagttttggtttaggattatctgtaaatggaaggttctggctagatttgacaccctcagatgtgatgtggaatacctcagatacgggctgggcaaagtctgcatggagtagtgttttttctccgtggatccagggagcatgtgtattcacacaccatttaccccgttttgagccgacttctatcttgcaaacactctccaagtaccccatcacagtcttctgttcagcaccaactgtataccgaatgcttgtacagaatgatataaccagctataagtttaaaagcttaaagcactgtgtgagtgctggggaaccaattacccctgacgtgactgaaaaatggagaaacaagacgggcctggatatctacgaaggatatggacagactgaaacggtgctaatctgtggaaattttaagggaatgaaaattaaacctggctcaatgggaaaaccttctcctgctttcgatgttaagattgtagatgtaaatggcaatgttctacctcctggacaagaaggagatattggcattcaagttctacccaaccgaccatttggcctttttactcattacgtagataatccttcaaaaacagcttcaactctacgaggcaatttctatatcactggggacagaggatatatggataaagatgggtatttctggtttgttgcaagagcagatgatgtcatattatcctctggctatcgaattggaccatttgaggtagaaaatgccctgaatgaacacccttcagttgcagagtcagctgttgtcagcagcccagaccccatcagaggagagggtagtaaaggcttttgtcgttctaaatcctgattacaagtcacatgatcaagaacaactaataaaggagattcaggagcatgttaaaaaaactacagcaccttacaaatatcccagaaaggtagaatttattcaagagctgccaaagactatcagtgggaagacaaaaagaaatgaactgaggaagaaagaatggaagacaatttaaagttgtttcattaattaccatatctataaaacaaacatagtatctgtcaatctctagaaaccacaagatgatggagaggtcataaaaactgtggtagtatgcttagaaactgttgatttaaaatatcttgtggttatgatatcagaggctaaattttgaaataaaatatttggcaaattcctccacattagtgtcaatgttcctatcatttcttaatataaaaataataccatcaattgctgattaatttttaaatgtatagtatagaagcagtttctgaaccagatctctgctacataggttttcaaactttagttgactaattcttctgatatgttgatatacaaatcagaaccaatgttcaagcctgaaataaaactaaagaacttataaaagtttttagaaaaatataaaatatcagttagaagattatgataatctcaaagtacaagaatctacctgaaaatagactagggatttttattagtcacattttttgcaaataatttaaaaatagtttagacttgtttcaaggtctaactataaaagaaggatcatatactattgttgcttattatatgtaatctaataaatactgtttacaaaagattacacttgtggttcctgaagaaagtatggtaaatgcagtaaacattaatatataaaataaaaataaaatagtgtaagatgttatcagaatactcatgtttggaaattcaaggaacaattaggattcatacatgaaaggttatcaattcctcattgaaggcctgagtctcaaagaatttttggtggaaatacttaaatttctgtcacaaatatggcttgtttctggagaactaaaagtgagtccccctgtggaatgagatggaaccatgctgttggctctttccttttgaagtgtttgttcccatttgaaataaccacaacattttctgttttcttggtatttcccgatagggcaacaatagaagacttttccatggttcggtccattattagaaacaacaagtctcttagatctccgaccacacttgcataatggaggtgtcattttcccactcttccatggctcttgtaggttaactgtagaagttaatatagatgggagacgcctccaggaagaacttcttactggggagcaatcagatgatgtaggcttttcttcatgaatagtgaagggttgtttttttgctggtgggaaagcttggggactgcatggattccttttggtaccacctgaaagaagaggatgtttccccaaaactaaaggatgagacatattggcattaactctgttgaaggtacttgatttgtgttcaggtaacttaaaggcagaaatatctgaacctggatctttggcttcttttacattataaatagtagtgtgaggactcttgtacacaatagacttagaagtctcagatttttgaggagtttcctctatgtctccaaagttttcatgacttgacatttccaattctttcaaaaccattaatctttctccagaattaaatgaaatctctaagtctgagtcactaatgggaactgtacagtctacgttttcctcaggctgagatgctggcagtaaaaccacatcctcccaatcagccaacacaggtaaacagtccagagtagagctcatttccaaatcagaaacatgatgaacagttggaacggtggtagaaacaagtaccaattctgaaccaactgttgaagccttagatttggtattaaatgcaagatgttcattttttccttgcttttgcatanagataggtgaattcaaggtaggagactgcaactgccccacagaagtagaggacttagtattaaaaagaggtaaggaacttttgacattgtgaagacttgcttttatattgttttttacttgtaattgatcctgttgtgcctttataggagaatttgcacaaattgacttcatttgaactttttcatgaggatttattatatttttaggctccttattatatatgctgggaccctggatgctaatgttacaggcagacatttcttcaacttgaattgtattcaaatttctggccagaatgctgaaattcttcttagtgggaacctatgattccacagacaaatgcaacagctttagaaactgtgcattcgttaatttcttcagtatacagttttatgacaaaaaagagaaatgtcattgatttataaatgactgcacacattaaatctacgtttcaaagaacgtatgactgtttatgaagtttgagatgacagaataaaaaggcaagacactactaaccttgttcaacgaccttgtaattttcattacacaaccatctctgatcattttccaagcaagaagggcagtattccgagaatcgtccaaccctgaggatacagatatcaaacactgaatttagtggtactagtactatttccttagtnctaaagaaataacttaaaaagaaaaacaccacttgtgtagaaattggaacacagttttagttttatgaccatctactaattttaatcatgataaactggtcttggaagtggaaggctatggcagcattaccagtgaaagacaagctcgtccacatttatagaggaggatatgaaaatgtattagacagttccccaaaatgtggccagcgttctgcaggaaccaggatttgtgaataatctaatagtcttgttcagttttttcactagtccattctattatttgagcacttgtttaatctccatttgatttggctcattcttttcattcttcttagcaactagaaagccactagatggcagtntatcttacaatagtttatgaaagtggtaatttgaaagtcttagaaacaatgtgaattgtttagattaggagttttttttttttaggctgaagatatcccttactaatgacattaccaaaaaatgaaattcatatgaagtattttttaaaagtcaaatggcttacataatttttaatgtatactaaccagaatgttctcgtcctgagaattctattcctacttcctgcaaggcaccacttagtccttttggttttctcctatagaaaagctaaccaataaaaaaagatatatttaaaagaagattactattttaaagactatgtattaaacacttttcataatttttagttctattagatttagaatgtgcttattttttgtgtgttgtttttaaatactttaagaaatgcatttatgtg

SEQ ID NO: 359681 - DNA, 4938 bp, Homo sapiens
  misc_feature (3494)..(3494): n is a, c, g, or t
  misc_feature (4157)..(4157): n is a, c, g, or t
  misc_feature (4519)..(4519): n is a, c, g, or t
cggattgtcagactgctcctccctcttctttagactgccacgaggaaaaagcagatgtgagaactcaaggttcagggctgctcttctaagaaacaagtctgccataatctccatctgtgttggaatctgttaactaatgaactggtctctgtgcaaatcctgagtgctaaagcttccaacaagactgatgctagctcgtgtcaccaggaagatgctacgtcatgccaagtgttttcagcgcctagcaatttttggttctgtgagggcactgcataaagataatagaacagcaacccctcagaatttctccaactatgaatccatgaaacaggacttcaaactggggattccagagtatttcaactttgctaaagatgtcctggaccaatggactgataaggaaaaggctggaaagaaaccttcaaatccagccttctggtggatcaacagaaatggagaagagatgcgatggagttttgaggaactgggatctctgtccagaaaatttgccaatatactttcagaagcctgttccctacaaagaggagatcgggtaattctgattctgcccagggtcccagagtggtggcttgcaaatgtggcctgtctgcgaacagggacagttttaattccaggaaccactcagctgacccagaaagacattctctacagactacaatcttcaaaagcaaactgcattatcaccaatgatgttttagccccagcagtagacgctgttgcatccaaatgtgaaaatctgcactccaagctgattgtatcagagaactccagagaggggtgggggaacctcaaggagttgatgaaacatgccagtgacagccacacctgtgtgaagacaaaacacaatgagatcatggccatattctttaccagtggaacaagtggatatccgaaaatgactgcacacacccacagcagttttggtttaggattatctgtaaatggaaggttctggctagatttgacaccctcagatgtgatgtggaatacctcagatacgggctgggcaaagtctgcatggagtagtgttttttctccgtggatccagggagcatgtgtattcacacaccatttaccccgttttgagccgacttctatcttgcaaacactctccaagtaccccatcacagtcttctgttcagcaccaactgtataccgaatgcttgtacagaatgatataaccagctataagtttaaaagcttaaagcactgtgtgagtgctggggaaccaattacccctgacgtgactgaaaaatggagaaacaagacgggcctggatatctacgaaggatatggacagactgaaacggtgctaatctgtggaaattttaagggaatgaaaattaaacctggctcaatgggaaaaccttctcctgctttcgatgttaagattgtagatgtaaatggcaatgttctacctcctggacaagaaggagatattggcattcaagttctacccaaccgaccatttggcctttttactcattacgtaggtagtaaaggcttttgtcgttctaaatcctgattacaagtcacatgatcaagaacaactaataaaggagattcaggagcatgttaaaaaaactacagcaccttacaaatatcccagaaaggtagaatttattcaagagctgccaaagactatcagtgggaagacaaaaagaaatgaactgaggaagaaagaatggaagacaatttaaagttgtttcattaattaccatatctataaaacaaacatagtatctgtcaatctctagaaaccacaagatgatggagaggtcataaaaactgtggtagtatgcttagaaactgttgatttaaaatatcttgtggttatgatatcagaggctaaattttgaaataaaatatttggcaaattcctccacattagtgtcaatgttcctatcatttcttaatataaaaataataccatcaattgctgattaatttttaaatgtatagtatagaagcagtttctgaaccagatctctgctacataggttttcaaactttagttgactaattcttctgatatgttgatatacaaatcagaaccaatgttcaagcctgaaataaaactaaagaacttataaaagtttttagaaaaatataaaatatcagttagaagattatgataatctcaaagtacaagaatctacctgaaaatagactagggatttttattagtcacattttttgcaaataatttaaaaatagtttagacttgtttcaaggtctaactataaaagaaggatcatatactattgttgcttattatatgtaatctaataaatactgtttacaaaagattacacttgtggttcctgaagaaagtatggtaaatgcagtaaacattaatatataaaataaaaataaaatagtgtaagatgttatcagaatactcatgtttggaaattcaaggaacaattaggattcatacatgaaaggttatcaattcctcattgaaggcctgagtctcaaagaatttttggtggaaatacttaaatttctgtcacaaatatggcttgtttctggagaactaaaagtgagtccccctgtggaatgagatggaaccatgctgttggctctttccttttgaagtgtttgttcccatttgaaataaccacaacattttctgttttcttggtatttcccgatagggcaacaatagaagacttttccatggttcggtccattattagaaacaacaagtctcttagatctccgaccacacttgcataatggaggtgtcattttcccactcttccatggctcttgtaggttaactgtagaagttaatatagatgggagacgcctccaggaagaacttcttactggggagcaatcagatgatgtaggcttttcttcatgaatagtgaagggttgtttttttgctggtgggaaagcttggggactgcatggattccttttggtaccacctgaaagaagaggatgtttccccaaaactaaaggatgagacatattggcattaactctgttgaaggtacttgatttgtgttcaggtaacttaaaggcagaaatatctgaacctggatctttggcttcttttacattataaatagtagtgtgaggactcttgtacacaatagacttagaagtctcagatttttgaggagtttcctctatgtctccaaagttttcatgacttgacatttccaattctttcaaaaccattaatctttctccagaattaaatgaaatctctaagtctgagtcactaatgggaactgtacagtctacgttttcctcaggctgagatgctggcagtaaaaccacatcctcccaatcagccaacacaggtaaacagtccagagtagagctcatttccaaatcagaaacatgatgaacagttggaacggtggtagaaacaagtaccaattctgaaccaactgttgaagccttagatttggtattaaatgcaagatgttcattttttccttgcttttgcatanagataggtgaattcaaggtaggagactgcaactgccccacagaagtagaggacttagtattaaaaagaggtaaggaacttttgacattgtgaagacttgcttttatattgttttttacttgtaattgatcctgttgtgcctttataggagaatttgcacaaattgacttcatttgaactttttcatgaggatttattatatttttaggctccttattatatatgctgggaccctggatgctaatgttacaggcagacatttcttcaacttgaattgtattcaaatttctggccagaatgctgaaattcttcttagtgggaacctatgattccacagacaaatgcaacagctttagaaactgtgcattcgttaatttcttcagtatacagttttatgacaaaaaagagaaatgtcattgatttataaatgactgcacacattaaatctacgtttcaaagaacgtatgactgtttatgaagtttgagatgacagaataaaaaggcaagacactactaaccttgttcaacgaccttgtaattttcattacacaaccatctctgatcattttccaagcaagaagggcagtattccgagaatcgtccaaccctgaggatacagatatcaaacactgaatttagtggtactagtactatttccttagtnctaaagaaataacttaaaaagaaaaacaccacttgtgtagaaattggaacacagttttagttttatgaccatctactaattttaatcatgataaactggtcttggaagtggaaggctatggcagcattaccagtgaaagacaagctcgtccacatttatagaggaggatatgaaaatgtattagacagttccccaaaatgtggccagcgttctgcaggaaccaggatttgtgaataatctaatagtcttgttcagttttttcactagtccattctattatttgagcacttgtttaatctccatttgatttggctcattcttttcattcttcttagcaactagaaagccactagatggcagtntatcttacaatagtttatgaaagtggtaatttgaaagtcttagaaacaatgtgaattgtttagattaggagttttttttttttaggctgaagatatcccttactaatgacattaccaaaaaatgaaattcatatgaagtattttttaaaagtcaaatggcttacataatttttaatgtatactaaccagaatgttctcgtcctgagaattctattcctacttcctgcaaggcaccacttagtccttttggttttctcctatagaaaagctaaccaataaaaaaagatatatttaaaagaagattactattttaaagactatgtattaaacacttttcataatttttagttctattagatttagaatgtgcttattttttgtgtgttgtttttaaatactttaagaaatgcatttatgtg

SEQ ID NO: 359682 - DNA, 447 bp, Homo sapiens
cattcatgagggatccatgtctatgatgcaaacacctcccaccaaaccccacatccaacaagggaatcacattttaacatgagatttggaggggatgaaacatctaaaccatatcacctggcaattttcattgtgtacaaagatttgtagaggcattgagtggtttttcccttgcctctgtgtaggtctgagctggcatggggctgacctgcagtcttgcagaggctccactggactctggttcccctgcctttctgcatcgttccccagaggtcccaactgagggcctggaatgtgtcaacaccaaaaaatggctgaaaatacagcccttcttttttaagccatttttacaattgttttttaacctcttatgttgtacaacttagtcagtaaatgtgtcgaggagataaccagtattggttggctttcttctctgacattcatatt

SEQ ID NO: 359683 - DNA, 2705 bp, Homo sapiens
  misc_feature (639)..(639): n is a, c, g, or t
accaattaaggaaaaaaataacccacaaaagaatggctgggaattatctctcatggcctttattttcttcatattagatctccagaaatctatttgaattaattttgttatcatttgctaaatcactggaggccatgtctacactgccaagagaaaaaagttcaaaaactcatttcaaacagcttcctaccaaaccagtcggggatattctatacagtataccaatataaaaaatacagaagaattatttgttctgatcctattccaaattatataagttgataaccaaatgttaccattggaaaacgtcttggaactatttaagtctttctattgcactttttcttccaactttaaaagacaaaattttaaaatctgaccccagcccttgtgattgttcagtatataatcaatggtatcttacaaggactattttatttggaatcaatcaaatttgtttcctgccaacaataagttagattgttttttgcagttctcaagtaacaaatatgaggaccgaactctcattcaacatccaagcccttgcagtttgtgcaaatatatgtttagcaacaaaggacagacagaatccatcattagtatggctttttactggaatgttttgcatttattcattgntctttgcttggagagcaaatttagatatttcaaaaccacttttcatgggtgtggtggaacgattctggatgcagagcaatgcagtagtggccgtcctcgctggcattggtttggctgcagttgtgtctgagactaaccgagtgctgaatagcaatgggcttcagtgtctggaatggctttctgcaactctttttgtagtttaccaaatatattctaattacagatgatgacttacgagtggtatttacccaagatggcaaagcacttgccaggtgtcaactttcctgggaaccggtggaatcctgtggaaggaatattacctagtggaatggtcacatttaatctttatcattttcttgaagtaaataaacaaaaagaaacatttgtttgcataggaattcatgaaggcgacccaacctggaaaaagaactattcactttggccatgggggtcttgtgacaaattagttcctttggagattgtattcaaccctgaggaatggattaaacttacaaaaagtatctataactggaccgaagaatatggaaggtttgatccatcttcttgggaatctgtggccaatgaagaaatgtggcaagcgaggatgaaaacaccgttcttcatctttaacctggcagaaactgctcacatgccttcaaaagtgaaagctcaactctacgctcaagcatatgacctttataaggagattgtctatttacaaaaggagcacccagtgaattggcacaagaactatgccatcgcctgtgagcggatgctgcgtcttcaggcaagagatgcagatcctgaagtgctgttatcggaaaccatcagacatttccgtctgtactctcagaaagcaccgaatgacccacagcaagctgatattttaggtgctctaaagcacctaagaaaagaactgcaaagtctgagaaataggaaaaatgtctgagacagcaaaatatgaaaaacctgctcatcgttcagcttccaaaattctgaagtctggaagtttttccttcaagaaaagaaactgcataaaaaatttaaaactaagtcatctcccagatataagtatcatggtccagcagtactgtttaatggggtattcagtgactaaggtctgctatttatgcaaaattctgtttatcccgtgttaccaaattaccatttcagtgagaagcttttgaaaagtcttctgacttccagtctttcaccagatgactgcactggattagattctagaagagaatgaaccattttcatataactaaatattggtcatgaactgtgtaagggccatgcttattgggatcagttttaaagttaaattcttttgatattaataccagaccaaagacattttctgtttcctggaaaaaaaaaatgaatcatgttaggctttaggtgagagtacattttttacaaagtagctatagttgttacatagtcttacacttcaagctaaacaccaaatgggtgatattttgaaaaaagtttgtgttttactgtcttagatcgttcttggaaatcactaaaaaaaaaaaaagttaatttgatgtttgcttatttcagttgcagaaactggcgagtaaaaaagattttgcatttacttaattaattttatatttatgttttatttctatttggactcagagatctagacccaataattagtaggctcctgctgccaaaatgcaaaggggaaaaaaaggcagggattgggggggatggggaagtggcccaataaattcatttctgttacaagcatcttttatacatattactaaagagaacatagtaagaaatgcaaataatagttctttattttattatgacagttaattaatagcaacctgttttaatgaataaagtcactcagagtccttcagcacttcctaagtagaggccagaatctgtagggcttcttttccccccaattgtatagctcctagactccaagcactatataggcccctgtatagaaatgctcactaatgaagagggagggctagaagcttgtctgcattcaaagatcactggtgagtcattcagcaagaaaaggcccc

SEQ ID NO: 359684 - DNA, 1575 bp, Homo sapiens
tataaaagaacaaactggatgtggaaaggctacttgtccaagggcacactgctgctagtgatggagtccaaagttcacatctgtctgcctctggaacactcatctaactaaagatgaaaacaccgttcttcatctttaacctggcagaaactgctcacatgccttcaaaagtgaaagctcaactctacgctcaagcatatgacctttataaggagattgtctatttacaaaaggagcacccagtgaattggcacaagaactatgccatcgcctgtgagcggatgctgcgtcttcaggcaagagatgcagatcctgaagtgctgttatcggaaaccatcagacatttccgtctgtactctcagaaagcaccgaatgacccacagcaagctgatattttaggtgctctaaagcacctaagaaaagaactgcaaagtctgagaaataggaaaaatgtctgagacagcaaaatatgaaaaacctgctcatcgttcagcttccaaaattctgaagtctggaagtttttccttcaagaaaagaaactgcataaaaaatttaaaactaagtcatctcccagatataagtatcatggtccagcagtactgtttaatggggtattcagtgactaaggtctgctatttatgcaaaattctgtttatcccgtgttaccaaattaccatttcagtgagaagcttttgaaaagtcttctgacttccagtctttcaccagatgactgcactggattagattctagaagagaatgaaccattttcatataactaaatattggtcatgaactgtgtaagggccatgcttattgggatcagttttaaagttaaattcttttgatattaataccagaccaaagacattttctgtttcctggaaaaaaaaaatgaatcatgttaggctttaggtgagagtacattttttacaaagtagctatagttgttacatagtcttacacttcaagctaaacaccaaatgggtgatattttgaaaaaagtttgtgttttactgtcttagatcgttcttggaaatcactaaaaaaaaaaaaagttaatttgatgtttgcttatttcagttgcagaaactggcgagtaaaaaagattttgcatttacttaattaattttatatttatgttttatttctatttggactcagagatctagacccaataattagtaggctcctgctgccaaaatgcaaaggggaaaaaaaggcagggattgggggggatggggaagtggcccaataaattcatttctgttacaagcatcttttatacatattactaaagagaacatagtaagaaatgcaaataatagttctttattttattatgacagttaattaatagcaacctgttttaatgaataaagtcactcagagtccttcagcacttcctaagtagaggccagaatctgtagggcttcttttccccccaattgtatagctcctagactccaagcactatataggcccctgtatagaaatgctcactaatgaagagggagggctagaagcttgtctgcattcaaagatcactggtgagtcattcagcaagaaaaggcccc

SEQ ID NO: 359685 - DNA, 1749 bp, Homo sapiens
ttctccaacagctaaatttagagtttcaacccttctgcctgttgagtaaatagctttccatgaattaaaactaaatcccttccccagaacatctttctggaggaagagcattttgtcctaacactgtgtcttcggtttcccctgcaacatctaaaaacctcagaagcagttttagaagcagcatatttgcctcctgctactgtaataattgcagtaacattcttgggttctctgcatggcttagcaatgattagatttttactggaggctgcttgaatttttttttcttgttattaattcctctgtgtttttttgtttttgaaaaaaaaaaagtcaaagaataacaatggaataccaacatttctgctgttttctagctttataaggagattgtctatttacaaaaggagcacccagtgaattggcacaagaactatgccatcgcctgtgagcggatgctgcgtcttcaggcaagagatgcagatcctgaagtgctgttatcggaaaccatcagacatttccgtctgtactctcagaaagcaccgaatgacccacagcaagctgatattttaggtgctctaaagcacctaagaaaagaactgcaaagtctgagaaataggaaaaatgtctgagacagcaaaatatgaaaaacctgctcatcgttcagcttccaaaattctgaagtctggaagtttttccttcaagaaaagaaactgcataaaaaatttaaaactaagtcatctcccagatataagtatcatggtccagcagtactgtttaatggggtattcagtgactaaggtctgctatttatgcaaaattctgtttatcccgtgttaccaaattaccatttcagtgagaagcttttgaaaagtcttctgacttccagtctttcaccagatgactgcactggattagattctagaagagaatgaaccattttcatataactaaatattggtcatgaactgtgtaagggccatgcttattgggatcagttttaaagttaaattcttttgatattaataccagaccaaagacattttctgtttcctggaaaaaaaaaatgaatcatgttaggctttaggtgagagtacattttttacaaagtagctatagttgttacatagtcttacacttcaagctaaacaccaaatgggtgatattttgaaaaaagtttgtgttttactgtcttagatcgttcttggaaatcactaaaaaaaaaaaaagttaatttgatgtttgcttatttcagttgcagaaactggcgagtaaaaaagattttgcatttacttaattaattttatatttatgttttatttctatttggactcagagatctagacccaataattagtaggctcctgctgccaaaatgcaaaggggaaaaaaaggcagggattgggggggatggggaagtggcccaataaattcatttctgttacaagcatcttttatacatattactaaagagaacatagtaagaaatgcaaataatagttctttattttattatgacagttaattaatagcaacctgttttaatgaataaagtcactcagagtccttcagcacttcctaagtagaggccagaatctgtagggcttcttttccccccaattgtatagctcctagactccaagcactatataggcccctgtatagaaatgctcactaatgaagagggagggctagaagcttgtctgcattcaaagatcactggtgagtcattcagcaagaaaaggcccc

SEQ ID NO: 359686 - DNA, 508 bp, Homo sapiens
atgaaggttcctatccccacccccaggatgaaaacaccgttcttcatctttaacctggcagaaactgctcacatgccttcaaaagtgaaagctcaactctacgctcaagcatatgacgtatgttacacttttatatgtagatatagatatatttggtgggaaggtgatggtgattgttcagaatggatagagggtatatcacattagaatttttattattttatttctctcaatttgggtggtataaagcagcacatatgaacaaatcctcagttgtatcacagtatccaaagtaaatggctgtggtaggcagaataatacctcccacccaaaaaagatgtctagtcctaatctccacaacctgtgaatatgttacctatgtaacaaagcagggggtggtggggattaagttaggtgtcttgagacagggggttaccccagattatccaggtgggcccaacataatcataaaggtcctcatgaaagggaagcaggcaggtcagagtca

SEQ ID NO: 359687 - DNA, 3243 bp, Homo sapiens
gacccggaagccgccgtggccgccgcacaagctgcgctcgtctctcggctggggagctccgtgtcgcaccgggttcttgggctggccgtgtccttctccctcggtcgccactggcccatgagtccccatggcgacggcaggggccaggcccaggggcgggcagtccgagtggggctgcggcgctccgggggcatccgcggcggcgtggcggtgttcgccgccgtggccgcagtgttcaccttcaccctgcccccttcggtaccggggggagactccggggaactgatcacagccgcacatgagcttggagttgcccatcctcctggctatcctttgttcactctggtggctaaactggcaattacactgtttccttttggttcaattgcctaccgcgtcaatcttctctgtggcttatttggagcagtagctgcatcattactttttttcaccgttttcaggctttctggctcatctgctggaggaatccttgctgcgggggtgttttcattttctcgtctaacatggcagtggtccattgcagcagaggtttttagcttaaacaatctctttgtggggctgcttatggctcttactgtacattttgaggaagcagcaactgctaaggagagatcaaaggtagctaaaattggtgctttctgctgtggccttagtttatgtaaccagcacacaataatactctatgttttgtgcataataccttggattctctttcaacttttaaaaaagaaggaactctccctgggctctttgttgaagttgagcctgtacttctctgctggtttgctgccctatgtccaccttcccatctcatcttaccttaatcacgcccggtggacctggggagaccagacaacactgcaaggatttttgacacattttctcagggaagaatatggaaccttcagcctggccaaatctgaaataggatccagtatgtctgaaatactgctttctcaagtaacaaatatgaggaccgaactctcattcaacatccaagcccttgcagtttgtgcaaatatatgtttagcaacaaagtggaacgattctggatgcagagcaatgcagtagtggccgtcctcgctggcattggtttggctgcagttgtgtctgagactaaccgagtgctgaatagcaatgggcttcagtgtctggaatggctttctgcaactctttttgtagtttaccaaatatattctaattacagtgtttgtgaccaaaggaccaactatgtgattgataagttcgcaaagaaccttctcacctctatgcctcatgatgcaattatcttactcagaggagatttgccaggaaattctctccgttacatgcattactgtgaggggttgaggcctgacatttcattagtggatcaggaaatgatgacttacgagtggtatttacccaagatggcaaagcacttgccaggtgtcaactttcctgggaaccggtggaatcctgtggaaggaatattacctagtggaatggtcacatttaatctttatcattttcttgaagtaaataaacaaaaagaaacatttgtttgcataggaattcatgaaggcgacccaacctggaaaaagaactattcactttggccatgggggtcttgtgacaaattagttcctttggagattgtattcaaccctgaggaatggattaaacttacaaaaagtatctataactggaccgaagaatatggaaggtttgatccatcttcttgggaatctgtggccaatgaagaaatgtggcaagcgaggatgaaaacaccgttcttcatctttaacctggcagaaactgctcacatgccttcaaaagtgaaagctcaactctacgctcaagcatatgacctttataaggagattgtctatttacaaaaggagcacccagtgaattggcacaagaactatgccatcgcctgtgagcggatgctgcgtcttcaggcaagagatgcagatcctgaagtgctgttatcggaaaccatcagacatttccgtctgtactctcagaaagcaccgaatgacccacagcaagctgatattttaggtgctctaaagcacctaagaaaagaactgcaaagtctgagaaataggaaaaatgtctgagacagcaaaatatgaaaaacctgctcatcgttcagcttccaaaattctgaagtctggaagtttttccttcaagaaaagaaactgcataaaaaatttaaaactaagtcatctcccagatataagtatcatggtccagcagtactgtttaatggggtattcagtgactaaggtctgctatttatgcaaaattctgtttatcccgtgttaccaaattaccatttcagtgagaagcttttgaaaagtcttctgacttccagtctttcaccagatgactgcactggattagattctagaagagaatgaaccattttcatataactaaatattggtcatgaactgtgtaagggccatgcttattgggatcagttttaaagttaaattcttttgatattaataccagaccaaagacattttctgtttcctggaaaaaaaaaatgaatcatgttaggctttaggtgagagtacattttttacaaagtagctatagttgttacatagtcttacacttcaagctaaacaccaaatgggtgatattttgaaaaaagtttgtgttttactgtcttagatcgttcttggaaatcactaaaaaaaaaaaaagttaatttgatgtttgcttatttcagttgcagaaactggcgagtaaaaaagattttgcatttacttaattaattttatatttatgttttatttctatttggactcagagatctagacccaataattagtaggctcctgctgccaaaatgcaaaggggaaaaaaaggcagggattgggggggatggggaagtggcccaataaattcatttctgttacaagcatcttttatacatattactaaagagaacatagtaagaaatgcaaataatagttctttattttattatgacagttaattaatagcaacctgttttaatgaataaagtcactcagagtccttcagcacttcctaagtagaggccagaatctgtagggcttcttttccccccaattgtatagctcctagactccaagcactatataggcccctgtatagaaatgctcactaatgaagagggagggctagaagcttgtctgcattcaaagatcactggtgagtcattcagcaagaaaaggcccc

SEQ ID NO: 359688 - DNA, 3358 bp, Homo sapiens
  misc_feature (1120)..(1120): n is a, c, g, or t
gacccggaagccgccgtggccgccgcacaagctgcgctcgtctctcggctggggagctccgtgtcgcaccgggttcttgggctggccgtgtccttctccctcggtcgccactggcccatgagtccccatggcgacggcaggggccaggcccaggggcgggcagtccgagtggggctgcggcgctccgggggcatccgcggcggcgtggcggtgttcgccgccgtggccgcagtgttcaccttcaccctgcccccttcggtaccggggggagactccggggaactgatcacagccgcacatgagcttggagttgcccatcctcctggctatcctttgttcactctggtggctaaactggcaattacactgtttccttttggttcaattgcctaccgcgtcaatcttctctgtggcttatttggagcagtagctgcatcattactttttttcaccgttttcaggctttctggctcatctgctggaggaatccttgctgcgggggtgttttcattttctcgtctaacatggcagtggtccattgcagcagaggtttttagcttaaacaatctctttgtggggctgcttatggctcttactgtacattttgaggaagcagcaactgctaaggagagatcaaaggtagctaaaattggtgctttctgctgtggccttagtttatgtaaccagcacacaataatactctatgttttgtgcataataccttggattctctttcaacttttaaaaaagaaggaactctccctgggctctttgttgaagttgagcctgtacttctctgctggtttgctgccctatgtccaccttcccatctcatcttaccttaatcacgcccggtggacctggggagaccagacaacactgcaaggatttttgacacattttctcagggaagaatatggaaccttcagcctggccaaatctgaaataggatccagtatgtctgaaatactgctttctcaagtaacaaatatgaggaccgaactctcattcaacatccaagcccttgcagtttgtgcaaatatatgtttagcaacaaaggacagacagaatccatcattagtatggctttttactggaatgttttgcatttattcattgntctttgcttggagagcaaatttagatatttcaaaaccacttttcatgggtgtggtggaacgattctggatgcagagcaatgcagtagtggccgtcctcgctggcattggtttggctgcagttgtgtctgagactaaccgagtgctgaatagcaatgggcttcagtgtctggaatggctttctgcaactctttttgtagtttaccaaatatattctaattacagtgtttgtgaccaaaggaccaactatgtgattgataagttcgcaaagaaccttctcacctctatgcctcatgatgcaattatcttactcagaggagatttgccaggaaattctctccgttacatgcattactgtgaggggttgaggcctgacatttcattagtggatcaggaaatgatgacttacgagtggtatttacccaagatggcaaagcacttgccaggtgtcaactttcctgggaaccggtggaatcctgtggaaggaatattacctagtggaatggtcacatttaatctttatcattttcttgaagtaaataaacaaaaagaaacatttgtttgcataggaattcatgaaggcgacccaacctggaaaaagaactattcactttggccatgggggtcttgtgacaaattagttcctttggagattgtattcaaccctgaggaatggattaaacttacaaaaagtatctataactggaccgaagaatatggaaggtttgatccatcttcttgggaatctgtggccaatgaagaaatgtggcaagcgaggatgaaaacaccgttcttcatctttaacctggcagaaactgctcacatgccttcaaaagtgaaagctcaactctacgctcaagcatatgacctttataaggagattgtctatttacaaaaggagcacccagtgaattggcacaagaactatgccatcgcctgtgagcggatgctgcgtcttcaggcaagagatgcagatcctgaagtgctgttatcggaaaccatcagacatttccgtctgtactctcagaaagcaccgaatgacccacagcaagctgatattttaggtgctctaaagcacctaagaaaagaactgcaaagtctgagaaataggaaaaatgtctgagacagcaaaatatgaaaaacctgctcatcgttcagcttccaaaattctgaagtctggaagtttttccttcaagaaaagaaactgcataaaaaatttaaaactaagtcatctcccagatataagtatcatggtccagcagtactgtttaatggggtattcagtgactaaggtctgctatttatgcaaaattctgtttatcccgtgttaccaaattaccatttcagtgagaagcttttgaaaagtcttctgacttccagtctttcaccagatgactgcactggattagattctagaagagaatgaaccattttcatataactaaatattggtcatgaactgtgtaagggccatgcttattgggatcagttttaaagttaaattcttttgatattaataccagaccaaagacattttctgtttcctggaaaaaaaaaatgaatcatgttaggctttaggtgagagtacattttttacaaagtagctatagttgttacatagtcttacacttcaagctaaacaccaaatgggtgatattttgaaaaaagtttgtgttttactgtcttagatcgttcttggaaatcactaaaaaaaaaaaaagttaatttgatgtttgcttatttcagttgcagaaactggcgagtaaaaaagattttgcatttacttaattaattttatatttatgttttatttctatttggactcagagatctagacccaataattagtaggctcctgctgccaaaatgcaaaggggaaaaaaaggcagggattgggggggatggggaagtggcccaataaattcatttctgttacaagcatcttttatacatattactaaagagaacatagtaagaaatgcaaataatagttctttattttattatgacagttaattaatagcaacctgttttaatgaataaagtcactcagagtccttcagcacttcctaagtagaggccagaatctgtagggcttcttttccccccaattgtatagctcctagactccaagcactatataggcccctgtatagaaatgctcactaatgaagagggagggctagaagcttgtctgcattcaaagatcactggtgagtcattcagcaagaaaaggcccc

SEQ ID NO: 359689 - DNA, 1800 bp, Homo sapiens
gacccggaagccgccgtggccgccgcacaagctgcgctcgtctctcggctggggagctccgtgtcgcaccgggttcttgggctggccgtgtccttctccctcggtcgccactggcccatgagtccccatggcgacggcaggggccaggcccaggggcgggcagtccgagtggggctgcggcgctccgggggcatccgcggcggcgtggcggtgttcgccgccgtggccgcagtgttcaccttcaccctgcccccttcggtaccggggggagactccggggaactgatcacagccgcacatgagcttggagttgcccatcctcctggctatcctttgttcactctggtggctaaactggcaattacactgtttccttttggttcaattgcctaccgcgtcaatcttctctgtggcttatttggagcagtagctgcatcattactttttttcaccgttttcaggctttctggctcatctgctggaggaatccttgctgcgggggtgttttcattttctcgtctaacatggcagtggtccattgcagcagaggtttttagcttaaacaatctctttgtggggctgcttatggctcttactgtacattttgaggaagcagcaactgctaaggagagatcaaaggtagctaaaattggtgctttctgctgtggccttagtttatgtaaccagcacacaataatactctatgttttgtgcataataccttggattctctttcaacttttaaaaaagaaggaactctccctgggctctttgttgaagttgagcctgtacttctctgctggtttgctgccctatgtccaccttcccatctcatcttaccttaatcacgcccggtggacctggggagaccagacaacactgcaaggatttttgacacattttctcagggaagaatatggaaccttcagcctggccaaatctgaaataggatccagtatgtctgaaatactgctttctcaagtaacaaatatgaggaccgaactctcattcaacatccaagcccttgcagtttgtgcaaatatatgtttagcaacaaagtggaacgattctggatgcagagcaatgcagtagtggccgtcctcgctggcattggtttggctgcagttgtgtctgagactaaccgagtgctgaatagcaatgggcttcagtgtctggaatggctttctgcaactctttttgtagtttaccaaatatattctaattacaggtaatacatggttatttttatgaaaagtagctgtcaagccagagatacctgaatatttagattctaacactttatttcattgttaacttctggttttcaagactcaaagtgagacagcttggttgaatgcagtagttctttaacttttagggtcgttaaacctaaaagttaaagcatgggcgatgaatggtttcaggccattgcaaacaagggtttaggtggtgcgtgtagacaatttgtatctttttctcttaagaacccaagagatacttttagaatccctagtataggtaaaattccatgacctaaaataccacttagatggagagtaaaatgatttagagttttttgtataccctaaaataattcactttatgcttccctttatgtccagtttactctgtagtagtaaatactaatttttttgagacaaggtcttattctgtcccctaggctggagtacagtggcatgatcgtagcttactacagccgtgaaattctgggctcaagcagtcctctgcctcagcctcctcagtagctaggactatggacacatgccaccattagcatgc

SEQ ID NO: 359690 - DNA, 4049 bp, Homo sapiens
ggcgtctgggaagtgaggagcgtctctgcctggcagaggctgcaatctctgcactttggggggccaaggcaggcgctgagaaggacgcgcagtccatctctctcagggttagtgaaatgaggctctccgcccgggccggcccggggacagtgcgctgctggtcccagcatgaatgcgggccccggctgtgaaccctgcaccaagcgaccccgctggggcgccgctacaacttcgccggctgcttcggacgcccggagctttcccagcaggcagaggcgcgtcctcgaccccaaggacgctcacgtgcagttcagggtcccaccgtcctcgccagcctgcgtcccagggcaggcgggacagcacagaggcagcgccacctcgcttgttttcaaacaaaagactattaccagttggatggacactaaaggaatcaagacagcggaatcagaaagtttggatagtaaagaaaacaacaatacaagaatagaatccatgatgagttctgtacaaaaagataacttttaccaacataatgtagaaaaattagaaaatgtttctcagctaagtcttgataagtcactcactgaaaaaagtacacagtatttgaaccagcatcagactgcagcaatgtgtaagtggcaaaatgaagggaaacacacggagcagcttttggaaagtgaacctcaaacagtaaccctggtaccagagcagtttagtaatgctaacattgatcggtcacctcaaaatgatgatcacagtgacacagatagtgaagagaatagagacaatcaacagtttctcacaactgtaaagcttgcaaatgcaaagcagactacggaagatgaacacgccagagaagccaaaagccaccagaagtgcagcaagtcttgccatcctggggaagactgtgcaagttgtcagcaagatgagatagacgtggtgccaaagagtccattgtcagatgttggctctgaggatgttggtactgggtcaaaaaatgacaacaaattgattagacaagaaagttgcctaggaaattctcctccatttgagaaggaaagtgaacccgaatcaccgatggatgtggataattctaaaaatagttgtcaagactcagaagcagatgaggagacaagtccaggttttgatgaacaagaagatggtagttcctcccaaacagcaaataaaccttcaaggttccaagcaagagacgctgacattgaatttaggaaacggtactctactaagggcggtgaagttagattacatttccaatttgaaggaggagagagtcgcactggaatgaatgatttaaatgctaaactacctggaaatatttctagcctgaatgtagaatgcagaaattctaagcaacatggaaaaaaggattctaaaatcacagatcatttgatgagactgcccaaagcagaggacagaagaaaagaacagtgggaaaccaaacatcaaagaacagaaaggaagatccctaaatacgttccacctcacctttctccagataagaagtggcttggaactcccattgaggagatgagaagaatgcctcggtgtgggatccggctgcctctcttgagaccatctgccaatcacacagtaactattcgggtagatcttttgcgagcaggagaagttcctaaaccttttccaacacattataaagatttgtgggataacaagcatgttaaaatgccttgttcagaacaaaatttgtacccagtggaagatgagaatggtgagcgaactgcggggagccggtgggagctcattcagactgcacttctcaacaaatttacacgaccccaaaacttgaaggatgctattctgaaatacaatgtggcatattctaagaaatgggactttacagctttgatcgatttctgggataaggtacttgaagaagcagaagctcaacatttatatcagtccatcttgcctgatatggtgaaaattgcactctgtctgccaaatatttgcacccagccaataccactcctgaaacagaagatgaatcattccatcacaatgtcgcaggaacagattgccagtcttttagctaatgctttcttctgcacatttccacgacgaaatgctaagatgaaatcggagtattctagttacccagacattaacttcaatcgattgtttgagggacgttcatcaaggaaaccggagaaacttaaaacgctcttctgctactttagaagagtcacagagaaaaaacctactgggttggtgacatttacaagacagagtcttgaagattttccagaatgggaaagatgtgaaaaacccttgacacgattgcatgtcacttacgaaggtaccatagaagaaaatggccaaggcatgctacaggtggattttgcaaatcgttttgttggaggtggtgtaaccagtgcaggacttgtgcaagaagaaatccgctttttaatcaatcctgagttgattatttcacggctcttcactgaggtgctggatcacaatgaatgtctaattatcacaggtactgagcagtacagtgaatacacaggctatgctgagacatatcgttggtcccggagccacgaagatgggagtgaaagggacgactggcagcggcgctgcactgagatcgttgccatcgatgctcttcacttcagacgctacctcgatcagtttgtgcctgagaaaatgagacgcgagctgaacaaggcttactgtggatttctccgtcctggagtttcttcagagaatctttctgcagtggccacaggaaactggggctgtggtgcctttgggggtgatgccaggttaaaagccttaatacagatattggcagctgctgcagctgagcgagatgtggtttatttcacctttggggactcagaattgatgagagacatttacagcatgcacattttccttactgaaaggaaactcactgttggagatgtgtataagctgttgctacgatactacaatgaagaatgcagaaactgttccacccctggaccagacatcaagctttatccattcatataccatgctgtcgagtcctgtgcagagaccgctgaccattcagggcaaaggacagggacctgaggagccgagcgaatagcatctcctcccacctcccaccagagacgtcctgtttgagctgtcaggtgtaatatatgaattgacttaagttaatataaatgtgtacataatccacatttgtagtcaaggacgcaatctcttccacacatgtgcagttgtcagttggtacatctaaactccctccatcctgactcacgtggacttagatatgttttgtttctattttcttctatttcagtttttcattctttgatgtttatttcttttgtccatcagatctcttgtgaaatcccatggaaggttgtgctcagcctgtcgggtctctttcttcctgcccatatattataccagttgcttctgcagcccgcagatgccagcgatgccaggaaacaagttgaaatccaggaatctctttaactgattttgctaaaaatctccctgtgagccttccactcaactcttaatatgcttgcattgtttaagtttttaaattctgaaaattaataattagggtttttttcatatgtgttgcataatgcaaacctcctaggttaaaatagtttctttatttaagatagaataatttccagaaattgtacttttgaggtatcatttttatctgtaatggtttgtctgtcttttttcctctgatcagtatttttttataccagttttggagactggctgagatgaaaggaaatgtggaataaaaggaggttttcctgatgtggtgtaaagaaaacagattcaagagaattgaagattttttttgtttcttggtacttttttctttttaaattaggactaatgtttcttttgtggtgcttgaggcatattcatataaccaaagtttgagaactgggaacttcatgctgatttgtacatattgaagtttctctggtattcaaaggttatatagtgaatgaattttcattaataaatcactttgtcag

SEQ ID NO: 359691 - DNA, 998 bp, Homo sapiens
cggttcccgttaagcgccacacttccgctttgcggcaatgtgcgccccggaagctggaagcgcctgacggcagctttccggtggtgggaaagtgaacgaatcccgaatcaaagcggcgcattgaggcaggtggggtgccagtggaagagggaaggcaggcgagtgtttacggcctgacttgggaggccggcggatcagcaattgcagaagcaggcagcggcagagagggaatggtgcaggcaggcgctgagaaggacgcgcagtccatctctctcagggttagtgaaatgaggctctccgcccgggccggcccggggacagtgcgctgctggtcccagcatgaatgcgggccccggctgtgaaccctgcaccaagcgaccccgctggggcgccgctacaacttcgccggctgcttcggacgcccggagctttcccagcaggcagaggcgcgtcctcgaccccaaggacgctcacgtgcagttcagggtcccaccgtcctcgccagcctgcgtcccagggcaggcgggacagcacagaggcagcgccacctcgcttggtacgtgggaaaataaaaatctttgtccttcgcctcggcccgaaccttctggtctcagggactccagtcactcctttctggtcttgtgtgcatcatcactctgaggtccacttgctgagctaccaaagccactagtgggtgaatggggccgcatttttcccagtgcgattgatgtgagaaactctgatgagcagtcactcacagggcggaaaatggcaggagactccaccacctgtttgcttcttcaggtttgattgagaaattgccttagtcgtcaaggagatctaattgtgtatgtaaaacagtagggcgcttcagcctctagataggaagaaaacaacttcacttgtgcagattctgggtcccagggtgcagagctattagtctaagctggcattgtacccgtccctggtatacagtgttgaatgagagaaacttggcc

SEQ ID NO: 359692 - DNA, 746 bp, Homo sapiens
cggttcccgttaagcgccacacttccgctttgcggcaatgtgcgccccggaagctggaagcgcctgacggcagctttccggtggtgggaaagtgaacgaatcccgaatcaaacctgcaccaagcgaccccgctggggcgccgctacaacttcgccggctgcttcggacgcccggagctttcccagcaggcagaggcgcgtcctcgaccccaaggacgctcacgtgcagttcagggtcccaccgtcctcgccagcctgcgtcccagggcaggcgggacagcacagaggcagcgccacctcgcttggtacgtgggaaaataaaaatctttgtccttcgcctcggcccgaaccttctggtctcagggactccagtcactcctttctggtcttgtgtgcatcatcactctgaggtccacttgctgagctaccaaagccactagtgggtgaatggggccgcatttttcccagtgcgattgatgtgagaaactctgatgagcagtcactcacagggcggaaaatggcaggagactccaccacctgtttgcttcttcaggtttgattgagaaattgccttagtcgtcaaggagatctaattgtgtatgtaaaacagtagggcgcttcagcctctagataggaagaaaacaacttcacttgtgcagattctgggtcccagggtgcagagctattagtctaagctggcattgtacccgtccctggtatacagtgttgaatgagagaaacttggcc

SEQ ID NO: 359693 - DNA, 4254 bp, Homo sapiens
cggttcccgttaagcgccacacttccgctttgcggcaatgtgcgccccggaagctggaagcgcctgacggcagctttccggtggtgggaaagtgaacgaatcccgaatcaaagcggcgcattgaggcaggtggggtgccagtggaagagggaaggcagttttcaaacaaaagactattaccagttggatggacactaaaggaatcaagacagcggaatcagaaagtttggatagtaaagaaaacaacaatacaagaatagaatccatgatgagttctgtacaaaaagataacttttaccaacataatgtagaaaaattagaaaatgtttctcagctaagtcttgataagtcactcactgaaaaaagtacacagtatttgaaccagcatcagactgcagcaatgtgtaagtggcaaaatgaagggaaacacacggagcagcttttggaaagtgaacctcaaacagtaaccctggtaccagagcagtttagtaatgctaacattgatcggtcacctcaaaatgatgatcacagtgacacagatagtgaagagaatagagacaatcaacagtttctcacaactgtaaagcttgcaaatgcaaagcagactacggaagatgaacacgccagagaagccaaaagccaccagaagtgcagcaagtcttgccatcctggggaagactgtgcaagttgtcagcaagatgagatagacgtggtgccaaagagtccattgtcagatgttggctctgaggatgttggtactgggtcaaaaaatgacaacaaattgattagacaagaaagttgcctaggaaattctcctccatttgagaaggaaagtgaacccgaatcaccgatggatgtggataattctaaaaatagttgtcaagactcagaagcagatgaggagacaagtccaggttttgatgaacaagaagatggtagttcctcccaaacagcaaataaaccttcaaggttccaagcaagagacgctgacattgaatttaggaaacggtactctactaagggcggtgaagttagattacatttccaatttgaaggaggagagagtcgcactggaatgaatgatttaaatgctaaactacctggaaatatttctagcctgaatgtagaatgcagaaattctaagcaacatggaaaaaaggattctaaaatcacagatcatttgatgagactgcccaaagcagaggacagaagaaaagaacagtgggaaaccaaacatcaaagaacagaaaggaagatccctaaatacgttccacctcacctttctccagataagaagtggcttggaactcccattgaggagatgagaagaatgcctcggtgtgggatccggctgcctctcttgagaccatctgccaatcacacagtaactattcgggtagatcttttgcgagcaggagaagttcctaaaccttttccaacacattataaagatttgtgggataacaagcatgttaaaatgccttgttcagaacaaaatttgtacccagtggaagatgagaatggtgagcgaactgcggggagccggtgggagctcattcagactgcacttctcaacaaatttacacgaccccaaaacttgaaggatgctattctgaaatacaatgtggcatattctaagaaatgggactttacagctttgatcgatttctgggataaggtacttgaagaagcagaagctcaacatttatatcagtccatcttgcctgatatggtgaaaattgcactctgtctgccaaatatttgcacccagccaataccactcctgaaacagaagatgaatcattccatcacaatgtcgcaggaacagattgccagtcttttagctaatgctttcttctgcacatttccacgacgaaatgctaagatgaaatcggagtattctagttacccagacattaacttcaatcgattgtttgagggacgttcatcaaggaaaccggagaaacttaaaacgctcttctgctactttagaagagtcacagagaaaaaacctactgggttggtgacatttacaagacagagtcttgaagattttccagaatgggaaagatgtgaaaaacccttgacacgattgcatgtcacttacgaaggtaccatagaagaaaatggccaaggcatgctacaggtggattttgcaaatcgttttgttggaggtggtgtaaccagtgcaggacttgtgcaagaagaaatccgctttttaatcaatcctgagttgattatttcacggctcttcactgaggtgctggatcacaatgaatgtctaattatcacaggtactgagcagtacagtgaatacacaggctatgctgagacatatcgttggtcccggagccacgaagatgggagtgaaagggacgactggcagcggcgctgcactgagatcgttgccatcgatgctcttcacttcagacgctacctcgatcagtttgtgcctgagaaaatgagacgcgagctgaacaaggcttactgtggatttctccgtcctggagtttcttcagagaatctttctgcagtggccacaggaaactggggctgtggtgcctttgggggtgatgccaggttaaaagccttaatacagatattggcagctgctgcagctgagcgagatgtggtttatttcacctttggggactcagaattgatgagagacatttacagcatgcacattttccttactgaaaggaaactcactgttggagatgtgtataagctgttgctacgatactacaatgaagaatgcagaaactgttccacccctggaccagacatcaagctttatccattcatataccatgctgtcgagtcctgtgcagagaccgctgaccattcagggcaaaggacagggacctgaggagccgagcgaatagcatctcctcccacctcccaccagagacgtcctgtttgagctgtcaggtgtaatatatgaattgacttaagttaatataaatgtgtacataatccacatttgtagtcaaggacgcaatctcttccacacatgtgcagttgtcagttggtacatctaaactccctccatcctgactcacgtggacttagatatgttttgtttctattttcttctatttcagtttttcattctttgatgtttatttcttttgtccatcagatctcttgtgaaatcccatggaaggttgtgctcagcctgtcgggtctctttcttcctgcccatatattataccagttgcttctgcagcccgcagatgccagcgatgccaggaaacaagttgaaatccaggaatctctttaactgattttgctaaaaatctccctgtgagccttccactcaactcttaatatgcttgcattgtttaagtttttaaattctgaaaattaataattagggtttttttcatatgtgttgcataatgcaaacctcctaggttaaaatagtttctttatttaagatagaataatttccagaaattgtacttttgaggtatcatttttatctgtaatggtttgtctgtcttttttcctctgatcagtatttttttataccagttttggagactggctgagatgaaaggaaatgtggaataaaaggaggttttcctgatgtggtgtaaagaaaacagattcaagagaattgaagattttttttgtttcttggtacttttttctttttaaattaggactaatgtttcttttgtggtgcttgaggcatattcatataaccaaagtttgagaactgggaacttcatgctgatttgtacatattgaagtttctctggtattcaaaggttatatagtgaatgaattttcattaataaatcactttgtcagaaactcccatatcatctatattttatatatgtatatataaacgtatgctctttaagtgtgtctatatgtgagcacataaaatctaaataaaattggactggtgggaaacaaaaaaaaaaaaaaaaaaaaggggggggggggtaaaattcctgggggggcccactttatacggcgtcccccgtctttttttgtaacaaggggccccataaagggaggggccgtatataaaaacgccaggaggacgggcgcgtgttaaacaacgtctctctgctgggaaagaccgctgcgtggggattcttggggaagggccctacttgtgggcggcgaccattgtggggcagcctcccagcaaaataataaggctgagggaatataattactgtgtcatgtggaccaccctattgtgcgctgagttgtcccgatgttggattg

SEQ ID NO: 359694 - DNA, 3113 bp, Homo sapiens
ctcgtgccgaattcggcacgaggaatcggcggcgcattgaggcaggtggggtgccagtggaagagggaaggcaggcgagtgtttacggcctgacttgggaggccggcggatcagcaattgcagaagcaggcagcggcagagagggaatggtgcaggcaggcgctgagaaggacgcgcagtccatctctctcaggaaaagaacagtgggaaaccaaacatcaaagaacagaaaggaagatccctaaatacgttccacctcacctttctccagataagaagtggcttggaactcccattgaggagatgagaagaatgcctcggtgtgggatccggctgcctctcttgagaccatctgccaatcacacagtaactattcggaatggtgagcgaactgcggggagccggtgggagctcattcagactgcacttctcaacaaatttacacgaccccaaaacttgaaggatgctattctgaaatacaatgtggcatattctaagaaatgggactttacagctttgatcgatttctgggataaggtacttgaagaagcagaagctcaacatttatatcagtccatcttgcctgatatggtgaaaattgcactctgtctgccaaatatttgcacccagccaataccactcctgaaacagaagatgaatcattccatcacaatgtcgcaggaacagattgccagtcttttagctaatgctttcttctgcacatttccacgacgaaatgctaagatgaaatcggagtattctagttacccagacattaacttcaatcgattgtttgagggacgttcatcaaggaaaccggagaaacttaaaacgctcttctgctactttagaagagtcacagagaaaaaacctactgggttggtgacatttacaagacagagtcttgaagattttccagaatgggaaagatgtgaaaaacccttgacacgattgcatgtcacttacgaaggtaccatagaagaaaatggccaaggcatgctacaggtggattttgcaaatcgttttgttggaggtggtgtaaccagtgcaggacttgtgcaagaagaaatccgctttttaatcaatcctgagttgattatttcacggctcttcactgaggtgctggatcacaatgaatgtctaattatcacaggtactgagcagtacagtgaatacacaggctatgctgagacatatcgttggtcccggagccacgaagatgggagtgaaagggacgactggcagcggcgctgcactgagatcgttgccatcgatgctcttcacttcagacgctacctcgatcagtttgtgcctgagaaaatgagacgcgagctgaacaaggcttactgtggatttctccgtcctggagtttcttcagagaatctttctgcagtggccacaggaaactggggctgtggtgcctttgggggtgatgccaggttaaaagccttaatacagatattggcagctgctgcagctgagcgagatgtggtttatttcacctttggggactcagaattgatgagagacatttacagcatgcacattttccttactgaaaggaaactcactgttggagatgtgtataagctgttgctacgatactacaatgaagaatgcagaaactgttccacccctggaccagacatcaagctttatccattcatataccatgctgtcgagtcctgtgcagagaccgctgaccattcagggcaaaggacagggacctgaggagccgagcgaatagcatctcctcccacctcccaccagagacgtcctgtttgagctgtcaggtgtaatatatgaattgacttaagttaatataaatgtgtacataatccacatttgtagtcaaggacgcaatctcttccacacatgtgcagttgtcagttggtacatctaaactccctccatcctgactcacgtggacttagatatgttttgtttctattttcttctatttcagtttttcattctttgatgtttatttcttttgtccatcagatctcttgtgaaatcccatggaaggttgtgctcagcctgtcgggtctctttcttcctgcccatatattataccagttgcttctgcagcccgcagatgccagcgatgccaggaaacaagttgaaatccaggaatctctttaactgattttgctaaaaatctccctgtgagccttccactcaactcttaatatgcttgcattgtttaagtttttaaattctgaaaattaataattagggtttttttcatatgtgttgcataatgcaaacctcctaggttaaaatagtttctttatttaagatagaataatttccagaaattgtacttttgaggtatcatttttatctgtaatggtttgtctgtcttttttcctctgatcagtatttttttataccagttttggagactggctgagatgaaaggaaatgtggaataaaaggaggttttcctgatgtggtgtaaagaaaacagattcaagagaattgaagattttttttgtttcttggtacttttttctttttaaattaggactaatgtttcttttgtggtgcttgaggcatattcatataaccaaagtttgagaactgggaacttcatgctgatttgtacatattgaagtttctctggtattcaaaggttatatagtgaatgaattttcattaataaatcactttgtcagaaactcccatatcatctatattttatatatgtatatataaacgtatgctctttaagtgtgtctatatgtgagcacataaaatctaaataaaattggactggtgggaaacaaaaaaaaaaaaaaaaaaaaggggggggggggtaaaattcctgggggggcccactttatacggcgtcccccgtctttttttgtaacaaggggccccataaagggaggggccgtatataaaaacgccaggaggacgggcgcgtgttaaacaacgtctctctgctgggaaagaccgctgcgtggggattcttggggaagggccctacttgtgggcggcgaccattgtggggcagcctcccagcaaaataataaggctgagggaatataattactgtgtcatgtggaccaccctattgtgcgctgagttgtcccgatgttggattg

SEQ ID NO: 359695 - DNA, 2360 bp, Homo sapiens
agcaagcgccccgcgccgcgcaactccaagaccaactctgcctacgcacagcaccaggcagcggcagagagggaatggtgcaggcaggcgctgagaaggacgcgcagtccatctctctcagggttagtgaaatgaggctctccgcccgggccggcccggggacagtgcgctgctggtcccagcatgaatgcgggccccggctgtgaaccctgcaccaagcgaccccgctggggcgccgctacaacttcgccggctgcttcggacgcccggagctttcccagcaggcagaggcgcgtcctcgaccccaaggacgctcacgtgcagttcagggtcccaccgtcctcgccagcctgcgtcccagggcaggcgggacagcacagaggcagcgccacctcgcttggtactgagcagtacagtgaatacacaggctatgctgagacatatcgttggtcccggagccacgaagatgggagtgaaagggacgactggcagcggcgctgcactgagatcgttgccatcgatgctcttcacttcagacgctacctcgatcagtttgtgcctgagaaaatgagacgcgagctgaacaaggcttactgtggatttctccgtcctggagtttcttcagagaatctttctgcagtggccacaggaaactggggctgtggtgcctttgggggtgatgccaggttaaaagccttaatacagatattggcagctgctgcagctgagcgagatgtggtttatttcacctttggggactcagaattgatgagagacatttacagcatgcacattttccttactgaaaggaaactcactgttggagatgtgtataagctgttgctacgatactacaatgaagaatgcagaaactgttccacccctggaccagacatcaagctttatccattcatataccatgctgtcgagtcctgtgcagagaccgctgaccattcagggcaaaggacagggacctgaggagccgagcgaatagcatctcctcccacctcccaccagagacgtcctgtttgagctgtcaggtgtaatatatgaattgacttaagttaatataaatgtgtacataatccacatttgtagtcaaggacgcaatctcttccacacatgtgcagttgtcagttggtacatctaaactccctccatcctgactcacgtggacttagatatgttttgtttctattttcttctatttcagtttttcattctttgatgtttatttcttttgtccatcagatctcttgtgaaatcccatggaaggttgtgctcagcctgtcgggtctctttcttcctgcccatatattataccagttgcttctgcagcccgcagatgccagcgatgccaggaaacaagttgaaatccaggaatctctttaactgattttgctaaaaatctccctgtgagccttccactcaactcttaatatgcttgcattgtttaagtttttaaattctgaaaattaataattagggtttttttcatatgtgttgcataatgcaaacctcctaggttaaaatagtttctttatttaagatagaataatttccagaaattgtacttttgaggtatcatttttatctgtaatggtttgtctgtcttttttcctctgatcagtatttttttataccagttttggagactggctgagatgaaaggaaatgtggaataaaaggaggttttcctgatgtggtgtaaagaaaacagattcaagagaattgaagattttttttgtttcttggtacttttttctttttaaattaggactaatgtttcttttgtggtgcttgaggcatattcatataaccaaagtttgagaactgggaacttcatgctgatttgtacatattgaagtttctctggtattcaaaggttatatagtgaatgaattttcattaataaatcactttgtcagaaactcccatatcatctatattttatatatgtatatataaacgtatgctctttaagtgtgtctatatgtgagcacataaaatctaaataaaattggactggtgggaaacaaaaaaaaaaaaaaaaaaaaggggggggggggtaaaattcctgggggggcccactttatacggcgtcccccgtctttttttgtaacaaggggccccataaagggaggggccgtatataaaaacgccaggaggacgggcgcgtgttaaacaacgtctctctgctgggaaagaccgctgcgtggggattcttggggaagggccctacttgtgggcggcgaccattgtggggcagcctcccagcaaaataataaggctgagggaatataattactgtgtcatgtggaccaccctattgtgcgctgagttgtcccgatgttggattg

SEQ ID NO: 359696 - DNA, 2627 bp, Homo sapiens
aagcctgttacagtctgatcacttcagaaaataagaatttagaaagaaggcagaaagaccaactagctgacagcaaagaggtggaaatcaggaactctgggatcttacacaatggtcttctcatatagaaaatgagctgttcatttaattaatatttagccagcatcttcagaatatattgtacttttctcacattactggcaagtttttaaatattctagcttaaaacagagctgtgaaactagagaatcttagagccaaaaggcatcttaaaggttatttcataaccaggtataggaatcccttctatagatagttgcttgctctttgttaagtatgtcagtagcaggaagcacatttattaatctaatctccataactgagagagagaatgctgaggaggcataatagtgaccctttgcctgatgaaaaaaatagtgattaaagccttcaaagaaaaagaaaactgttctaacaagtccctttcctggtagtttttcctagtagtttataattgggatcctattagttcttgaaatatctgctattttcatttctgtttgtttgaagtggaaaaataaattgggacctgtattagtttaagggattttatgtgcttagcattcaaacaaataaatattagaatttatcatttcttagtctcttccttgcataatcccaggtttttctctccctttctccctctttgtttttccctctattttggcccctatggaaaaaaaaaatgagaaattgaacataagcttgataatggacactgatcctagtacatcagtcagaaacactgttagtgtctaggcactcacaggctttgataattcttttatcctgcaggcttactgtggatttctccgtcctggagtttcttcagagaatctttctgcagtggccacaggaaactggggctgtggtgcctttgggggtgatgccaggttaaaagccttaatacagatattggcagctgctgcagctgagcgagatgtggtttatttcacctttggggactcagaattgatgagagacatttacagcatgcacattttccttactgaaaggaaactcactgttggagatgtgtataagctgttgctacgatactacaatgaagaatgcagaaactgttccacccctggaccagacatcaagctttatccattcatataccatgctgtcgagtcctgtgcagagaccgctgaccattcagggcaaaggacagggacctgaggagccgagcgaatagcatctcctcccacctcccaccagagacgtcctgtttgagctgtcaggtgtaatatatgaattgacttaagttaatataaatgtgtacataatccacatttgtagtcaaggacgcaatctcttccacacatgtgcagttgtcagttggtacatctaaactccctccatcctgactcacgtggacttagatatgttttgtttctattttcttctatttcagtttttcattctttgatgtttatttcttttgtccatcagatctcttgtgaaatcccatggaaggttgtgctcagcctgtcgggtctctttcttcctgcccatatattataccagttgcttctgcagcccgcagatgccagcgatgccaggaaacaagttgaaatccaggaatctctttaactgattttgctaaaaatctccctgtgagccttccactcaactcttaatatgcttgcattgtttaagtttttaaattctgaaaattaataattagggtttttttcatatgtgttgcataatgcaaacctcctaggttaaaatagtttctttatttaagatagaataatttccagaaattgtacttttgaggtatcatttttatctgtaatggtttgtctgtcttttttcctctgatcagtatttttttataccagttttggagactggctgagatgaaaggaaatgtggaataaaaggaggttttcctgatgtggtgtaaagaaaacagattcaagagaattgaagattttttttgtttcttggtacttttttctttttaaattaggactaatgtttcttttgtggtgcttgaggcatattcatataaccaaagtttgagaactgggaacttcatgctgatttgtacatattgaagtttctctggtattcaaaggttatatagtgaatgaattttcattaataaatcactttgtcagaaactcccatatcatctatattttatatatgtatatataaacgtatgctctttaagtgtgtctatatgtgagcacataaaatctaaataaaattggactggtgggaaacaaaaaaaaaaaaaaaaaaaaggggggggggggtaaaattcctgggggggcccactttatacggcgtcccccgtctttttttgtaacaaggggccccataaagggaggggccgtatataaaaacgccaggaggacgggcgcgtgttaaacaacgtctctctgctgggaaagaccgctgcgtggggattcttggggaagggccctacttgtgggcggcgaccattgtggggcagcctcccagcaaaataataaggctgagggaatataattactgtgtcatgtggaccaccctattgtgcgctgagttgtcccgatgttggattg

SEQ ID NO: 359697 - DNA, 1500 bp, Homo sapiens
gtggaaaatgtcatgatatagccgtgtcttttctctttgcctcagccttaatacagatattggcagctgctgcagctgagcgagatgtggtttatttcacctttggggactcagaattgatgagagacatttacagcatgcacattttccttactgaaaggaaactcactgttggagatgtgtataagctgttgctacgatactacaatgaagaatgcagaaactgttccacccctggaccagacatcaagctttatccattcatataccatgctgtcgagtcctgtgcagagaccgctgaccattcagggcaaaggacagggacctgaggagccgagcgaatagcatctcctcccacctcccaccagagacgtcctgtttgagctgtcagatctcttgtgaaatcccatggaaggttgtgctcagcctgtcgggtctctttcttcctgcccatatattataccagttgcttctgcagcccgcagatgccagcgatgccaggaaacaagttgaaatccaggaatctctttaactgattttgctaaaaatctccctgtgagccttccactcaactcttaatatgcttgcattgtttaagtttttaaattctgaaaattaataattagggtttttttcatatgtgttgcataatgcaaacctcctaggttaaaatagtttctttatttaagatagaataatttccagaaattgtacttttgaggtatcatttttatctgtaatggtttgtctgtcttttttcctctgatcagtatttttttataccagttttggagactggctgagatgaaaggaaatgtggaataaaaggaggttttcctgatgtggtgtaaagaaaacagattcaagagaattgaagattttttttgtttcttggtacttttttctttttaaattaggactaatgtttcttttgtggtgcttgaggcatattcatataaccaaagtttgagaactgggaacttcatgctgatttgtacatattgaagtttctctggtattcaaaggttatatagtgaatgaattttcattaataaatcactttgtcagaaactcccatatcatctatattttatatatgtatatataaacgtatgctctttaagtgtgtctatatgtgagcacataaaatctaaataaaattggactggtgggaaacaaaaaaaaaaaaaaaaaaaaggggggggggggtaaaattcctgggggggcccactttatacggcgtcccccgtctttttttgtaacaaggggccccataaagggaggggccgtatataaaaacgccaggaggacgggcgcgtgttaaacaacgtctctctgctgggaaagaccgctgcgtggggattcttggggaagggccctacttgtgggcggcgaccattgtggggcagcctcccagcaaaataataaggctgagggaatataattactgtgtcatgtggaccaccctattgtgcgctgagttgtcccgatgttggattg

SEQ ID NO: 359698 - DNA, 612 bp, Homo sapiens
  misc_feature (2)..(2): n is a, c, g, or t
gngacgagccggtccagattcaccggcaggactaatgtttcttttgtggtgcttgaggcatattcatataaccaaagtttgagaactgggaacttcatgctgatttgtacatattgaagtttctctggtattcaaaggttatatagtgaatgaattttcattaataaatcactttgtcagaaactcccatatcatctatattttatatatgtatatataaacgtatgctctttaagtgtgtctatatgtgagcacataaaatctaaataaaattggactggtgggaaacaaaaaaaaaaaaaaaaaaaaggggggggggggtaaaattcctgggggggcccactttatacggcgtcccccgtctttttttgtaacaaggggccccataaagggaggggccgtatataaaaacgccaggaggacgggcgcgtgttaaacaacgtctctctgctgggaaagaccgctgcgtggggattcttggggaagggccctacttgtgggcggcgaccattgtggggcagcctcccagcaaaataataaggctgagggaatataattactgtgtcatgtggaccaccctattgtgcgctgagttgtcccgatgttggattg

SEQ ID NO: 359699 - DNA, 816 bp, Homo sapiens
cggttcccgttaagcgccacacttccgctttgcggcaatgtgcgccccggaagctggaagcgcctgacggcagctttccggtggtgggaaagtgaacgaatcccgaatcaaagcggcgcattgaggcaggtggggtgccagtggaagagggaaggcaggcgagtgtttacggcctgacttgggaggccggcggatcagcaattgcagaagcaggcagcggcagagagggaatggtgcaggcaggcgctgagaaggacgcgcagtccatctctctcagggttagtgaaatgaggctctccgcccgggccggcccggggacagtgcgctgctggtcccagcatgaatgcgggccccggctgtgaaccctgcaccaagcgaccccgctggggcgccgctacaacttcgccggctgcttcggacgcccggagctttcccagcaggcagaggcgcgtcctcgaccccaaggacgctcacgtgcagttcagggtcccaccgtcctcgccagcctgcgtcccagggcaggcgggacagcacagaggcagcgccacctcgcttgcgtcagcctcgagtttgaccagcagcaggggtcggtgtgtccctctgaatctgagatctatgaggcaggagctggggacaggatggcaggagcgcccatgggtgctgctgtacagcctgctgaggtgactgttgaagttggtgaaggacctccacgatgcaccacgttcgtgaccgggagaatgcctgaagctttggagtataacctttctgccaatccagaggcaagcacaatattccagaggaactctcaaacagatg

SEQ ID NO: 359700 - DNA, 2111 bp, Homo sapiens
ctcgtgccgaattcggcacgaggaatcggcggcgcattgaggcaggtggggtgccagtggaagagggaaggcaggcgagtgtttacggcctgacttgggaggccggcggatcagcaattgcagaagcaggcagcggcagagagggaatggtgcaggcaggcgctgagaaggacgcgcagtccatctctctcagggttagtgaaatgaggctctccgcccgggccggcccggggacagtgcgctgctggtcccagcatgaatgcgggccccggctgtgaaccctgcaccaagcgaccccgctggggcgccgctacaacttcgccggctgcttcggacgcccggagctttcccagcaggcagaggcgcgtcctcgaccccaaggacgctcacgtgcagttcagggtcccaccgtcctcgccagcctgcgtcccagggcaggcgggacagcacagaggcagcgccacctcgcttggtactgagcagtacagtgaatacacaggctatgctgagacatatcgttggtcccggagccacgaagatgggagtgaaagggacgactggcagcggcgctgcactgagatcgttgccatcgatgctcttcacttcagacgctacctcgatcagtttgtgcctgagaaaatgagacgcgagctgaacaaggcttactgtggatttctccgtcctggagtttcttcagagaatctttctgcagtggccacaggaaactggggctgtggtgcctttgggggtgatgccaggttaaaagccttaatacagatattggcagctgctgcagctgagcgagatgtggtttatttcacctttggggactcagaattgatgagagacatttacagcatgcacattttccttactgaaaggaaactcactgttggagatgtgtataagctgttgctacgatactacaatgaagaatgcagaaactgttccacccctggaccagacatcaagctttatccattcatataccatgctgtcgagtcctgtgcagagaccgctgaccattcagggcaaaggacagggacctgaggagccgagcgaatagcatctcctcccacctcccaccagagacgtcctgtttgagctgtcaggtgtaatatatgaattgacttaagttaatataaatgtgtacataatccacatttgtagtcaaggacgcaatctcttccacacatgtgcagttgtcagttggtacatctaaactccctccatcctgactcacgtggacttagatatgttttgtttctattttcttctatttcagtttttcattctttgatgtttatttcttttgtccatcagatctcttgtgaaatcccatggaaggttgtgctcagcctgtcgggtctctttcttcctgcccatatattataccagttgcttctgcagcccgcagatgccagcgatgccaggaaacaagttgaaatccaggaatctctttaactgattttgctaaaaatctccctgtgagccttccactcaactcttaatatgcttgcattgtttaagtttttaaattctgaaaattaataattagggtttttttcatatgtgttgcataatgcaaacctcctaggttaaaatagtttctttatttaagatagaataatttccagaaattgtacttttgaggtatcatttttatctgtaatggtttgtctgtcttttttcctctgatcagtatttttttataccagttttggagactggctgagatgaaaggaaatgtggaataaaaggaggttttcctgatgtggtgtaaagaaaacagattcaagagaattgaagattttttttgtttcttggtacttttttctttttaaattaggactaatgtttcttttgtggtgcttgaggcatattcatataaccaaagtttgagaactgggaacttcatgctgatttgtacatattgaagtttctctggtattcaaaggttatatagtgaatgaattttcattaataaatcactttgtcagaaactcccatatcatctatattttatatatgtatatataaacgtatgctctttaagtgtgtctatatgtgagcacataaaatctaaataaaattggactggtgggaaacaa

SEQ ID NO: 359701 - DNA, 4568 bp, Homo sapiens
ctcgtgccgaattcggcacgaggaatcggcggcgcattgaggcaggtggggtgccagtggaagagggaaggcaggcgagtgtttacggcctgacttgggaggccggcggatcagcaattgcagaagcaggcagcggcagagagggaatggtgcaggcaggcgctgagaaggacgcgcagtccatctctctcagggttagtgaaatgaggctctccgcccgggccggcccggggacagtgcgctgctggtcccagcatgaatgcgggccccggctgtgaaccctgcaccaagcgaccccgctggggcgccgctacaacttcgccggctgcttcggacgcccggagctttcccagcaggcagaggcgcgtcctcgaccccaaggacgctcacgtgcagttcagggtcccaccgtcctcgccagcctgcgtcccagggcaggcgggacagcacagaggcagcgccacctcgcttgttttcaaacaaaagactattaccagttggatggacactaaaggaatcaagacagcggaatcagaaagtttggatagtaaagaaaacaacaatacaagaatagaatccatgatgagttctgtacaaaaagataacttttaccaacataatgtagaaaaattagaaaatgtttctcagctaagtcttgataagtcactcactgaaaaaagtacacagtatttgaaccagcatcagactgcagcaatgtgtaagtggcaaaatgaagggaaacacacggagcagcttttggaaagtgaacctcaaacagtaaccctggtaccagagcagtttagtaatgctaacattgatcggtcacctcaaaatgatgatcacagtgacacagatagtgaagagaatagagacaatcaacagtttctcacaactgtaaagcttgcaaatgcaaagcagactacggaagatgaacacgccagagaagccaaaagccaccagaagtgcagcaagtcttgccatcctggggaagactgtgcaagttgtcagcaagatgagatagacgtggtgccaaagagtccattgtcagatgttggctctgaggatgttggtactgggtcaaaaaatgacaacaaattgattagacaagaaagttgcctaggaaattctcctccatttgagaaggaaagtgaacccgaatcaccgatggatgtggataattctaaaaatagttgtcaagactcagaagcagatgaggagacaagtccaggttttgatgaacaagaagatggtagttcctcccaaacagcaaataaaccttcaaggttccaagcaagagacgctgacattgaatttaggaaacggtactctactaagggcggtgaagttagattacatttccaatttgaaggaggagagagtcgcactggaatgaatgatttaaatgctaaactacctggaaatatttctagcctgaatgtagaatgcagaaattctaagcaacatggaaaaaaggattctaaaatcacagatcatttgatgagactgcccaaagcagaggacagaagaaaagaacagtgggaaaccaaacatcaaagaacagaaaggaagatccctaaatacgttccacctcacctttctccagataagaagtggcttggaactcccattgaggagatgagaagaatgcctcggtgtgggatccggctgcctctcttgagaccatctgccaatcacacagtaactattcgggtagatcttttgcgagcaggagaagttcctaaaccttttccaacacattataaagatttgtgggataacaagcatgttaaaatgccttgttcagaacaaaatttgtacccagtggaagatgagaatggtgagcgaactgcggggagccggtgggagctcattcagactgcacttctcaacaaatttacacgaccccaaaacttgaaggatgctattctgaaatacaatgtggcatattctaagaaatgggactttacagctttgatcgatttctgggataaggtacttgaagaagcagaagctcaacatttatatcagtccatcttgcctgatatggtgaaaattgcactctgtctgccaaatatttgcacccagccaataccactcctgaaacagaagatgaatcattccatcacaatgtcgcaggaacagattgccagtcttttagctaatgctttcttctgcacatttccacgacgaaatgctaagatgaaatcggagtattctagttacccagacattaacttcaatcgattgtttgagggacgttcatcaaggaaaccggagaaacttaaaacgctcttctgctactttagaagagtcacagagaaaaaacctactgggttggtgacatttacaagacagagtcttgaagattttccagaatgggaaagatgtgaaaaacccttgacacgattgcatgtcacttacgaaggtaccatagaagaaaatggccaaggcatgctacaggtggattttgcaaatcgttttgttggaggtggtgtaaccagtgcaggacttgtgcaagaagaaatccgctttttaatcaatcctgagttgattatttcacggctcttcactgaggtgctggatcacaatgaatgtctaattatcacaggtactgagcagtacagtgaatacacaggctatgctgagacatatcgttggtcccggagccacgaagatgggagtgaaagggacgactggcagcggcgctgcactgagatcgttgccatcgatgctcttcacttcagacgctacctcgatcagtttgtgcctgagaaaatgagacgcgagctgaacaaggcttactgtggatttctccgtcctggagtttcttcagagaatctttctgcagtggccacaggaaactggggctgtggtgcctttgggggtgatgccaggttaaaagccttaatacagatattggcagctgctgcagctgagcgagatgtggtttatttcacctttggggactcagaattgatgagagacatttacagcatgcacattttccttactgaaaggaaactcactgttggagatgtgtataagctgttgctacgatactacaatgaagaatgcagaaactgttccacccctggaccagacatcaagctttatccattcatataccatgctgtcgagtcctgtgcagagaccgctgaccattcagggcaaaggacagggacctgaggagccgagcgaatagcatctcctcccacctcccaccagagacgtcctgtttgagctgtcaggtgtaatatatgaattgacttaagttaatataaatgtgtacataatccacatttgtagtcaaggacgcaatctcttccacacatgtgcagttgtcagttggtacatctaaactccctccatcctgactcacgtggacttagatatgttttgtttctattttcttctatttcagtttttcattctttgatgtttatttcttttgtccatcagatctcttgtgaaatcccatggaaggttgtgctcagcctgtcgggtctctttcttcctgcccatatattataccagttgcttctgcagcccgcagatgccagcgatgccaggaaacaagttgaaatccaggaatctctttaactgattttgctaaaaatctccctgtgagccttccactcaactcttaatatgcttgcattgtttaagtttttaaattctgaaaattaataattagggtttttttcatatgtgttgcataatgcaaacctcctaggttaaaatagtttctttatttaagatagaataatttccagaaattgtacttttgaggtatcatttttatctgtaatggtttgtctgtcttttttcctctgatcagtatttttttataccagttttggagactggctgagatgaaaggaaatgtggaataaaaggaggttttcctgatgtggtgtaaagaaaacagattcaagagaattgaagattttttttgtttcttggtacttttttctttttaaattaggactaatgtttcttttgtggtgcttgaggcatattcatataaccaaagtttgagaactgggaacttcatgctgatttgtacatattgaagtttctctggtattcaaaggttatatagtgaatgaattttcattaataaatcactttgtcagaaactcccatatcatctatattttatatatgtatatataaacgtatgctctttaagtgtgtctatatgtgagcacataaaatctaaataaaattggactggtgggaaacaaaaaaaaaaaaaaaaaaaaggggggggggggtaaaattcctgggggggcccactttatacggcgtcccccgtctttttttgtaacaaggggccccataaagggaggggccgtatataaaaacgccaggaggacgggcgcgtgttaaacaacgtctctctgctgggaaagaccgctgcgtggggattcttggggaagggccctacttgtgggcggcgaccattgtggggcagcctcccagcaaaataataaggctgagggaatataattactgtgtcatgtggaccaccctattgtgcgctgagttgtcccgatgttggattg

SEQ ID NO: 359702 - DNA, 4445 bp, Homo sapiens
ctcgtgccgaattcggcacgaggaatcggcggcgcattgaggcaggtggggtgccagtggaagagggaaggcaggcgagtgtttacggcctgacttgggaggccggcggatcagcaattgcagaagcaggcagcggcagagagggaatggtgcaggcaggcgctgagaaggacgcgcagtccatctctctcagggttagtgaaatgaggctctccgcccgggccggcccggggacagtgcgctgctggtcccagcatgaatgcgggccccggctgtgaaccctgcaccaagcgaccccgctggggcgccgctacaacttcgccggctgcttcggacgcccggagctttcccagcaggcagaggcgcgtcctcgaccccaaggacgctcacgtgcagttcagggtcccaccgtcctcgccagcctgcgtcccagggcaggcgggacagcacagaggcagcgccacctcgcttgttttcaaacaaaagactattaccagttggatggacactaaaggaatcaagacagcggaatcagaaagtttggatagtaaagaaaacaacaatacaagaatagaatccatgatgagttctgtacaaaaagataacttttaccaacataatgtagaaaaattagaaaatgtttctcagctaagtcttgataagtcactcactgaaaaaagtacacagtatttgaaccagcatcagactgcagcaatgtgtaagtggcaaaatgaagggaaacacacggagcagcttttggaaagtgaacctcaaacagtaaccctggtaccagagcagtttagtaatgctaacattgatcggtcacctcaaaatgatgatcacagtgacacagatagtgaagagaatagagacaatcaacagtttctcacaactgtaaagcttgcaaatgcaaagcagactacggaagatgaacacgccagagaagccaaaagccaccagaagtgcagcaagtcttgccatcctggggaagactgtgcaagttgtcagcaagatgagatagacgtggtgccaaagagtccattgtcagatgttggctctgaggatgttggtactgggtcaaaaaatgacaacaaattgattagacaagaaagttgcctaggaaattctcctccatttgagaaggaaagtgaacccgaatcaccgatggatgtggataattctaaaaatagttgtcaagactcagaagcagatgaggagacaagtccaggttttgatgaacaagaagatggtagttcctcccaaacagcaaataaaccttcaaggttccaagcaagagacgctgacattgaatttaggaaacggtactctactaagggcggtgaagttagattacatttccaatttgaaggaggagagagtcgcactggaatgaatgatttaaatgctaaactacctggaaatatttctagcctgaatgtagaatgcagaaattctaagcaacatggaaaaaaggattctaaaatcacagatcatttgatgagactgcccaaagcagaggacagaagaaaagaacagtgggaaaccaaacatcaaagaacagaaaggaagatccctaaatacgttccacctcacctttctccagataagaagtggcttggaactcccattgaggagatgagaagaatgcctcggtgtgggatccggctgcctctcttgagaccatctgccaatcacacagtaactattcggaatggtgagcgaactgcggggagccggtgggagctcattcagactgcacttctcaacaaatttacacgaccccaaaacttgaaggatgctattctgaaatacaatgtggcatattctaagaaatgggactttacagctttgatcgatttctgggataaggtacttgaagaagcagaagctcaacatttatatcagtccatcttgcctgatatggtgaaaattgcactctgtctgccaaatatttgcacccagccaataccactcctgaaacagaagatgaatcattccatcacaatgtcgcaggaacagattgccagtcttttagctaatgctttcttctgcacatttccacgacgaaatgctaagatgaaatcggagtattctagttacccagacattaacttcaatcgattgtttgagggacgttcatcaaggaaaccggagaaacttaaaacgctcttctgctactttagaagagtcacagagaaaaaacctactgggttggtgacatttacaagacagagtcttgaagattttccagaatgggaaagatgtgaaaaacccttgacacgattgcatgtcacttacgaaggtaccatagaagaaaatggccaaggcatgctacaggtggattttgcaaatcgttttgttggaggtggtgtaaccagtgcaggacttgtgcaagaagaaatccgctttttaatcaatcctgagttgattatttcacggctcttcactgaggtgctggatcacaatgaatgtctaattatcacaggtactgagcagtacagtgaatacacaggctatgctgagacatatcgttggtcccggagccacgaagatgggagtgaaagggacgactggcagcggcgctgcactgagatcgttgccatcgatgctcttcacttcagacgctacctcgatcagtttgtgcctgagaaaatgagacgcgagctgaacaaggcttactgtggatttctccgtcctggagtttcttcagagaatctttctgcagtggccacaggaaactggggctgtggtgcctttgggggtgatgccaggttaaaagccttaatacagatattggcagctgctgcagctgagcgagatgtggtttatttcacctttggggactcagaattgatgagagacatttacagcatgcacattttccttactgaaaggaaactcactgttggagatgtgtataagctgttgctacgatactacaatgaagaatgcagaaactgttccacccctggaccagacatcaagctttatccattcatataccatgctgtcgagtcctgtgcagagaccgctgaccattcagggcaaaggacagggacctgaggagccgagcgaatagcatctcctcccacctcccaccagagacgtcctgtttgagctgtcaggtgtaatatatgaattgacttaagttaatataaatgtgtacataatccacatttgtagtcaaggacgcaatctcttccacacatgtgcagttgtcagttggtacatctaaactccctccatcctgactcacgtggacttagatatgttttgtttctattttcttctatttcagtttttcattctttgatgtttatttcttttgtccatcagatctcttgtgaaatcccatggaaggttgtgctcagcctgtcgggtctctttcttcctgcccatatattataccagttgcttctgcagcccgcagatgccagcgatgccaggaaacaagttgaaatccaggaatctctttaactgattttgctaaaaatctccctgtgagccttccactcaactcttaatatgcttgcattgtttaagtttttaaattctgaaaattaataattagggtttttttcatatgtgttgcataatgcaaacctcctaggttaaaatagtttctttatttaagatagaataatttccagaaattgtacttttgaggtatcatttttatctgtaatggtttgtctgtcttttttcctctgatcagtatttttttataccagttttggagactggctgagatgaaaggaaatgtggaataaaaggaggttttcctgatgtggtgtaaagaaaacagattcaagagaattgaagattttttttgtttcttggtacttttttctttttaaattaggactaatgtttcttttgtggtgcttgaggcatattcatataaccaaagtttgagaactgggaacttcatgctgatttgtacatattgaagtttctctggtattcaaaggttatatagtgaatgaattttcattaataaatcactttgtcagaaactcccatatcatctatattttatatatgtatatataaacgtatgctctttaagtgtgtctatatgtgagcacataaaatctaaataaaattggactggtgggaaacaaaaaaaaaaaaaaaaaaaaggggggggggggtaaaattcctgggggggcccactttatacggcgtcccccgtctttttttgtaacaaggggccccataaagggaggggccgtatataaaaacgccaggaggacgggcgcgtgttaaacaacgtctctctgctgggaaagaccgctgcgtggggattcttggggaagggccctacttgtgggcggcgaccattgtggggcagcctcccagcaaaataataaggctgagggaatataattactgtgtcatgtggaccaccctattgtgcgctgagttgtcccgatgttggattg

SEQ ID NO: 359703 - DNA, 2359 bp, Homo sapiens
ctgggattaaaggcacacaccaccaagcctggctaatttttacatttttagcagaggtggggtttcaccatgttggccaggctggtcttgaacttctgactttaggtaatccacccgcctctgggattacaggcatgagccactgcgcctggcctctctctttagttcagtgattccttaggatttgctatgtaaacaagcatgatatctacaaatagggacagtttgacttatttttttacattctttatgcctttttgtttattttcttgccttattgcactggctggagagaccttcagtacagtgctaaacagaagttattcttgccatgttatgaaaggtggaatgtttttgccatcaagtgtgaagttaatagtgacagattgtttgtttcaggtactgagcagtacagtgaatacacaggctatgctgagacatatcgttggtcccggagccacgaagatgggagtgaaagggacgactggcagcggcgctgcactgagatcgttgccatcgatgctcttcacttcagacgctacctcgatcagtttgtgcctgagaaaatgagacgcgagctgaacaaggcttactgtggatttctccgtcctggagtttcttcagagaatctttctgcagtggccacaggaaactggggctgtggtgcctttgggggtgatgccaggttaaaagccttaatacagatattggcagctgctgcagctgagcgagatgtggtttatttcacctttggggactcagaattgatgagagacatttacagcatgcacattttccttactgaaaggaaactcactgttggagatgtgtataagctgttgctacgatactacaatgaagaatgcagaaactgttccacccctggaccagacatcaagctttatccattcatataccatgctgtcgagtcctgtgcagagaccgctgaccattcagggcaaaggacagggacctgaggagccgagcgaatagcatctcctcccacctcccaccagagacgtcctgtttgagctgtcaggtgtaatatatgaattgacttaagttaatataaatgtgtacataatccacatttgtagtcaaggacgcaatctcttccacacatgtgcagttgtcagttggtacatctaaactccctccatcctgactcacgtggacttagatatgttttgtttctattttcttctatttcagtttttcattctttgatgtttatttcttttgtccatcagatctcttgtgaaatcccatggaaggttgtgctcagcctgtcgggtctctttcttcctgcccatatattataccagttgcttctgcagcccgcagatgccagcgatgccaggaaacaagttgaaatccaggaatctctttaactgattttgctaaaaatctccctgtgagccttccactcaactcttaatatgcttgcattgtttaagtttttaaattctgaaaattaataattagggtttttttcatatgtgttgcataatgcaaacctcctaggttaaaatagtttctttatttaagatagaataatttccagaaattgtacttttgaggtatcatttttatctgtaatggtttgtctgtcttttttcctctgatcagtatttttttataccagttttggagactggctgagatgaaaggaaatgtggaataaaaggaggttttcctgatgtggtgtaaagaaaacagattcaagagaattgaagattttttttgtttcttggtacttttttctttttaaattaggactaatgtttcttttgtggtgcttgaggcatattcatataaccaaagtttgagaactgggaacttcatgctgatttgtacatattgaagtttctctggtattcaaaggttatatagtgaatgaattttcattaataaatcactttgtcagaaactcccatatcatctatattttatatatgtatatataaacgtatgctctttaagtgtgtctatatgtgagcacataaaatctaaataaaattggactggtgggaaacaaaaaaaaaaaaaaaaaaaaggggggggggggtaaaattcctgggggggcccactttatacggcgtcccccgtctttttttgtaacaaggggccccataaagggaggggccgtatataaaaacgccaggaggacgggcgcgtgttaaacaacgtctctctgctgggaaagaccgctgcgtggggattcttggggaagggccctacttgtgggcggcgaccattgtggggcagcctcccagcaaaataataaggctgagggaatataattactgtgtcatgtggaccaccctattgtgcgctgagttgtcccgatgttggattg

SEQ ID NO: 359704 - DNA, 776 bp, Homo sapiens
ctcgtgccgaattcggcacgaggaatcggcggcgcattgaggcaggtggggtgccagtggaagagggaaggcaggcgagtgtttacggcctgacttgggaggccggcggatcagcaattgcagaagcaggcagcggcagagagggaatggtgcaggcaggcgctgagaaggacgcgcagtccatctctctcagggttagtgaaatgaggctctccgcccgggccggcccggggacagtgcgctgctggtcccagcatgaatgcgggccccggctgtgaaccctgcaccaagcgaccccgctggggcgccgctacaacttcgccggctgcttcggacgcccggagctttcccagcaggcagaggcgcgtcctcgaccccaaggacgctcacgtgcagttcagggtcccaccgtcctcgccagcctgcgtcccagggcaggcgggacagcacagaggcagcgccacctcgcttgttttcaaacaaaagactattaccagttggatggacactaaaggaatcaagacagcggaatcagaaagtttggatagtaaagaaaacaacaatacaagaatagaatccatgatgagttctgtacaaaaagataacttttaccaacataatgtagaaaaattagaaaatgtttctcagctaagtcttgataagtcactcactgaaaaaagtacacagtatttgaaccagcatcagactgcagcaatgtgtaagtggcaaaatgaagggaaacaatagatgctgtgaggcctgtgtagcgagtgacc

SEQ ID NO: 359705 - DNA, 1253 bp, Homo sapiens
  misc_feature (587)..(587): n is a, c, g, or t
agaaaagaaaagataagaaagtgaaggacgttttgtgtcctagaccctttttcgaaagggagtttatccaggaattagtagaattcctgaactggattcataaaactaagtagccttactctgcattgtctacagggcaaagttgtacccatgtttctttcaggatgtgcactgggtacctaaaaggccagtgtgacataccccacacctaacagtatgcatgtcatttcatatcatttctatttcagtgcaatttctgatggctgctatgtgtctgacactgtgccatgatctgtaggagaaacaagtgaacaggggacaatctcagcctttaggaacacaggggagcactcaaggccaaataaaatcagtgccctcgtggagcttctcgcagggtgtttgggagcagaggatggagcaccaactactagttctgctcagtaacaccctccatttgcatagcacctaactgacttccagagtctctgtagaaaccttaactcatctggagttatcagggagctgcaaaagggttgggactatcgagccggcttttgatgaccaagaagaattcctaggccaagggnaagcaggtgagccaaggtgcagctttactgcgggggtcccactccctgaggcagcatttatcccatgagtgtttgcatgatgaattaaggccccacagacctgctagtggactctgtgatgaaaatagtgtgtggccaggctccacatgggcaactagcgaccccttggtgagattatgacacctctcgcttccccctgtgtaaccagggaagctaagcatgtttctttcacttcacccatcttcctacattttttccttcctagtttcagaaacaactctccaagttccatttccaaggaaagtcttaaccatttgtcccttctggcgtaccctctttcattgaaatccatgcagaatataccagatccccaaaatggatggaagaatgcgcctaaattgagctgtcaggcacttggctgcgtaaccatgctttctggattgtggtgttgaaagtgccatcctgtgtgctctctccggatggctgtcacgtacttgcgtctgagaacagtgtatggacctgcatgagcactaatcagtcttcctagcagacttgctctttctctggtcgtatgccgccagatcctctgagaagagagtgggcctttcccctcaatgggcaaagaaccagcttccattttaaaagctctcagaaaaaaaagaaaga

SEQ ID NO: 359706 - DNA, 2814 bp, Homo sapiens
ctcctctctgatcgggcccaccccctggatctagcaccgcctcttccgcgttctcggaggagcgatctgcaggtaggggtgcgcgcgaccgctccccggcgggagccagcgaaggtttccatgtcagaggccgatggagaactgaagattgccacctacgcacaaaggccattgagacacttcgtgtagctggaagacaccaacttcctgacaggagctttatttcatttgggatttcaagtttacagatggtatcttctcaaaagttggaaaaacctatagagatgggcagtagcgaaccccttcccatcgcagatggtgacaggaggaggaagaagaagcggaggggccgggccactgactccttgccaggaaagtttgaagatatgtacaagctgacctctgaattgcttggagagggagcctatgccaaagttcaaggtgccgtgagcctacagaatggcaaagagtatgccgtcaaaatcatcgagaaacaagcagggcacagtcggagtagggtgtttcgagaggtggagacgctgtatcagtgtcagggaaacaagaacattttggagctgattgagttctttgaagatgacacaaggttttacttggtctttgagaaattgcaaggaggttccatcttagcccacatccagaagcaaaagcacttcaatgagcgagaagccagccgagtggtgcgggacgttgctgctgcccttgacttcctgcataccaaagacaaagtctctctctgtcacctaggctggagtgctatggcgccatcagggctcactgcagccccaacctccctgggctccagtgatcctcccacctcagcctcccaagtagctgggactacaggcattgctcatcgtgatctgaaaccagaaaatatattgtgtgaatctccagaaaaggtgtctccagtgaaaatctgtgactttgacttgggcagtgggatgaaactgaacaactcctgtacccccataaccacaccagagctgaccaccccatgtggctctgcagaatacatggcccctgaggtagtggaggtcttcacggaccaggccacattctacgacaagcgctgtgacctgtggagcctgggcgtggtcctctacatcatgctgagtggctacccacccttcgtgggtcactgcggggccgactgtggctgggaccggggcgaggtctgcagggtgtgccagaacaagctgtttgaaagcatccaggaaggcaagtatgagtttcctgacaaggactgggcacacatctccagtgaagccaaagacctcatctccaagctcctggtgcgagatgcaaagcagagacttagcgccgcccaagttctgcagcacccatgggtgcaggggcaagctccagaaaagggactccccacgccgcaagtcctccagaggaacagcagcacaatggacctgacgctcttcgcagctgaggccatcgcccttaaccgccagctatctcagcacgaagagaacgaactagcagaggagccagaggcactagctgatggcctctgctccatgaagctttcccctccctgcaagtcacgcctggcccggagacgggccctggcccaggcaggccgtggtgaagacaggagcccgcccacagcactctgaaatgctccagtcacaccttataggccctaggcctggccaggcattgtcccctggaaacctgtgtggctaaagtctgctgagcaggcagcagcctctgctctgtggctccattcaggctttttcatctacgaaggccctgaggttcccatcaacccccatttccctagggtcctggaggaaaaagctttttccaaaggggttgtctttgaaaaggaaagcaatcacttctcactttgcataattgcctgcagcaggaacatctcttcactgggctccacctgctcacccgcctgcagatctgggatccagcctgctctcaccgctgtagctgtggcggctggggctgcagcctgcagggagaagcaagaagcatcagttgacagaggctgccgacacgtgcctcttccctctcttctctgtcaccctcctctggcggtccttccaccttcctctgtcctccggatgtcctctttgcccgtcttctcccttggctgagcaaagccatcccctcaattcagggaagggcaaggagccttcctcattcaggaaatcaaatcagtcttccggtctgcagcacggaaaagcacataatctttctttgctgtgactgaaatgtatccctcgtttatcatcccctttgtttgtgattgctgctaaagtcagtagtatcgtttttttaaaaaaaaagtttggtgtttttaaccatgctgttccagcaaagatgataccttaaactcccactgcaagcccatgaacttcccagagagtggaacggcttgctcttctttctagaatgtccatgcacttgggttttaatcagcagttccctattattctgattttaagctgttcctgtgatgaacttagagacagcatcggtgtctgctgctgtgtccccaggtcttgtgtgggtggcacagatctgggcagttagatagtgctctgtgcctaaggtgaagccacactagggtgaagcctcacttccctgtttgagcaatgcagtgcctgctgcccgtgtgcatgaaggtacagccattcagataagtggaactattgagttacataaagaaaatagatttgcatttgtcaggcagacgtttatacaacaccacggtgcttttatacattgtgcttattttaataaaactgaaattctatgtgtggccta

SEQ ID NO: 359707 - DNA, 2482 bp, Homo sapiens
ctcctctctgatcgggcccaccccctggatctagcaccgcctcttccgcgttctcggaggagcgatctgcaggtaggggtgcgcgcgaccgctccccggcgggagccagcgaaggtttccatgtcagaggccgatggagaactgaagattgccacctacgcacaaaggccattgagacacttcgtgtagctggaagacaccaacttcctgacaggagctttatttcatttgggatttcaagtttacagatggtatcttctcaaaagttggaaaaacctatagagatgggcagtagcgaaccccttcccatcgcagatggtgacaggaggaggaagaagaagcggaggggccgggccactgactccttgccaggaaagtttgaagatatgtacaagctgacctctgaattgcttggagagggagcctatgccaaagttcaaggtgccgtgagcctacagaatggcaaagagtatgccgtcaaaatcatcgagaaacaagcagggcacagtcggagtagggtgtttcgagaggtggagacgctgtatcagtgtcagggaaacaagaacattttggagctgattgagttctttgaagatgacacaaggttttacttggtctttgagaaattgcaaggaggttccatcttagcccacatccagaagcaaaagcacttcaatgagcgagaagccagccgagtggtgcgggacgttgctgctgcccttgacttcctgcataccaaaggcattgctcatcgtgatctgaaaccagaaaatatattgtgtgaatctccagaaaaggtgtctccagtgaaaatctgtgactttgacttgggcagtgggatgaaactgaacaactcctgtacccccataaccacaccagagctgaccaccccatgtggctctgcagaatacatggcccctgaggtagtggaggtcttcacggaccaggccacattctacgacaagcgctgtgacctgtggagcctgggcgtggtcctctacatcatgctgagtggctacccacccttcgtgggtcactgcggggccgactgtggctgggaccggggcgaggtctgcagggtgtgccaggaacagcagcacaatggacctgacgctcttcgcagctgaggccatcgcccttaaccgccagctatctcagcacgaagagaacgaactagcagaggagccagaggcactagctgatggcctctgctccatgaagctttcccctccctgcaagtcacgcctggcccggagacgggccctggcccaggcaggccgtggtgaagacaggagcccgcccacagcactctgaaatgctccagtcacaccttataggccctaggcctggccaggcattgtcccctggaaacctgtgtggctaaagtctgctgagcaggcagcagcctctgctctgtggctccattcaggctttttcatctacgaaggccctgaggttcccatcaacccccatttccctagggtcctggaggaaaaagctttttccaaaggggttgtctttgaaaaggaaagcaatcacttctcactttgcataattgcctgcagcaggaacatctcttcactgggctccacctgctcacccgcctgcagatctgggatccagcctgctctcaccgctgtagctgtggcggctggggctgcagcctgcagggagaagcaagaagcatcagttgacagaggctgccgacacgtgcctcttccctctcttctctgtcaccctcctctggcggtccttccaccttcctctgtcctccggatgtcctctttgcccgtcttctcccttggctgagcaaagccatcccctcaattcagggaagggcaaggagccttcctcattcaggaaatcaaatcagtcttccggtctgcagcacggaaaagcacataatctttctttgctgtgactgaaatgtatccctcgtttatcatcccctttgtttgtgattgctgctaaagtcagtagtatcgtttttttaaaaaaaaagtttggtgtttttaaccatgctgttccagcaaagatgataccttaaactcccactgcaagcccatgaacttcccagagagtggaacggcttgctcttctttctagaatgtccatgcacttgggttttaatcagcagttccctattattctgattttaagctgttcctgtgatgaacttagagacagcatcggtgtctgctgctgtgtccccaggtcttgtgtgggtggcacagatctgggcagttagatagtgctctgtgcctaaggtgaagccacactagggtgaagcctcacttccctgtttgagcaatgcagtgcctgctgcccgtgtgcatgaaggtacagccattcagataagtggaactattgagttacataaagaaaatagatttgcatttgtcaggcagacgtttatacaacaccacggtgcttttatacattgtgcttattttaataaaactgaaattctatgtgtggccta

SEQ ID NO: 359708 - DNA, 2896 bp, Homo sapiens
ctcctctctgatcgggcccaccccctggatctagcaccgcctcttccgcgttctcggaggagcgatctgcaggtaggggtgcgcgcgaccgctccccggcgggagccagcgaaggtttccatgtcagaggccgatggagaactgaagattgccacctacgcacaaaggccattgagacacttcgtgtagctggaagacaccaacttcctgacaggagctttatttcatttgggatttcaagtttacagatggtatcttctcaaaagttggaaaaacctatagagatgggcagtagcgaaccccttcccatcgcagatggtgacaggaggaggaagaagaagcggaggggccgggccactgactccttgccaggaaagtttgaagatatgtacaagctgacctctgaattgcttggagagggagcctatgccaaagttcaaggtgccgtgagcctacagaatggcaaagagtatgccgtcaaaatcatcgagaaacaagcagggcacagtcggagtagggtgtttcgagaggtggagacgctgtatcagtgtcagggaaacaagaacattttggagctgattgagttctttgaagatgacacaaggttttacttggtctttgagaaattgcaaggaggttccatcttagcccacatccagaagcaaaagcacttcaatgagcgagaagccagccgagtggtgcgggacgttgctgctgcccttgacttcctgcataccaaaggcattgctcatcgtgatctgaaaccagaaaatatattgtgtgaatctccagaaaaggtactttgggcctgatttggaatgttatagtttatacttaccgaggaagccacccttgctttcaggatggattgttagcagttccgttggcctcagacaccaacttgaactgatcgtcttggacatgtgagaatgttacacttactgtgtgatgtttctgcccatcctcgtcctttcttcgctcttgatcatcagtgtgattgatgtgtctccagtgaaaatctgtgactttgacttgggcagtgggatgaaactgaacaactcctgtacccccataaccacaccagagctgaccaccccatgtggctctgcagaatacatggcccctgaggtagtggaggtcttcacggaccaggccacattctacgacaagcgctgtgacctgtggagcctgggcgtggtcctctacatcatgctgagtggctacccacccttcgtgggtcactgcggggccgactgtggctgggaccggggcgaggtctgcagggtgtgccagaacaagctgtttgaaagcatccaggaaggcaagtatgagtttcctgacaaggactgggcacacatctccagtgaagccaaagacctcatctccaagctcctggtgcgagatgcaaagcagagacttagcgccgcccaagttctgcagcacccatgggtgcaggggcaagctccagaaaagggactccccacgccgcaagtcctccagaggaacagcagcacaatggacctgacgctcttcgcagctgaggccatcgcccttaaccgccagctatctcagcacgaagagaacgaactagcagaggagccagaggcactagctgatggcctctgctccatgaagctttcccctccctgcaagtcacgcctggcccggagacgggccctggcccaggcaggccgtggtgaagacaggagcccgcccacagcactctgaaatgctccagtcacaccttataggccctaggcctggccaggcattgtcccctggaaacctgtgtggctaaagtctgctgagcaggcagcagcctctgctctgtggctccattcaggctttttcatctacgaaggccctgaggttcccatcaacccccatttccctagggtcctggaggaaaaagctttttccaaaggggttgtctttgaaaaggaaagcaatcacttctcactttgcataattgcctgcagcaggaacatctcttcactgggctccacctgctcacccgcctgcagatctgggatccagcctgctctcaccgctgtagctgtggcggctggggctgcagcctgcagggagaagcaagaagcatcagttgacagaggctgccgacacgtgcctcttccctctcttctctgtcaccctcctctggcggtccttccaccttcctctgtcctccggatgtcctctttgcccgtcttctcccttggctgagcaaagccatcccctcaattcagggaagggcaaggagccttcctcattcaggaaatcaaatcagtcttccggtctgcagcacggaaaagcacataatctttctttgctgtgactgaaatgtatccctcgtttatcatcccctttgtttgtgattgctgctaaagtcagtagtatcgtttttttaaaaaaaaagtttggtgtttttaaccatgctgttccagcaaagatgataccttaaactcccactgcaagcccatgaacttcccagagagtggaacggcttgctcttctttctagaatgtccatgcacttgggttttaatcagcagttccctattattctgattttaagctgttcctgtgatgaacttagagacagcatcggtgtctgctgctgtgtccccaggtcttgtgtgggtggcacagatctgggcagttagatagtgctctgtgcctaaggtgaagccacactagggtgaagcctcacttccctgtttgagcaatgcagtgcctgctgcccgtgtgcatgaaggtacagccattcagataagtggaactattgagttacataaagaaaatagatttgcatttgtcaggcagacgtttatacaacaccacggtgcttttatacattgtgcttattttaataaaactgaaattctatgtgtggccta

SEQ ID NO: 359709 - DNA, 3362 bp, Homo sapiens
  misc_feature (587)..(587): n is a, c, g, or t
agaaaagaaaagataagaaagtgaaggacgttttgtgtcctagaccctttttcgaaagggagtttatccaggaattagtagaattcctgaactggattcataaaactaagtagccttactctgcattgtctacagggcaaagttgtacccatgtttctttcaggatgtgcactgggtacctaaaaggccagtgtgacataccccacacctaacagtatgcatgtcatttcatatcatttctatttcagtgcaatttctgatggctgctatgtgtctgacactgtgccatgatctgtaggagaaacaagtgaacaggggacaatctcagcctttaggaacacaggggagcactcaaggccaaataaaatcagtgccctcgtggagcttctcgcagggtgtttgggagcagaggatggagcaccaactactagttctgctcagtaacaccctccatttgcatagcacctaactgacttccagagtctctgtagaaaccttaactcatctggagttatcagggagctgcaaaagggttgggactatcgagccggcttttgatgaccaagaagaattcctaggccaagggnaagcaggtgagccaaggtgcagctttactgcgggggtcccactccctgaggcagcatttatcccatgagtgtttgcatgatgaattaaggccccacagacctgctagtggactctgtgatgaaaatagtgtgtggccaggctccacatgggcaactagcgaccccttggtgagattatgacacctctcgcttccccctgtgtaaccagggaagctaagcatgtttctttcacttcacccatcttcctacattttttccttcctagtttcagaaacaactctccaagttccatttccaaggaaagtcttaaccatttgtcccttctggcgtaccctctttcattgaaatccatgcagaatataccagagatgggcagtagcgaaccccttcccatcgcagatggtgacaggaggaggaagaagaagcggaggggccgggccactgactccttgccaggaaagtttgaagatatgtacaagctgacctctgaattgcttggagagggagcctatgccaaagttcaaggtgccgtgagcctacagaatggcaaagagtatgccgtcaaaatcatcgagaaacaagcagggcacagtcggagtagggtgtttcgagaggtggagacgctgtatcagtgtcagggaaacaagaacattttggagctgattgagttctttgaagatgacacaaggttttacttggtctttgagaaattgcaaggaggttccatcttagcccacatccagaagcaaaagcacttcaatgagcgagaagccagccgagtggtgcgggacgttgctgctgcccttgacttcctgcataccaaaggcattgctcatcgtgatctgaaaccagaaaatatattgtgtgaatctccagaaaaggtgtctccagtgaaaatctgtgactttgacttgggcagtgggatgaaactgaacaactcctgtacccccataaccacaccagagctgaccaccccatgtggctctgcagaatacatggcccctgaggtagtggaggtcttcacggaccaggccacattctacgacaagcgctgtgacctgtggagcctgggcgtggtcctctacatcatgctgagtggctacccacccttcgtgggtcactgcggggccgactgtggctgggaccggggcgaggtctgcagggtgtgccagaacaagctgtttgaaagcatccaggaaggcaagtatgagtttcctgacaaggactgggcacacatctccagtgaagccaaagacctcatctccaagctcctggtgcgagatgcaaagcagagacttagcgccgcccaagttctgcagcacccatgggtgcaggggcaagctccagaaaagggactccccacgccgcaagtcctccagaggaacagcagcacaatggacctgacgctcttcgcagctgaggccatcgcccttaaccgccagctatctcagcacgaagagaacgaactagcagaggagccagaggcactagctgatggcctctgctccatgaagctttcccctccctgcaagtcacgcctggcccggagacgggccctggcccaggcaggccgtggtgaagacaggagcccgcccacagcactctgaaatgctccagtcacaccttataggccctaggcctggccaggcattgtcccctggaaacctgtgtggctaaagtctgctgagcaggcagcagcctctgctctgtggctccattcaggctttttcatctacgaaggccctgaggttcccatcaacccccatttccctagggtcctggaggaaaaagctttttccaaaggggttgtctttgaaaaggaaagcaatcacttctcactttgcataattgcctgcagcaggaacatctcttcactgggctccacctgctcacccgcctgcagatctgggatccagcctgctctcaccgctgtagctgtggcggctggggctgcagcctgcagggagaagcaagaagcatcagttgacagaggctgccgacacgtgcctcttccctctcttctctgtcaccctcctctggcggtccttccaccttcctctgtcctccggatgtcctctttgcccgtcttctcccttggctgagcaaagccatcccctcaattcagggaagggcaaggagccttcctcattcaggaaatcaaatcagtcttccggtctgcagcacggaaaagcacataatctttctttgctgtgactgaaatgtatccctcgtttatcatcccctttgtttgtgattgctgctaaagtcagtagtatcgtttttttaaaaaaaaagtttggtgtttttaaccatgctgttccagcaaagatgataccttaaactcccactgcaagcccatgaacttcccagagagtggaacggcttgctcttctttctagaatgtccatgcacttgggttttaatcagcagttccctattattctgattttaagctgttcctgtgatgaacttagagacagcatcggtgtctgctgctgtgtccccaggtcttgtgtgggtggcacagatctgggcagttagatagtgctctgtgcctaaggtgaagccacactagggtgaagcctcacttccctgtttgagcaatgcagtgcctgctgcccgtgtgcatgaaggtacagccattcagataagtggaactattgagttacataaagaaaatagatttgcatttgtcaggcagacgtttatacaacaccacggtgcttttatacattgtgcttattttaataaaactgaaattctatgtgtggccta

SEQ ID NO: 359710 - DNA, 3006 bp, Homo sapiens
ctcctctctgatcgggcccaccccctggatctagcaccgcctcttccgcgttctcggaggagcgatctgcaggtaggggtgcgcgcgaccgctccccggcgggagccagcgaaggtttccatgtcagaggccgatggagaactgaagattgccacctacgcacaaaggccattgagacacttcgtgtagctggaagacaccaacttcctgacaggagctttatttcatttgggatttcaagtttacagatggtatcttctcaaaagttggaaaaacctatagagatgggcagtagcgaaccccttcccatcgcagatggtgacaggaggaggaagaagaagcggaggggccgggccactgactccttgccaggaaagtttgaagatgtgattcttccctcagctattcctggaggggctgctgagagatagaactatataagaggaagagagaaacaccaaaggccatggccgcaaatgaaacttcagtctcctatatgtacaagctgacctctgaattgcttggagagggagcctatgccaaagttcaaggtgccgtgagcctacagaatggcaaagagtatgccgtcaaaatcatcgagaaacaagcagggcacagtcggagtagggtgtttcgagaggtggagacgctgtatcagtgtcagggaaacaagaacattttggagctgattgagttctttgaagatgacacaaggttttacttggtctttgagaaattgcaaggaggttccatcttagcccacatccagaagcaaaagcacttcaatgagcgagaagccagccgagtggtgcgggacgttgctgctgcccttgacttcctgcataccaaaggcattgctcatcgtgatctgaaaccagaaaatatattgtgtgaatctccagaaaaggtactttgggcctgatttggaatgttatagtttatacttaccgaggaagccacccttgctttcaggatggattgttagcagttccgttggcctcagacaccaacttgaactgatcgtcttggacatgtgagaatgttacacttactgtgtgatgtttctgcccatcctcgtcctttcttcgctcttgatcatcagtgtgattgatgtgtctccagtgaaaatctgtgactttgacttgggcagtgggatgaaactgaacaactcctgtacccccataaccacaccagagctgaccaccccatgtggctctgcagaatacatggcccctgaggtagtggaggtcttcacggaccaggccacattctacgacaagcgctgtgacctgtggagcctgggcgtggtcctctacatcatgctgagtggctacccacccttcgtgggtcactgcggggccgactgtggctgggaccggggcgaggtctgcagggtgtgccagaacaagctgtttgaaagcatccaggaaggcaagtatgagtttcctgacaaggactgggcacacatctccagtgaagccaaagacctcatctccaagctcctggtgcgagatgcaaagcagagacttagcgccgcccaagttctgcagcacccatgggtgcaggggcaagctccagaaaagggactccccacgccgcaagtcctccagaggaacagcagcacaatggacctgacgctcttcgcagctgaggccatcgcccttaaccgccagctatctcagcacgaagagaacgaactagcagaggagccagaggcactagctgatggcctctgctccatgaagctttcccctccctgcaagtcacgcctggcccggagacgggccctggcccaggcaggccgtggtgaagacaggagcccgcccacagcactctgaaatgctccagtcacaccttataggccctaggcctggccaggcattgtcccctggaaacctgtgtggctaaagtctgctgagcaggcagcagcctctgctctgtggctccattcaggctttttcatctacgaaggccctgaggttcccatcaacccccatttccctagggtcctggaggaaaaagctttttccaaaggggttgtctttgaaaaggaaagcaatcacttctcactttgcataattgcctgcagcaggaacatctcttcactgggctccacctgctcacccgcctgcagatctgggatccagcctgctctcaccgctgtagctgtggcggctggggctgcagcctgcagggagaagcaagaagcatcagttgacagaggctgccgacacgtgcctcttccctctcttctctgtcaccctcctctggcggtccttccaccttcctctgtcctccggatgtcctctttgcccgtcttctcccttggctgagcaaagccatcccctcaattcagggaagggcaaggagccttcctcattcaggaaatcaaatcagtcttccggtctgcagcacggaaaagcacataatctttctttgctgtgactgaaatgtatccctcgtttatcatcccctttgtttgtgattgctgctaaagtcagtagtatcgtttttttaaaaaaaaagtttggtgtttttaaccatgctgttccagcaaagatgataccttaaactcccactgcaagcccatgaacttcccagagagtggaacggcttgctcttctttctagaatgtccatgcacttgggttttaatcagcagttccctattattctgattttaagctgttcctgtgatgaacttagagacagcatcggtgtctgctgctgtgtccccaggtcttgtgtgggtggcacagatctgggcagttagatagtgctctgtgcctaaggtgaagccacactagggtgaagcctcacttccctgtttgagcaatgcagtgcctgctgcccgtgtgcatgaaggtacagccattcagataagtggaactattgagttacataaagaaaatagatttgcatttgtcaggcagacgtttatacaacaccacggtgcttttatacattgtgcttattttaataaaactgaaattctatgtgtggccta

SEQ ID NO: 359711 - DNA, 2380 bp, Homo sapiens
ccctggatttatccacacgaacaccctcctctttctcttaagagaacaggggtatcactatatacaccgtgcctggcctgtattatctaatgatgtataatacacatacaagaacagaacaaataattataacctatcaagaatttatttttattttaaatagaaacggagatcactctatggtagcccaggctagagtgcaattggcatgaacttggcttactgcaaaccggaggcggaggttgcagtgagccgagatcgtgccactactctccagcctgggtaacagagtgagacttcgtctaaaaaaaaaacttatacttactagagcccaaaaaggcattcttctatgtcccctctgctccccaggttccatcttagcccacatccagaagcaaaagcacttcaatgagcgagaagccagccgagtggtgcgggacgttgctgctgcccttgacttcctgcataccaaaggcattgctcatcgtgatctgaaaccagaaaatatattgtgtgaatctccagaaaaggtgtctccagtgaaaatctgtgactttgacttgggcagtgggatgaaactgaacaactcctgtacccccataaccacaccagagctgaccaccccatgtggctctgcagaatacatggcccctgaggtagtggaggtcttcacggaccaggccacattctacgacaagcgctgtgacctgtggagcctgggcgtggtcctctacatcatgctgagtggctacccacccttcgtgggtcactgcggggccgactgtggctgggaccggggcgaggtctgcagggtgtgccagaacaagctgtttgaaagcatccaggaaggcaagtatgagtttcctgacaaggactgggcacacatctccagtgaagccaaagacctcatctccaagctcctggtgcgagatgcaaagcagagacttagcgccgcccaagttctgcagcacccatgggtgcagggggaacagcagcacaatggacctgacgctcttcgcagctgaggccatcgcccttaaccgccagctatctcagcacgaagagaacgaactagcagaggagccagaggcactagctgatggcctctgctccatgaagctttcccctccctgcaagtcacgcctggcccggagacgggccctggcccaggcaggccgtggtgaagacaggagcccgcccacagcactctgaaatgctccagtcacaccttataggccctaggcctggccaggcattgtcccctggaaacctgtgtggctaaagtctgctgagcaggcagcagcctctgctctgtggctccattcaggctttttcatctacgaaggccctgaggttcccatcaacccccatttccctagggtcctggaggaaaaagctttttccaaaggggttgtctttgaaaaggaaagcaatcacttctcactttgcataattgcctgcagcaggaacatctcttcactgggctccacctgctcacccgcctgcagatctgggatccagcctgctctcaccgctgtagctgtggcggctggggctgcagcctgcagggagaagcaagaagcatcagttgacagaggctgccgacacgtgcctcttccctctcttctctgtcaccctcctctggcggtccttccaccttcctctgtcctccggatgtcctctttgcccgtcttctcccttggctgagcaaagccatcccctcaattcagggaagggcaaggagccttcctcattcaggaaatcaaatcagtcttccggtctgcagcacggaaaagcacataatctttctttgctgtgactgaaatgtatccctcgtttatcatcccctttgtttgtgattgctgctaaagtcagtagtatcgtttttttaaaaaaaaagtttggtgtttttaaccatgctgttccagcaaagatgataccttaaactcccactgcaagcccatgaacttcccagagagtggaacggcttgctcttctttctagaatgtccatgcacttgggttttaatcagcagttccctattattctgattttaagctgttcctgtgatgaacttagagacagcatcggtgtctgctgctgtgtccccaggtcttgtgtgggtggcacagatctgggcagttagatagtgctctgtgcctaaggtgaagccacactagggtgaagcctcacttccctgtttgagcaatgcagtgcctgctgcccgtgtgcatgaaggtacagccattcagataagtggaactattgagttacataaagaaaatagatttgcatttgtcaggcagacgtttatacaacaccacggtgcttttatacattgtgcttattttaataaaactgaaattctatgtgtggccta

SEQ ID NO: 359712 - DNA, 1454 bp, Homo sapiens
ctcctctctgatcgggcccaccccctggatctagcaccgcctcttccgcgttctcggaggagcgatctgcaggtaggggtgcgcgcgaccgctccccggcgggagccagcgaaggtttccatgtcagaggccgatggagaactgaagattgccacctacgcacaaaggccattgagacacttcgtgtagctggaagacaccaacttcctgacaggagctttatttcatttgggatttcaagtttacagatggtatcttctcaaaagttggaaaaacctatagagatgggcagtagcgaaccccttcccatcgcagatggtgacaggaggaggaagaagaagcggaggggccgggccactgactccttgccaggaaagtttgaagatatgtacaagctgacctctgaattgcttggagagggagcctatgccaaagttcaaggtgccgtgagcctacagaatggcaaagagtatgccgtcaaaatcatcgagaaacaagcagggcacagtcggagtagggtgtttcgagaggtggagacgctgtatcagtgtcagggaaacaagaacattttggagctgattgagttctttgaagatgacacaaggttttacttggtctttgagaaattgcaaggaggtacttaccgttgagtatgtgtgtggacttctgattaagacccagggtggtgatcatccatcatgaatcccagagacttccaaaacgagtcaagctaataaaaaggatgaaggacttaaaaactgcccttgatttgggagaagggaggccggagggaaggatgataattagcattttgcagagcttagaatgtcacctgtgtgggtattttataaatgccttttcattataataggagtcatatatagatacatttagtcatcgatttatcaatcccgttttgacatgttcactgtttaactacattaattatggggtggaagctctcaaatacattgcgaagtctagaaaggctaaaacagaggagaggagggtcctattgtttgggacacagacccaggataaaggggaagcctgagaatgtgccatccttcagatggaaagatgccatcacccacacacataatcactggggtgtatacttaagttgcttttctgacataatgaggtggggtagagaaaccctttcccttcccatcactcccccaatgtcttgtgtgggtggcacagatctgggcagttagatagtgctctgtgcctaaggtgaagccacactagggtgaagcctcacttccctgtttgagcaatgcagtgcctgctgcccgtgtgcatgaaggtacagccattcagataagtggaactattgagttacataaagaaaatagatttgcatttgtcaggcagacgtttatacaacaccacggtgcttttatacattgtgcttattttaataaaactgaaattctatgtgtggccta

SEQ ID NO: 359713 - DNA, 1058 bp, Homo sapiens
ctcctctctgatcgggcccaccccctggatctagcaccgcctcttccgcgttctcggaggagcgatctgcaggtaggggtgcgcgcgaccgctccccggcgggagccagcgaaggtttccatgtcagaggccgatggagaactgaagattgccacctacgcacaaaggccattgagacacttcgtgtagctggaagacaccaacttcctgacaggagctttatttcatttgggatttcaagtttacagatggtatcttctcaaaagttggaaaaacctatagagatgggcagtagcgaaccccttcccatcgcagatggtgacaggaggaggaagaagaagcggaggggccgggccactgactccttgccaggaaagtttgaagatatgtacaagctgacctctgaattgcttggagagggagcctatgccaaagttcaaggtgccgtgagcctacagaatggcaaagagtatgccgtcaaagtgagtgtctcagctgaatgccaggctttactttgcaaatagtcattcctagctcatcttgaaccaaataaatgttatattccataagaatggggactctgaagctgtattcactggattcaaatcttgttttctcatctgtaaaatgggtataatactagaacctatgtagaattgttgtgaggattaaataagttaatataggtaaagtgcttagcacaatgcctggctcatagtaagtttctcattattctgacaaatgaagtcagcttcagggagtggacaaccagatttggaattagaaggcctacctgaatatctattttgacaaactataactgtttgactttgggcaagtcatcaaatgtccgtaagcctcagttcctacatctctaaatgatgatacctgcccttcagtctcctgaggcagttatgaagatgaaaattaaaatatcctgggagaggtggaaacactttacacgtcacaaaatgctatccaagtgttagatgttagcatgatagtgaggattaaaaactaaggtgactgatttggtaacatctgaatgatgtctcaga

SEQ ID NO: 359714 - DNA, 1023 bp, Homo sapiens
ctcctctctgatcgggcccaccccctggatctagcaccgcctcttccgcgttctcggaggagcgatctgcaggtaggggtgcgcgcgaccgctccccggcgggagccagcgaaggtttccatgtcagaggccgatggagaactgaagattgccacctacgcacaaaggccattgagacacttcgtgtagctggaagacaccaacttcctgacaggagctttatttcatttgggatttcaagtttacagatggtatcttctcaaaagttggaaaaacctatagatagagtctccctctgtcgcccaggctggagtgcagtggtgcaatctccgctcacggcaacctctgcctcccaggttcaagcgattctcctgcctcagcttcctgagtagctgggattacaggcgtgcaccaccacacccagctaatttttgtttttagtagagacgggtttcatcatgttagccaggctggcctcaaactcctgacctcaagtgatctgcctgccttggcctctcaaagtgctgggattacaggcatgagccactgcgcctagccagatgtttaattctttcaattcatagggtgttgcagtccccagatatatcttgtgtttgaagctcttggctagagttatattttgagatgctctgtggatttcttttatctgtgtgtttatctgttccccattctaaactataatttaaaatgtgctgtcatcagatccccaaaatggatggaagaatgcgcctaaattgagctgtcaggcacttggctgcgtaaccatgctttctggattgtggtgttgaaagtgccatcctgtgtgctctctccggatggctgtcacgtacttgcgtctgagaacagtgtatggacctgcatgagcactaatcagtcttcctagcagacttgctctttctctggtcgtatgccgccagatcctctgagaagagagtgggcctttcccctcaatgggcaaagaaccagcttccattttaaaagctctcagaaaaaaaagaaaga

SEQ ID NO: 359715 - DNA, 1159 bp, Homo sapiens
ctcctctctgatcgggcccaccccctggatctagcaccgcctcttccgcgttctcggaggagcgatctgcaggtaggggtgcgcgcgaccgctccccggcgggagccagcgaaggtttccatgtcagaggccgatggagaactgaagattgccacctacgcacaaaggccattgagacacttcgtgtagctggaagacaccaacttcctgacaggagctttatttcatttgggatttcaagtttacagatggtatcttctcaaaagttggaaaaacctatagtttcagaaacaactctccaagttccatttccaaggaaagtcttaaccatttgtcccttctggcgtaccctctttcattgaaatccatgcagaatataccagagatgggcagtagcgaaccccttcccatcgcagatggtgacaggaggaggaagaagaagcggaggggccgggccactgactccttgccaggaaagtttgaagatatgtacaagctgacctctgaattgcttggagagggagcctatgccaaagttcaaggtgccgtgagcctacagaatggcaaagagtatgccgtcaaagtgagtgtctcagctgaatgccaggctttactttgcaaatagtcattcctagctcatcttgaaccaaataaatgttatattccataagaatggggactctgaagctgtattcactggattcaaatcttgttttctcatctgtaaaatgggtataatactagaacctatgtagaattgttgtgaggattaaataagttaatataggtaaagtgcttagcacaatgcctggctcatagtaagtttctcattattctgacaaatgaagtcagcttcagggagtggacaaccagatttggaattagaaggcctacctgaatatctattttgacaaactataactgtttgactttgggcaagtcatcaaatgtccgtaagcctcagttcctacatctctaaatgatgatacctgcccttcagtctcctgaggcagttatgaagatgaaaattaaaatatcctgggagaggtggaaacactttacacgtcacaaaatgctatccaagtgttagatgttagcatgatagtgaggattaaaaactaaggtgactgatttggtaacatctgaatgatgtctcaga

SEQ ID NO: 359716 - DNA, 613 bp, Homo sapiens
gctttactttgcaaatagtcattcctagctcatcttgaaccaaataaatgttatattccataagaatggggactctgaagctgtattcactggattcaaatcttggtttctctacttactgtgtacctcgggcaagttacttaacttctctgtccttcagttttctcatctgtaaaatgggtataatactagaacctatgtagaattgttgtgaggattaaataagttaatataggtaaagtgcttagcacaatgcctggctcatagtaagtttctcattattctgacaaatgaagtcagcttcagggagtggacaaccagatttggaattagaaggcctacctgaatatctattttgacaaactataactgtttgactttgggcaagtcatcaaatgtccgtaagcctcagttcctacatctctaaatgatgatacctgcccttcagtctcctgaggcagttatgaagatgaaaattaaaatatcctgggagaggtggaaacactttacacgtcacaaaatgctatccaagtgttagatgttagcatgatagtgaggattaaaaactaaggtgactgatttggtaacatctgaatgatgtctcagaaaaaaa

SEQ ID NO: 359717 - DNA, 2691 bp, Homo sapiens
ctcctctctgatcgggcccaccccctggatctagcaccgcctcttccgcgttctcggaggagcgatctgcaggtaggggtgcgcgcgaccgctccccggcgggagccagcgaaggtttccatgtcagaggccgatggagaactgaagattgccacctacgcacaaaggccattgagacacttcgtgtagctggaagacaccaacttcctgacaggagctttatttcatttgggatttcaagtttacagatggtatcttctcaaaagttggaaaaacctatagagatgggcagtagcgaaccccttcccatcgcagatggtgacaggaggaggaagaagaagcggaggggccgggccactgactccttgccaggaaagtttgaagatatgtacaagctgacctctgaattgcttggagagggagcctatgccaaagttcaaggtgccgtgagcctacagaatggcaaagagtatgccgtcaaaatcatcgagaaacaagcagggcacagtcggagtagggtgtttcgagaggtggagacgctgtatcagtgtcagggaaacaagaacattttggagctgattgagttctttgaagatgacacaaggttttacttggtctttgagaaattgcaaggaggttccatcttagcccacatccagaagcaaaagcacttcaatgagcgagaagccagccgagtggtgcgggacgttgctgctgcccttgacttcctgcataccaaaggcattgctcatcgtgatctgaaaccagaaaatatattgtgtgaatctccagaaaaggtgtctccagtgaaaatctgtgactttgacttgggcagtgggatgaaactgaacaactcctgtacccccataaccacaccagagctgaccaccccatgtggctctgcagaatacatggcccctgaggtagtggaggtcttcacggaccaggccacattctacgacaagcgctgtgacctgtggagcctgggcgtggtcctctacatcatgctgagtggctacccacccttcgtgggtcactgcggggccgactgtggctgggaccggggcgaggtctgcagggtgtgccagaacaagctgtttgaaagcatccaggaaggcaagtatgagtttcctgacaaggactgggcacacatctccagtgaagccaaagacctcatctccaagctcctggtgcgagatgcaaagcagagacttagcgccgcccaagttctgcagcacccatgggtgcaggggcaagctccagaaaagggactccccacgccgcaagtcctccagaggaacagcagcacaatggacctgacgctcttcgcagctgaggccatcgcccttaaccgccagctatctcagcacgaagagaacgaactagcagaggagccagaggcactagctgatggcctctgctccatgaagctttcccctccctgcaagtcacgcctggcccggagacgggccctggcccaggcaggccgtggtgaagacaggagcccgcccacagcactctgaaatgctccagtcacaccttataggccctaggcctggccaggcattgtcccctggaaacctgtgtggctaaagtctgctgagcaggcagcagcctctgctctgtggctccattcaggctttttcatctacgaaggccctgaggttcccatcaacccccatttccctagggtcctggaggaaaaagctttttccaaaggggttgtctttgaaaaggaaagcaatcacttctcactttgcataattgcctgcagcaggaacatctcttcactgggctccacctgctcacccgcctgcagatctgggatccagcctgctctcaccgctgtagctgtggcggctggggctgcagcctgcagggagaagcaagaagcatcagttgacagaggctgccgacacgtgcctcttccctctcttctctgtcaccctcctctggcggtccttccaccttcctctgtcctccggatgtcctctttgcccgtcttctcccttggctgagcaaagccatcccctcaattcagggaagggcaaggagccttcctcattcaggaaatcaaatcagtcttccggtctgcagcacggaaaagcacataatctttctttgctgtgactgaaatgtatccctcgtttatcatcccctttgtttgtgattgctgctaaagtcagtagtatcgtttttttaaaaaaaaagtttggtgtttttaaccatgctgttccagcaaagatgataccttaaactcccactgcaagcccatgaacttcccagagagtggaacggcttgctcttctttctagaatgtccatgcacttgggttttaatcagcagttccctattattctgattttaagctgttcctgtgatgaacttagagacagcatcggtgtctgctgctgtgtccccaggtcttgtgtgggtggcacagatctgggcagttagatagtgctctgtgcctaaggtgaagccacactagggtgaagcctcacttccctgtttgagcaatgcagtgcctgctgcccgtgtgcatgaaggtacagccattcagataagtggaactattgagttacataaagaaaatagatttgcatttgtcaggcagacgtttatacaacaccacggtgcttttatacattgtgcttattttaataaaactgaaattctatgtgtggccta

SEQ ID NO: 359718 - DNA, 2647 bp, Homo sapiens
ctcctctctgatcgggcccaccccctggatctagcaccgcctcttccgcgttctcggaggagcgatctgcaggtaggggtgcgcgcgaccgctccccggcgggagccagcgaaggtttccatgtcagaggccgatggagaactgaagattgccacctacgcacaaaggccattgagacacttcgtgtagctggaagacaccaacttcctgacaggagctttatttcatttgggatttcaagtttacagatggtatcttctcaaaagttggaaaaacctatagagatgggcagtagcgaaccccttcccatcgcagatggtgacaggaggaggaagaagaagcggaggggccgggccactgactccttgccaggaaagtttgaagatatgtacaagctgacctctgaattgcttggagagggagcctatgccaaagttcaaggtgccgtgagcctacagaatggcaaagagtatgccgtcaaaatcatcgagaaacaagcagggcacagtcggagtagggtgtttcgagaggtggagacgctgtatcagtgtcagggaaacaagaacattttggagctgattgagttctttgaagatgacacaaggttttacttggtctttgagaaattgcaaggaggttccatcttagcccacatccagaagcaaaagcacttcaatgagcgagaagccagccgagtggtgcgggacgttgctgctgcccttgacttcctgcataccaaaggcattgctcatcgtgatctgaaaccagaaaatatattgtgtgaatctccagaaaaggtgtctccagtgaaaatctgtgactttgacttgggcagtgggatgaaactgaacaactcctgtacccccataaccacaccagagctgaccaccccatgtggctctgcagaatacatggcccctgaggtagtggaggtcttcacggaccaggccacattctacgacaagcgctgtgacctgtggagcctgggcgtggtcctctacatcatgctgagtggctacccacccttcgtgggtcactgcggggccgactgtggctgggaccggggcgaggtctgcagggtgtgccagaacaagctgtttgaaagcatccaggaaggcaagtatgagtttcctgacaaggactgggcacacatctccagtgaagccaaagacctcatctccaagctcctggtgcgagatgcaaagcagagacttagcgccgcccaagttctgcagcacccatgggtgcagggggaacagcagcacaatggacctgacgctcttcgcagctgaggccatcgcccttaaccgccagctatctcagcacgaagagaacgaactagcagaggagccagaggcactagctgatggcctctgctccatgaagctttcccctccctgcaagtcacgcctggcccggagacgggccctggcccaggcaggccgtggtgaagacaggagcccgcccacagcactctgaaatgctccagtcacaccttataggccctaggcctggccaggcattgtcccctggaaacctgtgtggctaaagtctgctgagcaggcagcagcctctgctctgtggctccattcaggctttttcatctacgaaggccctgaggttcccatcaacccccatttccctagggtcctggaggaaaaagctttttccaaaggggttgtctttgaaaaggaaagcaatcacttctcactttgcataattgcctgcagcaggaacatctcttcactgggctccacctgctcacccgcctgcagatctgggatccagcctgctctcaccgctgtagctgtggcggctggggctgcagcctgcagggagaagcaagaagcatcagttgacagaggctgccgacacgtgcctcttccctctcttctctgtcaccctcctctggcggtccttccaccttcctctgtcctccggatgtcctctttgcccgtcttctcccttggctgagcaaagccatcccctcaattcagggaagggcaaggagccttcctcattcaggaaatcaaatcagtcttccggtctgcagcacggaaaagcacataatctttctttgctgtgactgaaatgtatccctcgtttatcatcccctttgtttgtgattgctgctaaagtcagtagtatcgtttttttaaaaaaaaagtttggtgtttttaaccatgctgttccagcaaagatgataccttaaactcccactgcaagcccatgaacttcccagagagtggaacggcttgctcttctttctagaatgtccatgcacttgggttttaatcagcagttccctattattctgattttaagctgttcctgtgatgaacttagagacagcatcggtgtctgctgctgtgtccccaggtcttgtgtgggtggcacagatctgggcagttagatagtgctctgtgcctaaggtgaagccacactagggtgaagcctcacttccctgtttgagcaatgcagtgcctgctgcccgtgtgcatgaaggtacagccattcagataagtggaactattgagttacataaagaaaatagatttgcatttgtcaggcagacgtttatacaacaccacggtgcttttatacattgtgcttattttaataaaactgaaattctatgtgtggccta

SEQ ID NO: 359719 - DNA, 2817 bp, Homo sapiens
ctcctctctgatcgggcccaccccctggatctagcaccgcctcttccgcgttctcggaggagcgatctgcaggtaggggtgcgcgcgaccgctccccggcgggagccagcgaaggtttccatgtcagaggccgatggagaactgaagattgccacctacgcacaaaggccattgagacacttcgtgtagctggaagacaccaacttcctgacaggagctttatttcatttgggatttcaagtttacagatggtatcttctcaaaagttggaaaaacctatagagatgggcagtagcgaaccccttcccatcgcagatggtgacaggaggaggaagaagaagcggaggggccgggccactgactccttgccaggaaagtttgaagatatgtacaagctgacctctgaattgcttggagagggagcctatgccaaagttcaaggtgccgtgagcctacagaatggcaaagagtatgccgtcaaaatcatcgagaaacaagcagggcacagtcggagtagggtgtttcgagaggtggagacgctgtatcagtgtcagggaaacaagaacattttggagctgattgagttctttgaagatgacacaaggttttacttggtctttgagaaattgcaaggaggttccatcttagcccacatccagaagcaaaagcacttcaatgagcgagaagccagccgagtggtgcgggacgttgctgctgcccttgacttcctgcataccaaaggcattgctcatcgtgatctgaaaccagaaaatatattgtgtgaatctccagaaaaggtactttgggcctgatttggaatgttatagtttatacttaccgaggaagccacccttgctttcaggatggattgttagcagttccgttggcctcagacaccaacttgaactgatcgtcttggacatgtgtctccagtgaaaatctgtgactttgacttgggcagtgggatgaaactgaacaactcctgtacccccataaccacaccagagctgaccaccccatgtggctctgcagaatacatggcccctgaggtagtggaggtcttcacggaccaggccacattctacgacaagcgctgtgacctgtggagcctgggcgtggtcctctacatcatgctgagtggctacccacccttcgtgggtcactgcggggccgactgtggctgggaccggggcgaggtctgcagggtgtgccagaacaagctgtttgaaagcatccaggaaggcaagtatgagtttcctgacaaggactgggcacacatctccagtgaagccaaagacctcatctccaagctcctggtgcgagatgcaaagcagagacttagcgccgcccaagttctgcagcacccatgggtgcaggggcaagctccagaaaagggactccccacgccgcaagtcctccagaggaacagcagcacaatggacctgacgctcttcgcagctgaggccatcgcccttaaccgccagctatctcagcacgaagagaacgaactagcagaggagccagaggcactagctgatggcctctgctccatgaagctttcccctccctgcaagtcacgcctggcccggagacgggccctggcccaggcaggccgtggtgaagacaggagcccgcccacagcactctgaaatgctccagtcacaccttataggccctaggcctggccaggcattgtcccctggaaacctgtgtggctaaagtctgctgagcaggcagcagcctctgctctgtggctccattcaggctttttcatctacgaaggccctgaggttcccatcaacccccatttccctagggtcctggaggaaaaagctttttccaaaggggttgtctttgaaaaggaaagcaatcacttctcactttgcataattgcctgcagcaggaacatctcttcactgggctccacctgctcacccgcctgcagatctgggatccagcctgctctcaccgctgtagctgtggcggctggggctgcagcctgcagggagaagcaagaagcatcagttgacagaggctgccgacacgtgcctcttccctctcttctctgtcaccctcctctggcggtccttccaccttcctctgtcctccggatgtcctctttgcccgtcttctcccttggctgagcaaagccatcccctcaattcagggaagggcaaggagccttcctcattcaggaaatcaaatcagtcttccggtctgcagcacggaaaagcacataatctttctttgctgtgactgaaatgtatccctcgtttatcatcccctttgtttgtgattgctgctaaagtcagtagtatcgtttttttaaaaaaaaagtttggtgtttttaaccatgctgttccagcaaagatgataccttaaactcccactgcaagcccatgaacttcccagagagtggaacggcttgctcttctttctagaatgtccatgcacttgggttttaatcagcagttccctattattctgattttaagctgttcctgtgatgaacttagagacagcatcggtgtctgctgctgtgtccccaggtcttgtgtgggtggcacagatctgggcagttagatagtgctctgtgcctaaggtgaagccacactagggtgaagcctcacttccctgtttgagcaatgcagtgcctgctgcccgtgtgcatgaaggtacagccattcagataagtggaactattgagttacataaagaaaatagatttgcatttgtcaggcagacgtttatacaacaccacggtgcttttatacattgtgcttattttaataaaactgaaattctatgtgtggccta

SEQ ID NO: 359720 - DNA, 2854 bp, Homo sapiens
ctcctctctgatcgggcccaccccctggatctagcaccgcctcttccgcgttctcggaggagcgatctgcaggtttccatgtcagaggccgatggagaactgaagattgccacctacgcacaaaggccattgagacacttcgtgtagctggaagacaccaacttcctgacaggagctttatttcatttgggatttcaagtttacagatggtatcttctcaaaagttggaaaaacctatagagatgggcagtagcgaaccccttcccatcgcagatggtgacaggaggaggaagaagaagcggaggggccgggccactgactccttgccaggaaagtttgaagatatgtacaagctgacctctgaattgcttggagagggagcctatgccaaagttcaaggtgccgtgagcctacagaatggcaaagagtatgccgtcaaaatcatcgagaaacaagcagggcacagtcggagtagggtgtttcgagaggtggagacgctgtatcagtgtcagggaaacaagaacattttggagctgattgagttctttgaagatgacacaaggttttacttggtctttgagaaattgcaaggaggttccatcttagcccacatccagaagcaaaagcacttcaatgagcgagaagccagccgagtggtgcgggacgttgctgctgcccttgacttcctgcataccaaaggcattgctcatcgtgatctgaaaccagaaaatatattgtgtgaatctccagaaaaggtactttgggcctgatttggaatgttatagtttatacttaccgaggaagccacccttgctttcaggatggattgttagcagttccgttggcctcagacaccaacttgaactgatcgtcttggacatgtgagaatgttacacttactgtgtgatgtttctgcccatcctcgtcctttcttcgctcttgatcatcagtgtgattgatgtgtctccagtgaaaatctgtgactttgacttgggcagtgggatgaaactgaacaactcctgtacccccataaccacaccagagctgaccaccccatgtggctctgcagaatacatggcccctgaggtagtggaggtcttcacggaccaggccacattctacgacaagcgctgtgacctgtggagcctgggcgtggtcctctacatcatgctgagtggctacccacccttcgtgggtcactgcggggccgactgtggctgggaccggggcgaggtctgcagggtgtgccagaacaagctgtttgaaagcatccaggaaggcaagtatgagtttcctgacaaggactgggcacacatctccagtgaagccaaagacctcatctccaagctcctggtgcgagatgcaaagcagagacttagcgccgcccaagttctgcagcacccatgggtgcaggggcaagctccagaaaagggactccccacgccgcaagtcctccagaggaacagcagcacaatggacctgacgctcttcgcagctgaggccatcgcccttaaccgccagctatctcagcacgaagagaacgaactagcagaggagccagaggcactagctgatggcctctgctccatgaagctttcccctccctgcaagtcacgcctggcccggagacgggccctggcccaggcaggccgtggtgaagacaggagcccgcccacagcactctgaaatgctccagtcacaccttataggccctaggcctggccaggcattgtcccctggaaacctgtgtggctaaagtctgctgagcaggcagcagcctctgctctgtggctccattcaggctttttcatctacgaaggccctgaggttcccatcaacccccatttccctagggtcctggaggaaaaagctttttccaaaggggttgtctttgaaaaggaaagcaatcacttctcactttgcataattgcctgcagcaggaacatctcttcactgggctccacctgctcacccgcctgcagatctgggatccagcctgctctcaccgctgtagctgtggcggctggggctgcagcctgcagggagaagcaagaagcatcagttgacagaggctgccgacacgtgcctcttccctctcttctctgtcaccctcctctggcggtccttccaccttcctctgtcctccggatgtcctctttgcccgtcttctcccttggctgagcaaagccatcccctcaattcagggaagggcaaggagccttcctcattcaggaaatcaaatcagtcttccggtctgcagcacggaaaagcacataatctttctttgctgtgactgaaatgtatccctcgtttatcatcccctttgtttgtgattgctgctaaagtcagtagtatcgtttttttaaaaaaaaagtttggtgtttttaaccatgctgttccagcaaagatgataccttaaactcccactgcaagcccatgaacttcccagagagtggaacggcttgctcttctttctagaatgtccatgcacttgggttttaatcagcagttccctattattctgattttaagctgttcctgtgatgaacttagagacagcatcggtgtctgctgctgtgtccccaggtcttgtgtgggtggcacagatctgggcagttagatagtgctctgtgcctaaggtgaagccacactagggtgaagcctcacttccctgtttgagcaatgcagtgcctgctgcccgtgtgcatgaaggtacagccattcagataagtggaactattgagttacataaagaaaatagatttgcatttgtcaggcagacgtttatacaacaccacggtgcttttatacattgtgcttattttaataaaactgaaattctatgtgtggccta

SEQ ID NO: 359721 - DNA, 2629 bp, Homo sapiens
ccctggatttatccacacgaacaccctcctctttctcttaagagaacaggggtatcactatatacaccgtgcctggcctgtattatctaatgatgtataatacacatacaagaacagaacaaataattataacctatcaagaatttatttttattttaaatagaaacggagatcactctatggtagcccaggctagagtgcaattggcatgaacttggcttactgcaaaccggaggcggaggttgcagtgagccgagatcgtgccactactctccagcctgggtaacagagtgagacttcgtctaaaaaaaaaacttatacttactagagcccaaaaaggcattcttctatgtcccctctgctccccaggttccatcttagcccacatccagaagcaaaagcacttcaatgagcgagaagccagccgagtggtgcgggacgttgctgctgcccttgacttcctgcataccaaaggcattgctcatcgtgatctgaaaccagaaaatatattgtgtgaatctccagaaaaggtactttgggcctgatttggaatgttatagtttatacttaccgaggaagccacccttgctttcaggatggattgttagcagttccgttggcctcagacaccaacttgaactgatcgtcttggacatgtgagaatgttacacttactgtgtgatgtttctgcccatcctcgtcctttcttcgctcttgatcatcagtgtgattgatgtgtctccagtgaaaatctgtgactttgacttgggcagtgggatgaaactgaacaactcctgtacccccataaccacaccagagctgaccaccccatgtggctctgcagaatacatggcccctgaggtagtggaggtcttcacggaccaggccacattctacgacaagcgctgtgacctgtggagcctgggcgtggtcctctacatcatgctgagtggctacccacccttcgtgggtcactgcggggccgactgtggctgggaccggggcgaggtctgcagggtgtgccagaacaagctgtttgaaagcatccaggaaggcaagtatgagtttcctgacaaggactgggcacacatctccagtgaagccaaagacctcatctccaagctcctggtgcgagatgcaaagcagagacttagcgccgcccaagttctgcagcacccatgggtgcaggggcaagctccagaaaagggactccccacgccgcaagtcctccagaggaacagcagcacaatggacctgacgctcttcgcagctgaggccatcgcccttaaccgccagctatctcagcacgaagagaacgaactagcagaggagccagaggcactagctgatggcctctgctccatgaagctttcccctccctgcaagtcacgcctggcccggagacgggccctggcccaggcaggccgtggtgaagacaggagcccgcccacagcactctgaaatgctccagtcacaccttataggccctaggcctggccaggcattgtcccctggaaacctgtgtggctaaagtctgctgagcaggcagcagcctctgctctgtggctccattcaggctttttcatctacgaaggccctgaggttcccatcaacccccatttccctagggtcctggaggaaaaagctttttccaaaggggttgtctttgaaaaggaaagcaatcacttctcactttgcataattgcctgcagcaggaacatctcttcactgggctccacctgctcacccgcctgcagatctgggatccagcctgctctcaccgctgtagctgtggcggctggggctgcagcctgcagggagaagcaagaagcatcagttgacagaggctgccgacacgtgcctcttccctctcttctctgtcaccctcctctggcggtccttccaccttcctctgtcctccggatgtcctctttgcccgtcttctcccttggctgagcaaagccatcccctcaattcagggaagggcaaggagccttcctcattcaggaaatcaaatcagtcttccggtctgcagcacggaaaagcacataatctttctttgctgtgactgaaatgtatccctcgtttatcatcccctttgtttgtgattgctgctaaagtcagtagtatcgtttttttaaaaaaaaagtttggtgtttttaaccatgctgttccagcaaagatgataccttaaactcccactgcaagcccatgaacttcccagagagtggaacggcttgctcttctttctagaatgtccatgcacttgggttttaatcagcagttccctattattctgattttaagctgttcctgtgatgaacttagagacagcatcggtgtctgctgctgtgtccccaggtcttgtgtgggtggcacagatctgggcagttagatagtgctctgtgcctaaggtgaagccacactagggtgaagcctcacttccctgtttgagcaatgcagtgcctgctgcccgtgtgcatgaaggtacagccattcagataagtggaactattgagttacataaagaaaatagatttgcatttgtcaggcagacgtttatacaacaccacggtgcttttatacattgtgcttattttaataaaactgaaattctatgtgtggccta

SEQ ID NO: 359722 - DNA, 951 bp, Homo sapiens
ctcctctctgatcgggcccaccccctggatctagcaccgcctcttccgcgttctcggaggagcgatctgcaggtaggggtgcgcgcgaccgctccccggcgggagccagcgaaggtttccatgtcagaggccgatggagaactgaagattgccacctacgcacaaaggccattgagacacttcgtgtagctggaagacaccaacttcctgacaggagctttatttcatttgggatttcaagtttacagatggtatcttctcaaaagttggaaaaacctatagagatgggcagtagcgaaccccttcccatcgcagatggtgacaggaggaggaagaagaagcggaggggccgggccactgactccttgccaggaaagtttgaagatatgtacaagctgacctctgaattgcttggagagggagcctatgccaaagttcaaggtgccgtgagcctacagaatggcaaagagtatgccgtcaaagtgagtgtctcagctgaatgccaggctttactttgcaaatagtcattcctagctcatcttgaaccaaataaatgttatattccataagaatggggaaaaaaaaaaaaaaaaaaaaaaaaaaaaaaacccgggggccatttttggggggggggaaaaaagggtttaaaaggggcggtgcagtggtcccggcccattttttggccagggggggagaattcgggggggcgccccaaaaagggggagccggattaaaattcgaaaaagccgggtttaacctgtagtattgttgctagtagagaggcatatcccacgcgaccagacagacgatcaaatgcaggatctaccacatctatagacacatcggattagaaaaaagttcaacttatactgcatatcgcgtcgccaaagcataccacaaccaatcaaacataacattataagcacatcatgtcgaaaacagaaaatacca

SEQ ID NO: 359723 - DNA, 348 bp, Homo sapiens
attactttgacatctttgttgacaatcagtaaaccacatatatgtgagtctgtttctggattctattcggttccaccgatctttgtgtctggtttataggaatacttgaaattggacaatgttaagtcttccagccatatcctttgtgttaaaaaataattgtttttggctgggcgtggtggctcatgcctgtaatctcagcactttgggaggctgaggcgggtgggtcacttgaggtcaggagttcgagaccagcctgcctaacatggtgaaacctcatctctacttaaaatacaaaaaactagccaggcatggtggcacatgcctgtaatcccagctgcttgggag

SEQ ID NO: 359724 - DNA, 612 bp, Homo sapiens
tgtcagagaaaaaggatgggcttgaacttctattgacttcattgagtcaacacaggagtcaaaaactgttgtgactggggactcacaccctgtctattcttgttgatctttggacaaaccattgcagcagacagaaacattcaaataaagcttagaaaagtgaaaaaagaaaggggggaagaataccatagtaaaagaaaatagaagagggaaatggtgaggcaaacttatcactggcatcatgatctatcagattatgtgctcaaaataaggttatggatttattcttagtggagggactggggctcatggcctgagtatcattcacaaagaagccagaaaactccatgtgtccacgtgtccaggggcaggaatgcccacgcaggcactgtatcgctgcagctgaatacctgccagagaagctttgctaccctaaagccaaggccaggccttctaagaatgcgccacaccaatgaggtgacatgtcctgtgatggcctagtatggttatgtgctttgcctagaatccccgattgcattatgatggaatttctggtatagaaaaattgtaatgttccaaccctgtttttgaaaataaagtgcttcttcatta

SEQ ID NO: 359725 - DNA, 3145 bp, Homo sapiens
tcctctttccgtgcgcgagtgcacagctccggaggcccgagccgaccctggggcgtccggtccggtggtcttgcagcctccaaaccccgagtgctataccgaactgcgcgccaagggtgggagagctgacggcctgggccacccttcttccttcactgggcaggctttgaggtgcttgtcggtctggactgatgaaaatccatatgacctgaaagatgtctgaaaattccagtgacagtgattcatcttgtggttggactgtcatcagtcatgaggggtcagatatagaaatgttgaattctgtgacccccactgacagctgtgagcccgccccagaatgttcatctttagagcaagaggagcttcaagcattgcagatagagcaaggagaaagcagccaaaatggcacagtgcttatggaagaaactgcttatccagctttggaggaaaccagctcaacaattgaggcagaggaacaaaagatacccgaagacagtatctatattggaactgccagtgatgattctgatattgttacccttgagccacctaagttagaagaaattggaaatcaagaagttgtcattgttgaagaagcacagagttcagaagactttaacatgggctcttcctctagcagccagtatactttctgtcagccagaaactgtattttcatctcagcctagtgacgatgaatcaagtagtgatgaaaccagtaatcagcccagtcctgcctttagacgacgccgtgctaggaagaagaccgtttctgcttcagaatctgaagaccggctagttgctgaacaagaaactgaaccttctaaggagttgagtaaacgtcagttcagtagtggtctcaataagtgtgttatacttgctttggtgattgcaatcagcatgggatttggccatttctatggcacaattcagattcagaagcgtcaacagttagtcagaaagatacatgaagatgaattgaatgatatgaaggattatctttcccagtgtcaacaggaacaagaatcttttatagattataagtcattgaaagaaaatcttgcaaggtgttggacacttactgaagcagagaagatgtcctttgaaactcagaaaacgaaccttgctacagaaaatcagtatttaagagtatccctggagaaggaagaaaaagccttatcctcattacaggaagagttaaacaaactaagagaacagattagaatattggaagataaagggacaagtactgaattagttaaagaaaatcagaaacttaagcagcatttggaagaggaaaagcagaaaaaacacagctttcttagtcaaagggagactctgttgacagaagcaaagatgctaaagagagaactggagagagaacgactagtaactacggctttaaggggggaactccagcagttaagtggtagtcagttacatggcaagtcagattctcccaatgtatatactgaaaaaaaggaaatagcaatcttacgggaaagactcactgagctggaacggaagctaaccttcgaacagcagcgttctgatttgtgggaaagattgtatgttgaggcaaaagatcaaaatggaaaacaaggaacagatggaaaaaagaaagggggcagaggaagccacagggctaaaaataagtcaaaggaaacatttttgggttcagttaaggaaacatttgatgccatgaagaattctaccaaggagtttgtaaggcatcataaagagaaaattaagcaggctaaagaagctgtgaaggaaaatctgaaaaaattctcagattcagttaaatccactttcagacactttaaagataccaccaagaatatctttgatgaaaagggtaataaaagatttggtgctacaaaagaagcagctgaaaaaccaagaacagtttttagtgactatttacatccacagtataaggcacctacagaaaaccatcataatagaggccctactatgcaaaatgatggaaggaaagaaaagccagttcactttaaagaattcagaaaaaatacaaattcaaagaaatgcagtcctgggcatgattgtagagaaaattctcattctttcagaaaggcttgttctggtgtatttgattgtgctcaacaagagtccatgagcctttttaacacagtggtgaatcctataaggatggatgaatttagacagataattcaaaggtacatgttaaaagaactggatactttttgtcactggaacgaacttgatcagttcatcaataagtttttcctaaacggtgtctttatacatgatcagaagctcttcactgactttgttaatgatgttaaagattatcttagaaacatgaaggaatatgaagtagataatgatggagtatttgagaagttggatgaatatatatatagacacttctttggtcacactttttcccctccatatggacccaggtcggtttacataaaaccgtgtcattacagtagtttgtaacatttgtagattggatagcatttttatgatttgatgagtttcttgtaaggttaccgtttctaagagttgtgctttatggccactgagagaattcagaataaattgaaagatggagtctaaaaattattagctgttacaaatggaacatttcattataacgtgatcactttgacttgagcaaatggtttaatttttatcttaaaaatcagttaagaatatataaaatcctactttggccaagtttgtttcttttcattatagtttatatgaaaagatcaccttaagtgaaattattttcctttaatcttttatgtatttattcacttttggaagctaggaatgagcaacacaaattttactctgaagtcagaagagctcatatataataattctaatgtcccacctattttcacttgtccattccatgtaccagcttagttatgatacttagtcacataattatctttgataaaggtagaggcacaaagaggcaaactaagcaagtcaaattctaatgtgtgtacttcataataattttttatccattttcatctctttatattctgtaacatgaaacttacctaatcttcaaatgttagcttcattttttacctttgaaatacttaatctttctgaataaatataatgtgtctata

SEQ ID NO: 359726 - DNA, 347 bp, Homo sapiens
gctgcatgaagcctgttttataaagaccttaatcatattcctaggggaggatcccttataactcagtcacctcctaaaggtcccacttcttagtactatcacattggcgattacattccagcgtagaaatttgtggggacaccttcagatacattcagtacaagatacagctgttgaagtttattacgtacataacctaaaaacatggaactcgtgagagaagtgagctcttttttctgtggttattgagggggcaaagatgggcttctcagcttctgcagcccactaggagaatgcagtggtctgatctaattctgagagttgtcaagggatctgatggtgttctc

SEQ ID NO: 359727 - DNA, 6720 bp, Homo sapiens
  misc_feature (3127)..(3127): n is a, c, g, or t
acggcatgcactgcggcgcccagccggtcaccgcctgccggctgcagacgcctgcgagcaggttgtttttataagaggcgtcattggcgcccgagctgtgaccgccgccactggggcagccagcacaatcgggcggaggtggcgctgccccttcagacctgaaagatgtctgaaaattccagtgacagtgattcatcttgtggttggactgtcatcagtcatgaggggtcagatatagaaatgttgaattctgtgacccccactgacagctgtgagcccgccccagaatgttcatctttagagcaagaggagcttcaagcattgcagatagagcaaggagaaagcagccaaaatggcacagtgcttatggaagaaactgcttatccagctttggaggaaaccagctcaacaattgaggcagaggaacaaaagatacccgaagacagtatctatattggaactgccagtgatgattctgatattgttacccttgagccacctaagttagaagaaattggaaatcaagaagttgtcattgttgaagaagcacagagttcagaagactttaacatgggctcttcctctagcagccagtatactttctgtcagccagaaactgtattttcatctcagcctagtgacgatgaatcaagtagtgatgaaaccagtaatcagcccagtcctgcctttagacgacgccgtgctaggaagaagaccgtttctgcttcagaatctgaagaccggctagttgctgaacaagaaactgaaccttctaaggagttgagtaaacgtcagttcagtagtggtctcaataagtgtgttatacttgctttggtgattgcaatcagcatgggatttggccatttctatggcacaattcagattcagaagcgtcaacagttagtcagaaagatacatgaagatgaattgaatgatatgaaggattatctttcccagtgtcaacaggaacaagaatcttttatagattataagtcattgaaagaaaatcttgcaaggtgttggacacttactgaagcagagaagatgtcctttgaaactcagaaaacgaaccttgctacagaaaatcagtatttaagagtatccctggagaaggaagaaaaagccttatcctcattacaggaagagttaaacaaactaagagaacagattagaatattggaagataaagggacaagtactgaattagttaaagaaaatcagaaacttaagcagcatttggaagaggaaaagcagaaaaaacacagctttcttagtcaaagggagactctgttgacagaagcaaagatgctaaagagagaactggagagagaacgactagtaactacggctttaaggggggaactccagcagttaagtggtagtcagttacatggcaagtcagattctcccaatgtatatactgaaaaaaaggaaatagcaatcttacgggaaagactcactgagctggaacggaagctaaccttcgaacagcagcgttctgatttgtgggaaagattgtatgttgaggcaaaagatcaaaatggaaaacaaggaacagatggaaaaaagaaagggggcagaggaagccacagggctaaaaataagtcaaaggaaacatttttgggttcagttaaggaaacatttgatgccatgaagaattctaccaaggagtttgtaaggcatcataaagagaaaattaagcaggctaaagaagctgtgaaggaaaatctgaaaaaattctcagattcagttaaatccactttcagacactttaaagataccaccaagaatatctttgatgaaaagggtaataaaagatttggtgctacaaaagaagcagctgaaaaaccaagaacagtttttagtgactatttacatccacagtataaggcacctacagaaaaccatcataatagaggccctactatgcaaaatgatggaaggaaagaaaagccagttcactttaaagaattcagaaaaaatacaaattcaaagaaatgcagtcctgggcatgattgtagagaaaattctcattctttcagaaaggcttgttctggtgtatttgattgtgctcaacaagagtccatgagcctttttaacacagtggtgaatcctataaggatggatgaatttagacagataattcaaaggtacatgttaaaagaactggatactttttgtcactggaacgaacttgatcagttcatcaataagtttttcctaaacggtgtctttatacatgatcagaagctcttcactgactttgttaatgatgttaaagattatcttagaaacatgaaggaatatgaagtagataatgatggagtatttgagaagttggatgaatatatatatagacacttctttggtcacactttttcccctccatatggacccaggtcggtttacataaaaccgtgtcattacagtagtttgtaacatttgtagattggatagcatttttatgatttgatgagtttcttgtaaggttaccgtttctaagagttgtgctttatggccactgagagaattcagaataaattgaaagatggagtctaaaaattattagctgttacaaatggaacatttcattataacgtgatcactttgacttgagcaaatggtttaatttttatcttaaaaatcagttaagaatatataaaatcctactttggccaagtttgtttcttttcattatagtttatatgaaaagatcaccttaagtgaaattattttcctttaatcttttatgtatttattcacttttggaagctaggaatgagcaacacaaattttactctgaagtcagaagagctcatatataataattctaatgtcccacctattttcacttgtccattccatgtaccagcttagttatgatacttagtcacataattatctttgataaaggtagaggcacaaagaggcaaactaagcaagtcaaattctaatgtgtgtacttcataataattttttatccattttcatctctttatattctgtaacatgaaacttacctaatcttcaaatgttagcttcattttttacctttgaaatacttaatctttctgaataaatataatgtgtctataaaataatgagactgattctggtgtctttagtnattaagctggtatctagtcctataatgaacaaaggtgaagctgccttgaggagacaagtgaaaaatttttgcttcaaaggagctcacaagctaagtaaataaatgaaattaaggtatggggcatggtggcctcaggctgtctggaggtgtttggaaaggcttcttgagtgaggtggcctttgaactgaacttagtttttaaagtagcttttggaagagaaatgaggatttgctatgcagacagggaagggaatttcacttaaaaggaaggtcatttggagatgtgaagatacactgctttaaggaagcagggtagagctggaggataagagatgcagaccatgaagggccccattttatgctaaaggttttgtcctgtaggacatggagaacttctgaagaattttcaaggcgggtgggataagattatattgtattttagattacagtagtccccccttatcttcaggatatatgttccaagacccccagtggatgctggaaaccagggatagaacataattctatatatactatgcatgaatttctttttccttctttacaatctcacacataggtttgttcttactatagatcttaccaatctcagcatacttttatttctcttgagaaccttcaccctttcacttaaaggaggcgctttatagcttctctttggcatatccaaatgccagcatcactgttgtattttggggtcattattaagttacttagtcatccttaatccttatcttagggatacttgaacacaaacactgtggtaggataacagtatatctgattaacagactgctactaggtgattaatgggtgggtagtgtaaatacacaagaaaaggatgattcacatcccatgtgggatggagcagaactgcattatttcattacattactcagaacaggcatataattgaaaacttatgaattatttttttttaattatttgagatggaatcttgctttgtcagccaggctggagtgcagtgacacgatctcagctcactgcaacctctgtctcctgggttcaggtgattctcctccctagtctcccaagtagctgggactataggcacgtgccaccacacccggctaattttcatatttttagtagagatggggtttcaccatgttggccaggctgttcttgaaatcctgacctcaagtgatccacacatgtctacctcccaaagtgctgggattacagtcgtgagccactgtaccccgcctaaaactgatgaattatttctgaaattttctatttaacattttcagaccacagttgaccacaggtaacggaaacctcaatcacagaaagtaaagccgtggatacggtgggactaatgtattggtagcagcctagaggattgatgggaaaggtatgaagctagaaggtggtcaatataatacagacatgagctgatgaacatctaaactgggactatactagtaggagaggaaaggaaaaaacatttggaaaatagtaacattgatatttcttgtgaaggagaagtagaaagtaacagtgacttctagatttctgggttgggtcatctgttgttggatagtagtaccactgagatagggaattcaaggtttggggcaagggtaattggagatgagaattgtgtttggaggtaactactgacattcaagtggagagggttagttggcagttagttctatggtcatctcttttgccgagactgtatatttatcagactcctgggagaacaccaacatccatggggttgtagggaaggctaaggacaagagtggggagtggtaccttgaaaatccaaaagccatctcaagtaaaaggaataaatgtgtcatgctttttaaaaagttgatgtgcggaaaatgttttcttggcttggaaactgggcggccaggggatgacagtatggacttccagtgaagtagtgacggaagcctgatcatagacattaaggaaagcggtgtaggtgttgtgagcttttgctgtaagaaaaagttgagacttttgttttgctttgtttgtgagagatgtgtatgtatttctgctgagtgataaagccagcggggagggactgatttttataggaaaggaggaaaaataatggaaacacatctcattattttattgtcacatttcttttctttgttatcttttgagtgtttcccttttttgccagtagagttattgtctattttttctttctataggacaaaaaaactaatacagactcctttatttttatatggatatactaggattgtaattcagatatttaatatcttttatcagtgttcagatcatagattaatggagaaaacatttaaaattgttttaaatttaaatacattgaactctaacatagatgaaaaatgtgtttactgctttcagtcgacctgataaaaagcaacgtatggtaaatattgaaaactccaggcatcgaaaacaagagcagaagcaccttcagccacagccttataaaagggaaggtaaatggcataaatatggtcgcactaatggaagacaaatggcaaatcttgaaatagaattggggcaattaccttttgatcctcaatactgattcacaattgagttaaattagacaactgtaagagaaaaatttatgctttgtataatgtttggtattgaaactaatgaaattaccaagatgacaatgtcttttcttttgtttctaagtatcagtttgataactttatattattcctcagaagcattagttaaaagtctactaacctgcattttcctgtagtttagcttcgttgaattttttttgacactggaaatgttcaactgtagttttattaaggaagccaggcatgcaacagattttgtgcatgaaatgagacttcctttcagtgtaagagcttaaagcaagctcagtcatacatgacaaagtgtaattaacactgatgtttgtgttaaatttgcagcagagcttgagaaaagtacattgttctggaatttcatcattaacattttataatcttacactcacttcttgtctttttgtgggttcaagagccctctgacttgtgaagaatttgctgccctcttaagagcttgctgacttgttttcttgtgaaattttttgcacatctgaatatcgtggaagaaacaataaaactacaccatgaggaaaactaaaggtctttatttaaaatctggcattgtattaacatgtaattttatactatgtggtattttatacatttcctcagtagtgatatttggtaaagcagttcatacagcttttttctaagttccatgaatcttacccagtgtttaccgaagtatttaagcagcatctgaatatttccacccagcaatgttaatttatctaggaaagttcagaatttcatcttcatgttgaatttcccttttaacttccgttcatagacatatatgtgacttccaattcgaccctctggcaagtgagtgtggaagaaaacagcagttcttttataattgcttgaaattaggaaagcgcttatttcctagaagcaaataaatgtttaagtaaataaaggctacattttgctgagtactgtttcagtcaat

SEQ ID NO: 359728 - DNA, 6841 bp, Homo sapiens
  misc_feature (3127)..(3127): n is a, c, g, or t
  misc_feature (6798)..(6798): n is a, c, g, or t
  misc_feature (6839)..(6839): n is a, c, g, or t
acggcatgcactgcggcgcccagccggtcaccgcctgccggctgcagacgcctgcgagcaggttgtttttataagaggcgtcattggcgcccgagctgtgaccgccgccactggggcagccagcacaatcgggcggaggtggcgctgccccttcagacctgaaagatgtctgaaaattccagtgacagtgattcatcttgtggttggactgtcatcagtcatgaggggtcagatatagaaatgttgaattctgtgacccccactgacagctgtgagcccgccccagaatgttcatctttagagcaagaggagcttcaagcattgcagatagagcaaggagaaagcagccaaaatggcacagtgcttatggaagaaactgcttatccagctttggaggaaaccagctcaacaattgaggcagaggaacaaaagatacccgaagacagtatctatattggaactgccagtgatgattctgatattgttacccttgagccacctaagttagaagaaattggaaatcaagaagttgtcattgttgaagaagcacagagttcagaagactttaacatgggctcttcctctagcagccagtatactttctgtcagccagaaactgtattttcatctcagcctagtgacgatgaatcaagtagtgatgaaaccagtaatcagcccagtcctgcctttagacgacgccgtgctaggaagaagaccgtttctgcttcagaatctgaagaccggctagttgctgaacaagaaactgaaccttctaaggagttgagtaaacgtcagttcagtagtggtctcaataagtgtgttatacttgctttggtgattgcaatcagcatgggatttggccatttctatggcacaattcagattcagaagcgtcaacagttagtcagaaagatacatgaagatgaattgaatgatatgaaggattatctttcccagtgtcaacaggaacaagaatcttttatagattataagtcattgaaagaaaatcttgcaaggtgttggacacttactgaagcagagaagatgtcctttgaaactcagaaaacgaaccttgctacagaaaatcagtatttaagagtatccctggagaaggaagaaaaagccttatcctcattacaggaagagttaaacaaactaagagaacagattagaatattggaagataaagggacaagtactgaattagttaaagaaaatcagaaacttaagcagcatttggaagaggaaaagcagaaaaaacacagctttcttagtcaaagggagactctgttgacagaagcaaagatgctaaagagagaactggagagagaacgactagtaactacggctttaaggggggaactccagcagttaagtggtagtcagttacatggcaagtcagattctcccaatgtatatactgaaaaaaaggaaatagcaatcttacgggaaagactcactgagctggaacggaagctaaccttcgaacagcagcgttctgatttgtgggaaagattgtatgttgaggcaaaagatcaaaatggaaaacaaggaacagatggaaaaaagaaagggggcagaggaagccacagggctaaaaataagtcaaaggaaacatttttgggttcagttaaggaaacatttgatgccatgaagaattctaccaaggagtttgtaaggcatcataaagagaaaattaagcaggctaaagaagctgtgaaggaaaatctgaaaaaattctcagattcagttaaatccactttcagacactttaaagataccaccaagaatatctttgatgaaaagggtaataaaagatttggtgctacaaaagaagcagctgaaaaaccaagaacagtttttagtgactatttacatccacagtataaggcacctacagaaaaccatcataatagaggccctactatgcaaaatgatggaaggaaagaaaagccagttcactttaaagaattcagaaaaaatacaaattcaaagaaatgcagtcctgggcatgattgtagagaaaattctcattctttcagaaaggcttgttctggtgtatttgattgtgctcaacaagagtccatgagcctttttaacacagtggtgaatcctataaggatggatgaatttagacagataattcaaaggtacatgttaaaagaactggatactttttgtcactggaacgaacttgatcagttcatcaataagtttttcctaaacggtgtctttatacatgatcagaagctcttcactgactttgttaatgatgttaaagattatcttagaaacatgaaggaatatgaagtagataatgatggagtatttgagaagttggatgaatatatatatagacacttctttggtcacactttttcccctccatatggacccaggtcggtttacataaaaccgtgtcattacagtagtttgtaacatttgtagattggatagcatttttatgatttgatgagtttcttgtaaggttaccgtttctaagagttgtgctttatggccactgagagaattcagaataaattgaaagatggagtctaaaaattattagctgttacaaatggaacatttcattataacgtgatcactttgacttgagcaaatggtttaatttttatcttaaaaatcagttaagaatatataaaatcctactttggccaagtttgtttcttttcattatagtttatatgaaaagatcaccttaagtgaaattattttcctttaatcttttatgtatttattcacttttggaagctaggaatgagcaacacaaattttactctgaagtcagaagagctcatatataataattctaatgtcccacctattttcacttgtccattccatgtaccagcttagttatgatacttagtcacataattatctttgataaaggtagaggcacaaagaggcaaactaagcaagtcaaattctaatgtgtgtacttcataataattttttatccattttcatctctttatattctgtaacatgaaacttacctaatcttcaaatgttagcttcattttttacctttgaaatacttaatctttctgaataaatataatgtgtctataaaataatgagactgattctggtgtctttagtnattaagctggtatctagtcctataatgaacaaaggtgaagctgccttgaggagacaagtgaaaaatttttgcttcaaaggagctcacaagctaagtaaataaatgaaattaaggtatggggcatggtggcctcaggctgtctggaggtgtttggaaaggcttcttgagtgaggtggcctttgaactgaacttagtttttaaagtagcttttggaagagaaatgaggatttgctatgcagacagggaagggaatttcacttaaaaggaaggtcatttggagatgtgaagatacactgctttaaggaagcagggtagagctggaggataagagatgcagaccatgaagggccccattttatgctaaaggttttgtcctgtaggacatggagaacttctgaagaattttcaaggcgggtgggataagattatattgtattttagattacagtagtccccccttatcttcaggatatatgttccaagacccccagtggatgctggaaaccagggatagaacataattctatatatactatgcatgaatttctttttccttctttacaatctcacacataggtttgttcttactatagatcttaccaatctcagcatacttttatttctcttgagaaccttcaccctttcacttaaaggaggcgctttatagcttctctttggcatatccaaatgccagcatcactgttgtattttggggtcattattaagttacttagtcatccttaatccttatcttagggatacttgaacacaaacactgtggtaggataacagtatatctgattaacagactgctactaggtgattaatgggtgggtagtgtaaatacacaagaaaaggatgattcacatcccatgtgggatggagcagaactgcattatttcattacattactcagaacaggcatataattgaaaacttatgaattatttttttttaattatttgagatggaatcttgctttgtcagccaggctggagtgcagtgacacgatctcagctcactgcaacctctgtctcctgggttcaggtgattctcctccctagtctcccaagtagctgggactataggcacgtgccaccacacccggctaattttcatatttttagtagagatggggtttcaccatgttggccaggctgttcttgaaatcctgacctcaagtgatccacacatgtctacctcccaaagtgctgggattacagtcgtgagccactgtaccccgcctaaaactgatgaattatttctgaaattttctatttaacattttcagaccacagttgaccacaggtaacggaaacctcaatcacagaaagtaaagccgtggatacggtgggactaatgtattggtagcagcctagaggattgatgggaaaggtatgaagctagaaggtggtcaatataatacagacatgagctgatgaacatctaaactgggactatactagtaggagaggaaaggaaaaaacatttggaaaatagtaacattgatatttcttgtgaaggagaagtagaaagtaacagtgacttctagatttctgggttgggtcatctgttgttggatagtagtaccactgagatagggaattcaaggtttggggcaagggtaattggagatgagaattgtgtttggaggtaactactgacattcaagtggagagggttagttggcagttagttctatggtcatctcttttgccgagactgtatatttatcagactcctgggagaacaccaacatccatggggttgtagggaaggctaaggacaagagtggggagtggtaccttgaaaatccaaaagccatctcaagtaaaaggaataaatgtgtcatgctttttaaaaagttgatgtgcggaaaatgttttcttggcttggaaactgggcggccaggggatgacagtatggacttccagtgaagtagtgacggaagcctgatcatagacattaaggaaagcggtgtaggtgttgtgagcttttgctgtaagaaaaagttgagacttttgttttgctttgtttgtgagagatgtgtatgtatttctgctgagtgataaagccagcggggagggactgatttttataggaaaggaggaaaaataatggaaacacatctcattattttattgtcacatttcttttctttgttatcttttgagtgtttcccttttttgccagtagagttattgtctattttttctttctataggacaaaaaaactaatacagactcctttatttttatatggatatactaggattgtaattcagatatttaatatcttttatcagtgttcagatcatagattaatggagaaaacatttaaaattgttttaaatttaaatacattgaactctaacatagatgaaaaatgtgtttactgctttcagtcgacctgataaaaagcaacgtatggtaaatattgaaaactccaggcatcgaaaacaagagcagaagcaccttcagccacagccttataaaagggaaggtaaatggcataaatatggtcgcactaatggaagacaaatggcaaatcttgaaatagaattggggcaattaccttttgatcctcaatactgattcacaattgagttaaattagacaactgtaagagaaaaatttatgctttgtataatgtttggtattgaaactaatgaaattaccaagatgacaatgtcttttcttttgtttctaagtatcagtttgataactttatattattcctcagaagcattagttaaaagtctactaacctgcattttcctgtagtttagcttcgttgaattttttttgacactggaaatgttcaactgtagttttattaaggaagccaggcatgcaacagattttgtgcatgaaatgagacttcctttcagtgtaagagcttaaagcaagctcagtcatacatgacaaagtgtaattaacactgatgtttgtgttaaatttgcagcagagcttgagaaaagtacattgttctggaatttcatcattaacattttataatcttacactcacttcttgtctttttgtgggttcaagagccctctgacttgtgaagaatttgctgccctcttaagagcttgctgacttgttttcttgtgaaattttttgcacatctgaatatcgtggaagaaacaataaaactacaccatgaggaaaactaaaggtctttatttaaaatctggcattgtattaacatgtaattttatactatgtggtattttatacatttcctcagtagtgatatttggtaaagcagttcatacagcttttttctaagttccatgaatcttacccagtgtttaccgaagtatttaagcagcatctgaatatttccacccagcaatgttaatttatctaggaaagttcagaatttcatcttcatgttgaatttcccttttaacttccgttcatagacatatatgtgacttccaattcgaccctctggcaagtgagtgtggaagaaaacagcagttcttttataattgcttgaaattaggaaagcgctattccaaaatgctgaaggtgatcaagtgagtaggcaatgatgcatcatcatgaaactctctatgtaaccagtttaagggatttaggtaaaatacatctgcttcatcaagataatgactttttccagtcaggtctggcggcacggggtncagggagtgggcgtgacaggcacgaacaccatcagtggtcngg

SEQ ID NO: 359729 - DNA, 6770 bp, Homo sapiens
  misc_feature (3177)..(3177): n is a, c, g, or t
tcctctttccgtgcgcgagtgcacagctccggaggcccgagccgaccctggggcgtccggtccggtggtcttgcagcctccaaaccccgagtgctataccgaactgcgcgccaagggtgggagagctgacggcctgggccacccttcttccttcactgggcaggctttgaggtgcttgtcggtctggactgatgaaaatccatatgacctgaaagatgtctgaaaattccagtgacagtgattcatcttgtggttggactgtcatcagtcatgaggggtcagatatagaaatgttgaattctgtgacccccactgacagctgtgagcccgccccagaatgttcatctttagagcaagaggagcttcaagcattgcagatagagcaaggagaaagcagccaaaatggcacagtgcttatggaagaaactgcttatccagctttggaggaaaccagctcaacaattgaggcagaggaacaaaagatacccgaagacagtatctatattggaactgccagtgatgattctgatattgttacccttgagccacctaagttagaagaaattggaaatcaagaagttgtcattgttgaagaagcacagagttcagaagactttaacatgggctcttcctctagcagccagtatactttctgtcagccagaaactgtattttcatctcagcctagtgacgatgaatcaagtagtgatgaaaccagtaatcagcccagtcctgcctttagacgacgccgtgctaggaagaagaccgtttctgcttcagaatctgaagaccggctagttgctgaacaagaaactgaaccttctaaggagttgagtaaacgtcagttcagtagtggtctcaataagtgtgttatacttgctttggtgattgcaatcagcatgggatttggccatttctatggcacaattcagattcagaagcgtcaacagttagtcagaaagatacatgaagatgaattgaatgatatgaaggattatctttcccagtgtcaacaggaacaagaatcttttatagattataagtcattgaaagaaaatcttgcaaggtgttggacacttactgaagcagagaagatgtcctttgaaactcagaaaacgaaccttgctacagaaaatcagtatttaagagtatccctggagaaggaagaaaaagccttatcctcattacaggaagagttaaacaaactaagagaacagattagaatattggaagataaagggacaagtactgaattagttaaagaaaatcagaaacttaagcagcatttggaagaggaaaagcagaaaaaacacagctttcttagtcaaagggagactctgttgacagaagcaaagatgctaaagagagaactggagagagaacgactagtaactacggctttaaggggggaactccagcagttaagtggtagtcagttacatggcaagtcagattctcccaatgtatatactgaaaaaaaggaaatagcaatcttacgggaaagactcactgagctggaacggaagctaaccttcgaacagcagcgttctgatttgtgggaaagattgtatgttgaggcaaaagatcaaaatggaaaacaaggaacagatggaaaaaagaaagggggcagaggaagccacagggctaaaaataagtcaaaggaaacatttttgggttcagttaaggaaacatttgatgccatgaagaattctaccaaggagtttgtaaggcatcataaagagaaaattaagcaggctaaagaagctgtgaaggaaaatctgaaaaaattctcagattcagttaaatccactttcagacactttaaagataccaccaagaatatctttgatgaaaagggtaataaaagatttggtgctacaaaagaagcagctgaaaaaccaagaacagtttttagtgactatttacatccacagtataaggcacctacagaaaaccatcataatagaggccctactatgcaaaatgatggaaggaaagaaaagccagttcactttaaagaattcagaaaaaatacaaattcaaagaaatgcagtcctgggcatgattgtagagaaaattctcattctttcagaaaggcttgttctggtgtatttgattgtgctcaacaagagtccatgagcctttttaacacagtggtgaatcctataaggatggatgaatttagacagataattcaaaggtacatgttaaaagaactggatactttttgtcactggaacgaacttgatcagttcatcaataagtttttcctaaacggtgtctttatacatgatcagaagctcttcactgactttgttaatgatgttaaagattatcttagaaacatgaaggaatatgaagtagataatgatggagtatttgagaagttggatgaatatatatatagacacttctttggtcacactttttcccctccatatggacccaggtcggtttacataaaaccgtgtcattacagtagtttgtaacatttgtagattggatagcatttttatgatttgatgagtttcttgtaaggttaccgtttctaagagttgtgctttatggccactgagagaattcagaataaattgaaagatggagtctaaaaattattagctgttacaaatggaacatttcattataacgtgatcactttgacttgagcaaatggtttaatttttatcttaaaaatcagttaagaatatataaaatcctactttggccaagtttgtttcttttcattatagtttatatgaaaagatcaccttaagtgaaattattttcctttaatcttttatgtatttattcacttttggaagctaggaatgagcaacacaaattttactctgaagtcagaagagctcatatataataattctaatgtcccacctattttcacttgtccattccatgtaccagcttagttatgatacttagtcacataattatctttgataaaggtagaggcacaaagaggcaaactaagcaagtcaaattctaatgtgtgtacttcataataattttttatccattttcatctctttatattctgtaacatgaaacttacctaatcttcaaatgttagcttcattttttacctttgaaatacttaatctttctgaataaatataatgtgtctataaaataatgagactgattctggtgtctttagtnattaagctggtatctagtcctataatgaacaaaggtgaagctgccttgaggagacaagtgaaaaatttttgcttcaaaggagctcacaagctaagtaaataaatgaaattaaggtatggggcatggtggcctcaggctgtctggaggtgtttggaaaggcttcttgagtgaggtggcctttgaactgaacttagtttttaaagtagcttttggaagagaaatgaggatttgctatgcagacagggaagggaatttcacttaaaaggaaggtcatttggagatgtgaagatacactgctttaaggaagcagggtagagctggaggataagagatgcagaccatgaagggccccattttatgctaaaggttttgtcctgtaggacatggagaacttctgaagaattttcaaggcgggtgggataagattatattgtattttagattacagtagtccccccttatcttcaggatatatgttccaagacccccagtggatgctggaaaccagggatagaacataattctatatatactatgcatgaatttctttttccttctttacaatctcacacataggtttgttcttactatagatcttaccaatctcagcatacttttatttctcttgagaaccttcaccctttcacttaaaggaggcgctttatagcttctctttggcatatccaaatgccagcatcactgttgtattttggggtcattattaagttacttagtcatccttaatccttatcttagggatacttgaacacaaacactgtggtaggataacagtatatctgattaacagactgctactaggtgattaatgggtgggtagtgtaaatacacaagaaaaggatgattcacatcccatgtgggatggagcagaactgcattatttcattacattactcagaacaggcatataattgaaaacttatgaattatttttttttaattatttgagatggaatcttgctttgtcagccaggctggagtgcagtgacacgatctcagctcactgcaacctctgtctcctgggttcaggtgattctcctccctagtctcccaagtagctgggactataggcacgtgccaccacacccggctaattttcatatttttagtagagatggggtttcaccatgttggccaggctgttcttgaaatcctgacctcaagtgatccacacatgtctacctcccaaagtgctgggattacagtcgtgagccactgtaccccgcctaaaactgatgaattatttctgaaattttctatttaacattttcagaccacagttgaccacaggtaacggaaacctcaatcacagaaagtaaagccgtggatacggtgggactaatgtattggtagcagcctagaggattgatgggaaaggtatgaagctagaaggtggtcaatataatacagacatgagctgatgaacatctaaactgggactatactagtaggagaggaaaggaaaaaacatttggaaaatagtaacattgatatttcttgtgaaggagaagtagaaagtaacagtgacttctagatttctgggttgggtcatctgttgttggatagtagtaccactgagatagggaattcaaggtttggggcaagggtaattggagatgagaattgtgtttggaggtaactactgacattcaagtggagagggttagttggcagttagttctatggtcatctcttttgccgagactgtatatttatcagactcctgggagaacaccaacatccatggggttgtagggaaggctaaggacaagagtggggagtggtaccttgaaaatccaaaagccatctcaagtaaaaggaataaatgtgtcatgctttttaaaaagttgatgtgcggaaaatgttttcttggcttggaaactgggcggccaggggatgacagtatggacttccagtgaagtagtgacggaagcctgatcatagacattaaggaaagcggtgtaggtgttgtgagcttttgctgtaagaaaaagttgagacttttgttttgctttgtttgtgagagatgtgtatgtatttctgctgagtgataaagccagcggggagggactgatttttataggaaaggaggaaaaataatggaaacacatctcattattttattgtcacatttcttttctttgttatcttttgagtgtttcccttttttgccagtagagttattgtctattttttctttctataggacaaaaaaactaatacagactcctttatttttatatggatatactaggattgtaattcagatatttaatatcttttatcagtgttcagatcatagattaatggagaaaacatttaaaattgttttaaatttaaatacattgaactctaacatagatgaaaaatgtgtttactgctttcagtcgacctgataaaaagcaacgtatggtaaatattgaaaactccaggcatcgaaaacaagagcagaagcaccttcagccacagccttataaaagggaaggtaaatggcataaatatggtcgcactaatggaagacaaatggcaaatcttgaaatagaattggggcaattaccttttgatcctcaatactgattcacaattgagttaaattagacaactgtaagagaaaaatttatgctttgtataatgtttggtattgaaactaatgaaattaccaagatgacaatgtcttttcttttgtttctaagtatcagtttgataactttatattattcctcagaagcattagttaaaagtctactaacctgcattttcctgtagtttagcttcgttgaattttttttgacactggaaatgttcaactgtagttttattaaggaagccaggcatgcaacagattttgtgcatgaaatgagacttcctttcagtgtaagagcttaaagcaagctcagtcatacatgacaaagtgtaattaacactgatgtttgtgttaaatttgcagcagagcttgagaaaagtacattgttctggaatttcatcattaacattttataatcttacactcacttcttgtctttttgtgggttcaagagccctctgacttgtgaagaatttgctgccctcttaagagcttgctgacttgttttcttgtgaaattttttgcacatctgaatatcgtggaagaaacaataaaactacaccatgaggaaaactaaaggtctttatttaaaatctggcattgtattaacatgtaattttatactatgtggtattttatacatttcctcagtagtgatatttggtaaagcagttcatacagcttttttctaagttccatgaatcttacccagtgtttaccgaagtatttaagcagcatctgaatatttccacccagcaatgttaatttatctaggaaagttcagaatttcatcttcatgttgaatttcccttttaacttccgttcatagacatatatgtgacttccaattcgaccctctggcaagtgagtgtggaagaaaacagcagttcttttataattgcttgaaattaggaaagcgcttatttcctagaagcaaataaatgtttaagtaaataaaggctacattttgctgagtactgtttcagtcaat

SEQ ID NO: 359730 - DNA, 6344 bp, Homo sapiens
  misc_feature (2751)..(2751): n is a, c, g, or t
gctctcctagcacaaatagtatgattaacagattcttgtgtatcacatttgaaatgctttatgttttggctttatgttgatgagttgaaaacccgtgtttttgtttatgttgtttggtttttgtttttggctatcttatgtagaaaggcatgtaagggatggcattgattattctaaataatttttactgggaaagcttttccaagattttgaatagctaaatgtcaacttttttcttaatagtattttcatctcagcctagtgacgatgaatcaagtagtgatgaaaccagtaatcagcccagtcctgcctttagacgacgccgtgctaggaagaagaccgtttctgcttcagaatctgaagaccggctagttgctgaacaagaaactgaaccttctaaggagttgagtaaacgtcagttcagtagtggtctcaataagtgtgttatacttgctttggtgattgcaatcagcatgggatttggccatttctatggcacaattcagattcagaagcgtcaacagttagtcagaaagatacatgaagatgaattgaatgatatgaaggattatctttcccagtgtcaacaggaacaagaatcttttatagattataagtcattgaaagaaaatcttgcaaggtgttggacacttactgaagcagagaagatgtcctttgaaactcagaaaacgaaccttgctacagaaaatcagtatttaagagtatccctggagaaggaagaaaaagccttatcctcattacaggaagagttaaacaaactaagagaacagattagaatattggaagataaagggacaagtactgaattagttaaagaaaatcagaaacttaagcagcatttggaagaggaaaagcagaaaaaacacagctttcttagtcaaagggagactctgttgacagaagcaaagatgctaaagagagaactggagagagaacgactagtaactacggctttaaggggggaactccagcagttaagtggtagtcagttacatggcaagtcagattctcccaatgtatatactgaaaaaaaggaaatagcaatcttacgggaaagactcactgagctggaacggaagctaaccttcgaacagcagcgttctgatttgtgggaaagattgtatgttgaggcaaaagatcaaaatggaaaacaaggaacagatggaaaaaagaaagggggcagaggaagccacagggctaaaaataagtcaaaggaaacatttttgggttcagttaaggaaacatttgatgccatgaagaattctaccaaggagtttgtaaggcatcataaagagaaaattaagcaggctaaagaagctgtgaaggaaaatctgaaaaaattctcagattcagttaaatccactttcagacactttaaagataccaccaagaatatctttgatgaaaagggtaataaaagatttggtgctacaaaagaagcagctgaaaaaccaagaacagtttttagtgactatttacatccacagtataaggcacctacagaaaaccatcataatagaggccctactatgcaaaatgatggaaggaaagaaaagccagttcactttaaagaattcagaaaaaatacaaattcaaagaaatgcagtcctgggcatgattgtagagaaaattctcattctttcagaaaggcttgttctggtgtatttgattgtgctcaacaagagtccatgagcctttttaacacagtggtgaatcctataaggatggatgaatttagacagataattcaaaggtacatgttaaaagaactggatactttttgtcactggaacgaacttgatcagttcatcaataagtttttcctaaacggtgtctttatacatgatcagaagctcttcactgactttgttaatgatgttaaagattatcttagaaacatgaaggaatatgaagtagataatgatggagtatttgagaagttggatgaatatatatatagacacttctttggtcacactttttcccctccatatggacccaggtcggtttacataaaaccgtgtcattacagtagtttgtaacatttgtagattggatagcatttttatgatttgatgagtttcttgtaaggttaccgtttctaagagttgtgctttatggccactgagagaattcagaataaattgaaagatggagtctaaaaattattagctgttacaaatggaacatttcattataacgtgatcactttgacttgagcaaatggtttaatttttatcttaaaaatcagttaagaatatataaaatcctactttggccaagtttgtttcttttcattatagtttatatgaaaagatcaccttaagtgaaattattttcctttaatcttttatgtatttattcacttttggaagctaggaatgagcaacacaaattttactctgaagtcagaagagctcatatataataattctaatgtcccacctattttcacttgtccattccatgtaccagcttagttatgatacttagtcacataattatctttgataaaggtagaggcacaaagaggcaaactaagcaagtcaaattctaatgtgtgtacttcataataattttttatccattttcatctctttatattctgtaacatgaaacttacctaatcttcaaatgttagcttcattttttacctttgaaatacttaatctttctgaataaatataatgtgtctataaaataatgagactgattctggtgtctttagtnattaagctggtatctagtcctataatgaacaaaggtgaagctgccttgaggagacaagtgaaaaatttttgcttcaaaggagctcacaagctaagtaaataaatgaaattaaggtatggggcatggtggcctcaggctgtctggaggtgtttggaaaggcttcttgagtgaggtggcctttgaactgaacttagtttttaaagtagcttttggaagagaaatgaggatttgctatgcagacagggaagggaatttcacttaaaaggaaggtcatttggagatgtgaagatacactgctttaaggaagcagggtagagctggaggataagagatgcagaccatgaagggccccattttatgctaaaggttttgtcctgtaggacatggagaacttctgaagaattttcaaggcgggtgggataagattatattgtattttagattacagtagtccccccttatcttcaggatatatgttccaagacccccagtggatgctggaaaccagggatagaacataattctatatatactatgcatgaatttctttttccttctttacaatctcacacataggtttgttcttactatagatcttaccaatctcagcatacttttatttctcttgagaaccttcaccctttcacttaaaggaggcgctttatagcttctctttggcatatccaaatgccagcatcactgttgtattttggggtcattattaagttacttagtcatccttaatccttatcttagggatacttgaacacaaacactgtggtaggataacagtatatctgattaacagactgctactaggtgattaatgggtgggtagtgtaaatacacaagaaaaggatgattcacatcccatgtgggatggagcagaactgcattatttcattacattactcagaacaggcatataattgaaaacttatgaattatttttttttaattatttgagatggaatcttgctttgtcagccaggctggagtgcagtgacacgatctcagctcactgcaacctctgtctcctgggttcaggtgattctcctccctagtctcccaagtagctgggactataggcacgtgccaccacacccggctaattttcatatttttagtagagatggggtttcaccatgttggccaggctgttcttgaaatcctgacctcaagtgatccacacatgtctacctcccaaagtgctgggattacagtcgtgagccactgtaccccgcctaaaactgatgaattatttctgaaattttctatttaacattttcagaccacagttgaccacaggtaacggaaacctcaatcacagaaagtaaagccgtggatacggtgggactaatgtattggtagcagcctagaggattgatgggaaaggtatgaagctagaaggtggtcaatataatacagacatgagctgatgaacatctaaactgggactatactagtaggagaggaaaggaaaaaacatttggaaaatagtaacattgatatttcttgtgaaggagaagtagaaagtaacagtgacttctagatttctgggttgggtcatctgttgttggatagtagtaccactgagatagggaattcaaggtttggggcaagggtaattggagatgagaattgtgtttggaggtaactactgacattcaagtggagagggttagttggcagttagttctatggtcatctcttttgccgagactgtatatttatcagactcctgggagaacaccaacatccatggggttgtagggaaggctaaggacaagagtggggagtggtaccttgaaaatccaaaagccatctcaagtaaaaggaataaatgtgtcatgctttttaaaaagttgatgtgcggaaaatgttttcttggcttggaaactgggcggccaggggatgacagtatggacttccagtgaagtagtgacggaagcctgatcatagacattaaggaaagcggtgtaggtgttgtgagcttttgctgtaagaaaaagttgagacttttgttttgctttgtttgtgagagatgtgtatgtatttctgctgagtgataaagccagcggggagggactgatttttataggaaaggaggaaaaataatggaaacacatctcattattttattgtcacatttcttttctttgttatcttttgagtgtttcccttttttgccagtagagttattgtctattttttctttctataggacaaaaaaactaatacagactcctttatttttatatggatatactaggattgtaattcagatatttaatatcttttatcagtgttcagatcatagattaatggagaaaacatttaaaattgttttaaatttaaatacattgaactctaacatagatgaaaaatgtgtttactgctttcagtcgacctgataaaaagcaacgtatggtaaatattgaaaactccaggcatcgaaaacaagagcagaagcaccttcagccacagccttataaaagggaaggtaaatggcataaatatggtcgcactaatggaagacaaatggcaaatcttgaaatagaattggggcaattaccttttgatcctcaatactgattcacaattgagttaaattagacaactgtaagagaaaaatttatgctttgtataatgtttggtattgaaactaatgaaattaccaagatgacaatgtcttttcttttgtttctaagtatcagtttgataactttatattattcctcagaagcattagttaaaagtctactaacctgcattttcctgtagtttagcttcgttgaattttttttgacactggaaatgttcaactgtagttttattaaggaagccaggcatgcaacagattttgtgcatgaaatgagacttcctttcagtgtaagagcttaaagcaagctcagtcatacatgacaaagtgtaattaacactgatgtttgtgttaaatttgcagcagagcttgagaaaagtacattgttctggaatttcatcattaacattttataatcttacactcacttcttgtctttttgtgggttcaagagccctctgacttgtgaagaatttgctgccctcttaagagcttgctgacttgttttcttgtgaaattttttgcacatctgaatatcgtggaagaaacaataaaactacaccatgaggaaaactaaaggtctttatttaaaatctggcattgtattaacatgtaattttatactatgtggtattttatacatttcctcagtagtgatatttggtaaagcagttcatacagcttttttctaagttccatgaatcttacccagtgtttaccgaagtatttaagcagcatctgaatatttccacccagcaatgttaatttatctaggaaagttcagaatttcatcttcatgttgaatttcccttttaacttccgttcatagacatatatgtgacttccaattcgaccctctggcaagtgagtgtggaagaaaacagcagttcttttataattgcttgaaattaggaaagcgcttatttcctagaagcaaataaatgtttaagtaaataaaggctacattttgctgagtactgtttcagtcaat

SEQ ID NO: 359731 - DNA, 5946 bp, Homo sapiens
  misc_feature (35)..(35): n is a, c, g, or t
  misc_feature (2353)..(2353): n is a, c, g, or t
atttccgaatcgaaccccgttccccatcggaatgngccatagaaatggccaaatcccatggtgattgcaatcagcatgggatttggccatttctatggcacaattcagattcagaagcgtcaacagttagtcagaaagatacatgaagatgaattgaatgatatgaaggattatctttcccagtgtcaacaggaacaagaatcttttatagattataagtcattgaaagaaaatcttgcaaggtgttggacacttactgaagcagagaagatgtcctttgaaactcagaaaacgaaccttgctacagaaaatcagtatttaagagtatccctggagaaggaagaaaaagccttatcctcattacaggaagagttaaacaaactaagagaacagattagaatattggaagataaagggacaagtactgaattagttaaagaaaatcagaaacttaagcagcatttggaagaggaaaagcagaaaaaacacagctttcttagtcaaagggagactctgttgacagaagcaaagatgctaaagagagaactggagagagaacgactagtaactacggctttaaggggggaactccagcagttaagtggtagtcagttacatggcaagtcagattctcccaatgtatatactgaaaaaaaggaaatagcaatcttacgggaaagactcactgagctggaacggaagctaaccttcgaacagcagcgttctgatttgtgggaaagattgtatgttgaggcaaaagatcaaaatggaaaacaaggaacagatggaaaaaagaaagggggcagaggaagccacagggctaaaaataagtcaaaggaaacatttttgggttcagttaaggaaacatttgatgccatgaagaattctaccaaggagtttgtaaggcatcataaagagaaaattaagcaggctaaagaagctgtgaaggaaaatctgaaaaaattctcagattcagttaaatccactttcagacactttaaagataccaccaagaatatctttgatgaaaagggtaataaaagatttggtgctacaaaagaagcagctgaaaaaccaagaacagtttttagtgactatttacatccacagtataaggcacctacagaaaaccatcataatagaggccctactatgcaaaatgatggaaggaaagaaaagccagttcactttaaagaattcagaaaaaatacaaattcaaagaaatgcagtcctgggcatgattgtagagaaaattctcattctttcagaaaggcttgttctggtgtatttgattgtgctcaacaagagtccatgagcctttttaacacagtggtgaatcctataaggatggatgaatttagacagataattcaaaggtacatgttaaaagaactggatactttttgtcactggaacgaacttgatcagttcatcaataagtttttcctaaacggtgtctttatacatgatcagaagctcttcactgactttgttaatgatgttaaagattatcttagaaacatgaaggaatatgaagtagataatgatggagtatttgagaagttggatgaatatatatatagacacttctttggtcacactttttcccctccatatggacccaggtcggtttacataaaaccgtgtcattacagtagtttgtaacatttgtagattggatagcatttttatgatttgatgagtttcttgtaaggttaccgtttctaagagttgtgctttatggccactgagagaattcagaataaattgaaagatggagtctaaaaattattagctgttacaaatggaacatttcattataacgtgatcactttgacttgagcaaatggtttaatttttatcttaaaaatcagttaagaatatataaaatcctactttggccaagtttgtttcttttcattatagtttatatgaaaagatcaccttaagtgaaattattttcctttaatcttttatgtatttattcacttttggaagctaggaatgagcaacacaaattttactctgaagtcagaagagctcatatataataattctaatgtcccacctattttcacttgtccattccatgtaccagcttagttatgatacttagtcacataattatctttgataaaggtagaggcacaaagaggcaaactaagcaagtcaaattctaatgtgtgtacttcataataattttttatccattttcatctctttatattctgtaacatgaaacttacctaatcttcaaatgttagcttcattttttacctttgaaatacttaatctttctgaataaatataatgtgtctataaaataatgagactgattctggtgtctttagtnattaagctggtatctagtcctataatgaacaaaggtgaagctgccttgaggagacaagtgaaaaatttttgcttcaaaggagctcacaagctaagtaaataaatgaaattaaggtatggggcatggtggcctcaggctgtctggaggtgtttggaaaggcttcttgagtgaggtggcctttgaactgaacttagtttttaaagtagcttttggaagagaaatgaggatttgctatgcagacagggaagggaatttcacttaaaaggaaggtcatttggagatgtgaagatacactgctttaaggaagcagggtagagctggaggataagagatgcagaccatgaagggccccattttatgctaaaggttttgtcctgtaggacatggagaacttctgaagaattttcaaggcgggtgggataagattatattgtattttagattacagtagtccccccttatcttcaggatatatgttccaagacccccagtggatgctggaaaccagggatagaacataattctatatatactatgcatgaatttctttttccttctttacaatctcacacataggtttgttcttactatagatcttaccaatctcagcatacttttatttctcttgagaaccttcaccctttcacttaaaggaggcgctttatagcttctctttggcatatccaaatgccagcatcactgttgtattttggggtcattattaagttacttagtcatccttaatccttatcttagggatacttgaacacaaacactgtggtaggataacagtatatctgattaacagactgctactaggtgattaatgggtgggtagtgtaaatacacaagaaaaggatgattcacatcccatgtgggatggagcagaactgcattatttcattacattactcagaacaggcatataattgaaaacttatgaattatttttttttaattatttgagatggaatcttgctttgtcagccaggctggagtgcagtgacacgatctcagctcactgcaacctctgtctcctgggttcaggtgattctcctccctagtctcccaagtagctgggactataggcacgtgccaccacacccggctaattttcatatttttagtagagatggggtttcaccatgttggccaggctgttcttgaaatcctgacctcaagtgatccacacatgtctacctcccaaagtgctgggattacagtcgtgagccactgtaccccgcctaaaactgatgaattatttctgaaattttctatttaacattttcagaccacagttgaccacaggtaacggaaacctcaatcacagaaagtaaagccgtggatacggtgggactaatgtattggtagcagcctagaggattgatgggaaaggtatgaagctagaaggtggtcaatataatacagacatgagctgatgaacatctaaactgggactatactagtaggagaggaaaggaaaaaacatttggaaaatagtaacattgatatttcttgtgaaggagaagtagaaagtaacagtgacttctagatttctgggttgggtcatctgttgttggatagtagtaccactgagatagggaattcaaggtttggggcaagggtaattggagatgagaattgtgtttggaggtaactactgacattcaagtggagagggttagttggcagttagttctatggtcatctcttttgccgagactgtatatttatcagactcctgggagaacaccaacatccatggggttgtagggaaggctaaggacaagagtggggagtggtaccttgaaaatccaaaagccatctcaagtaaaaggaataaatgtgtcatgctttttaaaaagttgatgtgcggaaaatgttttcttggcttggaaactgggcggccaggggatgacagtatggacttccagtgaagtagtgacggaagcctgatcatagacattaaggaaagcggtgtaggtgttgtgagcttttgctgtaagaaaaagttgagacttttgttttgctttgtttgtgagagatgtgtatgtatttctgctgagtgataaagccagcggggagggactgatttttataggaaaggaggaaaaataatggaaacacatctcattattttattgtcacatttcttttctttgttatcttttgagtgtttcccttttttgccagtagagttattgtctattttttctttctataggacaaaaaaactaatacagactcctttatttttatatggatatactaggattgtaattcagatatttaatatcttttatcagtgttcagatcatagattaatggagaaaacatttaaaattgttttaaatttaaatacattgaactctaacatagatgaaaaatgtgtttactgctttcagtcgacctgataaaaagcaacgtatggtaaatattgaaaactccaggcatcgaaaacaagagcagaagcaccttcagccacagccttataaaagggaaggtaaatggcataaatatggtcgcactaatggaagacaaatggcaaatcttgaaatagaattggggcaattaccttttgatcctcaatactgattcacaattgagttaaattagacaactgtaagagaaaaatttatgctttgtataatgtttggtattgaaactaatgaaattaccaagatgacaatgtcttttcttttgtttctaagtatcagtttgataactttatattattcctcagaagcattagttaaaagtctactaacctgcattttcctgtagtttagcttcgttgaattttttttgacactggaaatgttcaactgtagttttattaaggaagccaggcatgcaacagattttgtgcatgaaatgagacttcctttcagtgtaagagcttaaagcaagctcagtcatacatgacaaagtgtaattaacactgatgtttgtgttaaatttgcagcagagcttgagaaaagtacattgttctggaatttcatcattaacattttataatcttacactcacttcttgtctttttgtgggttcaagagccctctgacttgtgaagaatttgctgccctcttaagagcttgctgacttgttttcttgtgaaattttttgcacatctgaatatcgtggaagaaacaataaaactacaccatgaggaaaactaaaggtctttatttaaaatctggcattgtattaacatgtaattttatactatgtggtattttatacatttcctcagtagtgatatttggtaaagcagttcatacagcttttttctaagttccatgaatcttacccagtgtttaccgaagtatttaagcagcatctgaatatttccacccagcaatgttaatttatctaggaaagttcagaatttcatcttcatgttgaatttcccttttaacttccgttcatagacatatatgtgacttccaattcgaccctctggcaagtgagtgtggaagaaaacagcagttcttttataattgcttgaaattaggaaagcgcttatttcctagaagcaaataaatgtttaagtaaataaaggctacattttgctgagtactgtttcagtcaat

SEQ ID NO: 359732 - DNA, 2438 bp, Homo sapiens
acggcatgcactgcggcgcccagccggtcaccgcctgccggctgcagacgcctgcgagcaggttgtttttataagaggcgtcattggcgcccgagctgtgaccgccgccactggggcagccagcacaatcgggcggaggtggcgctgccccttcagacctgaaagatgtctgaaaattccagtgacagtgattcatcttgtggttggactgtcatcagtcatgaggggtcagatatagaaatgttgaattctgtgacccccactgacagctgtgagcccgccccagaatgttcatctttagagcaagaggagcttcaagcattgcagatagagcaaggagaaagcagccaaaatggcacagtgcttatggaagaaactgcttatccagctttggaggaaaccagctcaacaattgaggcagaggaacaaaagatacccgaagacagtatctatattggaactgccagtgatgattctgatattgttacccttgagccacctaagttagaagaaattggaaatcaagaagttgtcattgttgaagaagcacagagttcagaagactttaacatgggctcttcctctagcagccagtatactttctgtcagccagaaactgtattttcatctcagcctagtgacgatgaatcaagtagtgatgaaaccagtaatcagcccagtcctgcctttagacgacgccgtgctaggaagaagaccgtttctgcttcagaatctgaagaccggctagttgctgaacaagaaactgaaccttctaaggagttgagtaaacgtcagttcagtagtggtctcaataagtgtgttatacttgctttggtgattgcaatcagcatgggatttggccatttctatggcacaattcagattcagaagcgtcaacagttagtcagaaagatacatgaagatgaattgaatgatatgaaggattatctttcccagtgtcaacaggaacaagaatcttttatagattataagtcattgaaagaaaatcttgcaaggtgttggacacttactgaagcagagaagatgtcctttgaaactcagaaaacgaaccttgctacagaaaatcagtatttaagaaagctcttcactgactttgttaatgatgttaaagattatcttagaaacatgaaggaatatgaagtagataatgatggagtatttgagaagttggatgaatatatatatagacacttctttggtcacactttttcccctccatatggacccagtcgacctgataaaaagcaacgtatggtaaatattgaaaactccaggcatcgaaaacaagagcagaagcaccttcagccacagccttataaaagggaaggtaaatggcataaatatggtcgcactaatggaagacaaatggcaaatcttgaaatagaattggggcaattaccttttgatcctcaatactgattcacaattgagttaaattagacaactgtaagagaaaaatttatgctttgtataatgtttggtattgaaactaatgaaattaccaagatgacaatgtcttttcttttgtttctaagtatcagtttgataactttatattattcctcagaagcattagttaaaagtctactaacctgcattttcctgtagtttagcttcgttgaattttttttgacactggaaatgttcaactgtagttttattaaggaagccaggcatgcaacagattttgtgcatgaaatgagacttcctttcagtgtaagagcttaaagcaagctcagtcatacatgacaaagtgtaattaacactgatgtttgtgttaaatttgcagcagagcttgagaaaagtacattgttctggaatttcatcattaacattttataatcttacactcacttcttgtctttttgtgggttcaagagccctctgacttgtgaagaatttgctgccctcttaagagcttgctgacttgttttcttgtgaaattttttgcacatctgaatatcgtggaagaaacaataaaactacaccatgaggaaaactaaaggtctttatttaaaatctggcattgtattaacatgtaattttatactatgtggtattttatacatttcctcagtagtgatatttggtaaagcagttcatacagcttttttctaagttccatgaatcttacccagtgtttaccgaagtatttaagcagcatctgaatatttccacccagcaatgttaatttatctaggaaagttcagaatttcatcttcatgttgaatttcccttttaacttccgttcatagacatatatgtgacttccaattcgaccctctggcaagtgagtgtggaagaaaacagcagttcttttataattgcttgaaattaggaaagcgcttatttcctagaagcaaataaatgtttaagtaaataaaggctacattttgctgagtactgtttcagtcaat

SEQ ID NO: 359733 - DNA, 1211 bp, Homo sapiens
gagacggcgacagcagcggcggcgagcgcctcgagagcgcggcggaacagcgccctatagagagtgcagcatcgaaaacaagagcagaagcaccttcagccacagccttataaaagggaaggtaaatggcataaatatggtcgcactaatggaagacaaatggcaaatcttgaaatagaattggggcaattaccttttgatcctcaatactgattcacaattgagttaaattagacaactgtaagagaaaaatttatgctttgtataatgtttggtattgaaactaatgaaattaccaagatgacaatgtcttttcttttgtttctaagtatcagtttgataactttatattattcctcagaagcattagttaaaagtctactaacctgcattttcctgtagtttagcttcgttgaattttttttgacactggaaatgttcaactgtagttttattaaggaagccaggcatgcaacagattttgtgcatgaaatgagacttcctttcagtgtaagagcttaaagcaagctcagtcatacatgacaaagtgtaattaacactgatgtttgtgttaaatttgcagcagagcttgagaaaagtacattgttctggaatttcatcattaacattttataatcttacactcacttcttgtctttttgtgggttcaagagccctctgacttgtgaagaatttgctgccctcttaagagcttgctgacttgttttcttgtgaaattttttgcacatctgaatatcgtggaagaaacaataaaactacaccatgaggaaaactaaaggtctttatttaaaatctggcattgtattaacatgtaattttatactatgtggtattttatacatttcctcagtagtgatatttggtaaagcagttcatacagcttttttctaagttccatgaatcttacccagtgtttaccgaagtatttaagcagcatctgaatatttccacccagcaatgttaatttatctaggaaagttcagaatttcatcttcatgttgaatttcccttttaacttccgttcatagacatatatgtgacttccaattcgaccctctggcaagtgagtgtggaagaaaacagcagttcttttataattgcttgaaattaggaaagcgcttatttcctagaagcaaataaatgtttaagtaaataaaggctacattttgctgagtactgtttcagtcaat

SEQ ID NO: 359734 - DNA, 1190 bp, Homo sapiens
  misc_feature (679)..(680): n is a, c, g, or t
  misc_feature (855)..(855): n is a, c, g, or t
  misc_feature (863)..(863): n is a, c, g, or t
  misc_feature (865)..(865): n is a, c, g, or t
  misc_feature (876)..(876): n is a, c, g, or t
  misc_feature (890)..(890): n is a, c, g, or t
  misc_feature (917)..(917): n is a, c, g, or t
  misc_feature (925)..(925): n is a, c, g, or t
  misc_feature (928)..(928): n is a, c, g, or t
  misc_feature (932)..(932): n is a, c, g, or t
  misc_feature (937)..(937): n is a, c, g, or t
  misc_feature (946)..(947): n is a, c, g, or t
  misc_feature (962)..(962): n is a, c, g, or t
  misc_feature (964)..(964): n is a, c, g, or t
  misc_feature (970)..(970): n is a, c, g, or t
  misc_feature (973)..(974): n is a, c, g, or t
  misc_feature (977)..(977): n is a, c, g, or t
  misc_feature (980)..(980): n is a, c, g, or t
  misc_feature (984)..(985): n is a, c, g, or t
  misc_feature (994)..(994): n is a, c, g, or t
  misc_feature (996)..(996): n is a, c, g, or t
  misc_feature (1008)..(1008): n is a, c, g, or t
  misc_feature (1018)..(1018): n is a, c, g, or t
  misc_feature (1020)..(1020): n is a, c, g, or t
acggcatgcactgcggcgcccagccggtcaccgcctgccggctgcagacgcctgcgagcaggttgtttttataagaggcgtcattggcgcccgagctgtgaccgccgccactggggcagccagcacaatcgggcggaggtggcgctgccccttcagacctgaaagatgtctgaaaattccagtgacagtgattcatcttgtggttggactgtcatcagtcatgaggggtcagatatagaaatgttgaattctgtgacccccactgacagctgtgagcccgccccagaatgttcatctttagagcaagaggagcttcaagcattgcagatagagcaaggagaaagcagccaaaatggcacagtgcttatggaagaaactgcttatccagctttggaggaaaccagctcaacaattgaggcagaggaacaaaagatacccgaagacagtatctatattggaactgccagtgatgattctgatattgttacccttgagccacctaagttagaagaaattggaaatcaagaagttgtcattgttgaagaagcacagagttcagaagactttaacatgggctcttcctctagcagccagtatactttctgtcagccagaaactggctgaacctcctcagaagagcaactggagatagaagcatgaatcttttatccatacgttnngccaggctcgagaggtccagcaggtaactgccaaaggtggaaactgttcacacttgcctcccatcctgcctgcagaaaacccagactgcattcagtgtcctcagtgtagccaccactttgctcccaaggtggctgagcaacacattcccaagtgtaagaccatcaagaactgtcntccacctntnaggaagcattntagttgagcagacnacaatggaaacttttggatagtcaganagctctgnttntttnagccntaatggganntgaatttatgcaagnanaaaganttnnacngtnccanntctgcctgnanagctaaatctgngaggagagancncttgcttcgcagctgggggtacaacggatccccacttcccactaattacacccttgggctggcgcgttatggtattggcctgagaatggagcggtgacacctggggagttttaatcagcttttttatgtcttttttcgcaacaaaataaatagttttgctcttcccgcat

SEQ ID NO: 359735 - DNA, 926 bp, Homo sapiens
tcctctttccgtgcgcgagtgcacagctccggaggcccgagccgaccctggggcgtccggtccggtggtcttgcagcctccaaaccccgagtgctataccgaactgcgcgccaagggtgggagagctgacggcctgggccacccttcttccttcactgggcaggctttgaggtgcttgtcggtctggactgatgaaaatccatatgacctgaaagatgtctgaaaattccagtgacagtgattcatcttgtggttggactgtcatcagtcatgaggggtcagatatagaaatgttgaattctgtgacccccactgacagctgtgagcccgccccagaatgttcatctttagagcaagaggagcttcaagcattgcagatagagcaaggagaaagcagccaaaatggcacagtgcttatggaagaaactgcttatccagctttggaggaaaccagctcaacaattgagtgatattgttacccttgagccacctaagttagaagaaattggaaatcaagaagttgtcattgttgaagaagcacagagttcagaagactttaacatgggctcttcctctagcagccagtatactttctgtcagccagaaactgtattttcatctcagcctagtgacgatgaatcaagtagtgatgaaaccagtaatcagcccagtcctgcctttagacgacgccgtgctaggaagaagaccgtttctgcttcagaatctgaagaccggctagttgctgaacaagaaactgaaccttctaaggagttgagtaaacgtcagttcagtagtggtctcaataagtgtgttatacttgctttggtgattgcaatcagcatgggatttggccatttctatggcacattcagattcagaagcgtcacagttagtccaaggcagacaggggatcctctagtacgccg

SEQ ID NO: 359736 - DNA, 596 bp, Homo sapiens
gctgcatgaagcctgttttataaagaccttaatcatattcctaggggaggatcccttataactcagtcacctcctaaaggtcccacttcttagtactatcacattggcgattacattccagcgtagaaatttgtggggacaccttcagatacattcagtacaagatacagctgttgaagtttattacgtacataacctaaaaagttcagtgagtcttttttgggcttccacactacagagttgtgctcgaatagaaccatggaactcgtgagagaagtgagctcttttttctgtggttattgagggggcaaagatgggcttctcagcttctgcagcccactaggagaatgcagtggtctgatctaattctgagagttgtcaagggatctgatggtgttctcaagctatatgatgagcctgctattgcataattctttactaatagtaggaatcatatcttttattttaactcagatgactataatacttactactgttgtattctaagaaaatgtaagacccttaaatgattgttgaacttaccatctctaaaattatgattcttcaggcagaggaacaaaagatacccgaagaca

SEQ ID NO: 359737 - DNA, 406 bp, Homo sapiens
tcctctttccgtgcgcgagtgcacagctccggaggcccgagccgaccctggggcgtccggtccggtggtcttgcagcctccaaaccccgagtgctataccgaactgcgcgccaagggtgggagagctgacggcctgggccacccttcttccttcactgggcaggctttgaggtgcttgtcggtctggactgatgaaaatccatatggtaagatgttatgtgcgtcaccctgccgggtttaatgccagcctgtcttttgatgacatttgagcccccgtgatgtcaggaatagaaagattaaatattaaataatgcccggagacttccgctaggcacgccagcctggatgatgatcaaatacctctccatatccttctccagttccagtggcctcctttagctttggt

SEQ ID NO: 359738 - DNA, 6616 bp, Homo sapiens
  misc_feature (3023)..(3023): n is a, c, g, or t
ttcatagtaaaatgtagctacccaggaatgatgaggggcaccatcatatcagacctgaaagatgtctgaaaattccagtgacagtgattcatcttgtggttggactgtcatcagtcatgaggggtcagatatagaaatgttgaattctgtgacccccactgacagctgtgagcccgccccagaatgttcatctttagagcaagaggagcttcaagcattgcagatagagcaaggagaaagcagccaaaatggcacagtgcttatggaagaaactgcttatccagctttggaggaaaccagctcaacaattgaggcagaggaacaaaagatacccgaagacagtatctatattggaactgccagtgatgattctgatattgttacccttgagccacctaagttagaagaaattggaaatcaagaagttgtcattgttgaagaagcacagagttcagaagactttaacatgggctcttcctctagcagccagtatactttctgtcagccagaaactgtattttcatctcagcctagtgacgatgaatcaagtagtgatgaaaccagtaatcagcccagtcctgcctttagacgacgccgtgctaggaagaagaccgtttctgcttcagaatctgaagaccggctagttgctgaacaagaaactgaaccttctaaggagttgagtaaacgtcagttcagtagtggtctcaataagtgtgttatacttgctttggtgattgcaatcagcatgggatttggccatttctatggcacaattcagattcagaagcgtcaacagttagtcagaaagatacatgaagatgaattgaatgatatgaaggattatctttcccagtgtcaacaggaacaagaatcttttatagattataagtcattgaaagaaaatcttgcaaggtgttggacacttactgaagcagagaagatgtcctttgaaactcagaaaacgaaccttgctacagaaaatcagtatttaagagtatccctggagaaggaagaaaaagccttatcctcattacaggaagagttaaacaaactaagagaacagattagaatattggaagataaagggacaagtactgaattagttaaagaaaatcagaaacttaagcagcatttggaagaggaaaagcagaaaaaacacagctttcttagtcaaagggagactctgttgacagaagcaaagatgctaaagagagaactggagagagaacgactagtaactacggctttaaggggggaactccagcagttaagtggtagtcagttacatggcaagtcagattctcccaatgtatatactgaaaaaaaggaaatagcaatcttacgggaaagactcactgagctggaacggaagctaaccttcgaacagcagcgttctgatttgtgggaaagattgtatgttgaggcaaaagatcaaaatggaaaacaaggaacagatggaaaaaagaaagggggcagaggaagccacagggctaaaaataagtcaaaggaaacatttttgggttcagttaaggaaacatttgatgccatgaagaattctaccaaggagtttgtaaggcatcataaagagaaaattaagcaggctaaagaagctgtgaaggaaaatctgaaaaaattctcagattcagttaaatccactttcagacactttaaagataccaccaagaatatctttgatgaaaagggtaataaaagatttggtgctacaaaagaagcagctgaaaaaccaagaacagtttttagtgactatttacatccacagtataaggcacctacagaaaaccatcataatagaggccctactatgcaaaatgatggaaggaaagaaaagccagttcactttaaagaattcagaaaaaatacaaattcaaagaaatgcagtcctgggcatgattgtagagaaaattctcattctttcagaaaggcttgttctggtgtatttgattgtgctcaacaagagtccatgagcctttttaacacagtggtgaatcctataaggatggatgaatttagacagataattcaaaggtacatgttaaaagaactggatactttttgtcactggaacgaacttgatcagttcatcaataagtttttcctaaacggtgtctttatacatgatcagaagctcttcactgactttgttaatgatgttaaagattatcttagaaacatgaaggaatatgaagtagataatgatggagtatttgagaagttggatgaatatatatatagacacttctttggtcacactttttcccctccatatggacccaggtcggtttacataaaaccgtgtcattacagtagtttgtaacatttgtagattggatagcatttttatgatttgatgagtttcttgtaaggttaccgtttctaagagttgtgctttatggccactgagagaattcagaataaattgaaagatggagtctaaaaattattagctgttacaaatggaacatttcattataacgtgatcactttgacttgagcaaatggtttaatttttatcttaaaaatcagttaagaatatataaaatcctactttggccaagtttgtttcttttcattatagtttatatgaaaagatcaccttaagtgaaattattttcctttaatcttttatgtatttattcacttttggaagctaggaatgagcaacacaaattttactctgaagtcagaagagctcatatataataattctaatgtcccacctattttcacttgtccattccatgtaccagcttagttatgatacttagtcacataattatctttgataaaggtagaggcacaaagaggcaaactaagcaagtcaaattctaatgtgtgtacttcataataattttttatccattttcatctctttatattctgtaacatgaaacttacctaatcttcaaatgttagcttcattttttacctttgaaatacttaatctttctgaataaatataatgtgtctataaaataatgagactgattctggtgtctttagtnattaagctggtatctagtcctataatgaacaaaggtgaagctgccttgaggagacaagtgaaaaatttttgcttcaaaggagctcacaagctaagtaaataaatgaaattaaggtatggggcatggtggcctcaggctgtctggaggtgtttggaaaggcttcttgagtgaggtggcctttgaactgaacttagtttttaaagtagcttttggaagagaaatgaggatttgctatgcagacagggaagggaatttcacttaaaaggaaggtcatttggagatgtgaagatacactgctttaaggaagcagggtagagctggaggataagagatgcagaccatgaagggccccattttatgctaaaggttttgtcctgtaggacatggagaacttctgaagaattttcaaggcgggtgggataagattatattgtattttagattacagtagtccccccttatcttcaggatatatgttccaagacccccagtggatgctggaaaccagggatagaacataattctatatatactatgcatgaatttctttttccttctttacaatctcacacataggtttgttcttactatagatcttaccaatctcagcatacttttatttctcttgagaaccttcaccctttcacttaaaggaggcgctttatagcttctctttggcatatccaaatgccagcatcactgttgtattttggggtcattattaagttacttagtcatccttaatccttatcttagggatacttgaacacaaacactgtggtaggataacagtatatctgattaacagactgctactaggtgattaatgggtgggtagtgtaaatacacaagaaaaggatgattcacatcccatgtgggatggagcagaactgcattatttcattacattactcagaacaggcatataattgaaaacttatgaattatttttttttaattatttgagatggaatcttgctttgtcagccaggctggagtgcagtgacacgatctcagctcactgcaacctctgtctcctgggttcaggtgattctcctccctagtctcccaagtagctgggactataggcacgtgccaccacacccggctaattttcatatttttagtagagatggggtttcaccatgttggccaggctgttcttgaaatcctgacctcaagtgatccacacatgtctacctcccaaagtgctgggattacagtcgtgagccactgtaccccgcctaaaactgatgaattatttctgaaattttctatttaacattttcagaccacagttgaccacaggtaacggaaacctcaatcacagaaagtaaagccgtggatacggtgggactaatgtattggtagcagcctagaggattgatgggaaaggtatgaagctagaaggtggtcaatataatacagacatgagctgatgaacatctaaactgggactatactagtaggagaggaaaggaaaaaacatttggaaaatagtaacattgatatttcttgtgaaggagaagtagaaagtaacagtgacttctagatttctgggttgggtcatctgttgttggatagtagtaccactgagatagggaattcaaggtttggggcaagggtaattggagatgagaattgtgtttggaggtaactactgacattcaagtggagagggttagttggcagttagttctatggtcatctcttttgccgagactgtatatttatcagactcctgggagaacaccaacatccatggggttgtagggaaggctaaggacaagagtggggagtggtaccttgaaaatccaaaagccatctcaagtaaaaggaataaatgtgtcatgctttttaaaaagttgatgtgcggaaaatgttttcttggcttggaaactgggcggccaggggatgacagtatggacttccagtgaagtagtgacggaagcctgatcatagacattaaggaaagcggtgtaggtgttgtgagcttttgctgtaagaaaaagttgagacttttgttttgctttgtttgtgagagatgtgtatgtatttctgctgagtgataaagccagcggggagggactgatttttataggaaaggaggaaaaataatggaaacacatctcattattttattgtcacatttcttttctttgttatcttttgagtgtttcccttttttgccagtagagttattgtctattttttctttctataggacaaaaaaactaatacagactcctttatttttatatggatatactaggattgtaattcagatatttaatatcttttatcagtgttcagatcatagattaatggagaaaacatttaaaattgttttaaatttaaatacattgaactctaacatagatgaaaaatgtgtttactgctttcagtcgacctgataaaaagcaacgtatggtaaatattgaaaactccaggcatcgaaaacaagagcagaagcaccttcagccacagccttataaaagggaaggtaaatggcataaatatggtcgcactaatggaagacaaatggcaaatcttgaaatagaattggggcaattaccttttgatcctcaatactgattcacaattgagttaaattagacaactgtaagagaaaaatttatgctttgtataatgtttggtattgaaactaatgaaattaccaagatgacaatgtcttttcttttgtttctaagtatcagtttgataactttatattattcctcagaagcattagttaaaagtctactaacctgcattttcctgtagtttagcttcgttgaattttttttgacactggaaatgttcaactgtagttttattaaggaagccaggcatgcaacagattttgtgcatgaaatgagacttcctttcagtgtaagagcttaaagcaagctcagtcatacatgacaaagtgtaattaacactgatgtttgtgttaaatttgcagcagagcttgagaaaagtacattgttctggaatttcatcattaacattttataatcttacactcacttcttgtctttttgtgggttcaagagccctctgacttgtgaagaatttgctgccctcttaagagcttgctgacttgttttcttgtgaaattttttgcacatctgaatatcgtggaagaaacaataaaactacaccatgaggaaaactaaaggtctttatttaaaatctggcattgtattaacatgtaattttatactatgtggtattttatacatttcctcagtagtgatatttggtaaagcagttcatacagcttttttctaagttccatgaatcttacccagtgtttaccgaagtatttaagcagcatctgaatatttccacccagcaatgttaatttatctaggaaagttcagaatttcatcttcatgttgaatttcccttttaacttccgttcatagacatatatgtgacttccaattcgaccctctggcaagtgagtgtggaagaaaacagcagttcttttataattgcttgaaattaggaaagcgcttatttcctagaagcaaataaatgtttaagtaaataaaggctacattttgctgagtactgtttcagtcaat

SEQ ID NO: 359739 - DNA, 6665 bp, Homo sapiens
  misc_feature (3072)..(3072): n is a, c, g, or t
acggcatgcactgcggcgcccagccggtcaccgcctgccggctgcagacgcctgcgagcaggttgtttttataagaggcgtcattggcgcccgagctgtgaccgccgccactggggcagccagcacaatcgggcggaggtggcgctgccccttcagacctgaaagatgtctgaaaattccagtgacagtgattcatcttgtggttggactgtcatcagtcatgaggggtcagatatagaaatgttgaattctgtgacccccactgacagctgtgagcccgccccagaatgttcatctttagagcaagaggagcttcaagcattgcagatagagcaaggagaaagcagccaaaatggcacagtgcttatggaagaaactgcttatccagctttggaggaaaccagctcaacaattgaggcagaggaacaaaagatacccgaagacagtatctatattggaactgccagtgatgattctgatattgttacccttgagccacctaagttagaagaaattggaaatcaagaagttgtcattgttgaagaagcacagagttcagaagactttaacatgggctcttcctctagcagccagtatactttctgtcagccagaaactgtattttcatctcagcctagtgacgatgaatcaagtagtgatgaaaccagtaatcagcccagtcctgcctttagacgacgccgtgctaggaagaagaccgtttctgcttcagaatctgaagaccggctagttgctgaacaagaaactgaaccttctaaggagttgagtaaacgtcagttcagtagtggtctcaataagtgtgttatacttgctttggtgattgcaatcagcatgggatttggccatttctatggcacaattcagattcagaagcgtcaacagttagtcagaaagatacatgaagatgaattgaatgatatgaaggattatctttcccagtgtcaacaggaacaagaatcttttatagattataagtcattgaaagaaaatcttgcaaggtgttggacacttactgaagcagagaagatgtcctttgaaactcagaaaacgaaccttgctacagaaaatcagtatttaagagtatccctggagaaggaagaaaaagccttatcctcattacaggaagagttaaacaaactaagagaacagattagaatattggaagataaagggacaagtactgaattagttaaagaaaatcagaaacttaagcagcatttggaagaggaaaagcagaaaaaacacagctttcttagtcaaagggagactctgttgacagaagcaaagatgctaaagagagaactggagagagaacgactagtaactacggctttaaggggggaactccagcagttaagtggtagtcagttacatggcaagtcagattctcccaatgtatatactgaaaaaaaggaaatagcaatcttacgggaaagactcactgagctggaacggaagctaaccttcgaacagcagcgttctgatttgtgggaaagattgtatgttgaggcaaaagatcaaaatggaaaacaaggaacagatggaaaaaagaaagggggcagaggaagccacagggcatgaagaattctaccaaggagtttgtaaggcatcataaagagaaaattaagcaggctaaagaagctgtgaaggaaaatctgaaaaaattctcagattcagttaaatccactttcagacactttaaagataccaccaagaatatctttgatgaaaagggtaataaaagatttggtgctacaaaagaagcagctgaaaaaccaagaacagtttttagtgactatttacatccacagtataaggcacctacagaaaaccatcataatagaggccctactatgcaaaatgatggaaggaaagaaaagccagttcactttaaagaattcagaaaaaatacaaattcaaagaaatgcagtcctgggcatgattgtagagaaaattctcattctttcagaaaggcttgttctggtgtatttgattgtgctcaacaagagtccatgagcctttttaacacagtggtgaatcctataaggatggatgaatttagacagataattcaaaggtacatgttaaaagaactggatactttttgtcactggaacgaacttgatcagttcatcaataagtttttcctaaacggtgtctttatacatgatcagaagctcttcactgactttgttaatgatgttaaagattatcttagaaacatgaaggaatatgaagtagataatgatggagtatttgagaagttggatgaatatatatatagacacttctttggtcacactttttcccctccatatggacccaggtcggtttacataaaaccgtgtcattacagtagtttgtaacatttgtagattggatagcatttttatgatttgatgagtttcttgtaaggttaccgtttctaagagttgtgctttatggccactgagagaattcagaataaattgaaagatggagtctaaaaattattagctgttacaaatggaacatttcattataacgtgatcactttgacttgagcaaatggtttaatttttatcttaaaaatcagttaagaatatataaaatcctactttggccaagtttgtttcttttcattatagtttatatgaaaagatcaccttaagtgaaattattttcctttaatcttttatgtatttattcacttttggaagctaggaatgagcaacacaaattttactctgaagtcagaagagctcatatataataattctaatgtcccacctattttcacttgtccattccatgtaccagcttagttatgatacttagtcacataattatctttgataaaggtagaggcacaaagaggcaaactaagcaagtcaaattctaatgtgtgtacttcataataattttttatccattttcatctctttatattctgtaacatgaaacttacctaatcttcaaatgttagcttcattttttacctttgaaatacttaatctttctgaataaatataatgtgtctataaaataatgagactgattctggtgtctttagtnattaagctggtatctagtcctataatgaacaaaggtgaagctgccttgaggagacaagtgaaaaatttttgcttcaaaggagctcacaagctaagtaaataaatgaaattaaggtatggggcatggtggcctcaggctgtctggaggtgtttggaaaggcttcttgagtgaggtggcctttgaactgaacttagtttttaaagtagcttttggaagagaaatgaggatttgctatgcagacagggaagggaatttcacttaaaaggaaggtcatttggagatgtgaagatacactgctttaaggaagcagggtagagctggaggataagagatgcagaccatgaagggccccattttatgctaaaggttttgtcctgtaggacatggagaacttctgaagaattttcaaggcgggtgggataagattatattgtattttagattacagtagtccccccttatcttcaggatatatgttccaagacccccagtggatgctggaaaccagggatagaacataattctatatatactatgcatgaatttctttttccttctttacaatctcacacataggtttgttcttactatagatcttaccaatctcagcatacttttatttctcttgagaaccttcaccctttcacttaaaggaggcgctttatagcttctctttggcatatccaaatgccagcatcactgttgtattttggggtcattattaagttacttagtcatccttaatccttatcttagggatacttgaacacaaacactgtggtaggataacagtatatctgattaacagactgctactaggtgattaatgggtgggtagtgtaaatacacaagaaaaggatgattcacatcccatgtgggatggagcagaactgcattatttcattacattactcagaacaggcatataattgaaaacttatgaattatttttttttaattatttgagatggaatcttgctttgtcagccaggctggagtgcagtgacacgatctcagctcactgcaacctctgtctcctgggttcaggtgattctcctccctagtctcccaagtagctgggactataggcacgtgccaccacacccggctaattttcatatttttagtagagatggggtttcaccatgttggccaggctgttcttgaaatcctgacctcaagtgatccacacatgtctacctcccaaagtgctgggattacagtcgtgagccactgtaccccgcctaaaactgatgaattatttctgaaattttctatttaacattttcagaccacagttgaccacaggtaacggaaacctcaatcacagaaagtaaagccgtggatacggtgggactaatgtattggtagcagcctagaggattgatgggaaaggtatgaagctagaaggtggtcaatataatacagacatgagctgatgaacatctaaactgggactatactagtaggagaggaaaggaaaaaacatttggaaaatagtaacattgatatttcttgtgaaggagaagtagaaagtaacagtgacttctagatttctgggttgggtcatctgttgttggatagtagtaccactgagatagggaattcaaggtttggggcaagggtaattggagatgagaattgtgtttggaggtaactactgacattcaagtggagagggttagttggcagttagttctatggtcatctcttttgccgagactgtatatttatcagactcctgggagaacaccaacatccatggggttgtagggaaggctaaggacaagagtggggagtggtaccttgaaaatccaaaagccatctcaagtaaaaggaataaatgtgtcatgctttttaaaaagttgatgtgcggaaaatgttttcttggcttggaaactgggcggccaggggatgacagtatggacttccagtgaagtagtgacggaagcctgatcatagacattaaggaaagcggtgtaggtgttgtgagcttttgctgtaagaaaaagttgagacttttgttttgctttgtttgtgagagatgtgtatgtatttctgctgagtgataaagccagcggggagggactgatttttataggaaaggaggaaaaataatggaaacacatctcattattttattgtcacatttcttttctttgttatcttttgagtgtttcccttttttgccagtagagttattgtctattttttctttctataggacaaaaaaactaatacagactcctttatttttatatggatatactaggattgtaattcagatatttaatatcttttatcagtgttcagatcatagattaatggagaaaacatttaaaattgttttaaatttaaatacattgaactctaacatagatgaaaaatgtgtttactgctttcagtcgacctgataaaaagcaacgtatggtaaatattgaaaactccaggcatcgaaaacaagagcagaagcaccttcagccacagccttataaaagggaaggtaaatggcataaatatggtcgcactaatggaagacaaatggcaaatcttgaaatagaattggggcaattaccttttgatcctcaatactgattcacaattgagttaaattagacaactgtaagagaaaaatttatgctttgtataatgtttggtattgaaactaatgaaattaccaagatgacaatgtcttttcttttgtttctaagtatcagtttgataactttatattattcctcagaagcattagttaaaagtctactaacctgcattttcctgtagtttagcttcgttgaattttttttgacactggaaatgttcaactgtagttttattaaggaagccaggcatgcaacagattttgtgcatgaaatgagacttcctttcagtgtaagagcttaaagcaagctcagtcatacatgacaaagtgtaattaacactgatgtttgtgttaaatttgcagcagagcttgagaaaagtacattgttctggaatttcatcattaacattttataatcttacactcacttcttgtctttttgtgggttcaagagccctctgacttgtgaagaatttgctgccctcttaagagcttgctgacttgttttcttgtgaaattttttgcacatctgaatatcgtggaagaaacaataaaactacaccatgaggaaaactaaaggtctttatttaaaatctggcattgtattaacatgtaattttatactatgtggtattttatacatttcctcagtagtgatatttggtaaagcagttcatacagcttttttctaagttccatgaatcttacccagtgtttaccgaagtatttaagcagcatctgaatatttccacccagcaatgttaatttatctaggaaagttcagaatttcatcttcatgttgaatttcccttttaacttccgttcatagacatatatgtgacttccaattcgaccctctggcaagtgagtgtggaagaaaacagcagttcttttataattgcttgaaattaggaaagcgcttatttcctagaagcaaataaatgtttaagtaaataaaggctacattttgctgagtactgtttcagtcaat

SEQ ID NO: 359740 - DNA, 6368 bp, Homo sapiens
  misc_feature (2775)..(2775): n is a, c, g, or t
atcccccgggctgcaggattcggcacgagtgcagatagagcaaggagaaagcagccaaaatggcacagtgcttatggaagaaactgcttatccagctttggaggaaaccagctcaacaattgagtgatattgttacccttgagccacctaagttagaagaaattggaaatcaagaagttgtcattgttgaagaagcacagagttcagaagactttaacatgggctcttcctctagcagccagtatactttctgtcagccagaaactgtattttcatctcagcctagtgacgatgaatcaagtagtgatgaaaccagtaatcagcccagtcctgcctttagacgacgccgtgctaggaagaagaccgtttctgcttcagaatctgaagaccggctagttgctgaacaagaaactgaaccttctaaggagttgagtaaacgtcagttcagtagtggtctcaataagtgtgttatacttgctttggtgattgcaatcagcatgggatttggccatttctatggcacaattcagattcagaagcgtcaacagttagtcagaaagatacatgaagatgaattgaatgatatgaaggattatctttcccagtgtcaacaggaacaagaatcttttatagattataagtcattgaaagaaaatcttgcaaggtgttggacacttactgaagcagagaagatgtcctttgaaactcagaaaacgaaccttgctacagaaaatcagtatttaagagtatccctggagaaggaagaaaaagccttatcctcattacaggaagagttaaacaaactaagagaacagattagaatattggaagataaagggacaagtactgaattagttaaagaaaatcagaaacttaagcagcatttggaagaggaaaagcagaaaaaacacagctttcttagtcaaagggagactctgttgacagaagcaaagatgctaaagagagaactggagagagaacgactagtaactacggctttaaggggggaactccagcagttaagtggtagtcagttacatggcaagtcagattctcccaatgtatatactgaaaaaaaggaaatagcaatcttacgggaaagactcactgagctggaacggaagctaaccttcgaacagcagcgttctgatttgtgggaaagattgtatgttgaggcaaaagatcaaaatggaaaacaaggaacagatggaaaaaagaaagggggcagaggaagccacagggctaaaaataagtcaaaggaaacatttttgggttcagttaaggaaacatttgatgccatgaagaattctaccaaggagtttgtaaggcatcataaagagaaaattaagcaggctaaagaagctgtgaaggaaaatctgaaaaaattctcagattcagttaaatccactttcagacactttaaagataccaccaagaatatctttgatgaaaagggtaataaaagatttggtgctacaaaagaagcagctgaaaaaccaagaacagtttttagtgactatttacatccacagtataaggcacctacagaaaaccatcataatagaggccctactatgcaaaatgatggaaggaaagaaaagccagttcactttaaagaattcagaaaaaatacaaattcaaagaaatgcagtcctgggcatgattgtagagaaaattctcattctttcagaaaggcttgttctggtgtatttgattgtgctcaacaagagtccatgagcctttttaacacagtggtgaatcctataaggatggatgaatttagacagataattcaaaggtacatgttaaaagaactggatactttttgtcactggaacgaacttgatcagttcatcaataagtttttcctaaacggtgtctttatacatgatcagaagctcttcactgactttgttaatgatgttaaagattatcttagaaacatgaaggaatatgaagtagataatgatggagtatttgagaagttggatgaatatatatatagacacttctttggtcacactttttcccctccatatggacccaggtcggtttacataaaaccgtgtcattacagtagtttgtaacatttgtagattggatagcatttttatgatttgatgagtttcttgtaaggttaccgtttctaagagttgtgctttatggccactgagagaattcagaataaattgaaagatggagtctaaaaattattagctgttacaaatggaacatttcattataacgtgatcactttgacttgagcaaatggtttaatttttatcttaaaaatcagttaagaatatataaaatcctactttggccaagtttgtttcttttcattatagtttatatgaaaagatcaccttaagtgaaattattttcctttaatcttttatgtatttattcacttttggaagctaggaatgagcaacacaaattttactctgaagtcagaagagctcatatataataattctaatgtcccacctattttcacttgtccattccatgtaccagcttagttatgatacttagtcacataattatctttgataaaggtagaggcacaaagaggcaaactaagcaagtcaaattctaatgtgtgtacttcataataattttttatccattttcatctctttatattctgtaacatgaaacttacctaatcttcaaatgttagcttcattttttacctttgaaatacttaatctttctgaataaatataatgtgtctataaaataatgagactgattctggtgtctttagtnattaagctggtatctagtcctataatgaacaaaggtgaagctgccttgaggagacaagtgaaaaatttttgcttcaaaggagctcacaagctaagtaaataaatgaaattaaggtatggggcatggtggcctcaggctgtctggaggtgtttggaaaggcttcttgagtgaggtggcctttgaactgaacttagtttttaaagtagcttttggaagagaaatgaggatttgctatgcagacagggaagggaatttcacttaaaaggaaggtcatttggagatgtgaagatacactgctttaaggaagcagggtagagctggaggataagagatgcagaccatgaagggccccattttatgctaaaggttttgtcctgtaggacatggagaacttctgaagaattttcaaggcgggtgggataagattatattgtattttagattacagtagtccccccttatcttcaggatatatgttccaagacccccagtggatgctggaaaccagggatagaacataattctatatatactatgcatgaatttctttttccttctttacaatctcacacataggtttgttcttactatagatcttaccaatctcagcatacttttatttctcttgagaaccttcaccctttcacttaaaggaggcgctttatagcttctctttggcatatccaaatgccagcatcactgttgtattttggggtcattattaagttacttagtcatccttaatccttatcttagggatacttgaacacaaacactgtggtaggataacagtatatctgattaacagactgctactaggtgattaatgggtgggtagtgtaaatacacaagaaaaggatgattcacatcccatgtgggatggagcagaactgcattatttcattacattactcagaacaggcatataattgaaaacttatgaattatttttttttaattatttgagatggaatcttgctttgtcagccaggctggagtgcagtgacacgatctcagctcactgcaacctctgtctcctgggttcaggtgattctcctccctagtctcccaagtagctgggactataggcacgtgccaccacacccggctaattttcatatttttagtagagatggggtttcaccatgttggccaggctgttcttgaaatcctgacctcaagtgatccacacatgtctacctcccaaagtgctgggattacagtcgtgagccactgtaccccgcctaaaactgatgaattatttctgaaattttctatttaacattttcagaccacagttgaccacaggtaacggaaacctcaatcacagaaagtaaagccgtggatacggtgggactaatgtattggtagcagcctagaggattgatgggaaaggtatgaagctagaaggtggtcaatataatacagacatgagctgatgaacatctaaactgggactatactagtaggagaggaaaggaaaaaacatttggaaaatagtaacattgatatttcttgtgaaggagaagtagaaagtaacagtgacttctagatttctgggttgggtcatctgttgttggatagtagtaccactgagatagggaattcaaggtttggggcaagggtaattggagatgagaattgtgtttggaggtaactactgacattcaagtggagagggttagttggcagttagttctatggtcatctcttttgccgagactgtatatttatcagactcctgggagaacaccaacatccatggggttgtagggaaggctaaggacaagagtggggagtggtaccttgaaaatccaaaagccatctcaagtaaaaggaataaatgtgtcatgctttttaaaaagttgatgtgcggaaaatgttttcttggcttggaaactgggcggccaggggatgacagtatggacttccagtgaagtagtgacggaagcctgatcatagacattaaggaaagcggtgtaggtgttgtgagcttttgctgtaagaaaaagttgagacttttgttttgctttgtttgtgagagatgtgtatgtatttctgctgagtgataaagccagcggggagggactgatttttataggaaaggaggaaaaataatggaaacacatctcattattttattgtcacatttcttttctttgttatcttttgagtgtttcccttttttgccagtagagttattgtctattttttctttctataggacaaaaaaactaatacagactcctttatttttatatggatatactaggattgtaattcagatatttaatatcttttatcagtgttcagatcatagattaatggagaaaacatttaaaattgttttaaatttaaatacattgaactctaacatagatgaaaaatgtgtttactgctttcagtcgacctgataaaaagcaacgtatggtaaatattgaaaactccaggcatcgaaaacaagagcagaagcaccttcagccacagccttataaaagggaaggtaaatggcataaatatggtcgcactaatggaagacaaatggcaaatcttgaaatagaattggggcaattaccttttgatcctcaatactgattcacaattgagttaaattagacaactgtaagagaaaaatttatgctttgtataatgtttggtattgaaactaatgaaattaccaagatgacaatgtcttttcttttgtttctaagtatcagtttgataactttatattattcctcagaagcattagttaaaagtctactaacctgcattttcctgtagtttagcttcgttgaattttttttgacactggaaatgttcaactgtagttttattaaggaagccaggcatgcaacagattttgtgcatgaaatgagacttcctttcagtgtaagagcttaaagcaagctcagtcatacatgacaaagtgtaattaacactgatgtttgtgttaaatttgcagcagagcttgagaaaagtacattgttctggaatttcatcattaacattttataatcttacactcacttcttgtctttttgtgggttcaagagccctctgacttgtgaagaatttgctgccctcttaagagcttgctgacttgttttcttgtgaaattttttgcacatctgaatatcgtggaagaaacaataaaactacaccatgaggaaaactaaaggtctttatttaaaatctggcattgtattaacatgtaattttatactatgtggtattttatacatttcctcagtagtgatatttggtaaagcagttcatacagcttttttctaagttccatgaatcttacccagtgtttaccgaagtatttaagcagcatctgaatatttccacccagcaatgttaatttatctaggaaagttcagaatttcatcttcatgttgaatttcccttttaacttccgttcatagacatatatgtgacttccaattcgaccctctggcaagtgagtgtggaagaaaacagcagttcttttataattgcttgaaattaggaaagcgcttatttcctagaagcaaataaatgtttaagtaaataaaggctacattttgctgagtactgtttcagtcaat

SEQ ID NO: 359741 - DNA, 3587 bp, Homo sapiens
acggcatgcactgcggcgcccagccggtcaccgcctgccggctgcagacgcctgcgagcaggttgtttttataagaggcgtcattggcgcccgagctgtgaccgccgccactggggcagccagcacaatcgggcggaggtggcgctgccccttcagacctgaaagatgtctgaaaattccagtgacagtgattcatcttgtggttggactgtcatcagtcatgaggggtcagatatagaaatgttgaattctgtgacccccactgacagctgtgagcccgccccagaatgttcatctttagagcaagaggagcttcaagcattgcagatagagcaaggagaaagcagccaaaatggcacagtgcttatggaagaaactgcttatccagctttggaggaaaccagctcaacaattgaggcagaggaacaaaagatacccgaagacagtatctatattggaactgccagtgatgattctgatattgttacccttgagccacctaagttagaagaaattggaaatcaagaagttgtcattgttgaagaagcacagagttcagaagactttaacatgggctcttcctctagcagccagtatactttctgtcagccagaaactgtattttcatctcagcctagtgacgatgaatcaagtagtgatgaaaccagtaatcagcccagtcctgcctttagacgacgccgtgctaggaagaagaccgtttctgcttcagaatctgaagaccggctagttgctgaacaagaaactgaaccttctaaggagttgagtaaacgtcagttcagtagtggtctcaataagtgtgttatacttgctttggtgattgcaatcagcatgggatttggccatttctatggcacaattcagattcagaagcgtcaacagttagtcagaaagatacatgaagatgaattgaatgatatgaaggattatctttcccagtgtcaacaggaacaagaatcttttatagattataagtcattgaaagaaaatcttgcaaggtgttggacacttactgaagcagagaagatgtcctttgaaactcagaaaacgaaccttgctacagaaaatcagtatttaagagtatccctggagaaggaagaaaaagccttatcctcattacaggaagagttaaacaaactaagagaacagattagaatattggaagataaagggacaagtactgaattagttaaagaaaatcagaaacttaagcagcatttggaagaggaaaagcagaaaaaacacagctttcttagtcaaagggagactctgttgacagaagcaaagatgctaaagagagaactggagagagaacgactagtaactacggctttaaggggggaactccagcagttaagtggtagtcagttacatggcaagtcagattctcccaatgtatatactgaaaaaaaggaaatagcaatcttacgggaaagactcactgagctggaacggaagctaaccttcgaacagcagcgttctgatttgtgggaaagattgtatgttgaggcaaaagatcaaaatggaaaacaaggaacagatggaaaaaagaaagggggcagaggaagccacagggctaaaaataagtcaaaggaaacatttttgggttcagttaaggaaacatttgatgccatgaagaattctaccaaggagtttgtaaggcatcataaagagaaaattaagcaggctaaagaagctgtgaaggaaaatctgaaaaaattctcagattcagttaaatccactttcagacactttaaagataccaccaagaatatctttgatgaaaagggtaataaaagatttggtgctacaaaagaagcagctgaaaaaccaagaacagtttttagtgactatttacatccacagtataaggcacctacagaaaaccatcataatagaggccctactatgcaaaatgatggaaggaaagaaaagccagttcactttaaagaattcagaaaaaatacaaattcaaagaaatgcagtcctgggcatgattgtagagaaaattctcattctttcagaaaggcttgttctggtgtatttgattgtgctcaacaagagtccatgagcctttttaacacagtggtgaatcctataaggatggatgaatttagacagataattcaaaggtacatgttaaaagaactggatactttttgtcactggaacgaacttgatcagttcatcaataagtttttcctaaacggtgtctttatacatgatcagaagctcttcactgactttgttaatgatgttaaagattatcttagaaacatgaaggaatatgaagtagataatgatggagtatttgagaagttggatgaatatatatatagacacttctttggtcacactttttcccctccatatggacccagtcgacctgataaaaagcaacgtatggtaaatattgaaaactccaggcatcgaaaacaagagcagaagcaccttcagccacagccttataaaagggaaggtaaatggcataaatatggtcgcactaatggaagacaaatggcaaatcttgaaatagaattggggcaattaccttttgatcctcaatactgattcacaattgagttaaattagacaactgtaagagaaaaatttatgctttgtataatgtttggtattgaaactaatgaaattaccaagatgacaatgtcttttcttttgtttctaagtatcagtttgataactttatattattcctcagaagcattagttaaaagtctactaacctgcattttcctgtagtttagcttcgttgaattttttttgacactggaaatgttcaactgtagttttattaaggaagccaggcatgcaacagattttgtgcatgaaatgagacttcctttcagtgtaagagcttaaagcaagctcagtcatacatgacaaagtgtaattaacactgatgtttgtgttaaatttgcagcagagcttgagaaaagtacattgttctggaatttcatcattaacattttataatcttacactcacttcttgtctttttgtgggttcaagagccctctgacttgtgaagaatttgctgccctcttaagagcttgctgacttgttttcttgtgaaattttttgcacatctgaatatcgtggaagaaacaataaaactacaccatgaggaaaactaaaggtctttatttaaaatctggcattgtattaacatgtaattttatactatgtggtattttatacatttcctcagtagtgatatttggtaaagcagttcatacagcttttttctaagttccatgaatcttacccagtgtttaccgaagtatttaagcagcatctgaatatttccacccagcaatgttaatttatctaggaaagttcagaatttcatcttcatgttgaatttcccttttaacttccgttcatagacatatatgtgacttccaattcgaccctctggcaagtgagtgtggaagaaaacagcagttcttttataattgcttgaaattaggaaagcgcttatttcctagaagcaaataaatgtttaagtaaataaaggctacattttgctgagtactgtttcagtcaat
